United States Patent Application Publication US 2024/0301345 A1 - sequence listing, part 9

SEQ ID NO: 1269 - DNA, 113882 bp, Unknown
  R157_18m  MAG No. k141_1697
aacgaaatgccgtacagcagttgcatcgccttggcgtagtcgccgccttcttcgttcggatctcctacaccgtccaccgcgacgaaccgcatcgccggcaccgtgacgatggcgggcatcctcttcggctgatacaggtccggaaactccttcgtataatcgaacgccatcgctcattccccttccgccaccgcatcgatctcgtcctgacgccgccaccgcttgaggtttggcagcagcgccgacatgcagtcctcggcctgttcgacgctgatatggcaggattccgccatcatcggcgcgcatgcggcgaccaattcatcgctattggcatagtcctgaagaaaaacgccgtcttcatagcagtagttgcaataatctccgtttcgcgttccatccggttcggtgccatggtcttccgggcggtaaaacggcatggcacaactttggcaaaaaccattgtccggcatttccataagcctcgccatcggcacctcaaaacgggtgctgatcagccgaatcatgtcgatgctcggctctgccgttcccttctcccagcgggaaagcgcctgttgggtgacgaacagctcgtgcgcgaactgcgactgcgtaagacctcgctcctcgcgcacgactttgataacctgaccgatcgacatgactacctcccgacatcggaaaacgattcgcgcgtctcgctgtgcgcttgctgattccagtctaagggcatgtcccgttcgccaagcgcgggtacaacaaaccgttgttcgcacttgcatcccggaggaagaaacggctcggtcgaacctatttcctctccacccccttcaattctcccggttcctctgactcctttgcgagcgccgcggatgggatgagcacgcttacgtatggggttgcgccagacaggacgtcgtcgtagaagcgctgtttggcgtcgatgaagtcgatggaatcctggatttccgcgagctgctcgaccagccgcgcccgcttgccggcgagcatctacttgcgttcggggatgctcggctcgtggaggagcgtaaggggcgcgagtaggggttcgcggctttgctgcggtctctccctcacccggctatactgggagctccctcgtcagagggagcttaaattcggtctggttataggcccatgggcttcttgggctttttgtcgctcatgagcataaggaagctgcgggactgggcggtgatcatgaagcccgcctcatagctcagttccggcccattcgggttgtgcgtatccacgaccagctgccatttgcggccgtatcgctcatccggcagggtgaacataatcggctcgtaatgcgcgttgaagatcaggatgaagtcattgtcgaccatccggttgccgtaccagtctacctccggaatatccgaaccgttcagatagatcatcatggagaacgcatgcgtgttctgccagtcgtccatatccatgatcgaaccggtgtggtcgaaccattcgacctgcggaatcatgttcgaatcgtcgccgggctcacggcctgtgaagaagcgacggcggtgcaacaccggatgatccaaacgcagatgaatgagtttggaaacgaaggcgagcagttccttgcgtcccttgtcaagatgccagttggtccaggagatctcgttgtcctgacagtaggcgttgttgttgccctgctgggtgcgggccacttcgtcgccaccgcaaatcatcgggataccctggctgaacagcaacgtggcgaacatgttgcgcatctgacgctgacgcaagtcgttgacgtccggaatattggtcgggccttcaacgccgcaattccaagagcgattgttgctctcgccgtcgcgattgccctcgccattggcttcgttgtgcttttcgttgtagctgaccaggtcgttcattgtgaaaccgtcatgcgcggtgatgaagttcacggacgccaccggtcgacggccgttgacctgatacagatcggaactgcccatcaggcgcgaggcgaattcgggcagcgtggagggctgcgagcgccagaagtcgcgcacggtgtcgcggtagcggccattccattcggaccagctggacgggaagccgcccacctgatagccgccggagcccagatcccacggttcggcaatcagcttcacgcgcgagatgatcgggtcctgctccacgatgtcgaagaacgcagacagcttgtcgacctcctggaactggcgtgccagcgtggcggccagatcgaagcggaagccgtcgacgtgcatttcggtaacccagtagcgcagcgaatcggtaatcaactgcagcgcgtgcggcgagcgcataagcagcgagttgccggtaccggtggtgtcgaagtagtgctgctggtcgccttccaccagtcggtagtaggaggcgttgtcgatgcccttgaagctcagggtggggcccatatggttgccttcggcggtgtggttgtacaccacgtcgaggatgacctccatgccggcgtgatggtaggccttgaccatggacttgaattcgttgacctgctcgccgcgttccccggaggaggagtaggcgttgtgcggcgcgaagaagccgatggtgttgtagccccagtagttcgacaggcccttctcctgcaggaaggagtcgttgacgaactggtggatcggcatgagttcgatggcggtgacgccgagcttcttcaggtattcgatgacgctcggataggccaggccggcgtaggtgccgcggatgtccggcggcacgtccatgttgaggttggtcatgccgcgcacatgcgcctcgtagatcaccgaatcgtggtacgagatgtaggggtgctggtcgttgccccagtcgaaatacggattgatgacggccgacttcatggtgtgggcggccgagtcaaggtcgttcatcgccgaggtgtcgtccgggcttttgaaccagtaggagaacaggctttcgtcgccgtcgatgttgccttcgatggccttggcatacgggtcaagcagcagtttgttggggttgcatctgaggccgtgcatcgggtcatagggaccgtagacgcggtagccgtagcgttggccgggctggaggccggggatgtagttatgccatacgtatgagttctgttcggtcatttcgatgcgcgtttccgcatcgtgctcgtcgaacaggcatagctcgactttctgcgcaacctgtgagtacagcgcgaagttcacaccggcgccgtcatagctggcgcccagcggatacattgatccaggtctgatctgcatagttttcagtatcccactttcttgtgtcactgatgtgccggggagttgaacgtcaggagaacagcgacggcttgtctttgtcggagttcctggcgatgagtctgcgtaacgcctcatgctggatggcgatcatcgaattggatgaggtgatgcgcgtggcggcaaggtcgctccacggaatccacgcggattccacgtgctcgtccgcgtcgaaatggcgctgctcccgtctgaacgggcccaaatgcaacaccatgatgtgggccagttcgtcggtcatgccttcggacgagtagaaatcgcccacgaagtcaacacccatggtgtcacggtccggcaccacgccggtttcctcggccagttccctcagggccgcgtccatgatgtcctcgccctcgtccatgagaccggcgggaagcccgtaggcgaacatgtccgatccggcacggtattcgcgttcgatgaggtaacggtcggtggacatgtcgtgcacgagcatgaccacacagggggcgtgacgcagcacctggcggccgatctcgtgttccttgccctgcttgtcggtcagagcgatgcgcatgtcgtccacgtggaagatgcgcccggtataaacggtttcgctactgatcactttggcgggcacgtccatgtcgatgccgtccgaggaggcgttcagcttatggtcgagccgatgctccagttgttcctgcttgcttcccccaaacatgtcatctcctcggaaaaaacgttttcgccacgtcactatagcgccttaatctcgatgcgcggtaatggacagcgtccatggatcggtcgtgtcgtggaaccactcgacttcaggccttgctccggtcgcttgttcgatggcggctggcacgtcatcgatcgcgtagttgaaccacatggattcgatggcggcatgaggggtgttgatgaagcagggacgcacatggctctcccccgccattccatggccgagcatgatgccttgggccctcatacgggcttcataccgggcttgttcgatggcgtcggtcaccggatggtgacgcaaatcgctggttacgtacacgtccgcaccggtggcacgcacctcgttgaacagggagtcaccggagccaggcagaatggccacatactgaacaaaagtgtccgaatcgccgcatacctggatgccgagcgcggtggtcatgccatgatcggacacttcgtcgaatacacgctgagcgaaatccttcagggcaacaggcttcggcaaacgacccacacgccccaagccgaccggatgagaggcgttggcatcgtcaatcggcacgagtggtttctggtcgatgagtccgaagtagtcggccgcagcctgccccacgccgcgatacgcagcgtcagcattggtgtgccctacccacagcccgcagccttgctggtagagcctgcggacgatgtcgccccggaaaccgagtccgctcgtctcgtgtacggaacggaagaacaacgggtgatgggtgatgagcaggtccgcgccggtggcgatggccttgtcaatgatggcggaggtcgggtcggcggcgaacacgatgcggtgcacgtcgtggctcagatcgccgacgatgagacccggctcatcccattcctcggcgtagcgcaatgggtacagggtctcgagaacgtcgatgacttgcttgagattcggcatatgtcccattgtagtgggctattgcggcaagggactcattctgcagttgcggacaagccatgctcgtgctcttcattgctcgactatcggctcgccttcgcctacaaacaatccactggactgtttgctcaacggctcagcctcctcacccgaggggagctagaaattgtcagtgtgcggcgagctgccagtcggaaccgataccgcacgatacgtccagcggcacggcaaggtcgacggcgtgttccatggcgttgcgcaccagttcggtgacctggtcgccttctcccggcgcgatttccactaccagttcatcgtgaatctgcagaatgatacggctcttgacgtgggcctctgccaaggtctgctcggcgcgaatcatcgcgatcttcatgatgtcggcggcagatccctgaatcggtgcgttgagtgccgcacgttcggcggcctcacgcgcaacacgattggtcgaatgcagggccgggaagtagcgacgccgtccgaaaatggtttccgtataccccttctctcgggcattggccaccagcgattcaaggtaatcgtgcaccttgccgaaggtatcgaaataccggtttttcaacgcttccgcttcacgtggcgcgatcttgagctgctgggcgagaccatacgtgctcagaccataggccaatccgtagctcatggcttttacgtggctgcgctggtcgccggtgatctggtcgaccggcagcttgtagaccatcgaggccacgtatttgtggaagtcggctccggagcggaacgcttcgatcagcgcctcatcaccggacagatcggccatgatgcgcagctcgacctgtgagtaatcgcagctcatcagggcctcgtacccctcccccggcacgaacacgccgcgaatctcacggccggcggcgttccgattggggatgttctgcaggttcgggtccacggagctcaatcggccggtggccgcgacggtttgctcgaaagtggtgtggatgcgctcatctgatgtattggtggcatcgatcagcgtttgaacgatctgcttgagcttgttgatctctcggtggcgcagcaacgccccgaggaaaccgttggcccgctcattgtccactgatttgacatacagatcctgcaatgcggccgcattcgtggtgtatgagccggacttggtgcgtttggtgggcttcaaacccatatcttcgaacagcaccttctgcaactgcttgggactttgcaggttgatttcggtgccggcatactcccaagccatttcctgcgcctgacgagcctcggcggcaaactggtcacgcatggaaacgagtcgaacgctatcgactttggctcctgtgtgctccatgccgtgcagcacgcgggaaacaggaagttcaatcgcgcgcatcagccagcattgttcacgctcgtcgataatcggcccaagcgtgacggcgaggctgcggataatggccaaatcgcgcagacgatgttcgttcggatcttcttcgacctgatcgtcatcgaagtccaacgtgccttgcgaaggctgttcggtttcggtgaagtggatgtcgaggaagtgctcggccgcctgcttgaggctatcggcgtggaaatccggttgggccagatacccggcaagcttggtgtcgaacatcggcaggtccatgtcaagatctaccgcgcccagaagatgcagcaactctttatacccatgcacgatggtgcgggagtgctcgctttccaggaaccgcgcaagctgtgctcgcagggtatcggtgattggaaggggcactatggccgctgatgttgccgtggcaacggcaatggcttgtgccgtggcacgacccggcctttcgtcgccccatgcggccacggtccaagcgtggccgaccgcgtcgccgcagacggtatgccgctgcgatccatcgccatagtcggaaaccgtgaaatcggcgatttcaccgggaactttgacctcggcgcgatgggccttgacccattcgtcgaactgctccgaagaggtgatgctcgtgggttccggcaggttcagatcgagactgttatcctgctcgtcctgttcattattcgtagactcgccggctccgtatgtgttggaaaccttggcaccggtattgaaggttttcagtacacgactcctggtacgcggtccgaattcaagctccttgaacagggcgtcgatttgtgccacgtccacggtgccgaatgtcagatcctcaatatcgacgccaagatcgacgtctcgtaccagtgcgttgactttgcgattgagcttgacctggtcgatattggcccgcagcgattcgccttttttgccgccgatttcatcggcgtgctcgcaaatgccgtcgagggaaccgaattggttgatccacttggccgcaaagccatcgcctacaccgggcacaccgggaatattgtcggcggtttcgccgcggagcgccgccagatccggatattgtgcgggagtgactttgtatttgtcgatgatggactgcggcgtcatatgcttcaggtctttgaagtgatggcccgggtacaacacggtgacgttgtcatccaccagctggaaggcgtctcggtctccggacaataccagtgtgtggtagccggccttgtctcccatggtggcgagggtggcgatcacgtcgtcgccttcgaatcccggcttctcgatgtaggtgacgccgagggccgtgagcatgcgttgaatcaatggcagctgggtgagcagctcttcgggagccgcctcacgggtgcctttgtattgcggaagcatctcattgcggaatgtgccgcccttcacatcgaaggcgacgcccagatggtcggggttctccgcatcgatcacctgcgcgagcatggtggcaaaaccccagacggcgttggtggcctggccgctggaagtactgaagttgtcgaccggcagggcgaaaaatgcacggaaggccagcgagtggccgtccaccaccagcaatgtttcattggtgggtacggtcacgctggcctctcccatagtgtgtttgtgttgctttacgactcagcacggtgatgccgataatcagcgttcgcccgaatcagaaggcttcggatcgccgtacttggcgatgatggcctgagccaggcgcttcttggggatgcgctggtccatggaggtcttctgaatccaacggaaggcaccctgctcggagaagtcagccttgtccatcagcagacccttggcgcggtcgacgagcttgcgctcctcaagcgtgtcttcggccttcttgagcttctcttcggtttccttgagctggtcggtggtttccttgagcttgcgttcgctgcgctccacgttgtccagcagatcgttgatctcggcgaaacggcccatggccacctcgagggtcggcagcaacttggattcctcgtacggcttggtgacgtatgccatggcgccggcaccggtggccttcttcaccagatcggtctgggagaatgcggtgagcatgacgacaggggcgatgttctcatcgcagataatgccggcagcggcgatgccgtccatacgcggcatcttgacatccatgcacaccacatcagggcgatacttgcgggtcagttccacggcttcctcgccgttggcggcctgaccaacgacctcataaccgttgtcttccagcatggcgaccagatccatgcggttcacggcttcatcctcggccacgacgacggtacgcggaccatcctcggccacggccttgcgctcagcaggttcgctttcatcggctacggccttgagttcttcgtcggtcagcacctcatcgacgttgatactcggttcttcggacttcttccttgcagccatgccaacctctttcttgaattacccaacaatggggttcgtaataatttcagcgaactcctagctaaagtgccctcggtgggactcgaacccacactgcgcagattttgaggctgcttcctctaccaattgggatacgagggcgtgcctaagcactctgaagagagtagcataccgattcgactcctgcgacacaagacacgcgccagtcctccatttccccccggtaaaacaggcgaaacacgtcgatatcgtggacggcgtacccgtgtgttgcccgttcttctgcgtggtttcaccgcttacaatgggctgtagtttcgatgtatcgcttttgttaggagggcttatgagcaacgaaacttaccgtcagttcgatccctggcgcccctctccggtcaaggagatttcccgtagacagattgtggagacgcattatttcaatgtcgatcacgtctcctatgagtcgaatcagatcggttcgtttgaacgctactttgttcaggagaacaatggcgacactgtggctgtgctggccgtcaccgatgacggcatgattccgctggtcgagcagtatcgcatcgccaaccatcgttggacgttggagattccggcaggccacgccaacaacccgtccgaacgcccgaccgatgtggctaagcgcaagctggccgaagaggctggtttcgatgcctccaagcttacgcagttcacccgttttatgaacacgccgagctattccacccagcacaccgcaatcttcttcgccaccggacttaccccggcttcccgtcaggaaatcggcccggagactccgcgttccgacgtgcgtatggtgtcggtggacgatgcctatgagatggtggtcaatggcacgattgtggatgccaagaccatggtcgccattctgcgtctgaagagcggcacgctcgatcatctcaacgactagtcaccacgctcgatcatcgcggtgactacgtgccattgcaatcaccgcacaatcgcaacataacggataacgaaagccccccatccactttctggatggggggctttcgcgtgctatgtgctagctgtcagcagctaccagcggcctgaaatcagtcgcaagcgccaacggtgtgcacgtagatggagtcggtgcggcccggctggtgatcgccctgagcagagctcaggatgacgatcttgtcgccgtcagcaaccttgccggcgtccttgaggatcttgtccgtgtagatcatgagatccttacgggacttgtcgtggtagtcctccttgagcaggaaggcttcggtgccccaggacagagccagccagtggtaggtgtgctcgttgctggtcaggccgtagatcggggcggccggacgctcacgggagacgcggtgcacggtggcgccggtctgggtgtaggcgacgatggccttggcgttgagcttgtcggccaggtccacggcggcggaggagacggcgccggtggaggacatgtcgaggttcttgagctccgggatgcggtcgaagccgtggtcggtggcgtagccggagatgcgcgacatggtggccacggtcacatccgggtacttgccgacggcggtctcgttggaggtcatggtggcgtcggagccgtcgaggacggcgttggcgcagtcggaggcctctgcacgggtcgggaccggggagttcaccatggagccgaggacttcggtggccacgatgaccggcttggcatactggcgggccagctcgatgatgcgcttggtggccagcgggacctcttccagcgggcactcaacggccatgtcgccacgggcggccatgacaccgtcgaaggtcttgacgatctcttcgaggttctccagagcctgcggcttctcgatcttggcaacgatcgggatgcgacggccttcctcgtccatgatctcgtgggcgcggtcgatgtcggtggcgaaacgcacgaaggacatggcgatgatgtcggcaccggtgcggatggcccaacgcaggtcagcctcatccttctcggtcagggccggcagggagacggcgacgcccggcaggttgatgcccttgtgggaggacacaggaccggccacgacgaccttggtgtacacgttgttgccctcgaccttggtgacctcaagacggaccttgccgtcatcgatcaggatcgggtcgcccgggtggcaatcgcccggcaggcccttgaaggtggtggaggtgatgtgctcgtcgccctcgacgtcatcagtggtgatgacgaattcctggccgagctgcagctgaaccttgtcttcgccatcggcgttcttcttgaaccaaccgcagcgaatcttcgggccctgcaaatcaacaagcgcggcaacgttgcgaccagtggcttcgctggccttgcgcacgttgttgtagaccttgaggtgatcctcgggggtgccgtgggagcggttcagacgagcaacgtccataccggcttcaacgagcttcaggaggttgtcgtaatcctcggtggaaggaccgatggtgtctacgatcttggctttacgcatgaatgcctgcctattcttgttcaatttggttcgaggcacgattgccccatttgccgaaacccagtctactagcgcgagccgactcatgacaagttttcttcacggtgtgttgtgagcgctcacattgttgtgttgactgggtttaagggttgtattctctaacgatttcaggccttctcggcgctttccatgctcttcatcttgatcacggaagccacggatgcgccgccaattgcgaccacaatcacagccagcgacagccatgtgggcacttccggcacccaatggatgccttcgccgccgttgatgaacggcaaggtattgccgtgcagggcctccatgatgagcttgacgccgatgaagcccagcaccacggacaggccggcaggcaggtagacgagcttgtcgagcagagcacccagcaggaagtacagctgctgcaggccgagcagggcgaacacgttggaggtgaacaccaggaacggatccttggtcaggccgaagatcgcgggaatcgagtcgaaggcaaacatgacgtcggtggtgccgatggtcaggaacacgatgagcatcggggtccagtaacgcacgccgttcttggtggtgcgcagcttctcgccgtcgtagtcgtcggtgatcttgatgatcttgcgcagattacggatgatgccgttctcgtggtattcctcatcctcgtcgccgccgagcaccagtttgacggcggtgtagatcaggaaggcgccgaacaggaagaacacccatgtgaagcgggtgatcagggccgcgccgatcagaatgaaaatgccacggaagatcaaagcaatggtgatgccgatggacagcacatacttctgaatctgcttgggcaccgcgaagttcgacatgataatgacgaacacgaacagattgtcgatggacaacgagtattcggtgagccagccggaatagaactcgatggcgggcttggagccggcgaagaaccagatgcatccgccgaagatcagcgccatgaccacgaagaaggcgatatgctgcacgcattccttggtggagggcacatgcggtcggcgcccgatgacgaacaggtcgacgatgaagaacagcgcgagcaccacgaaggtgatgatttcaaatgcgagtggggtttctgccatgattccctacactaacccatgtatgtgacgggtcattgccccgcctcggtcatctgccggagctccttcttgagatcacggatctcgtcgcgcagacgggccgcgagttcgaactggagttgttcggcggcggtgtgcatctgttcggacagctggcgaatcaggtcggcgaggtcctgcgcgggcaggccggccttcaggatctcctcgtggcgtttgtctgcctcgttgggatcgagtaccggcacgcccaggtgtgtgttgccggccttgcccgcgttgcggtagccaccttcaagcaaggtctgggtgtccacatcctccttggcgagcatatcgttgacatcgctgatcttcttgatcaggggcttgggatcgatgccgtgttcccggttgtaggcaatctgcttggcgcggcggcggtcggtctcgtcgatcgcctgcctcatggcctcggtggtctcgtcggcgtacatgatcaccacgccggacacgtttcgcgcggcacggccgatggtctggatgagcgaacggtaggagcgcaggaatccttccttgtcggcgtcgaggatcgccaccagcgatacttccggcaaatcgaggccctcacgcagcaggttgatgccgacaatcacatcgatcttgccttcgcgcaacatgcgcagcagttcgacgcggcgcagcgtatccacatcggaatgcaggtattcgaccttgatgccgcgttccagcagatagtcggtcaaatcctcggccatcttcttggtcagggtggtcaccagcgcacgctcgttcctggccacacgggccttgatctcggcgagcagatcgtcgatctgccccttgaccgggcgcacgtcgatcttcgggtccagcaggccggtcgggcggatgatctgctcgaccaccccgtcggacaagcccaactcatagtcgccgggcgtggcggacaggtacacggtctggccgacgcgctgcaggaattccggccatttgagtggtcgattgtccatcgcggagggcagacggaagccgtgttcgaccagcgtgcgcttgcgggaggcatcgccctcgtacatcgcgccgatctgcggcacggtgacgtgtgattcgtcaatgaccagcaggaagtcatcggggaagaagtcgagcagcgtgtgcggtggggtgccggcggcgcggccgtcgaagtggcgcgaatagttttcgacgcccgagcacacgcccacctgggtgagcatttccagatcgtaggtggtgcgcatgtcgagacgctgcgcttccagctccttgccttgcttacgcagttctgccaggcgttcgtcgagttcctcgcgaatggttttgagcgcccgctccatgcgttcggggccggccacgtaatgggaggccgggaagatgtggatttcgttttcctcgtcgatctcgtcgccggtcagcgggtgcagcgtggagatgcggtcgatctcgtcgccgaagaattcgatgcgcacggccagttcctcgtagacggggatgatttcgaccgtatcgccccgcacgcggaaggtgccgcgcgtgaaggcgatgtcgttgcgcttgtactgcatggccacgaaccggcgcagcaggtcgtcgcgattgatctgctggccttccttgagaaacagcatacgcccggcgtattcctcaggagtgcccaggccgtagatgcaggagacggtggccacgaccacgcagtcgcgtctggtcagcaggttggccgtggcctgatggcgcaaacgctccacatcatcgttgatgttggagtctttctcgatataggtgtcggtctgcggtatgtaggcctccggctgatagtagtcgtagtaggaaacgaaatagctcaccgcgttgtcgggcatgagctcgcggaattcggcgcacagctgcgcggcgagcgtcttgttcggctcgatgatgagcgtgggacgttgcagccgttcgatcagccatgcggtggtggcggttttgccggtgccggtggcgcccatgagcaccacgtcgttctcgccgttctcgatgcgcgtggccagttcctcgatggccttcggctggtctccggatggtcggtacggcgatttgaccacaaacggcttgtccacacgttcgatgttgaatcccatgcgctgtttccttccgattcacgctgtatcccgatgatatatcggaatatacgctaggcaactccaatacccgtcttcctcttggacgcgcagccaaccaccgctccgcgtaattgattgacacagatgagacattccaaatcccatgcccaatgttctcggagattccgccaatgctccatccgccatcttggcgggaacgtcagccaccgatacgtacagtccgtcttgccgcacttgtatggcgagtacatacccttgttcgcgatccgcgtgcttggcgatattggcaaacgtctcttccagcaacgaccgcgtcaactggatagtcttctcgtcaaaccgactcaggagatcgaagggatcggacacaaccacctcgcctcggaaaccaagcgttgcgagttcccgccggcgccgttcgatctcggcctcgaatcgacctgcaccgatcggaacaatggcttctccggagcgacgcgcatggcatcgcgggattcgcgcagtaccgacattgtgctttgcgagaaccgctatgacatcatgcgtctgatcgagcgcccgttgagccacttcgcgcaacagtggcaagtccatcgactctccttgcgaagggtgttccgacatgatcctgtcgatgctcatgatgagatatgagagatcattggtcgtcgcatcatgcagccttgccgccaaatccaacgattcggccctgccacgcgcttccgactccctctccccctcacgatgatgccaattcagcagcagaccgattccaacgcacgccaacgccggcatgacggtccaaggcacaacggacaccaacgccccggcatcccaacccatcggcaacccatactgccatatcagctgcgccacgcgagatacggtcacagtcaccgccaacaccacgccgcaccatatgcgttgataggagaggacgattaatggctcggctatcaccacgctcaccgacatggacagatccaccggcaaggggaacaccacgcaccatgagatcgccaacgcgatattgccgccgaacgggaatgccacgcagagcaacgacaggatgacgaacaacagacccacccacagggcccacgcatcccaaaccggattgatacacgattcgatgaccgtatcagcggctatgcacaaggcgcaggctagcgccgcgatcttctcgccatgccaagacttcccgaaatcgcggaagcgacgtctaagaaaacggctgccgtcacagaacatggtatcgctcacagtaatcaaggagttcgccgcgcctcgtcaccccgaccttgcgcatggctcgtttcacatagctgtacacagtttcgacaccgattcccaagcggcgcgcaatttcaatggtcggtacatgatgtgcatagagacgcaacaccgccagctctcgatcggagaagagcctggcaccatccgcttccggctgtgcggcatccaccgtatgcaatgtctcttcaaggctatgcaaaccccaaccatgagggtatgttcccccgtcaaacaccgatttgaccgcctcgcgtatggtcgctgcgaaatctcttttcgaaatcaacgcttgggctccgcaacacgcgatatcctcaccataggttgccaggtcatacgaagtgactacgatgacgccaacctgcacgttccgctgtcgaatacgttccgtcagccgcactccgttcagcccgtccatcatgagatcgcaaataaggatgtccggcttccgcggatcgaacagacaacgttccaaggcaagactgggattatccgtaacccatagcatatgcgcctcgggaatcgtcctgccaataagcaaagccatcatctccgcagagcaacgatcgttgtccaccaaggcaagccgaatcaggcgcccgttcttcataagtaccccctccccaaatcgcctccgtcaaacgaaatcgtaacactgtgacgattcccgtcacacagacttcgttcgctcctcattggcgtcttaccgtgttatatgcggcaaaacagccgcgcaataatgtgcggcgagcgaacttcctatcgtccgccgcacaaacacattgttaccgggaataaggtgtatcatgcactggacttataaaatcgccagtatattggccgtggctctcatcactctcgcagcaggattctatgcgcagaataacgaagaaacctatccctccggccctagctacgatattggaatttccgacgcgcacgggcagactctatcgacattgaccggtctcgcagcgacccatcatgtcggactcgcgagagtctcctatgagccggacggtcacggtaccaacagacgcgtaatttctattttcggcgcattagacggcaacggcatgcatgcgaattcgccatacccggattatgggttcgggccgcgcacacgtgtgcaacgcggagacagattcaccgacccattgggaagatggcttctctatggatcaccacgggataccgcttcagtagccaaatccatacggcgccaaggattcgaacttaacagagcaacccccatcggcatcacacaaatcaccaaacaattcttctccaattccatcgcccaagtcatattcgccggacttgctgtagtatttgtgtccggcgcgctttccgtgtcgacagcttcacgcgtttgcgcgatacaagccttgcatggcatgagaacaaccggcattattatgaggcaattcctgcggcatgcgttctttttcatcatctgcgtctgcatcggatggatgacttggatttccattggtgcgatcttctggcctttcgcttctcccttaggattcgccggtcaggtattcctctccatcatcatcgccacaacgtgcatggcattggttgccttgtcattgtcgattgctctagtaagggttctggtgccgaacgcactcaaattaatccaaggaaagcgccctttacgttttctcatggcttccggctgcatcatggcaatcatcgttctcgctctcagctctgccagtttgaacgttacgaacttcaaatggcggcaatcccaaacactgaaaacaacattggagcatcaattgtcatccaacgacggattccaattgcaactgtggtatagccgcgatcaaaaccgagcccgttccatgccctcatggaatgacttcgtcgaacaaacttcccaatcagaacatacgcgattcgcctcattccggctaggatgcacgtgggtggatagctcgcaagacccacagccctgcatcctcatggattcccgtacggcaaggcttcatcatcttatacgaaacaacacgacacttgcacgaatcagtgtgattatgcccgagaatgaacaatggaacagcgaatccattacgaacaatgtgcttcgcgcatactcattcgagcaaagtttggcggcagaagagggaaagagtctgcccgccatcaatcgcacgagcatctccattgaatccagaccaagagatgctgtcttatcggcatttgacaccccttccaacaccgatggcctttcctctgttcctgttgttgtcattgacccgtcactgctctctggcgataccactacatcgatggtgtccaccggcggcatgaccttcgattacagctcccgccatcagctgctcgaaatcctacgggaaaagggcgtggactctttggtggcttcggtcgtcaatcggcacgacgagatacaaactcgtttggcacgaacaactcaggaaatgaactatttttccatcacagcttgcatatccataacatgtctgctgggcggcgcaatcatggtggctttgacactatgcacactccgacgtcaaattatgttcgtggaatatatgcatggagcgccgtcatatctccgttttcaatcgatactgttcctagcagcggcgttatgcagtgcatctcttccgatccagttgctcataggaggttacaacgccgtttccacgacctcggtttccttactattcatcgtcgtttcgctggcaaccacagtgctttacgattcgcggctgcgcgccgacagtatcaaacatccctgatcgccatccacaaacctgtatcagcaatcacttaccacgtaaggaacatcaatcatgagcgccttattgatcacgcataatctgacatatcgaatcgacgaccgcaccttatgggaaggactgaacctgacgttcagtcccggtgacatggttgccctaaccggagaaagcggatgcggcaaaaccactttgttgaatgtcctaggtcttttggaagagccaagttcaggaacaattacctatgatgggcaaacaattgcctccagaaagggccgacggctcatgcaccgcaacgtcatgggattcatgttccagaattacgccctggtggagcaatggacggtgaacagaaatctgattctggctctgcgcagcgtcggaataccatcggcagatagaagtcggctcatcagacgcgcattgcgggccgtgaatctgacgggctacggcaatagacctatctacacactcagtggaggcgaacaacagcgagtcgcaatcgcgaggcttctcatccgtcaatcgctgcgcgtcatactggcggacgagccaacagcggccctcgatgccgacaaccgcgccatggtcatgcgtcacctgcgtgatttcgccgacaacggagcgatcgtgatctacacgacgcacaacgaggagaccgcggccctcgccgaccgcatcatcgcattatgattccgccagccactgttcgtacagcgcatcgacggcttcgagcattcgacccatcggctgcgtggaatcgatcaccgcgtcggctatgacacggcgttgttccaggctggactggtggcgaatgcgcgcaagcgcatcatctcgcgtcatgccgcgggtcgacaccattctgtcgacccgtacttgttcgggcgcttcgacggtgacgatatggtcgaatcgcatgggcatggcgtccaggacttccgccaacagcggaacatcatgcacgaccacggcatccggattgtccgcgaccgcctgccgctcccgcgacagcgcaagatcatagatcaacggatgctcgatatcgtccagtttcctccgcatccgttccgagtcgggcccggcgaacacgtgctcggcgatccatcgccggttgagccgcccctgatcggtcagcgcgtcggggccgaaacattccgctatacgacgaagaccgacgccgcccggttccaccactcggcgcgcgagctcgtcatagtcgataagcgccgcgccgagctcccgcagtcttgtggacaccgtgcttttgcccgccgcaataccaccggtcaatcctattcgaatcatgctccccccatcatgccatgtttcgaggttcatgcacacaacggcaaaacccggcccgccgaagcgagaccgggttttgactatacgtcaggcgtcagtcgcccgatggcgaactcacttgccgagcagctggtcgcgcagggcggcgagctgatcggagtcggcgagggtaccggtagccggagcagcggaagagtagttggaggtctcctcgaccggcttctcttccttcgggccctggccgtcggcggctgcggattcggcagcgttctccagctccttggccacgaactccttgtgctcctcccacagctcgtgggcggcggcgtactgggactcccactcctcgcgctgcttctcgtaaccggcgatccactcgttggtgttcgggtcgaagccttcggggtacttgtagttgccctgctcgtcgtactcggccggcatgccgtagatggccggatcgaagtcctcggaagccgggtcgacggagtcgttggcctgcttgagggacagggagatacggcgacgatcgaggtcgacgtcgatcaccttgacgaacacggcctcgcccggcttgaccacggtctccgggttctcgacgtgacggttggcgagctcggagatgtgcaccaggccctcgatgccgtcctcgacggagatgaagacaccgaactggacgatcttggtgaccttgcccttgacgatctggccgggaacgtgggtgcgagcgaagcgctgccacggatcctcctgagtcgccttcagggacagggagatacgctcacggtcgagatcgacgtcgagcacctcgacggtgaccttgtcgccgaccttgacgacctcggacgggtggtcgatgtgcttccaggacagctcggaaacgtggatcaggccgtcaacaccgcccagatcgacgaaagcgccgaagttgacgatggaggacaccacaccctcacgaatctggcccttcttgagctgggacaggaaggtctcgcggacctcggactgggtctcctcgaggtactggcggcgggacaggaccacgttgttgcggttcttgtcgagctcaaggatcttggccttgatcttctggccgatgtacggggagaggtcgcggacgcgacgcatctcgacgagggaggcaggcaggaagccacgcagaccgatgtcgacgatgaggccgcccttgacggcttcgatgacggtgccctcaacgacgccgtcagcttccttgatcttctcgatgtcgccccaggcgcgctcgtactgggcacgcttcttggacagaatcagacggccttccttgtcttccttggtgacgacaagggcctcgatggcgtcgccgacctcgacgacttcgtcaggatcaacgtccttcttgatggaaagctcgcgggaggggatgacgccctcggtcttgtagccgatgtccaggaggacttcgtcgtgatcgatcttgacgacggtgccctcaaccagatcaccatcatcgaagttcttgatggtggaatcgactgccttgatgaagtcctcttcggtgccgatgtcgttgatggcaaccttggcgacttcagtgttgttctctgccatgtaaatatatggtttctaatagtggatggataatttctcgatattcagttatacgcacacccttacaggcatacagatattcacaatacaagcaactctgcccaaatttcctaggaaactctaggcgtgtcgttcggccatttccacgacgttggccaggagcatggctcgggtcatggggcccacgcctccggggttgggggtgtaggcggaggccttgtcgtagcaggccttgtccacgtcgcccttgatgcggtagcgaccggcttcttcgtcgtagacgcggctgacgcccacgtcgaccagcacggcgccgtccttgatcttgtcgggcgtcacgaatccggccgaacccattgcggcgacgatcacgtcggcgcggcgcatgtggtcggtcacatcccgggtaccggtgtggcacaaggtgacggtggcgttgacggcgttgcgcgtgagcatcaggccaatcgtgcggccaatggtgatgccgcggccaagcacgcacacttccttgccgttcaaatcaatgtcataggcgtcgagcagctcgagcacaccgcgcggagtgcaaggcagcggtgtcgaaatgtcgccgcgcacatgcagcaccagttcgccgaggttgtacgggtgcatgccgtcggcatccttggccgggtcgatcatgtcgatgatcgcgttctcgttgatgcccttgggcaacggcaactggacgatgaacccggtgcaggccggatcttcgtcgagttcgcgtacggcagcggcgatgtcgtcgaagctggcgtccgccggcagttccttcttgactgaggtaatgcccacttcctggcaatcggcgtgcttgccggccacgtacttcatcgacccgggatccgaccccaccagcaacgtgccaagccccggctggatgccccgggccttgagcctgctcacccgttcggcaaggtcggtcttgatcccggccgcgattcgtttgccgtcgattattgtggacatcaacgccctcccctgtggtttcgatgctttctatcgaaacgataggctatcgttggaacaagtcaggattatatatcgttcgctcttacgaagaaggcgtgccatggggactcaaatcacacgacttacgcgactcgccgcagccggcctgagcgccgttctgttgttcgcgaccgccgcatgcgcaaccttctcccccgatgaaaccgagccggacaacaagaccagcgttcccgcaccgaccgggccgatcaatgtggtggcctccctcaatcaatggggctcgctggccgccgagctgggcggcgatgacgtggaagtcacgtccatcgtgaactccaccaatgtggatgcccacgatttcgagccaaagacctcggacgtcgccaagctgtccaaggcccagatcatcgtggccaacggcgcgggttacgattcctgggccaccaaatcgatgaccaagaccacgaatatcgtatccgccgcttccgtcatgggtgccatggaaggcgataacccgcatctgtggttctccaaagacgctcgatccagcatggccacggccatcaccgatgcatatgtaaaggcactccccagcaagaagaaggccttccagaagcggctcaaggcatggcaggcggatgagaaatcgctggaaacatgggcgtccgagttcaccagatcccactccgacctcacctatgcagccaccgaacccgtggtctattatctgatggccgatctcgggttcaagaatcagacgcccaagggatatacgcaatcgaccgcttccggcggcgaaccggcacccgcggacctgcagtctttccagaaactcatcgaagacaagggcgtggatgtgctggtcaacaacacgcaggaagccagtgacgcgaccaatatgatcactggcgctgccggtcgtgccgatgtgccggtagtcgacgtctccgaacaaatgcccaagaacgccgacacgctgaacgcctggatcaatcagctcatcaacaccatcatcgacgcggtggatccgagctatgactgcgaagacgccacggacggcaacgcgaattccgatgattccagcgccgacggcgccgccacggatgatgccaatgcacaagactccaaggccagcaccggttccagcacggagcccaagtacatccgtcagtgcaaggcggccacatccagtgactcgtctcaggattcggcaaaggccgatgcctccaatggcgattccggcgatgcctccggcaacgaccagaccgactccggcaaatagttagaagcaaaggacaacggcatcggattcatgcaatgccgatagacgccttgcacgagaagggttgtgcgaccattgtcgagatggccgcacaacccttttctttggttgccaccatccgtacacgatattgagaacgattgtcagcatcgtttgccacaatcgggcgttatgagtgaaacttccgattgcatcgtgttcagcgatgccgccatcaagcgtggtgaccatatcatctggcagcatggcacctttgccattcccaccggttcggtcacggccatcgtcggcaccaacggcaccggcaaaaccacgatgatgagggccgagctgggacttttgccgctttgccatggcagcctgaccgtactgggcaagcccgcaggcgagatgaacaaacgcatcggatatgtgccgcagagctatgtggcgaatgtcgattccaatctcaccgccgaacaatccgtgttgctgggcctgaccggcacccgattcggcatccaccccatcaccaaggcccagaaagccaaagcgctcaaggcgatggagttcaccggcatcgccgacaaggcgcagtaccgtctgtccgaactgtccggcggtttgcgccagcgtgtggccatcgcccaggcgttggtgtgcgatccacaactgctgatgcttgacgagccgttggccaacctcgatctggccagtcaacgcgccaccgtacacgtgctggccaagctgaaccgtgaactgaacatgaccatccaggtggttgcgcacgatctcaatatgctcttgccgattctgaccggtgccgtctacttgctcgacgggcacccgcactacgccgatatgcacaacgtgctcgactccgacctactcacccacctctacggcacacaggtgcaggtggtcaccactccgcagggtgacatgttcgtgaccccgacgccggatgagccccaggaccagccgcaggatatgcacacggcagccgaagtggcgcaattgcaccatcacgagcacggcaacgccaccaatggcagtgccgccaacagcgccgagaatcgataacatcaagctagccgatccacagcccgtcaacgggctgcagctcaggcatggagaaaatacagggacatgagcaccatcaacttttcgtatgatcccgaatggctggacacactgtccgctccattcatgaccaacgccttcatcgccggcctgtgcattgccctggccgccggtgtcatgggatacttcaccatcgcccgtcgttccaccttcgcggcccatgcgctggcccatatcggtctgccgggcgcgaccggcgcggtgttgctcggcctgcccgtatcactgggcatgggcgtgttcgcactgggcggcgcactggtgatcggtgctttgggcaagcgcgtttccgagcgtgaaatcgcaaccggcaccgtactggccttcgccaccggcttgggtctgttcttcgcgcgattgtcgagttccgcctcccagcagatgcagtcgatcctcttcggctcgatcctgaccatcaccaccggccagatcatcggcttcgccgtgttcgacgtattgctgctggcattgttggccatcatctaccgcccgctgctgttcagctcgttggatgagcaggtggcacaggccaagggtgtgccgatcgggctgatgaacgtggcgtttatggcgattatggccggtgtaatcaccattgccgtgccggcagtgggtaccttgctgattttcgcgctggtgatcacgcctgcggccaccgccaatattctggccggctccccattcaaggcgatggtgatcgccagcgtgctgtgcctggtgtcgatttgggccggactcgtgctgtcggcgatgttccccgcccccccgagcttcattatcgtgacgctttccaccctgttctgggctatcgccaaggccgtggagacagtgcggaagtaatctcattcatttttcttgcccccgctggcaaattcacagcgggggctttgttatatcttctccaccaaggcattggcgatggcggcgatgccttcgccgcggccagtgaatcccatatggtcggtggtggtggcggtaaccgataccgggcaaccaaccgccgcagacagggcggcttcggcttcagcacggcgtgtgccgattttcgggcggttgccgatgatcgccactgaggccgatgccggcgtatacccgttggatgccagatgcgccacaacttcttgcagcatatcgatgccatgccttccggcaccatgcgcgtccgcaccgacaccgaacagtgaaccaatgtctcccaatcgggcggcggcaagcaacgcgtcaatcagggcgtgcgcggccacatcgccatcggaatcgccttcgataccctcgtatttggcggcatcggcctcgctacatgaatcaggcaccggccagtagagcccggcaatccacagttcacggcctgaaccggcaggcgcaaaacggtgagcgtcaaaaccctgccctatcaacactcctgcagaccccatgcagtccccttcgatggcgctacccagacgaacggcagcaaacgattatgaatcacgaagccccggcgtatcgcataaggacacgaccggggcctcaacaatcaaatcacttcttcttagacttcttctcggcttcgacacgagccaaagtatcggccgcggcctcttcgggctcggcggtgtgatgcttgtcgtcaccgggttgagcgggctcgtagcccaggttcacgtcgagcagacgctgggcttccgcctcgtcgatcttctcggacaaggcgatctcagaagtcagaatggcgcgggccttggtgagcatacgcttctcgcctgcggacaggccgtgctcgtcgacatcgcgctgggcgagatcgcgaaccacttcggcgatcttgttgacgtcaccggtggcgatcttttcgacgttcagcttgtaacggcgagaccagttcatctctttctcgatgatcggggtccgcaggatgccgaacaccttggccacttcggatgcggagacgatgtcacgcacgccgaccttcctggcattgtccacgggaacgttgatgaccaaaccatcggaagagagtacggacagctgcagatattcgcgcgtcactcccttgaccgtccgctcggtaatggcctccaccttcgctgcaccatgacgcggatagacgaccatatcgccgactttgtaagacatgtaccctccgagaactgacggcttacacacaaaaactcgaataattatgccatgcggtctggaccgcccctatgagagcgctcacaaccacggagacacaccgaaaagggcaagaattcgccattttcgacgcgccaatgtagcgttttcgactccaacgcacgtagactttgggtcatggctaaagaaacgaagatcaaggaagataccgtcaccgtgcctgtcgcccaaggcgacctcgatgcggtgagcaatgctgaattctacaacccccacggagttctcggcgggcatctcggcatcggcaagcatgccgacaccgccacaatccgtgtgctgcgtccgcttgccaagtccgtgaccatcctcacccaggatggcgaatacccgatgacccacgaatacaacggcgtgttcgtggctaccgtgccggcctccggcaccaagaagcagcccacgattcccgactaccgcgtcaggaccgagtgggaaagcggcgcagtgctcattgaggacgacccataccgttatatgcccacagtcggtgacatggacacctatctgttcggcgagggccgtcacgagaagctctgggaggcgcttggcgcgcacgtgctgcgctatgacgatccgatgggcggcgtggacggcacgcctggcgaacaggtggtaggcaccgcgttctccgtgtgggccccgaacgcccatgccgtgcgcgtggtcggtaacttcaacgcctgggatggccgtcgtcatgccatgcgcgagctcggctcctccggcgtgtgggagatcttcattcccggcatcggcgcgggcgagacctacaagttccagatcctgaacgccaattacacgtgggagatgaaggctgacccgatggagcgtcagcacgaggttccgccgcacaccgcctccatcgtcaccgaatccacctacgagtggaacgatgacgcctggatgcagcaccgccgcaccaccaacccgcatgatggcccggtctccatctatgaggttcacgccggcagctggaagcagggactgacctaccgcgacctggccaagcagctcgtggactatgtcaagcaggaaggcttcacccacgtggagttcatgccactggcacagcacccgttctccggctcctggggctatcaggtcaccggctactatgcggtggattcccgcctcggctcccccgacgacttccgttacctggtcgatcggttccatcaggccggcatcggcgtgatcatggactgggtgcccgcccacttcccgaaggatgccttcgcactcggccgcttcgacggcaccccgctgtacgaggacccggacccgctgcgcggcgaacaccccgaatggggcacctatgtgttcaacttcggacgccgcgaagtacgcaacttcctggtggccaacgccctgttctggctcgaggacctgcatgtcgatgcgctgcgcgtggatgccgtcagctccatgctctacctcgactacagccgcgaacccggccattggcgtccgaacatctacggcggacgcgaaaacctggaggccatcgacttcctcaaggaagccaccgccaccgcgtacaagaacaaccccggcgtcatgatgatcgccgaggagtccaccgcatggccgggcatcaccgcccccacctccgccggcggcatcggcttcggtatgaagtggaacatgggatggatgcacgacaccctcgagtatctgcacgaggagcccatcaatcgcaagtggcaccacaacgaaatcaccttctccatggtgtacgcctactccgaacactacgtattgcccatcagccacgacgaagtcgtgtacggcaagggctccctgtacggcaagatgccgggcgatggctggcagaagctagccggcgtgcgttcgatgttcgcctatcagtgggctcacccgggcaagaagctctccttcatgggcaacgagctggcccagtggggcgagtgggatcacgacgcctccatcgattgggattgcctgaactggcaggagcaccgtcaggtccagaccatggtcgccgacctcaacgccttctacaaggcgcatccggcactttggagccaggacttcgatccggccggcttccagtggctgaccagcgacgatgccgaccacaacacgctgagcttcctgcgcatcggcaccaagggcgagaccttggccgtggtggtcaacttctccggtgaagcctggcccgattaccaggtggcgctgcccaccggcggcaagtggaccgaagtgttcaccaccgatgacgccaagtacggcggctccgacatccacaacggcaccttcgaagcggtcgagggcgaatatcattcgcgtccgttctcggcgaagatcaccgttccagctctgggagttgtattcttgaagccggaagactgaactggtcaacaggctgaaaggtaaccggtttatttatgctcaataccacagcgcgtcagaatacgacaccgcgcatggtgctggtggtcgaggacgagcccacactcgccacggccattgcccagcgcatcaccgctgaaggatggaccgctcgcgtggccggggacggcgcttccgccgtccaggccgcgtcccagctacgccccgatctggtaatcatggacatcatgctgccggtcatggatggtcttgaggccaccaaacgcatcgtcgccgaacgtccggtgccggtgctgatcctcaccgcacgtgatgacgaggccgacaaggtcatcggtctgggagcgggcgccgatgattacatgaccaaaccgttctccatgcgcgagctcatcgcccgctgcaaggcgctgctgcgccgcgtggagcgtgcgaaggtcatcgccaagaattcggagaacgagaagctgctcgacttcggttcgatggtcatagacccggcccagcgcatcgtcaccgtgaacggcgagcaggtgcatctgacccccaccgagttcgatctgctggccacgctggcccgccgcccgaagtcggtgctcacccgcgaaaagctgctcgaagaggtctgggactgggtcgacgcatccggcacccgcaccgtcgacagccacgtcaaggcgctgcgccataagctcggcgccgataccatccgcaccgtgcacggcgtaggctacgctttcgagccgccgaccgcgtgatggcatccaaaaaacaacagcaatcccggcttgatgcgatgaaacctcgcgtcaagccggttgatttgttctcctctctgaagctggaactcagcgtactgatcgttatcgccactgccatcgcgtttgccatgtgctggttcctcctgaaattcggctggtccggttggatcgccatgccgctgactttggtggtggccttgggcatcacctatttcttctcccgcggcatcaccgctcccttacgccagatgcgcgatgtggccgaagccatggcggatggcgattacacggtccgcgtggatatcgatcaggatcgtcatgacgaggtcggccagctggctcgctcgttcaacgagatggccggcgaactcgaacatgccgataaaatgcgccgcgatatgatcgccaatgtgagccatgagctgcgtacgcccgtttccgctttgcaggcgatggtcgagaacatggccgacggcgtcaccgagcccactcccgccaatctggagagcatcctcacccaaacacagcgtctctccgacctcatcgccttcctgttggatttgagccgtatggaggccggtgcggcgagtctgaatatcgagaagttcaatttcgccgactttcttgacgagaccatcgagccgttggaaatcgccgatggcggccacgcccacgacatccatgtcaccgtgccggccgacatctcgatggaaggcgatcaggaccgcctgcgccagctgttcaccaacatcatcgccaacgcgctgaagcattcggccgacggcaccaccgtgctggtcgatgcccatgaggatgacagccaaggcaccatcgtgaccaatgtggtgaatttcggctcccagattgcaccgtccgaccgttcggatatcttccggcgctttgtcaaaggcaagacgggtcccggcaccgagtcgggcggcaccggccttggcctgtccatcgcacgttgggcggcccaattgcacggcggcaccgtcaaagtggtcgatgacacgcgaggcgccgatttcgaaatcatcctgcctaaatatcacgtcgccgaacgctgatattgtccgccgtcctaccgtatactgtattcgaacagatgttcgaatacagggtgggaggcacagcatgacacagcaatccaagtcacgaaccatgccgcacgacaccacgctgtttgtcatgcagatggccggcgattccatgatcaatgccggtattcataacggcgatctgctgattgtcgatcgttcgttggcaccagtccccggagatgtggttgcggctgtcatggacgatgaaatcgccatcaaacggctggtttcacgggccggcatcaccatattgcacgccgagaatcctcgatatcccgattacatgccgagcaacggcgcttcgcctgctatctggggcatcgtcaccgatgtcattcacccgttgatatcgtcatcggaccgtcgcgccacggcatccgccaataccagcacacccaccactttagtaccggcctgctgaaatgtctgaacgcattgccgcacggtggcacctgtggtgacgatgtcatcaatgagaagcaccgcgtcgccatggcctatgagatcacgcttcaccgtgacatgaccggtgatacggcgggcacgctgtgccgaagaggtctgctgcacggagcgtgccttggtggaggagctcagggcattgcatggtcgcgcatcgacgccgtacccacgcaatgcccctgccaccgatttggccaacggtgccgtgtgagcccgtcctcttcggcgcattgatgcccgcgatgacggcaccggaaccaccaatacgcgatgacccaagcatgatgatggtattggcgtcttgttcagcagcgacaccatgatgcggccgaacgggccgtcaagctcggtatcatcgtggtccttccagtcgagaatggcacgacgcgccgctccctgatagattgacgcggaccatatacgggctccgccaccactgtctgcatcccgttcccggcattgcgcgaacagggcccagcatgtcgcacacaatacctcatccggcgcgtcacacccagcgcagccgcgtggaaacagcagattgcagacctgtgcccacatcgcatgccaccacttgtatacgctcggcccgtccataacgcgtcaccatcaagctggagtatcgaatcgcgcaagcagtgcatccagcagttgtaccgtgtcttgcggattctccacacgaacaccgatcgcaccggcctcaaccgcaggatagtcattacccgtaggcgtcatgcgatcgcccacgaacaccatttcatcggcctgtatgccaagtgtctgcgtcagcttgcgcacggcataggccttatcgatgccgcattcgctgacatccacactggtgtagccgccggccctgacccgcatgtgcggcagatcggccttgaccgcttcgaccagcgcctgtttcttcgtgttatcgcgatcccatgcctgtttggccgctacgggtgcgaactgtcccagagcggagaaggtgatctggctgcccctgttctcgattcgaggcccccatacctgctgttcccacaatcccagttcccgggcatgtcgctcaagactttccgagacagcggccacggtggcttcggacagatcatgcgcatacaccaaggcccattgcgtgccatcccaccggtaataccgggagccggaggcaggcatgacatgcagattgccgcgcctggcattcggggtgagtacatccagcacctgtgaggtgaccaccgccatgccgccccctgagatcagggccaccaccgtatggtcgagcagcgcacagaaccgttcgatcatcgcgggcctcatcggctgttttgagctggccagcgtgttgtccaaatcgaaaccgaacaccttggcgttggagcagacattatcgaaatcaagttcggaccacgaacgtaccaccatttgtcgcgcctccctcgttgacgaatgttcacagccaatgaaccaatcctaacgcatgttgcctccgccatgtcctatggtgggaaccatgcttcagccaccttggaacgcacgaatctaccgcaaccgccacggtcgcggcacacgaaccccgatgttcggcacccgtctgccccgttaccgcactcgcaccggcatgttcgacgatatggtggcggcccaggttcgcaggctcggccaagcgtggccggaactgatacgtccgctccagttcgcggtggaggatgtgccgccttcggatccgacgccttggcagaccgagccgaatatgacgtcccagtgcttccccgccagccacggcattcccgcacgagtcgtgctctaccgtatgccgttgcagaccgaggcacctaccaagctcgaattgcagttggccgtcagggatgagctggtggcccgcatagcggaattgtatgggcgcaggcccgaggaaatcgaccccgattggggcctgtgacagtattgcgggggccgtgccacttcaagtaagacagtggcacggcccccgcagctatatcggcgccgaaacatcatcagaccgatgcttcggcgagcgcgctctacttgacgatggaggaatcgttccgagcccagacatggaccgtggcgggcatcagcgttgaagcgtcgatggcggacaatccggcgatgtccttgtcttgcaacgaatcgtgactgaaacgcgctccccagctcactttcttggatgagtcctccaacatcagcacgaccgcggtgccatgatcgccggaaagtttgccggtctcaatcgtttgcgccgcgttcgcatccagcgtgatttcctcggaggtcaccgaagcaccggcatcatcgtaggcgtgcaaggtgaccgtcctgcgcgcattggacgtattggccagcgtgatggaggcctttactccgtcgggaagggccaaccccgagaattcggatggctcgccggcattgaccaatgcgaaatcggcttggccggagtcaccggagcgtgtggccttgacggagaacgacacggcatcctctgcggtggacatcacgcccaacgccccatcaggagcctctcccaagtcgatcgccgtcaccttatcggcagtgacggtggcatctttggcgggaaccaatcctttgtcggtaatccatgacagcccggtgctggtgtctgccttggcgaacagataagcggtgaccgcatcgccggcagtgatggacggcgccaccgacgcattggaggcggtcggcagcggcagcgcgaaatcagaacccttcggtgtcagaccatccatggtcaccgtacgtaccacggacgcgataggagtctccttgctggaaacggtcacgaacagaccatgctgcccatcgaccgcggcggacagttccatcgaggactccccctcggccggcacagacagcgtggattgtgtggacaatgccattttcccggctgtctcggaaccccagacggcaatgtcgacggtggtcggcttggtggagggattcgagacgatgagctgctgtgtggtaccggtcgtgccgccggagagcaggaacgactggctgagcgaggtcgatacgcaggatgccgccgatacgcctctcacatcgccgtcatcggcccatgatgcgatggtgccgacggtgccggtgccagctgcggcctgcaacatacgggtattgatcaggcgagctccctgatcgatcttctgagcaccggttttcaccgaggaatcgtcggtcggatcggcgtctttcaaagtcacgtcatctgaactggacttttgcccgatcgccgagacagtggcgctgtagacggagccgaacgccgcatagcgcgcctgtgtgctcagattgccgacagtggcctggaaggcgctgtcgccgtacgtgccggtatcggccaatcctataggtgccgggcagtaggtttcggactgggtcggactaactgtctggtcgatggcattatcggaagcggccaccttgtccacccagatattggggatgggggccatgacgagaacgacgaacagcgcaatcaacaccagcatggtgatcacaccgagcacgatgccgatcgcacgtttgaaaccagaagttttgttgctcatgcctgctcctccaatccgtaggacggtcgtctgcgaggcatggcgaccaagcagtacaacgccgtgatcacacctaggcatatcagccagacgtgtctccagacactatgctgtgcacgttgctgccatgaggtatccacctgctgtgaggtgctgctacgcagcgtcagacgatagtagctgccgctatccgtggagaccagggactgggtgccgttcgatgcggcgatattcgcgctcaactgttcatacggcatgtcgttcgaggaatcgccggtctcgggaaccacgtagatgccgccgaatccaagcgcgctgatggccgcgatggcctcttcgtcgggattggacagcagcgaggcacaggcctgggccagttgttcgtcaaccgcatcatgcttgccggacagcaggcgcgcccgctggaccggagagctgtcgatcagatcgccgcgcgaggtgcgcatcaccgcatagttgacgatgttgcgggtctccgcgctcacggcaagcacacgatgatcggcactggcctccagataatcggtggtgaccatgggcaggccgttttcggacacgcccagtcccgcatccttatgacgttcgatgccatacatgcattggatgccgatgcagcacaccagtatcagagcaagcaccacacggccagacacgatgagcgcatgcagacggtcccttttcggtgcgggatcgctgccggacgcatgcaacggttggaatcgcttcaccgccccaccggcgacgaggcacacgcaggcaaggaagcccaatatcatcatcgcgatgccaggctgtgcggaaccggccacgacgccatcggcatccacggctatggtcacacggctggaaatcagggcgagcgcgcctccgcaaacgattaccacccacatcagccgcgaggtccgcaacgcgaacggcagcaccagcgaagcaagagcgagcagcgtgatgacgccgaacagcacagtgaccgccaaatcggcataatcggtcgatcccattcgccatcccagcgcacgctgtacggcctcaagcaggctcagcgacgccggcgacccgttggcggatgacgttggcactgtgatgtcgccgaacagttgacgccacatgcccaaatcggcgtaacgcaccgcattgacgagcgtaggggccaccgcaaaggcggcaggaaccggaataagcaacagcatggcgcgcttgcggcgcacgaacagcaggaacatcaggaacacgacgatcagcgcgaacagcagctgcggttcggcggccaccacagggatgaagcacagtgcggcgatggccgcggcctgaacggatgtgcgcggcttgagcgggtcttcggtatggtacatgcccacggcacggaacacgaatgcgaacgcggccggcaggaacaccattacggtgagcatcggcatattggcctgcgcataccagccgaacataatgccggtggatgcccacaacagtcctcccagcacacgaaccacgtccgagcgggtgaatacgcccgccagcgcccagaacgacaatgcgctcagcggcgcggccacaaacagtatcatcgccagagcggcggtcacatggccgagcgtgaccagcgaggccagcatcagcaccagcagccacggcgtgggcggcgcaggaatgccggtgccgctgccaaacacccatggcgtggtggcggactgcaccagttgagtgaagctggcaccggtggaaagcaacacatcggaatacaacgatccaccggagaatatcgaacggaacaccggccaatacatcaccacgatggccgcaaagcacaccagcgccatcaccacggctgcgctccagcgatatatggtgcgtgtccgcagatgggcacgttccagcggactgagcagcactctgccctgctgggattggaatgcatcccgacgatcatggaactgcttgatctgccgactgtcggcgaacaaaacctgcagggacgatgcggcgaccttcgactgtctggccaccagcctgcgcgatttcatgtttcccgcgatatcggccaaagccaaccatggcaggcacaattgcacccatgcttcatacggcttcttgccgaacatcatggctatggccatgccaaaactgcgaatcagcctccacagccagacgataatccaggacgacatggccaggtcagtgtacagatagcgctgttgggagcgatgcaccgtcatcgcatgattgaccgtgtgatcttccttaagcggctccccgcctcgcgtacgaatgccctcataccgtgcgcgacgatgtgatatctccgcttgcgggactaccaccacgcgtccgccgctcaggcagacacggcggcagaaatcgaccgattcgctgtaggtggtcagccaggcattgatgccccgcagtcgcgtgaattgcgacatggacaccagcgcgcccgccagcgacaccgcgaacacatcctgtcgcccgtcatactgctcctgatcgggttctccatcgaccaccagggaatgcacggcgtgtcggcctgcatacataccgacatcatgcaggtgggatccttcccaatcacactgtttgcacccgagcacgctggcccccggcgtattgcgccacgcctcaagcaatcgttcaaggcatgaggcatccgaggggcgggaatcatcatggagcaaccacaatgcgcggggagcgtcatccaaatcggcccgatccaacgcccggctgaccgcatcgccgaaggaacgcgcgcccttggccgaaacgatgtgaatggtcacatgcttggactgcggcacctccactaccggccccgatggcgagggaatgacctcgaacgaagtggttatcctcgaaccggcgcgcccggtcgcgtcggcgatgatgacgactcccggaagaacattctgcgtcaataccgaacgcaatgtagaccggaggaaacgcatatcctcctcaacggtgatcacagccgtaatgccggtatccacatcctgcctatgcgtatacggtcgagaagacatggcgtcggccaacgcctcatgaatatcgctattacctgtcggactcataaactcccagtgtacgcaccagacttgaagggggtgtgtgtggaactacgcctgctcccggtgctctcgcttatatcgacggcgttcgcgctcgctcataccgccccaaataccgaatcgctcatcatggtcgatggcccatttcaggcattgttcacgcacttcgcatttggcgcacacacgcttggcatcacgggtcgagcctcccttttccgggaagaacgcctccggatcggtttgcgcgcacaacgccttgtgctgccaagatacatcgccatcaggtcggaatagtccccacaattcatgccatggctcttcggctgaatcgtcgaccacaccccacatacgattctccttgcctattgagcttttcatacggactaaattacacacatgcaatttcgtttttgtcaaattctttctcgtgtcattacatcatttttatggaactgtgtgctatggcgcggacacgatgccctgatgccgttgcacatgatattgtgccgttcctgcgcaggaacaccatagcgcaggaacacccggcggatgctgtgtcaaagtgtcattcagacaatcgacagtttcaggaggggttatgacgcaggaatcaggtggggcggatccgcatatcaacccgccaagcttcattcctgcgggaaatcgacgcacccgaccttccgggcaggtgccacgctccttcgcccctgcccgcgcctcacgtcagtcaggtcaggctccatcggcccgtccgtccgtcacgggaaatgacatcgaagagcctcaaccgaacgccaacgccacggcaagcgccaacgtcacggcaagcgccaacgtcacggacaacggcaggcggactccgcccagtttttctccgaaaaccggacgtgccacccgcagcacggctccggatgccgccgcaccgcgcagcattccgccgtcgcgagcgcggatgtcttccggctcatcccgcaacgccgtgcgcaatccgtcggatatgtcggtttcccggccctcatcgccagcagcaaacgtgtccacgaagttcagccatcttggccggccggcggcggcaacggcgaaaacggtaacggcacaccggccgcgcgccttgcgcatcatcttatgcgcgattgcggtactggtggcggcgttgattctttctgttttcggtgcctggcaatgggtggacagcaaactgaaccggagcgactggctgaccgacacccccaacacgccggcctcgacctggctgattcttggctccgacgagcgagacggttccaccgattacggcggcgtggacaatatctcaggcttcagaaccgatacgattctggtgctgatcaagcctaaaagcgggccgagttcgctgatttccattccccgcgattcgcttatgaacgtcgatgaccagtacatgaaaatcaatgcggtggcgcagattgccggcaagaaagccttggtaagcaacgtcgagcagattaccggccagaaaatcgaccatgtggcgcagatcaagttcggcggtctgcagaacgtggtgaacgccttgggcggtatcgaactgtgctatgacgaggatgttcaggattcctattccggactgaactggaaggcgggatgccatacgacggatggttccactgcattgtccttctctcgtatgcgatacgccgacgcgcgaggagacttcggacgcaacgaacgccagcggcaggtcatctcggccatcgtcaaaaaggcttccagcagtgggaccctgaccaatccgtccaaagtcgtggcagtgtccaatgccgcgatgagcgcactcaccgtggatgaaaaaaccaacccttacacgttgctcaccatggcgttggcgttcaaaagcgccaccggctcgaatggcatctccggcagcgtgtactggtccgacccagattattacgttgatggcgttggctcctcggtgctgctcgatgacgccaggaacaccgaactgttcaatcagcttgccgacggcacgcataaggccggcgccgtgggcaatctggcggaaggctgaccgacgctttcccggagcccatcggcttcatcgtcggcgcatgatcgccgccgttgcccacgcagccaatcatgcacgggcaaaatgtcatgtggataactcggcaagctagaaccacataccttgattcggcttgcgctttcggcatgcgctcccccacgctggaagcatgacatcacagcagaacgattcgaagcgacattccgcccatacggcatccgccgtatcccgggcgaagcaccgtttgggcgcgccgccattgcgcgcccgcctgaccatgcttgccgcggcgtgcccgatgatcgcgcaggcactgatgatggtcatactgctgttgcacgggcaatggctgttcgccgccatgatcacgccaggcatattcgcctgtctcgtgtccctgctgctgacgctccccccacctccgggcccggagaagacccccgccccgcaacaggcaacgatcgatatcggtatcacggacgatgccgatgcccgcgccgcagacctccgtcatgcgccgtcgcagccgatagaatcgctgctgcacttcgcacgcctgccatggcgcaccattgtgggccattggcttgaaccccttgaccttgcggtgccgatcggcatgaccggaagcgagccgctgaggctcgatctgaaccgtcaggggccgcatgctctggtggccggcaccactggttccggcaaatccgtgttgctgcaaagctggtgtctggcgctcgcctcgatgaacgggcctgagcatctgaatttcgtgtttttggatttcaaaggcggttccgcgttccgcaaactcgaacggttgccgcataccgtgggcagcgtatgcgatctggatctggcgcatgccgtacgcgcgttgcgtgcgctggaagccgaactgacacgccgtgaacagctgtccgccgctgtccatgcttccgatatccgtgatatggtcaatccgccaccgcgcctgatcgtggtcattgacgaattccatgccctgaaggaccagctcccggattatgtgaatcgtctggtgcgtattgcctcgctcggcaggtcactgggcatgtatctgatcgcctgtacgcagaatccgatgggtcaggtcagtgccgatatgaaggcgaatatgtccgtcagcatttgtttacgggttcgggaccgtctgcaatcatgcgagctgcttggtgatggtcgtgccgccgacctcagtccggcaatgcccggtgcggcgttctgcaacgattccgaacaggtgacggcattccgctgtgcaacggcgcgcgatatcgatgcggtatgccgccagatcgcgttcgcatcgcggttcgtcgggagcccgccgcagccgtccctgtttaccgcgccacttccccggcacgtaaaagaccggactgtggccaatcacgcaccgcaacgcattcgatttggacttgccgacgatggcatcaacctgcgagaagcgacggtatccctcaccggtggcaatatcggtgtcatcggcccgcaggggcgcggcaaaaccacgttgctgaaaacattggctcgacacgccagcatggctgatggcttggcggtacgtgtcagttccccgcatcgccgggtatggggatcgcaatggcttcgcaacggccgctgcacgccgtatgccagctcggatgcaccaccgcctccgcatatcgtgtggttcgtcgacgacgccgatgagttgttcgacccattccgcaccgacgagcaggcgctgtctttcacacatgcgttggccgatgagtccgtcagcgtggtattcgccgtcagcacgattcgcccgatacgtataccagagcattgcaataccagaatcgtgttcccgtgcggggaacgaacgtctgaccttatggccggagtccccgctcgcctattggatacgatgagtcatatcgatgccgacaacgcgggccgggccgtgctcatcgagggcacatcggcatgtctggtgcagtgcgcttcgtgaaaacttcggttttttctcggcgaaacctcttgaaaatcaccacggttcgtggttaccttggtactggacttaaggaacaacaccagccacggggcttttaagggaggcaagcaatgagcagcgcttttgattggcgagccaaggccgcatgtcgtgacaaggatccggaactcttcttcccggtgggcaacaccggtgcagcctatcagcagattgaggaggccaaggccgtgtgccgcacctgcaaggtgattgatgcatgcctgaagtgcgctctggacaccaatcaggattacggcgtgtggggcggcttgagcgaagatgagcgtcgtgcgctgaagcgccgcgccatgcgcgcccgccgttctcaggccatgcagatgcaaatctgatgttttgattatcgcttcgtcatactaggaaaccctcccacttgggagggtttccttatttttgggcttcgcatcactcatcctgagcggccctgagcttcatatcaagcaccacgcgggtgccgcctccgcggcgcggctcccaatgcacggaaccaccgaaatcattggtcacaaaggtgttgatgatctgcgtgcccaaaccagaaccggaagaacgagccaatcctccctgttcttcggagccgagaccggaaccgtcatcctcgaccaccacattgaggttcgggccggagcggcccacggaaatcgtgatatggccatccttgcggccttcgaacccatgctccaccgaattggtgatgagctcggtcagcacgagggacagcggcgtggcatcctgagcgggcatcatgccgaacttgcccatgtagttgatatcgatgtgctggtctttcatcgtggctaggtccacggccatgcgcagcagattggcaatcaccttgtcgaagtcgacgacctcgtcggcggtctggctcaatccctcatgcaccatggcaatggtctgcacgcggcgttgcgcctcctgcaattccttcttgacctcatccgacttggtcttacgagcctgaagcctcagcaatgcggagacggcctgcaggttgttcttgacacgatggtgaatctcggaaatcgtagcgtccttggtctgcagctcctgctcacgacggcgcagctcggtgacgtcacggcatagcagaatcgctccgatacgaccgttgttgtcatataagggcagcgagcgtatcgagacggcggaacggttggcgttgagttcggagtcgaccgcggctttgcccgccagcaccaacggcagggtttccggaacggggtcgttctccttcaacagctgtgtgccgagttcgctgaggtaatggccaggcatggtggtcagcaggccgagacgcctaaagcagctgatggcgttcggggctgcgtatcgaaccacgccgtccatggtcaggatgatgaagccgtccgccacgcgagcgatatggcgctggctcatcaccgaatccttgtaggggaactggcctcgtggaatcatctcgtacagctgtttgcccgcgttaatgctttccgactcatatcgaccgttggattctcgtgtggccatattggtctcacgcacgaccaagcccaaggtcttgccattgtgccgaaccggcgcgtacacgttgcagacggtcgccttgcccacggttctcaataccgtggagcggaacaccacgctggagagcatggcggcgtccaattcgccgaccatgtcatccggcatgacgtttcccaccacgtcttccgcccgtagcgtcatcacggtggatgggcggcattgttcggccaccacgtatttgccgtcaccgttctgtaccagcaacagcaggtcggcaaagctcagatcggcgatcacctgccaatcggcaacgagatgatgcagccactcgcggtcctcgtcgtcgaagtcggggcgcgttgcaaggatgtgtgaaaaatcagccatatccctatcatacgcagatgcgacgtcgcatcgcccgacggcgaggaagaagcgcggcgtccacatcggcgtccgcatcgttgaccagcatagatgttacgctaacgtaggttacggcagcgtaagaagcgtatcgtcaactcgtgaaacgggggcatcaccatggcatcaacaaccgacgacgcggaaaagacgatgcatcacgacgctcataacagcgcgacgattgcagaggatgccaccatcgcatccaagcgtcaggcggctatcgaggcgcgcgaacaggcgttgcaggccaaggctgatgccgtacgggccaaggcccagttcaaggccgaggccattcgagccaaagccgaggagaaggcccggcacaagctcgccaaagcggagcaccgtgcgctgaaaatcgagggcattgcccctgcggaagtggaacgcaagattcgtctcgacgtgcacggacgaccaaagccgttgatgcgcggctggattcacgcgactgccgctcccctgtcattggcggcaggcatcgtgcttatatgcctggcacatggcgcgagtctgaagtgggcgtgtgccgtgttcatgacagcgtcgctgattctgttcaccaattcggcctgctaccatctgggcgattggagcccgcgcgtcaccgatgtgctgcggcgtatcgatcatgtcaacatcttcctgctcattgctggcacgtataccccggtttcgtttgcgctggaaccgttctggcgcaatgtgatcatcatatcgatgtgggcgtgcacggccatcgccatcgtgattcatgtgatctggatcaatgcaccacgctggctgtatacggtggtgtacatcatcttcggcatctacggcctggcttatatggtgatgttctggaattcgccgtatgcggggccagccgtggtggtgctgctgtgcgccggcggtgcctgctacatcctcggcgccatcgtctacgccttgcgcaagcccgacccttggcctcgcgtcttcggcttccatgagattttccactgcggaacggtggccggatatgcctgccatatggtggccatctacatggtgatcgtctcgctgtggcaataaacgctacgacatataagtatgcccccgcctacgggggcatactagtcacttataactcaggccagcggcttggcggccttgaccgtcacggacagctcgcggccgttcggtgcggtgtaggaaacgacgtcgcccaccttggcaccttcgatggccttgccaatcggggaatccggggtcatgatgtcgtagtcggtgccggccacgatgtcacggctgccgagcacgtaggtcatctcgttgccgttgagctcgatggtcaccacagagccctcgcccacggtgccttccggggcattctcgatgatcttggaatcgcgcagcttgacggtgagctcggtgatgcggccctcgttcttgctctgcgcctcacgggcggcctggtagccgccgttctcggacaagtcgccctcggcacgcgccacggcgatcttgtgcgcgatttcctcacgcagctcgccttcacgatgggcgagctcttccttcatcttgttgtatgcttcctgcgtcagcaggtagaccttgtcctcagccatatcgtcctcctgaaccgttgtcgatgctgaaacaattttcgttatttatgacaaaacgccggctataaccccggcgttcgtcatgtgctgacctatggtcagcgggtggaaatgatgtcgatgacgaacaccagcgtgtcctcgccgccgatgccggcctgcgggatgccgcgggaaccgtagccgtattccggcggaatggaaaccaccagacgcgagcccacgttatggcccggcacggtctggtcccagcccttgatgacctgtcccacgccgatgccgaagctggcgggctgatgacggtcgaagctggagtcgaatggggtgtccttaccccacaccacgccgtggtagttcacggtgacggtgtcgccgcgacgcacgatcgggccgtcgccctcggtcagctccacaaccttgaggcccttcggggcttcgggcgccgggaactcgataacgggcgtggtgccgaattcggcgttcacctgaggcatctgatctgccattagtcctccttcaaagacacaatgcgccctaccttagcaccatcggcgaatcggcggtagtccttcatccctgtgcgatacgacacgccggccgtatacgtcaattccggtcatcatgctggtgaataccagacatgtcaatcagcattcgacgacattgacggcaagcccgcccttggaggtctccttgtatttggccatcatgtcttcaccggtctgcttcatggtttcgatggcctgatcgagggtcacgatgtgtgagccgtcgccgagcatggccatacgcacggcgttgatggcggtgttggcggccatggcgttgcgttcgatgcatggaatctgcaccagtccgcccaccggatcgcaagtcaggcccaagttgtgttcgatgccgatctcagcagcattctccacctgttccggcgtgccgcccatgactgcggcaagtccggccgccgccatcgaacaggccgagccgacttcgccctggcaaccgacttccgcaccggaaattgaggcgttgcgtttgaacaggtatccgatggcaccggcggtcagcagaaacgtgaccacgccctgttcattggcgttgtccacgaaatgccagtaatagtgaagcacggcgggaatgatgccggcggaaccgttggtcggagcggttacgatgcgcccgcctccggcattctcctcagagacggccaaggcgaagagatccacccatgcggcgtcggaagactcgagcacggcgtctttgcgccggctgtcgcggcgcagcacatcggaattcgaagcgagacgccgatacatcttcggcgcgcggcggggtacgtcaaggccaccgggcaatgtgggctccgccgaggtgcatccgtggtccacgcaggcgcgcataacacgccagatggcatcaatatcggatcggacctggatgcctgagcgtgaagcggtttcgttggcccatacaagttcggcgatgctgagatgatgttcccggcacaacgacaccagttcggcgcatgatgagaacgggtagggtgcctcgacgccgaaatcagtggatgatgattcgtccgcgtcggcaaaggaggtgccttccggaggacgttcatgaatgccgatcatcgggtcttcgggagcgcctttgcgcacgaatccgccgccgatggaataccagacctgttcgtcgaccaagcttgcggcggcgtcgaaagcctggaatcgcatgccattggggtgcgcggccatgcgcttccattgttcgaacaccacgtcgcggtcgtagtcgaaatggatgcgtttgaggccggcgaggttcagagtatcgtccaacgcgcaggtctcgcggatgcgcatcatgtggtcggtatccacggtggccggcagattgccttcgagcccggccatcgcagcacgatcggtgccgtggccgagaccggtcagcgccagagaaccgtaaagcgtgattttgacacgtgcggtgcgatcgaccaaatggtcggccagcaacgaggaggcaaaggcatgtgccgcgaccatcgggcctacggtgtgcgaggatgaaggtccgacgccgatggtgaacatgtcaagcacactgaacatttggctccttctcccctgctggttcggcatgccggtgtcaccaggcgtcatgccatcacgatatcgtattccagcctagcgcccggaatctttcgctttgcgcgatgatggccgcgcgcgtcgtgccggcgagcgataagtcagtcagtgagatagtgcggagaacatcataaccagtacgatgataccgatgatggccaatacgatctgcaccaccatcagcccgatggtcagtcccttcttggtggcgattttgggcgcgtacgcctgtgccagcaggaaggcgatgaagccgaacaccgcgtagttgacggtcagggccatcacatcgctgttcgacaacaccacgccgttcagcggctggttcagcgtgttcatcatcgtgctcatcacgaacatgccccacacgccgtagccgattaatccgacgacgccgtacagccatggcttgagtttgtcgttggcacgcagggtcagggcttcggcacaccacaacagggcgaagccgacgatgtaggtgaacgccacggcgatcagtatcacgatagtcgcccacggcaggagtgcggccacattgccgatcatggacagatagaatcccgagcaggcgatggcaccaacggtgagtgcagtgcccgcaatgacggcttgggcaagcatggtgggcagggcgccttgttcgactcgttcgacatcggtccagcgtgaagccatgtggattcctcgtttcatcaggtacatcgtcacaacgccacatagcctaacggccttttgtttcggccttataagctctccacatagtaagctgcgagcccctctgacgaggggagctgtcggcgaagccgactgggggagagaccgcggcacagccgcaaaaaacggcatcggccacaggctgatttcaaggtgcctccggtgggactcgaaccctacggagaaaagccgcttagacttactcccgtctcgattatgcggctctcgaaacctcatttgcccacattttgcccacattctcacgcgccagcatctcacccatgcgctccgacagctcgtccagatcatcatcgaaaaggtcggcgtacacgtccaacgtcatggccgcgctcttgtgccccaactgccgttgcacggccttcacgttcgcgcccgctctgaccatgagactcgcggccgtgtgcctcaggtcatggattgtgaggtggccgggtatgccggcacgccgcaggccgaccgacagccaaccgtcatcgcggctcgcattaccccactcgcgtatcatcatgccctcgcgtcccggctgttcaaataacaggtcgccgggtttccggtctgcgcacagtctgcgcataatcgggtccagcacgaccgggtacatgatggcgcgggccttgtaggtcttggtgtcatcggggatgatgacgccgcccaccatcggcgcgctcactcctatatatatacgatgcttttcaagatcgacgtccatcaccctcaggggtatgagttcaccccatcgcatgccgcatagtccaagcacgaggacgaggtctcgtctccatggggtgacgctgcctgccagccggtcaagctgttcggcggtgagatacacgtgcttcttcctgcgcttgcgtggcagttcgatgcccctcgctggattgtccggaatacgccggtctttcttcgcgtcgtccaatattccggcgagcacgccgtgggcgcggaggacgacgctggcgcttcggggtttggcgagcacaatctcgttgccccgctcgtccttgacggtcttgccctggctgattccggtgacccattgttgcgccgtctcgcgggtgacggcggataccggggtgttgccccattccggtttcacccacttctcccacgctccttcgaggttccggtaatggctgggcttggtgcttagcttcttcttggctaaccatgccggtgccagttctccgaccgtggccttgccggcctgcgggtcgatgtacgtgccttcggccttggcgacggtgactcgtttcgccgcccaattttccgcgtctaccttccgtttgaatccacgcttgtcggtctgggttccgtccggcttgcgatacctcacacggtatctggtttcgcctttgctggtcttgtatctggtgacgttcgccattggtcagtcctcccccatcttagaattaaaggcatgggagctattcaggatgagccgaagatggtcggggccggtctcacgccgactactgtagccaatagcattctgcgccgggcattcggcacagatgagcacgtcacccccatgaaacttcagaagctcttgtttttcgtcacgtgcctgtatcagaggtacactggtcggcgattgcttaccgaatcgttccagccatggcagtatgggcccgtttgccgcagcgtctacgacgagttcaaaggattcggcggcaagccgattaatcggtatgctcaggatgctttggggaaggtcactgctgtggacgaatccagcagtccttccctgcgcaaagccctgaacctcgtctgggagaatatgggagacttgtccgccgtcaagctttcccgcgtcacgcatcgccctaattccgcatggtctcaggctgtggccgggcataagacgttcatcagcaatcgtgccatggcgggcgatcacacttttgataatttgctggggatgtgaccgatgcctgaggacaatgagaatgcatccatccccgatgacgcggaagaggatattccctttcccggagggccttcttccgaggatgtctctgaaagcgatggcgatggccacaagaccgttgagaacacgccaaaaactcaaggaatagatccagagaagcagcacaattggtggactgagaatctgaagaacatcgccgctcttgccatagtggctttttgtctcataatgattgcggcctttgctggcatacagttcggctggccgggtgctgatggtggtgatgcggtagccaaggcttctgacgtgttcaagctgattgccacgaccgcgttgggtttcctgttcggtcgtaattccaaatagcattttcgggtatgcttcgccccgtgtaggatagtgggcgaagcgtcctcctttcttgaactagctggattcttcaaccgccctgttggcgctgcaacgccggcagggcaatatttttatctaagcgattaacgcatacgtctccccggctcgtagaatcaaggtatgggtaaacatgggacgaagaagaccacagcgcaatctgtcataatgacagttctgtccgttctgtgctatacggcgggcgcgttctgcgcgctgttcgtttttgtcggcgcttggcctatgctcatcttcacagcgttcttcatctttatcggcatgttcgcatataaacatcgcttcgacaagagaggaggtgatccagccgtctctcgcactccagttgacgggtccacggtgcaaagaaaatcgccggacacgattcccgctccagctgagtcccatgttgccggaacagtcgaatacctcgtctacaactacaacgagccggttgtggcgaatattccgcgagacaggatattcaccgctgaaatcattcgacgcaggatgaacgtgcctttccatggaaacagggatctcggctatgtcctcggaggcggtaacggcaacggctatgtgctttcctacaacggcgcaccgttcggcgtgattccgaatgacaggctctgcgcctatcttgatgacgtccacgcacgcaccatcagctgcgtctggcatgaatggtacgaaccgaccatcaaatcgatcaaggctctcgcaccctccacacgaagaagccgtagcgaacggatcatagcgtccatgattggtgccggaaaatgggacagcgtggacgatgttgattccattaaagccagcgattataaaccgaacgcgatggcggacagtctgttgtccggcaggggcttcattgacatcgaggtgtccctggacatgattccaacgcctaagggctcctacgccaaaccgcatgtcggcatcttccacgacggagcggctctgtttgagttcgacgcgcggaagatggtctatggagagctggtgcgccacgccggtcagaacgcactggcccgagtcgaaaagaaactgtccaacgacgggaacggcagcccttattactccatcatgcttgtgttccaatcagacacctcctctcaggcgtgattactgcaaagtcatgtaggcattgctgataatcggtgatggtttgtatggtcaggtcgagctccgaggctatgagccaaggcgctcctccgtatgtttgttctgcttgacggtatttttgcgaatctactaggagccgcgctgcctccaatctggtacgttgctcgtgcattccgcattggtagtcggcgtgcagccaatggacgagttcgtgtatgagcacgcatttttttgcggtgtatgtaagtcttctgtctatgagaatgacgcggtttgcttctgagtagcaaccccacatattgtctaagatgtcgctttctacggtgacatctattccgctcgaataaatcgccatgcgcatggggccatagttcatgtgcgtgtcgaacggaataaggcgtttcatgccgatgcttctccatcgtggttcatgtaatagtcctttccctctgctccgtaagccgcaaggctgacatcgctcttgtgtgccagacgttttgtctccgctatccgcgatgccgtttgcgctttctcgtaggcgatgcgggtcatgtcggcggcgtttgctccgagcgctttgcatagatctccaaacacatcgatgggaatttgtctttgtccttttagatagcgaagaacggtgacgggactcagcccgacttcttctgcaatgtcatcgttggttttccccatgcgggctttttgggctcgaagctcttctgcgatagcttcggcaaattgatctccatattcggtcatggataaagaataacacatatcgggaagaaaattaaccatattgattaaaaactaacttgactaactatccaaatggtgcttacattaaccatatggttaatgtaagcaccacaaaacaggtggcaaataaaatcgcagccgcgctggaagccgcgaagcgctccgttaagtggctttccgaccaatcagggacaccctatgtgacccttcgtcgacagctcagcgggaaagcctccatttccatcggccagattgccgtttatgcggattgtctgtgtgtcgaaccgatgacaatgctccctgactcattcaccgcgctcgctggcaaggaggtggcgtgatgaaggacaagaaaaacccctgcggtgcaagcgcaggggcatggggaaatcaccagcggtgacattctcgccgggaccgcgtcacttgactcaaagactcctcagggcattcgaaatcgtctcgagggctgcattatgcgacttcaggatctcattctgtctggtgacgatccccaatatggacgcacaggaatcattgactctcccaataatctggagattgtttgcggaaatctcattcagatcctgaatgagatgcagggagtctctcaatcgctccagaagcaggtttctctgatcttgcatccgctgctcaaaagcggcctgtatctcttcaatcttggcatccgcctgttggtcgccggtcttcaccgttgctgggaacaccgtcgtgggagtgtcatctgcctcaagctgggcgatggagtcacgaagttcgccagcaatcttctcggtctcctcgtgagacttttcaaacgccgcgcgaaaatcttccgaaccgtctcttattccttttgccccctttcctgccgcggccacaatcgccccaatttcctccagggtctttgctccctgcatcacagtatctaaatccatcattcttccctccgttggctgtgtttttgaatgtcgcagttccaagcctaccggcggaggggccttatacgaaaagagaaacccatgaacgccaaagagtatggccgtcacgcttcaggctatcggaagccggaggccagcgaactgtctcgcggtttcacacgccgcctgattctgtgggccgtcgtgttcgcggtgtgcgtcggctgggtgatgacgcacatggggtgcgcgcatcccatcgagaacggattggccgcgctcatgggcttcggcttcgtgccgttaagactgatcgcactggtgttgagcgaggcgggcgtcgaataagtcttgccggacggcgtggaaaaccgtctggcatagcggaaggaaaaccgaataacccacgtgataactgaaaaaacaactgacagatacggtgtcggttttcttgggccggtggacgacgtttttcctgttcttccgtcgtccgccataagggcggctgcaagttgcccccggcacggccgggagatggtgcgattccatcgccgtccacgaccgcaaggttacgcaaaaaagaaaagccccagcggctactggggcggaaagaaactccactagaaaggataccccaatgagtgcgccgataccaaacctgatgacggtggaacaactcgccgaacattacgggaaggcgaagaagaccatccagaacaagctcacgcgaggctgggggccgacgccggtcaccgaccccgacaccatgcaggtgctgggcttcgaggtcgaggaggtggcccgttttgaccgcatcaacaagcagacgcgcaagcagcgcctctacgcctgacgtgccgaacgacatgtggcttgcggtcgcggaccggctgctcaccaaccttgacatcctgaccgcatatcccacccggcagtcgctggcgagcctcatcggactgagcatccacgaggccgggctcacgttaacgccggagacgccgttatgggcacggcaacgttgaccgcgcccataacggacgaggggatgcgcatgacgcccggcgagctcatagaggaattctatgagcgtctggctgatttgaacacggacatgcgtaacccccgcatctatctggtgccgaagccgggtgtcatcacggtcgaccggccgtcgcgcagggtctcggcggtcgtggaatacgcagacaagaaacatttcagaaggagtaggtgatggccggagagacgacgctcaccattgtgggcaacctgacggcagacccggaaatccgcacgatcggcaccggggcgacggtcgcgaatttcacggttgcttccacgccgcgcgtgtggaaccgtcagacgaaccagtacgaggacggtcaggccctgttcatgcgctgcagcgcatggcgcgacatggccggccacatcgcccaatcgttgaagaagggcgtgcgcgtgatcgtgacgggccgtctgcaacagcgctcctaccaggcgcaggacgggtcgaaccgcacgatcgtggaactgcaggtggacgagataggcccgagcctgcgttacgcggtcgcggcagtggccaagcagttcaagcccaacggcttccaaaacaaccaacagggtcagcagtcgtattcgggtggctccacgtacggcaatccgcaacagtcgggctggcagcaggacgcgccgcaaccagccgccaacgacccgttcggccaaccgcaacaaccgcaatcgccggagcaggatccgtgggcctccagccagcccgctcctccggccgatgggccggacgacccggaattctagaggaggattttcatgtcgatatccatagtggacattcccgtctcccaactggagccgaacccgcataatccgcgcagggacgtgggcgacgtaagggagctggcggacagcatcagggcgcagggcatcaaacaggagctgctggtcaccccgtccggcgaccgggacggcaggcccatgtaccgcgtggtcatcgggcatcgcaggctcgcggccgccaggctcgccggcctggacatggtaccgtgccgcgtggaggagctgtcggcgcgcgaggaacgcgagctgatgctcgtggagaacacgcagcgcgtggacctgaccccgttggaggaggccgacggctatcaggggctcctggacttgggcgtgaaggtcaaggagatggccgaacgcaccgggcgcagcatgagactggtgcgcggccggctgagaatagcgtccatcccccgatcggtgcgcgaggcgtcgcccgcgttcgcccaactgtcgctctccgagttggaggacatcgcggaattcgacggcgacgagaaggcgcaggccaggctcgccgccaaggccggttccaatgatttcgaatggcagcgcaaccggctgcgccgcgaacgcgaccggcgcgaatgggtggaggccgcgcgcctgtgggccgaatccaacaatctgcccatgctgcccgacaacctcaaaccggaggacatgtgggcgaacccgacaggctacgagaggcagcggcgtttcgcccaggattatcccggcccgttctccaagcagtggaaggactggcaggccaaggggaagcaccccggcgcggtcatccgcatcttcgacgacgagggaagcgtcgtggcctacacgccggcgaagaagacagccgaggagagggaagacgggaaggccgaagcgaaacgccggatggaacgggagcgccgccacaaggtcagggagctcgcccaggcgtcggccgaactgcgctgcgaatggatccgaacaaccgttcccgtgttgaaggcggacgcgctgcgcgacatgacggaacgcctgaccctgttggagctgatgggcgtgggcgattcgatgagaggcacgagcctggactcgaacgggtggacccgcgtggtcaaggcgtactccctgttcgccagaccgttgccggtagtggacaaggacccggagcatggcgtgtacacgctcaacgtggcggagaacgccctggagctgcgccgccgccagtcggtcccctcccgtcggggcgtggagcttctgctgctcctgctggcccgcagggagggcgcgatagacgcggacacgtgggaccgtgaggcctaccagtgcgacctcaagggtttgaacgcctactacgaggtgctggaatcggccggatacgcggtgtcggacgcggagatgaaggggctggagcagtgaacacgaaagtggttatcagggtgcgcaacggcgatgacgcgccggtgagcgtggagcgtctcgtggtggattcacgcgccgaggtgggtgcgggcgtcacgccgatgctgctctcggacatgctggccctgctggacgattcgtgccatgtgaccgatgtggagatcaggagggcggagccgtgagcatcgaactggtggcgaaggccaagaagaccagattgcatggggacagcacggcgaaactgctgcttatcgtgctcgcggattacgcgaacgacgagggcatggcgtggccgagcgtgaagaccatggcggaggagacggagaaaagcgaacgcagcatccaactgctgttgaggaagctcgaacagatgcgtctgatccgcaagggcgaccagaaactcgtggccaaatacgcgaagggacgccgaccggtcgtctacaagctgttcccgaagaccaaaaagggcgaaaccccaatggacgcaacggttgagaggggtgaaacccacttcacccctgaaaccgactgcaccggtgaaacaggcttcaccccacgggtgcaacccacttcaccccacgggtgcaacccgcttcaccccacgggtgaaacccacttcgtttcaggggtgaaacccacttcacccaaaccgtcacaggaaccgtcaatagaaccgtcaagagagagtacgcgcgcaaacaaaaccgacaccacacgactccaagcgctcgccaacctcacccccgaccagtcacaccgccagctcgcagacgaaatcggactcgacctcgaaaccgaactcgcaaaattccgagaccacgcgatagccggaggccacctgccagccgacccagccgccgcattccgcaactggctgagacgcggcagggaactcggcctcggcaacaccagccagaccacgccggcgctcgcaggcggcttcggccaccccgcaccagccaggaaaccccaccgtcacagcttcggctgcacgcacgtgctcaacctgctgaaccgtgacgcgccggacaacgatccgctcgcgatgcgcgcggcggaactgctcaaccaaggaaaaaccgaaaccgaagcgctcgccgccttgggactcatgaaggacgatttggaggaaatcgcatgaccaggaaaaccgaagccctcttgtgggtggacatcgagaccaccggcacggatccgcgccacgacctgatgctggaaatcggcttgaggtgcacgagcatggacgcgaaaaccgagtacgcgcgttacgagtcgataatcaaacccgacgtactgcccacggaccagagcttcgcctacgcgcatcggatgcatgaggcgaacgggctcatcaacgaggtcatcgacgcaagccccgaactatgctccacggcgcgggtggcgctcgccgtcatcgatttcacccagtcgatggcggaaacgcatgtgctgcatccggcgggcacgaacatgatgggcttcgacctgccgttcctggagcattacctgttcgccgaggaccagtggggacgcttccacaagctgctctcctaccgcgcgttggacatgaccgccatccggttgacccaaaccgcgttgggagccgacccgtacgagcattacacgcagacgaaaccgcatcgtgtgacggactgcctggacacggacatcagcgaatacatcgaatggctggacctcgtcaaatgagccgcaccaaccccacaagggaaacacacaggctgaccgccagacgagaccactaccggtgcctgcgatgcggcaacgaattggaccacatctggagcggccacagcctccaccaccggcacatgcgcagccacccgttccccggactgcatctgccagccaacctcatccatttatgcggctccggcaccacaggctgccacggatgggtacacaaccatcccaaaacggcgatggaatacgggtggatagtcagcatgggcgaagaccatcccgaaaccgtccccgtatgggacgcgcaccaaggctggctgctcctcgacaaccagggcggatacacgctctgcgacagggacggcaaccccagataacacacgcaagcaaaccgacacggaaacaagccggcgctcgccggctaagggaagggaagcatgacgttcgaacagacgaacgagaagcaacgccaacgcatgaaggcggacgccaggtcgcacatggaagcggcccggatgatactggccagcccgctctacgcgaggctcaagggcggcgaggacctgtacacggccgtctgggcgttgtgggaatcactcgccggcacgggattgtcgaccatgaaggcgggcgcggtatgccacgcatgcaagacccatgacctcgaccaattggattgggcgctcacatcgatagccgaaaccgggtcgatacgaccatcctccacacccgccaaacacccattgcactgcaccaactgcggcaaggaatgcaggccgcacgccggcaccgcgatcatgtgcaaacaatgcaaggaaaacctccgaagaagaaaaacaaaaccatgaacaacctggacaagtacatccaccgatgccggttgaacctcgaaccccaccacctccaacccgcagacgaaaccgacgacaaacattgcatcatctgcgacatcagcggcgctcgccggcatatccgcatggacggtctatgcatcaactgccacctcaaatggagacgtaaacacgaccccgcataccgcaagcgggtcaacgcctaccagcatcgatggcagcaggagcatcccaacgaattccgcgaaatgaaacgccgctacgagcagaggaaacgagcaaaggaacaccaatgagcgtcaaaacctacacagactccaccacacgaatcatcaccaaaaccatcgaagaacacgtctgggaaatccgctgcgacgccgtcggatgcaacaacagcctcgaattccgggaaaaccaggacaccggagacatcacagcagacggcgactacaccggcgacatggacaacgaatggctcaacatccacgacaccaacaccgccatccaaaccgcactccaacacggctggcaagaaggcaacaaaggcatccaacgaggccacctctactgccccacacacaacgaaaaccaataaaacaccaacaaccaaaaaagaaacaacgccggcgctcgccggcatagggaaaggagagccgatgaccgcactgcttgttggacgattgcgcgaactcgcgacgcagacccatctgctcgagaagaaagtggatgctctcggctggatggccgccaacggcccgcagacattgaactcaatgacccgcgcccaggcgcatctcatgctcgccgaacgcgatctgctggacgcaatcgaaaacaacgaaaaggaggagaatgacaatgagtgagaaacccttctgggaaggcaagacctgcgaggagatggccggactacccgtcaaggccgtgttcaaaaacggtgtcacgattactggccagctcagccgtttcggcggtatacccatatccaccgaaggcatgaacagtcccatcccgatctcgtccaacacgttaaatttccgacctcacagggaaatctcctccgtcgaactgttggattccctagagtacgagcgtatcgacaacatcgaggacgtgcgcgaaggcgacgtgtacgtcggcacggacggcaaccggtacaccgtcttgcgacgcactacgtccaatctccagcccctgacggtagcagtcatcaacacgaccttctacccacaccgttcctacttcggctacgctttgcgtccaaccccgaagctccccgaccatgacggactctggctggacagggtcggtaacacgtggacgatgtgcgacggcaaagtgcgtatcatacgcactagcgacggtgattggtgtttcacgcgcccatggttctatacggacagcgtgcaggtggtaaatgccggcccgttccgccctgctaaggtggtggaagcatgagcatcgaggtgggccaaaaataccgaaacaaccaggatgttgaattaatcatcatagccaaggtggcttgctttaccgcctcccgatctggcatgtatctaggtgtagacgtgctaccgggaacagaactgttcgtcgcggacgacccatacagcacaggctctgacgtgattgttaacgagcagtctctgaccaaatgcggatacaaggcggtggaagcatgaacatccacccgatcattgataaacctccatcgtttccgcaaactgtcttacgcctgctcacaggcagcactcattgctgtgactggtgcgagaaacgctggatcaaggttcaccgcactggccaattggaatgccgaaaccgtcgatgtccctactgcgggcaatacggatgcccccgagccgaaaaacactggaagaaatgccccgtgtggaattacatgaccccgcctgcatggctataccccgtgttggatcggctctgcgaaagagatctgcaacgaatggcgaagaaatcgaggaatgatgcgtgacacgattctgtgcctatgcgacctgaccggggttatggcccgaccgtgggtcgaacacgggtatcgggccgtgctggtggacccgcagcatggcatcacccatgaggatggagccatgctgaaactggcctgcaccatcgaagaggcgttcaaccagatcagcgtgctattgcgttcgggtcgtctcgctttcgtggccgggttccctccctgcacggacatggcggtgagcggcgcgcaatggttcgcccgcaagtacgaggccgaccacttgtttcaggcgaaggccgtttccgtggcggaacaatgcagggtgataggtgagatgagcggtgtcccctacatggtggagaacccggtgtcggttctatccaatgtgttcggcaagccctcccacacgttcgacccgtgtgattacacgcggttcgcgccagaggacaactacacgaagaaaacctgtctttggacgggggggattccaaatgcctcctcgcagccaggacatgagtctgccggctcccgaccggaatcgtatctggtacatgagcggcaaagaccgggccaacaatcgcagcaagacaccgttgggcttcgcccgagcggtatacgaaaccaatcacaaggaggaaaacagatgaatcttttagatgaaaccaagagtgcgatctcacaaagcgagcattcgaccgatgacgttcgattcgtaggctcccgcgacgagaagctgggaattccgtggagtcaggccgaaaaggtgctcgacatcgattacgacgccggctacggcggacaggagatagccgccgatctggtcgtggtgttcaccgatggcgggttcctgcgccgcgaagaatacgacggcagcgaatggtgggaatatgagccaccgttcagaggcccggagacgcagaagccgttcaaactcgtgaagctgaccagctatcgcacacggttgcttgtggagatcaattatccgatggaggcaacggaagaatgagcgacgaaattgaatccgtgtgggcggaaagaacggtctatatcaccgccgattgccctgaatgcggccacgcgtacgggttcctgaagggtactcgtgatgacgagatcatcggtttcgttgcggagtgccaggaatgcggtacgaaattcagaatctacggaatcgaggaatgatgcgtttccacaggattagcccgtgtcccaagtgcgggggcaaggtcaaggtgaaatgggaggcgtatcagcttctgtccgcgctgattttcaaatgtggggaatgcaagtacacgtgtcttatcggaatgcgggaaagacccaaaatgccgtggacgctcacgaaggagtggatactcgccgcttccatccgtcgttggaatgcgatgtgcaacggcgaccggaaatacaagctgattcgcgagagtctgggaggcagacgatgagagacaaggcgatgccgttgggcaagaagttcaaggtccggttgaccatcacaccggaggaaaccggaacgcccgtggacatgctgggattcacgttcaccagcggcaagaacgggcatacgacactgaacgcacagtacagcaacattcccaaactggttgacgacgggctcgactcactgtcgattctcgtgatcctcaaaacactggagatgtgggcccagaagggatatgagctgtgccagcccatcgttcaacgattttacggaggcagacgatgagctataaggcgaagatattcacccgcgaggagtttcgagaggtcgtcgcagccgccatctacgactacgaacaagcgcccgcgaaatgcctctacacgaccaaggatgcggcagaccaactctacggccattacggcgaggaaaccgaggtggaggaatgaacggagtacagcttaccaaccatctgaccgcgcaattcagggcctcagccctgagccggtacgaggccagaatcaccgaggacggcgacttcagagtctacatatacgccatgagcctcaaacgtctcaaacgcaagtgcgagaggtacgcgaaacgtgagcgcaaggccatcgaatatgtcaccacactcaaggaggaatcatgagcgcgacgaacaaccagcgtgagatgatactcaaatggcataaaggcaaggccgcgacacccgagtacacggcgaaactcctcggtttgccgttgagcgaggtgctgtacgtgatcgagcatcccgaaccgccgaaatcacgcgcggacgcgtggacaccggaattcatcgaaccactggtctgaaaaataccgataaacacacgcgaatacatgactgaattcagcgtaaaaacactgaatccaacgaaagacaaaacgaaaccctccaccaacaggcggagggcacgctcaccaaagcaccatcatagccggaacgtggagggtttcaacataatgttcatcaccaccgaaccatgccaatactgcggcagccgacaggtcgaggcaccatggacgctctgccgggactgccgccgcgtctacgcgaaaacgctccaccggctccgccgcgacatgatgctcctgcaacaggtgtcccgtcacgcctacaagctcggagaacccggagcgggcggcaaaccgcaaggaggcgcggcgcccgcgcccatcaacctccacgcgcaggacatgctcgaccagatcgaggacggcttgcaggacatgtggaacgaaaccggcgtggaaagccgtccgagatggcagaccctgctcagggactcgccacgacgactgcccgacctatgccgcgccagccgttcgggacattggctgacatggctcatccacacctgcgagcgcatcgaaccgctcgtggaccgcaggccacgcacgcgccggataatcggcgtctgccccgaatgcggacgcgaggtcatggccgcgaagggcgaatcactgctgctgtgcaaatgcggcaaccccatcaacgtgcaggagctttgcgaacaaagccaagccaaggccgaatcaatgcacctgaccaagacgccggcaggcatgagccaatggctgcgcgagaactacgggtacgaggtaagccgaaagaccatcaccgacgcattgcgccgcggcaaactacccagcagcaaacccatcgaagacggttactgggagttcaacatccgcgaaattgtggccttcggcgtgtccaagactcgacattaaaacgacatccaaaacacctgacacgcgaaacacaaaacccaagcgggagtaggctgccgccaccccgtggtatactccgtatcaggataagtgcgaaagcctctgggacatacatctcaggggttttacttatacccacctatgcgcgtagctcagcaggtagagcagcggtctccaaaaccgcaggtcgtcggatcgaagccaaccgcgcatgccacggcttgcgtaccgcagaggaccagccggccatgccgagacagcacggcgacccgcaaacacgacaaccggtccgcgaattagaatctcgcccaagccaccaaacacacaggatgggaacatgagcaacaaggcaggctcaggccgataccaaaatggagcagcccgccgcaaatgcaaggccagacacatcgcagccgaaggaccaataccgatctgcccgctgtgcggcaaacccatagacctcacgctcaaaacaccacacccactcagctgcgaactcgatgagatcatcccatacagccgaggcggatcaccaaccagctatgacaacacacaactcacacacagaatctgcaaccaaagaaaaagcaacaaaataatcgccaacaccacaggccaccaaaacacaaaaaaacaaccacaaaacaccatcccaatcagccgccaatggtaaccgggggccataccctccccctcccatgcaaggctccccacaggtcatagcgcccgcatccccccgcaacccgtgtggagtatcgtacgtttggccgctggggtgtctgcgagcgcccgtggaagccgttccggcatggttttgatgtttttgccccgttgttttccgaggctgttacgtttgattctccgcagttttgatatgtcacgaaattagtgttgcgaatcgttggaatatatgctatagtaatagctatggtcaaccaatgtaggaattgcggccatttcttccaactcacacctaaccctaggcgtccgagactgttttgctcggacaggtgccgtaaggcgtggagccgcaaacatcagataccccaagcgctcagggcattgcgccgttgggtgcgcgccgatggcaagcgcccgatccggtgcgatggttcgccggccagttcgaccgaccccgatacctgggcgtcatacccggaggtcatgcgctcgaaggccggcgacggttacggcatcatgctcggcgacgggcttgcgtgctgggatttcgaccatgttgatttgaccagtccgcccgataaggcgttggagctgctgcccgaagcgatctatgcggaggtttcgaccagcggtcacgggctgcatgtgttcgtcctgtcgtcggagccgagtttccggcgtgccggcgtcgagttctattcgcattcgcggttcatccgcatgaccggaaggaggtggccgaagtgaccacggttatccgcaatcagggcacgagcctcgcggtgcgcgagaaactggccgccgatggcaagcccgtgttgttggcgttttcgtgcggcaaggattccatcgccgcgtggctggccatgcgggacatgggggtcgaggtcgttcccgcgtacttgtactatgtgcccggtttgaggttcgtggacgaggagctcgattatttcgagcagaagttccagacccgaatcaaaaggtatccgcacccgtcgctgtatcggtggctgaacaatgcggtgttccaggctcccgagcgtctgcgctatatcgaggcggcgcggttgccggagccgtcgtatgagcagatgtgggatttcatccgcgccgacatcggtttggacaagaacacgtggtgcgcggatggcgtgcgcgccgccgattcgattcagcgtcgcggcgcgttcgtccagtacgggtactggcggcgcaatctcaagaaggtcagtcctatcggggattggctcaagggcgaggtgctggactgcatcagatcgcatgatatcgagctgccgtgtgattatgcgtggttcgggcgttcgttcgatggcatcgataagaggttcaccaaggtgctcaaggacaaggctccggacgattacgcgacgctgcttgaatggttccctttgttggaggtggatcatgtcaggtgatttcaagttctctttttccaagaaactcaagggcaagaaggctgtgaagccggtgccggagaatctggacgagaacgcgaaggagtaccgggagcgcgcccgtgcggagcgcaagcgtttcgtggatgcgaccgacaccgagttctggctgtgcctgtgtttcccctcccccgttgagatggcgcggtggtgtgaacggtatggtttcggcgatgaacaccgaatctatgcgtaccgtgatgtcgagaagctactcgccccgtacaagccggccaagtcgtccgccgtggcgttcggtgccggagtcgggttcggtggcggcctcgggttcgcggagaagacgcccgatccgctcgccgatgtcaagtactccgatgatctggaaaaggattgtctcgccgagttcgccgccctgcacagggcgctggtcgaggctcgcagtcccaggaagctcgtggagccgaccgattccgaacactggttcgccatcgcgttcccgttgcgagacgacaaggactctttccttgccgagtatggtcttcgcaagctcggcgacaagtacatggacggcatggccgtcatgaagaaacttggcgggtgatgttccgcctcctagagtttggccgctgtgatccgcagcggcttttcttatgccacgaaaggaggtggattatgcgaaacctgttccagcgtgccggcaatgcggtgcgtaacgttgccggtcgtatccgcagcgctttttctcgcgggggctcgcgttcctccggctcctgatcttgttgtctcttgtgattggagaatctcgtggcacgacacacaaaggttcaatctgaatctgaattcttggccgagcgtggcttgtcgagtccgataagcggttttgcggacgacaagatgcgctcgaaccggcagattcgcaccagccgcggagcgaaggcattccaaaaagccgctcaacgcgcgtcatctgattaccatacgcagagagaatccgcacgtgcggaataccgttctcgggttcaatccggcgcggtacgtcctccctcttccgttgaaaaagcattgaaaacggcgcagggtaattccgataatgaagccgtaagggccgcgcgtcgtattctcgccaagcgaggtattgactggaaaaccggcaagcgactcgctcgggggaaagtggcgtcccgttcatctggctcctgatttcccgatggaggtggttgtcatgcgtccgagatacgtgcagggcgagtttgatttctctcgtgccgccggttccgctcgcgcgagtcgctccagcggctcctagacattgattcgaggtgatccagttggccaagaccacgataacgcatccacagttgcctgacggcatcgaatggccggaggcgaccgtgcgatggtgggagcatttggcttccacccccggcgcggactcgtggacggaggccgactgggacaacctcatgaacgccgccctgatccacgcggacatctggggttccggcaatttcgccagcgtgcccatactgaacaagctgttgcaggattacggcatcacgcccgccgcgcgcagccagatcacgcaggcgaaagtgaaacagcaggagcggcatacgccgctcgatgagatagccgaacgacggaagctgagggtgatcgagggtggcaaggcgaagaggcgtacaggaacctagcttcgctctggttcccaagcacgcgcagtccgagggaggcgaggcgtgcgcgctcgccgccggctacgacatgaagccggataagtggcagcgtatcgtgcttgatgggtggctcgccacggattcgaagctgcaatgggcggcgtcggattgcgggtgcgcggtgccgcgccagaacggcaagaacgcgattcttgagttcacggagctgtaccttgccgcgatcctcggtatgaagatcctgcacacggcgcatgaggtgaagacctgccgcaagcatttcctgcgcatgaaatactacttcgagaacgcgcgcaagttccccgaactgtcggaactggtcacctacattcgggccacgaacggccaggaggccatcgtgttgaagaacggtggcagcattgagttcatcgcccgttcgaagagttcgggccgtggcttcacggtggacgtgctggtgtgcgacgaggcgcaggagctgaccgacgagcagatggaggccatacagcccgccatctcgtcggcaccctcgggcaatccgttgaccatctacacgggaacaccgaccccgccgacctcgccgggcacggtgttcgcgcgcatgcgccgcaacgcgcacagggacaagccgccgaagaacctgtgctggttcgaatgggcggcgaccgagataggcgacgtgcacgaccagcaacgctggtaccaatacaatccaagtctcggcacccgactgctgaaaagcgtggtcgtttccgagtcggagaagatgacccctgacggtttcgcccgcgaacgtctcggctggtggaacgatcaggccggcgcgctgtccgacatcgacttggatgcttgggccgaatgcaagaccgacaagccctgcatggacggctacaactcgtatgcggtcaagttcagcgcggacggcgcgaacgtcaccctcgtggcgtgcgtgcgcccgccccgcaagtcgggtgaattgcctcacgtggaggtcatcgcctcgcgcagcatgcgtggcggcaccggctggctggccgactggctgaccgccgagaaagacggtgcggaacggtggcgcaacgccatcggcatcatcatcgacgggcgcgtgggagcgcccaccctggtcaacagcctcatcgacaagggcgtgtccaaaagagtgatcgtggttccgcgcccttccgacgtggcggacgcttgttcgatgctcgaacaggccgtgaacgaccatgggcttacccatttcggccagcctctgcttgacgaggcggtgggtcatgcgaagcacaggaaaatcggagacgggttcggctacgagacgtccatggagaacatcgacgtgagtcccgtggaagcggtggctctcgcgtattggaacgtcaagacttccaaacgtcatccgggcagaagagcgaaggcggtggcattctgatgcagattcccagtcttgaaaacgtgcaggtcgataatctgcccgacgagtgccgagaaccgtgggatttgatgatacgtcaatggtcccagaagctcgaacgtaaccttttgcgcaccaaatactacgacggacgaaacgagcttaagaatctgtccatcgctgtgccggacagcatggcggggataagcgaggtcgtgggctggccgcagaaatcggtggacgctttggccgaccgcatcgtgttcgatggtttcgttggagtcggcgacgacggccgcgacccgttgggtttggattcgattctttccgacaacgacttcgacgtggaactgccgcaggccatccgcagcgcgctcacccattcatgctcgttcctgaatgtgcgcagcgcggaacccgaggatggtctgcgctcgaaggtgtcggtatcgttccgcagcgcgctctatgagaccggcctgtgggattacgcccgtcgcggcctgtcggcggcgttgtcgataaccgatatcgaccgttcccagtacgcgcaggcgaacaccatcgtgccttccgagctcatgctctacatgcccggctacacgattcgtatacgccgcgcgcaatcaggccgctatcatgcggacgctccccggaacacgtacatggatcatgtgcccgtttacctgatcccctaccatcaggacctgaaccgcccctttggccgctcgcgcatcagccgcgaggtcatgagcatcaccgacacggcggttcgcaccatgctgcgcatggaggtaagcgccgaattctattcgagcccgcaacgctacctcatcggcgctgacgagccgcccgaggacaagaacggcaagaagctgaccggctgggaagccaccatctcgaagatgctcaacatcagcctcaacgaggacggccaggcacccgccatcggccagttcacgcagatgaccatgcagccgcacaccgacatgcttcgcgcactcgcggcacgcatgagcggcgcgaccggcgtaccgctcagccagttcggcgtgatgacggactccggcccttcctcgtccgacgcgatcatggcggcggaaagcgagcttgtcatcgaggcgaagaacgcctgccgcgccatcggcgtgcagctacgcaaggccgcgagggacatcgccatactcaacggcaccagcgaggacagcgacgagctcgaccgcctgcaggtcaactggcgtgaccccgaacgcccatcgcaggccgcgctctccgatgccatcgtgaagcaggtgacggccattccatggctcgccaactccgacgtggtgttggagaagctcggctacacggattccgacatcacacgcctgttggccgacaagcgcaaggccgaaacccgcagcgtgcttgactccctcgtgaacggaggcaacaaggatgacggacaaccggcaactggaacagctgcaagccagccaagccagggcggtggaactggcacgccgcgatctggcgaaactgtgggagacgctgcaacagctcagccctgaatggcagcgtgacatgctgctcgactacgtgccgcaactggtcgtcaaatacggcgacctcgcggcgcatgccgcctatgaatggtatatgcgcgtccgtggcgaatcggtgccagacccgtgggagtacgacctgtccgactctttccccggcgacggcatcgacaagaccatacgctggcaggccggccacctgtggacggacccgcagaccatgcaggcgtatctggtcggcgcgatgcaacgctgggtcatgtattcggggcgtgaaaccgttgcccgcctgtgcgagcacgacccgtccgaaccacggtacgcgcgcgtgccgagaggcgcgaagacgtgcgcgttctgcacgatgctctgctcgcgaggctgggtgtaccacagcgagaaaaccgcgaaatacgccaaaggctcgttcagcctgttccacgacgactgcgactgccagatcgtgcccgaatgggacagggaccaagcgcacatcgagggctacgaccccgaccgcatgtactcggaatacatgcacgcccgcagcctcatcgagaacagcggcctggacgacgacacctatcggatgataaaggccaccacaaaaggcgaccccgagaatccgaacgacccgaacacgatcacctatgtgatgcgccgactctaccccgaccgctacaaggacggctacggggtgccacgaccatcgcactcgaactgagattttccacaaccacccgcacgggtggtttttttatgcccgaaacgggcccaacccactaggaggaaccatgaccgaagaggccaacggcaaccagcaggcggcatcgaccgagaacggagcgaagccgcccgaaatcgactacgaggccaaatacaaggaggccgtcgcccattcccgcgaatgggagaaacgcgccaaggacaacaaagcagccgccgacgagctgcaacagctcaaggaggcccagctgtccgaagccgaaaagaccgccaagcacatcaaagagcttgaagccaagaacgccgcctacgaggcggaaaaacagcagaacgaatggaagacgcaggtctccaaggaaaccggcgtgcccaccggactgctgcacggctccaccctcgaagagatgcaggccaacggaaaggcgctcgccgactacatcgccgacaaaaccaagcccacggtgcacgcctcatccgaatccaaccagccgcccgcaccttccggctcgtccggcgattggctgcgcgatgagttcctcaagcagaaacgcaaataatccacctcatagaaagaaggtatgacgatgtcttccaacgtgaactccatcatcaccagcggcgacctcggcggcggactcatccccaccgaatacgccacccagattatccaagacgctcccaagtcgagcgtatccctgacccgcatgcgtcagattcgcatgagcacccgcacgcgcacgcagccggtgcttgattccaagccgatcgcctactgggttggcggtgataccggcctcaagcagaccacgaagatgaaatggtctggcctgagcatcacggccgaggagcttgcggccatcgtgcccatcccggaggccgtcatcgcggattccggcatccccatctggccggaggtcatgccgcgtctggcttccgcgcttggctacaagctggatcaggcgacactgttcggcgtggacaagccgtccagcttccctgacggcatcatcccgcaggccatcgcggcgcacaacatgctcacccagggcaaggacctcgccaaggacgttgccagcatgggtcagaagctcgccgaacagggcttcgccatgaacggcttcgccagcaagccgggcctgaactgggaacttatcggcctgcgcaacgccaacggcagcccgatctacgtgccctcgctcgcctccggcgcgccgtccaccctgtacggcttcggcctcaacgaggtagacaacggcgcgtgggataccaccaaggccgtgctgctcggagccgactggtcgaacttcgtggtcggcatccgtcaggacatcacctacaagatgcttgaccagtcggttatctctgacgataacggcaaggtgattctgaacctcgcgcagcaggattgcgtcgccatgcgcgtcgtgttccgcgtcggcttccagatcgccaaccccatcaacgacgtgcagccggacaagagcaagcgcttcccggcgtacgtcatcacgccggcatcggtgaccggcagagagtgatggccatgggactgaacaagcagatacagttcgtgcgtcaaccgaagccgactgacggcgagattatcgctcaggtggccgtttttgacggggaaggcaatccggtcgatgtcggcggcgctcccaccgccgacacgcttgccggtgccaccgacaccggcaaggcggtgctcaaagccacggatgcagccggcgcgcgcaaggccattggcgcgggaacgtccagcttcagtggaagctacaacgacctgtcgaacaagccgacgattccgcccgcctacacgctgcccgccgccacggctgaggcgttgggtggcgtcaagaaaggtgccgcgatcccggatctcgcgagcggcgcggatgcggcggtcatcgccacgaaggtcaacagcatcctcgcccagttgcgcgcgatcggtgtcatcgccgtctgacgtggggaggtgcgttatggccgacgaaacggaagaaaacccatttgccacgcatttggaattggccaaacgctggaagcagatgccggacgacccggattatgttgaccagcggctggccgatgcatcgcagttcattcgcgaacagtgccccgattggaggaacatatcgcgggcgacgcttgaacgcatcgcctgcgagctcgccaaggatgtgatctcgtccgacatgcagaccgagggtgccggtttcgatacgaccggcgccagcaatctcagtctcacggcgggcgatttcacccagtcgatgactttctcgaatcctcgcggcgaattctacctatccaagggacagaagaaggcgctcggcctcaccggccaacgcttctacagcgtcgacctgtcaaatggggaggcgtcatgaggggcgagaccgtaaaggtgttgcgctacacgccgaccggcgagaacgaccccgctggctcgcccgtcacgaaggttgatatcgagtcggttgggaacgtgttggtttcgccgggcggcatgtcgaacgccaccgactcgctgcgccccgaaggcgtgacggtggcgttcacctgcctcttcccccgcagctacgcataccggagtctgcgcggggcgatggtgcgcatcgattcccatgactacaaggtgatcggagacccgaggcctttggacggcggcatgaaaccgaccgcatggaacctcaaggtcgaagtcaccgacacggatggatagggcatgaaacgggtgaaactgaattattcggcgtttcaggcataccggcgcaacgagggttccaaggccgccgtcagcgaggctcggaagctcgcggcgagggcgaacgccatgggctcgcccacacacgcgggccagcccctgtacacggcgttgggccctcaggccaaccccaagggagccaccgcgctcgtgcacacggagaacaccgccgcgcgcttcgacaacgcggcccacaacacgttggccaaggcgttgggaggtggcggctgatggccgtgaacgctgaaaaactcgtcatggactggctcaacgcggacccgacgatcaaggccgaatatccggccagtttcgacgtgcccgccgaatcatcggccacgcacccgatgccgttcgtcaccgtcgaacaggtcggcggcacggacgaacaattccgttcgctgcccctggtcgcggtgcaggtgtggggcgagtcgcgctggctggtctccgaggccgcagcgaagctcatactcccccgtctcaaacgtatcgtcgagctgcccgaggtcgccgacatcgacatcaccggccgcacgcatttccccatgccggacggccggccccgctaccagatactcatacaactcaccgtcaaatcagacgactaacgaaaggtctaaatcatgactggttccacaaccaacgattccaccatggtgtcgttgggcaagttcaaggtcggcggctacgcctactgggcaccgtccggcaccgcgctgcccaccgattcctccaccccgctggccgcggcgttcaaactgctcgggtacctgtccgaggacggtctgaccaacacgaccgacaccgacaccaccgagatcaaggacgccaacggcacgacagtgatgaaggtcatcaccagctacaccgagtcctaccagttcgcgctgctggaggtgctgcgcgcagaggccgcgaagctccgctacaacgaggacgcggtcactggcagcgacaagagcatgaccatcaagcatcagatgccctccggcgagggcttcgtgctcgtgttcgagatcgcgatgaccggtgacgtgaaggatcgtctcgtgatcggcaacgcgacgcgcgccgagttcggcgaccgtcaggtgcatgcgggcgacgcgcaggtctacgacgtcaccgtgtccgccaacaacatgggcaacggcgtcaccgccatcgaatacatcggcagggccacggctgtcagcgggagcgccgccgtcaccgaggccctgctcggcaaggtcgtcgacccggccaacggcgacgagaacgccgaaaccgccgaagaggttccggccgccgaatgacggttcttcccgcgtcgcgcttcgaacgacttcccacgacgcgggaaccttttcttcgttcaaccgtggaagtcgttttcactagtcttttggagaagtcatcatgtcacgaaaccgccaccgttccggcaaccccgccaacaatgttcccggcagccgtccgcaggatcacaagcccgcgcagggcaagccacgcaccgtcaccgtcaaagggctcgtcctgacactggacccggccaagctcaacgactgggagctcatggaatccctctacgacctccagtccgacccacagaacaatgcgctgagcgtggtaccgttcctgcgcggcatgttctcagccaaggactacgggcgcatcaagaaccgtctgcgcgaccccgaaaccggacgcatcaccggagacgccatgggcgagttcctgcaggaactgttcgcgcgtctgaacgaggaatccccaaactcctgacgctcgtatacctgctgcatgcctgccccgaccagttggcggcggacatgcggcgcgtatacgggcttagcgtctatgagctggatccattggaagcggcagcgctggcggtgaacctgcctgcgggctcactggtgtggcagaggctggacgttccggccgcctggacgctcgaccagtatctgatggccgcgcggatcgaccagatgaacatgtggatgtggggcaacgccgacccgaagaaacgcggcccacaacccgaaccgctgccacgacccggcaacggaagcggccatgccgtcgcgaacccctccaatccggaggactccggggaagcaacgcgcaggacgcgcaccatcaagcccatggccctgaccgtcgccgaactcgacgagttcatgagccgcgacttcacggacgtggagacgaaacccttcacccacaacgaataaccgaatagagaggcacggtcatggcataccagctggctcaggcgtacgtgcagatcgtgcccagcatgaagggcgtgggcaaggccatcgaaagcgcgttcgacgggccatccaaatcggtcggccagaaagccggcgacaccgccggcggcggcttctccaggggattctccgcgaagctcggcgtgatcagcggcgtcgcatccagcatcgccacgaaggtcatcggcgtgttctccggcctgtccgggcagatcctcgacgcatcggattcgacccagaagttcgcacagacactggacttcgccggcgtcggggccgaccagatcaagaaactgaccacgtccacgcaggagtacgcgaacaagaccgtctacggcatcgacgacatccgcaacaccaccgcccagctggccgccaacggcgtgccgaactacgacaagctcgccgaagcggccggcaacctgaacgcggtcgcgggcggcaacagcgaaacgttcaaaagcgtcgcgatgatgctcacccagaccgccggcgcaggcaagctgaccacggagaactggaaccagctggccgacgcgatcccaggcgcttcgggcaagctccaggaggcgatgctcaagaacggcgcgtacacgggcaacttccgcgacgcgatggcaaaaggcgagatcacctcacaggagttcaacgacgcgctcatgcaactgggcatgaacgacggtgccatcaaggcggcggaaagcacgcagacgttcgagggcgcgttcggcaatctcgaggccaccatcgtggacggtgcggcgaacatcgtcaacaccgtcaaaccgtacatcaccggagcggtcaccgcgttgggcgacggcatcggcaaggcgatgcagtgggtgaacgacttcacgggcgcgctcatgaaaaccgagggcgtgcagacgttcgccaacggggtgaaaagcatcgccggcgcggtcggttcggtcgtcggcccgttcgccggcgtcatcggcagcctgctcggcttcaccggcggcgcgtacagtgccggcggggccgcccagcagctctccaatattctgggcagcatcggcggcatgctccagtcggtcggcacgttcgtccagcagaacgccgactggatgcaggcgctcgcggtcgcggtcatggcgggatatggcgcgttcaagctgttctcgatcatcacgaccgtggtcggcttcatcaaggcgttcagcctcgctgacaccgtcgccgccgcaaagcagtggctgttgaacgcggctatgaacgcgaacccgatcatgctggtcgtcaccgcgatatcggcgctggtcgccgcgcttgtctggttcttcacgcagaccgagacgggtcgcaaggcgtgggcggcgttcacgtcgttcgtctcctctgcatggcagaagacggtcgatgccgtcaccagtctcggccagaacatcgcgaacttcttcacgcagacgcttcccaatgcgttccagtccgtcgtccaatggtttcagcggctgccggaacgtatcggcagcgcattgtcgaacctgctcacggctgtgggcgaatgggccacctgtctcgcgcaatccgcgtggaccgccgggaaccagttcgtgcagaacgtcgtgtacttcatcacgcacttgcctgagacgattgcctactggctgtcctattcgatcacgttcgtggtcgcatgggtcgcgcttatgggtcagaaggccatcgacgctggcacacagttcgtgcagaacgcgggcacgtttatatcccagctgccaggcaatatctggaactggctggtcgccaccgtcacgaacacggccaattgggtggcgcagatggccggcaaggccagcgaggccggaagccagttcctcaacaacatggccacgttcatttcccaattgcccggcaggatatgggcgttcctcgtgaacgtgctgaccggcgcggccaactgggcaggacagatggcgtcgaacgcggcgcaggccggcagcagtttcatacggaatgtgatccagttcgtatctcagctgcccggatgcatcgccgcctacctgcgcggcgtgatatcgaacgtcggggccttcgccggtcagatggggcagggcgcgctcaacgccggacgacagtttttgagcaacatcgtcaacacgctcgcctcgataccgggccgtgtggtgtccatcggacgcaacatcgtcgagggcatcgtcagcggcatcatgggcagcatcgggcgtatcggcaacgcgatcctcggcggcatgaatgccgccatcgccaacgtgaagcgcatgctcggcatccactccccctcacgcctgttccgcgaccagatcggcatgatgatgggccttggcctcgccaacggcatcgacgcttccgcacgctatgtgaacgcctccatgggcagcatgatcggcgggctcatgcccgacatcaacgacctgctgcccgccaaccgcacgtacgacgcggccacgatgaaccggcgcatggtgtacacgccgtccacggacgccatgcaaccgcaagcgggcgcgtcgaacgtgaacatcaccaactactatccgcaggccgacccgtggccactcgccacgaacgacagtctcgacaagctgacggtcggaatctaaagggggttgcttatggccggtgtcgattacgcgctcaacggcgtggccctcgactcccagtattgccgggtcacgttgggcagcaccctgttcgctggggtctccgtgtcccgcagcaaggtcagcgccccgttccggcatggcacgataccatccggtttcgccccatcgttcgaggaacgcagcgtgacgctcaaggtcaccgcgttccgtgcgggagcattgggccgcgctgatgccgcgggtttggattcgagccgcctggcgcgcctgtgcacggcaccaagcctgacattgggccgtcgggtcaacgggcggagacagcaggccgtcgtggagctcgccagtctggaggccgacgacggaggcaccgtgctggacaggctcaccccgttcacggcggtgttcgccatgccccaggtgtggtggcgcgacccgaacgcgtacgaccgtcaggtggcggcgaacacaacggactggctgtggccgtcagccgtgcaatggcggcaggaatactggacgcgctggagtggcgcggcgaacgattcgaccagtctcatggcggatttcgtgaccatgtggattggtgagccgaacaattcgccgtcgctgctgatcccgttgtcgtcgggcataccggatggcatgttcggtgacgcgcccgtcaccgatccgataatacggctgcccaagggcgtgagcagcgcctcggtcaccgaccccacgtcgaacacgggcgtcatctggcagggtgcggccaacgcgaacgcctacacgtatgtggacgtgggcaactgcctcgcatggcagtccacggcggatcatcagtggacgcaatctggcacggacgtgaccggcggcttggattatccggcgggcggcctgctgcaatgctggccgaacccggtggacaacggctaccggctcacgtcgaagatcaccggcagcggcgagccattgctcgtgcacgtgcgccgcgcatggtggtagaccccgtattccccttctatgcaatttccgcgccggttttcaacgtctggagtccccttatggtcaagacactgcacgcccgcctcgtcgcctacctgcccaacggcggcaggctcggcaacctgcccgcaccgctctcatgggacgcgagcatcgtcaacaacgacctcggagcactcaaggtcgtctacagccgtcgtaccgtcggcggcggaatcctgaaacgcggcctcgaacaggggctcgagatcgggctcgaggtcagtgacggcggaacatggagcgaaccctacaactgccgctacctgctcataggccgctcccgcaacgccgaagacgtgtcggacacggtgacgctcacctgccagagcatgggctggctggccaacaagattctgaacaacgacaccgcgcatctgatagcggacggcgacaacaagggcaagcgcgcgttcctgtcgaagaaccccggcaccatcatcagaacgattctcgatgagaacaaggcccgcaagggtgccggcctcgttttggcccccggtttcgacaccggcaaggacgcggctggcgcgaactggaagagcgtgtacacgctctactactcgttgggcacgagcctgaacagcatgctttcgagcatggtgggcggcggtgccatcgactggcgcaccgagggccgcaccctcagaatctggaacgccgacagcaccagtctcagccgtgacctgtcgggccgcgtgcacatcagcatggcgcacgacatactcgaggcacccgaagaggaaagcatcgaagacctctccagcgatatcctcgtggagggtgacaacgggctaatcttccgcgagtcgaatccggcggcacccacgccgtggggtggctgggaatcctatgtctctcagggtggagtctcggacgaggccaccgccaaggcgttcatgcagaccacattggccagcgcggcccgtgtgcgcggccagtacacccgctcgctgctcgtcaccaacgccgaatcattgccgttggtggactaccggcccggcgactggatcaccgcgcccacagtccagcacggcgagaaggtgcgaatccaacaggtcaccgtttcgcttgactccaacgggctcaaggcctcgattatcctcaacgacaaggtatacgactctcaggtgcgggccgcgaagaagatcgccggcatcaccggcggcgcgcaactggccggcagcgagggcgggcgtcccgcccccgagaaggaccatcgcgtgccgaaggcccctctcggattgatcgtgcggaccgacgcgtacatcggcggcgatggctacgcccatggattggcgaccgccatgtggagcgcggtcacgcaggccacgaacgacacggccatcgatatatcgtcgtaccgcgtcgaatggcgcaagcacgtggacggtgcgccctggcattccgccggcacgaccgataagacgcagctcggcttcggcggcctggactgcgggaccatgatcgaggtcagggtgcgagccgtgccgacgtattcggacaagctcggcgaatggtccggcgtcatcgtggccaccatcgaatcggacgtgacgccatgctccgtaccttcgagaccggtcctcgcgtccgagctcggcgtggtgaccgtccactgggacggcaggacctccaccggcgcgtcgatggaatcggacttcgatcatgtcgaggttggcgagggcgtcaatgccgccggaatgagagtggtgagcgccacccagtccggtcaaggcgactatctcgtgaccggactggcagccggttcccggcactcctatgcgcttcgttcggtcgaccatgcgggcaaccgttccgactggtcggcagtcgccacggtcaccgtcgcgtcggcggtgtcgccggaagaggtcaaacaaatccagcaggatttggctgaaaacaagacggcgttgcaggacaatacggccaagctcgatcaggcgcggaaggacatccaagccaacaagtcgaatctcgacacggcgaaccggacgctcacgcaggccaaggccgatctgtcgcaggctcggaaggacatcgcgcagaccaaaagcgacctgaccacggcgaacggcgagatcagcaaggcgaaggagtcggcggcgcaggcgtatgctgaagcccacagcaagaatcatacgtttcgtgggccttacatgccggacgcctccaaagggctgatcgtcggcgacctgtggctcaagacgcagaagtattggacgcgctggcagggggagaagaacgcaagcccatcactgctcgcggacttttacacgtactggcaggggaatccgaacaattcgcctagcgtgctcgtgccattggccgaccgcgtgatcgacacgctcgtgtgggacggctccaagtggaaccgcatgggttatgccgacgtggaggacaatgcgaagcagatcgagcaggcgaagtcggatatcgcggacaacgcggcgaagaccaccgacgccaagaagactgccgagaatgcggctgccgcagcgaaaaacgcgcagggcacggctgatacggccaatggtgcggcgaagacagcgcaggataccgccaatgctgctactgccgccgcgaagagcgcgaccgcgaccgctggtcaggccaaggatgccgccaatgccgcgcagaccgccgccgaaagcgctaagaagacggccggcaatgcgcagactctggcgaatacggccaatgagtccgccaatgccgccaagtccacagcagtcaatgcttcgagtgtcgcgacccaggccaaggccacggctgacagtgcagcccagtccgccacggatgcggcgaatgccgcgcagaaggcgaatacggctgctgccgcagcagctggcgtggctaacggcaaggccgacgtgctcatccagtccactgcgccggatacgtcgatgcgcaagccgactaccttgtggatcgacaccaccggtggtgctaacacgccgaaacggtggaacggcagcacgtggatggcggtgacggacaaggcggccacggatgcggccaatgcggctgtcaaggcacatgctgccgcgcagacggcgcaatcaacggctgacaaggctcagaccacagccgcgaacgcggccgcgcaggcgaatcaggcgcaggccgccgctaaaaaggcacagaccaccgccgacggcaagaacctcatctaccgtggaccggacgaaccctcgcatgatgggctgaagccgggcgacatgtggtggcgcacgcaaaaatactggactcgttggaaaggagagagaaacaacagtccgtcccttctggccgacttctacacgtactggcagggagcgccgaacaacagtccgagcgtcttggtgccgttgtccgaccgcgtggtcgaagtcctgacgtgggatggcacgcgcttcacgccgttcgacctcgtggccaacaatattctggctgccggcacggtggccgcgaagcatctcgccgtggactccgtgactgccgagaaggtcaaggccaatgcgatcaccgtcgacaagctcgccgcaaacagcgtgaccactgagaagctggtggccgacgcggtgaccgccgcaaaactcgccgctaactcggtgcaggcgcgcaacatcgtctcgctcgccatcacgaccgacaagttggccgcgaactcggtgacgaccgcgaagctccgcgtgacggaggacatgaccgtggcgctcctgaatgtccacaagatacaggccggagacatcgtggctggcgcggtcacgacggacaagattgccgccaatgcggtgaacgccgacaagattgctgccaacagcgttaacgccgacaagatagtgtccggagcgatcaccgtcgacaagctggcggcaaacagcgtgacggctgtcaagatcgcggctggcactatcacgtccgacaaggtggcggcaggccagttccggggctacgtgttcacgggcgcgatattccagtccagcgaggctgcgaacactggaatgaagctcaattcgacagccctgcaaatgtgggattccaaccataatcgcaccgtctatctggatggcgagggcaagtcgaatgtgctgaccggcacgttccagacgagcctcaccggccgtcgaatcataatctcaccgacgttccgccagacgactgtcggcggcgatgacagtaccgaaggctcaggcatcaaattcgcacacgggcgcgacgggagcgacgcctacatcgcgtcggaatcccgaacccaatctaaaggcgaagtctccaccatcgtaatcaacggaggccggctgagcgacaccgatccggggtcgttcatgagtttgggcgaatacaaggcggatgacaacgccaccaaaaccggcgaagccttcctagccgcttaccgtgattattccaaaggcagccagaacggtaaagcgcaactgttattgagggccgacccgacgtccaaataccatacatccgccgacctctcggcggcagatccgaacggcagtgtcggcgtaagtgcggacatcaactccgggtatctgtacctcggcggattcctcggccggtttggcgcggggcgcggaacgttccagacggtctattttcgtggcgggataatgagcggcgaagggtgggtgacgcagacgtgcacgtatggcgcaccggccaaatacggcttataccatgcgcatgtctcctccgactccatggggtcgatcatggtcggttcgaacagtgattcgccgagcggctgcggactgtgggcgcgtggcatcggcaacggcgtcaacatcgcctacggcactcagctactcgccatcctggccaaacagtaggaggcgtgatggaaacgaacatctacggtgacgtgttggccgtgacctgtgacgacgggacgggtcatctcatcccgttggacgcgatcgcctcgtggggcgagctcctcggctgcgacacggacatggaaacggtcgcggcgatcatacgggtccggtcgaacaggtcagacccgggcgtcatcgacccggccaccggacgcaacgcttggaccagcgcctacgagcaggtggagcgcgacgagttggcggaccgtcagcagacgcgcatggccgcgttgcatcccgtgctcacggcgtccggcgcgttgtcgccggacggtcgcgaggagacccgtcgcctgctcggattggacgcgatgcccgtcatggaggatgcggacggtcggctcgccgacacgctggccggtgtggccgaccgcatcgccgtgacgcgcgaccggttccgccgacggtcgatcgattatctgaccgaccgtcggcgttgacgcgggccgtggacggccacgcgcatcgactccgccgggatgaccggcgaaaaagggaaacaacacaacagcaaaggagtaatcatgacagcatctgacgtcccgcaacccggcgcacgaccggcgacggatggcgtgctcgacctgcgtccgccgaaggaaagcctgcgagccgaactgtgccggctcggattcgagtattcgtccgccgaccagacgggcgaatcatggcgcgactaccagcgcggagcgcttgcgacgttcgacgggactggggccaatgtcacgatcacggatgttaagacgaatctcggacgcactttgacgctcgaagagtttaaggccgtgactcgcatcgacacgatgaccgccgccgactaacccgtatttcccgtttttcagccccctgcaatccaatcggattgtgggggtttcgccttaaaaggagacttattttgactcagattccagccgacgcgaacgaggtcatcgaccagctttccgcgcaaatcggcactctcaccaagcaaaacgcaatcctgtccagccagctcgcggcggccatgaaactgatccccaaggacgtgctcgacagtctcgacaaggaggacacgaatgcagaggattaaccttttccccgacccgaatatggctaacaccattttccaatgcataccagcacaatgcaccgtggattttccgaccgtcagcggattccgatggctgcgtgccacgaccagcggcagtggtgacatatacgcgcaatacgtgcttgcgggagccgatcttccaccggccggcgtgtatcacattcacgcggtctgctatgcgcgaggctccggcgcactcttccgcgtctatgcgggcgtcggcaacgggttcaccatcctgcacgagaccggcatcgcagacaatcagacgaagggaattgacgcggacatcacgattccagccaacacgaagcaattgttgatacgtgtcgtaccaccgtccacggtcggcaaattcatactgattcgctacatcctcctcgaatccaagtccacttacgacactgccattggggggggggcttccgggcttcttcaccggcgacaccatgccgttgcagtaggcgcgactatcgggcgggtggtgcccgatgatggtcacgaacctatgcacgagcccatcctcgaccatcaccttgtcggcaggccgttgggtgggtatcacgaccattccgaacgagccagggacgagatatctggtcagtgcctatgtgaacgtcaccggcggcactatctcgttgaacatgtatggcgacctcagtgcaagccaacgtgtcagctacgcgttgaccgccggcaatgccggtccgatgtcaatgagttattccgtcaggtcaggcaatccgaccgtcacagtgacgaatatgctcatctgcacgtgggacgaatatcaggcgaacaagaccctgctcgacggcatcggatatttcaccggggatacgatgccgctcgcctgaccctcatgggggtggtggcatgagcctggtaacgaatctgattccgaatccactcttgatgttcccgaacggtgccgtctcggcatacgaggcgaccgtgcagcatgttgaccctgatcgcatgatcgttacgccaaacagtggcgctgtcaatcctatggccaagatccgactgtgcgaaccggtctccggtgatttccatctgaacttctgggtttcccaggtgccggaagatagcagatggcatgacggtatctgctacgtagccaacgcagcaaagaacaggggaatgctgtttcctcatggcaatacaggcggaaacacattccttggttttgattttcgtatggatgatgcgcaattcatccagttgaagtgtccgctgaatcatccgctgcaattctcggcaatcaatctgatgacacaagcggattggaaggaatacaagcagttcgtcccaggcatgggagcactgtacggcgacctcatgccacggccaaactgattttttaaggagatgtaatgtgtttcagacgtttctagctggtttcgggggtgtgggtggcgcgtgcgcgctcatcaccctgctgctcaggatatggccgggcgcgttggacgcgttggcgaccggcctgtacgcgcacgtacaaccggaacgcttgccctatgacagcccgctttcacagcatttcgccaagacccggcgtctcggcgagcgtaccgagaaattcgacgaccgcatggacgagctctgccgggacacgatcaagaacacgatcatcagcctgatctacggcgaccaagcgcacgaccattcggaggccgtccgttacgagttggccaaactcgaaaaactcgacgcgcaatgctggatagtcgacgcggccgaaaaatatttggaggaccggcaatgacgcgtctcatgatcgcaggcggcgtatacctgctgttgcttgccttgttgctcgtcttcaattttggcgcgcacaggcattgattttcgcaccggttttcaaagccatcccattccgggatggcttttctattgccccttgactcggggcgggaaggagaggatgtgaagatcctcgacaaaagcaagcataaacacggacgcctgcaccggcgcgtggtcatggcactgaccgcgctcgtcgccgcggtcttcatggcgttcgccccggcggcgcacgcggacatgcagggcgtggacatgagcaactggcagtgcggcgcggacgtgtataacatgcaggccgatttcatcgtggtcggcaccacatggggcaccggacaggtcaacaacaactgcctcgtgtccggtgtgaacaccgacgccaaccgcatgatcgcccaggcgcaggcatccggcaagaaattcggcctctaccactacgccatgggaggcaacccggaaggcgaagcccaattcttctacctgaacacgtcgaactattggcgtcacggcatcgtggcgctcgactgggagatggacgacaaccccgcatggggcgattgggattgggtacgccgattcatgagtgagtgcgaacggctttcgggcggtgtgcgcccattgctgtacaccggcccggtcgccggcaccatcccgcaggacatccgcgaccgatacggtttgtggatcgcccaatacgcgaacatgagcccgaccggctatcaggccaacccgtggatgataggcgcatacggcgaggccatgcgccaatacagcggcaccggtgtcgtcaacacgtggagtcccatcgacctcaacatcttccgtggcgacgcatggcagtgggacctgtacgccaacccaaccggcggctccacgccaccggccacaccggccgcgcccgtgcagccgaacactcccccggccgacaccgacacgggtggcatcagccacgtcatgcagtggggcgagaccgtctggggccttgccgtcgcctacaacgcatggcccctgtccgcatggcacacgccaagcggtgacatcaaccgctactacgtgggcgatgtcgtcacctacggcggcggctctactgccacccccgcaccgtccaccggcgtctccaaggtcctccagtggggcgacaccgtgtgggagttcgccacctcccacggctacagcgtcaaccgctgcaccgtcccctccggcaacatcaacgtctactaccccggtgacgtggtgacctgccgctaaaccaaccggtgccgccgtcaccccgacggcggcaccacccaccatcatcatcctttctttgatcggagcaaacatgaccgacagcaaaaccccggccgacaccggcgaaacactccccggccccgacacgggcgactggcccgaaaccgccgacgtcacccatgacgtgcccgactggctcatccccagccgcgtctacgatgtgctcaaatggctcggcctcatcgtcctgcccgcactcgccctgttcgtcaacacggtcggccccgcatggggctggccccacgtggacgccatcgtgaccacgctcaacgcgctcggcatcctcgccggcgcgctcatcggcgtcagcgccatcaaacaacgcctcgaccgcgccgcataaccaccacacagttcggccccgcccggcatcgcagacagctccacgagcttgactgcggccggcggggccggttttttcgttgttacagcagctaggcgtggctcgatttttgcccacattttgcccacattattccgggaaaccgagggaatacgagggaatcaccgggaatagaaaaagccgctcagccctactcccgcaaggcaaaacggctattttccacagtctagcgaaggtgcctccggtgggactcgaacccacaagccgaagcgatcgattttaagtcgactgcgtataccatttcgccacggaggccaacttttctattataagctatctcctgccctgagcattgcttgcgggttgctgcgcttcgtgcagccgtcgcggcatagccgctcccttcgcctacaaacagcccagtgggctgtttgtagcagccggtagcgatagcgtcgccggcgtcgcatataacgcaaacagcccaccgggctgtttgcttaacggctcagcccgctggaggcacttaccacttacgctattgagccagcaaccggcgaccataatcgagcacaatgccgtccagcagcccgtgttcgctggcgacgaacgaatcgatggcttcaccatgatcggccttggcggcttcgctgacacgcgccagcacacggctccagaccacagcgccgccgccgaccacatcgatacggccggggtggatggtcttgtattcgcggcgctcggcgcgcgtcatcctaaggaacttgtcgtccacggcataggcgtcttcaaggctcaaccgatgcccgtcgaccacggtgtgatcgtattctttcaatcccatagccaaggcggtcatcgtggtcaccgtgccggacacaccgatgatggtacgggccttgcctgcgtccacggtgcggaaggcctcatcgatatgctcgtcgatgtccgcaacggcctcatcgatctgcgcctgggtcggcggatcgttggtcagatgacgttcggtcatgcgcacggaaccgatgttcatggagaatgcgccctgaacctgggtggtgggcgcactgacgccgtcgccaccgatgaccagctcggtggacccgccgccgaggtcaaccaccagatagggggcgggcagatcgtcgcgattgaccacggaagtggcgccgaggaagctcaggtcggcttcttcagtgccgggaatgacttcggggcgcacgccgaggatacgttcgatctcatcctcgaactcctcgcggttttccgcgtcacgagtggcggaggtggcaacgaaacgcaggccgtcgatgggctgctcggcaatcacaccggcgaattcccgagcagccgcataggcgcgttccaacgcttcgtcggcaaaacgatgggtcttgtccacatcctgaccaaggcggatcacacgcaggatgcgcggcaccacctcatgcatgccatcggcatcgacacgtgcgatcttcagtcgaatggagttcgtgccgcaatcaatgccggcgacggttacggattccttgctcattgccttctcctcgtatcccttagtgcgtatgaatgggctgttcgcggtggctcatctgttgatcaatcgtccagtgtgcaacggcagacggtcggatcgaactcgtctttgacgcgttccagcaccaaatcgccaatggggttgacgcccggccccataaccaaggactgggccagcagggcatgcaggcacttgacgcgcaccggcatgccaccggccgaagtgccttcaatatgctcctcactgtcgccaagacggcctgccagttcgtgacggaatgccagatacagattatgggcctgctcatatgcggccttgagctcctcatcagcggccagcatatcgttgtattgctgcatcacgccggcggcctcgacatgggaggcggccttgacggcttccggaccggtcagatagcacgtggtggggaaagggattccgccgggcaacaccggacgggtgattacggcaagtggcctaccgcagacgcatcgcgcccccacggcgaccatgccgcgcgggtatcggccgagctgacgctgcacctggtcgatgtcatggtcgttggcgggctcggcaagcatggtgtcgacaagggccttggccttggcggcgatatcgatggtcactgttgggttccctcccctgtgttctgttgggtgttctgatcggattgagtgttctggtctgacttatcggactgcttggatgagtcgttggatgacgagtcagaggaaccggaagtatcggatttgccggactcgctatcggtcacaggctcatcggcctttttgagcgagtaagacagttcgctgtaccatggcaggacttttttgttgctggtattggaatcttccgttttctgggattcgcgatcggagccggtcacggcttcgggatgcagcacacgcacggcctgttcgccggggaatacgaagccgaggcgttcacgggcctgggcggtgatgtaggccttgtcatcccaacgcttgatatcgttctccaactcctgcttttgggcgatcagcgaggcttcctcacgcttgaggccattgagctcggccaggttcagggcataagtgtggaaggtggagaccagctggatggtgccgagtgcgatgatgaacagggagacgaagaacgctatgggccccgccgacccttttttcctgacttgtgctttgccggttttgccaggtttgccggtacgggacgacttgctcatgtcacatgaaaatacccgccgcattcgacttgacgaacacgacgggtatcgagcttcagtggaaactcacgcctttacgggcgtttcagctcacttggccaagtacttcttgcaggccttgaaggcgctgtagccggcgtactgagcggtggagccgagctcctcctcgatctcgagcaggcggttgtacttggcaacgcgctcgccacgggccggggcaccggtcttgatctggcgggtgttcttagcaacagccaggtcggagatggtggtgtccggggtctcgccggagcggtgggaaaccatggaggtgtagccgttggcggtggccagctcgatggcgtcgagggtctcggtgacggaaccgatctggttcagcttgaccagcagggagttggcggcgccgaggtcgatggccttctgcagacgagccgggttggtgaccagcaggtcgtcgccgacgaactgcagacgatcgccgaggcgagcggtgatggcagcccagtcttcccagccttcctcattgaacgggtcctcgatggagacgatcgggtactcgttgatgaggttctcgtagtagtcgagcatgtaggcggagtcgcgctcttcaccgtcgaagcggtacttgccggtctccttgttgtagaactcggaggaggcgacatccaggcagatgccgatctgcttgccaggctcgtagccggcggcggagatggcgtccatgatgtacttgagggagtcctcgttggacttcatcttcggggcgaagccaccctcgtcgccgaggccggtgttcaggccttccttcttcagaacgttcttcagggtgtggtaaacctcaacgccagcgcgcagagcctcggagtaggtgtcgaagccgtacggggaaatcatgtactcctgaatgtcggtggcgaagtcagcgtgagcgccaccgttcatgatgttcatgttcgggaccggcaggatgtggccgttggtgccgccgatgtagcggtacagcggcaggccggcagactcggcggaagcgtacagagcagccagggagacacccaggatggcgttggcgcccagcttgcccttgttcggggtgccgtcgagctcgatcatcaggtcgtccagagcgcgctggtcagcagcgtccatgccgatgaccttcggagcgatgacctcgttcacggccttgaccgcgttaagaacgcccttgccgccgtagacggacttgtcgccatcgcgacgctcccaagcctcagcttcaccggtggaggcgccggacggaaccagacccttgccctgagcgccgtcttcggtctccaggtagacctcaacggtcgggttgccacgggaatccagaatctgacgcgcgtacacgctttcaattactgccacaactactccttaaaacggttgtgtatcttgaatgacattcttaagagtagtgcgatttgtggacgttgtgaacaacacgcccaaaatttagtgttagcgctcacaatgccgatgcgccgcctgattgcaaggcagtacggacgaaatcgctcagtcgacgtccttgccattgaggtagtcgatttcactgtcggacaatttcagttcgctggctttgaacgagtcctgaatctcctgcgggtttctggccgagggaatcgtgaacagatattggtattgcgcaagttcccacgcgagcgtgacgcgctggtaggagcagtcgtgggacttcgcgacttcgcggaaccggtcgaacagatgctcgttgaacgggtcaaggaatccaccgagcggcgaccagcagacgaaagccaaaccgagtttttcgcaggtctccaacgtgtgttcggggtcgcggtgaaccggggagaactggttctggacggccacgagacgatcgcccaaaatgttgtgggcggcttcgatgtccgcgttgtcgattctggagataccgaccgctttggccacaccttcgtccacgagctgcttgagtgcgcccatctggtcttcgtacggcacctgcggatcattgcagtgcgagtagagcagatcgagcgtatcgacaccgaggcggcgggctgattccttggcattggcgatcatggtttcgggtcgggcgtcggcctgccagccgtagttgccgttgccgtcaagcgtgcgcagccagccggttttggtggctacgagcacctgatctttggggccatgccacgagtgcagagcatcgcggaccagatattcgccatagcccatatcctccggttcgccggtgccgggtgcgctgggcagataataggaccaagccgtgtccaaataacggactccggcatcgagcgcggcatggatggtctcgatcgcctgatcacggttggaggggcgcccctcgatggcgagcgccattgtgcccatgccgaggcggggaatctcatagccggcaagtgttgccgcgtgttggtttttcatcgttgtggcctccatgccaagtcatcgaggagttggttagtccaaaggactacctggtcggagctcatggggccttggcccagggaaccggtgaacggggtgggtacgatgagctggtgggtgaccgggcggtattgggcgcctttgtaaatacggcccatacgcatctggatggattcgggcgggtcgatacggccgatccgcacgcggttggattgcgcgagaatctccgaaatgccgagcttgcgggccttgaacttcagacgggccacgtcgaacagggtctcgaattcgaccggcggcttgccgtaacggtcggtaagctcctcttccagatccttcaaatcggcctcgttgcgagcggaggcgagcttgcggtacgcttccagacgcagcttgtccgaatcgatgtactcgatcggaatcgacgcttcgatgggcaggtcgatggacacggccaccggctcgacgttctcttcgggctccttgtacttctccacggcttcggacaccatgcgtacgtacaggtcgaagcccacgccctcgatatggccggactgctcgtcgcccagaaggttaccggtgccgcgcaattccaagtccttcatggccacatcgaaaccggagccgagcgccgtgttctgcgcgatggtggcgagccggtcatgggactgctcggtcatcggcttggacgggtcgtacaggaagtaagcgtacgcgcgctcgcggccgcgaccgacgcggccacgcagctgatggagctggctcaagccgaaacggtcggcatggtcgacgatcagcgtgttcgcattggagatatcgagaccggtctcgatgatcgtggtgcacacgagcacgtcgatgtcgcgatgccagaagtcgcggatgatctggtcgagctgcttctcccccatcttgccgtgggcgatgccgacgtgcgcctcgggcaccagcgtgtggatcttgtcggcgatggacgagatatcctgcacacgattgtggacatagaacacctggccgcctcgcaacagttcgcggcgtacggctgcggtggcctgcgcatcctcgtaggcgcccacataggtcagcaccggcaaccggtcttcgggcggggtggcaagcgtggacatctcgcgaatgccggtcacggccatctccagcgtacgcgggataggcgtggcagacagggacagcacgtccacgttggtgcgcagggctttcagcgtctccttgtgttccacgccgaaacgctgctcctcatcgatgatgacgagtcccagatccttgaacttgattttcgggttcagcagcttgtgcgtgccgatgaccacgtccaccgtgccggtttccagaccctcgatggtctcgttgatctctttggtggtctggaatcggctcatggccgccacattgaccgggaaaccctcgaatcgttcgctgaacgtctcgtaatgctgctggacaagcagcgtggtgggcacgagcacggccacctgcttgccgtcctgcacggccttgaaggcggcacgcagtgcgatttcggttttgccgaagcccacgtcgccgcagatgaggcggtccatcggcacgggcttctccatgtcggatttgacctcgtcgatggtggtgagctggtcggcggtttcctgataggggaaggcatcttccagttccttctgccatggggtgtccgggctgaacgcgaagcccctggcgcgctggcgggcggagtacagcttgatcaggtcgtcggcgatctcgtggacgtgtttgcgggccttggccttggtggccgcccagtcggagccgccgagcttgttgagcttgggggcttcggcaccgatgtatttgctgacctggtcgagctggtcggtggggatgaacagtttgtccgccggggcgccgcgcttggaaggcgcatattcgatgaccaggtattcgcgagtggttttgttggcgccggtgccgatggtgcgctggcgcatttcgatgaaccggccaatgccgtgctgctcgtgcaccacgtaatcgccttttttgagttccaccaagtcgatggccttgcgccggcgtttcggcgttttggccacggccacggccgaagtgcggccggtcaggtcgcgttcggtgagcagggcgattttggcggctttgtccacgaagccgtcgatggcctgagagcggatgacgtcgaaattggcgatgccggtagtgttgatcgcgcgcctgagcctggccaaggtgccggccgcagcggcggtgatggtgacgtggaagccggcgtcgagcaggccttcgatgccttgggaggccttggcctcatcccctcggaattcggccgggttctgggcgtcgagctgcacatggccggtcagcgtggtgtccacgccgaaactggtgaggcgaatcaccggatgttcggagtattcgagggagctgatggtttccgcatagtcgaggaagctggctttgtcgaagctgatgggcgcgccggcgccgtggccggaagcggccacatgccagctggcggccaggaactcgttcgcggtttttgccaagtcttcggcggaacggcgcagtttctccgggtcgctcaggaggatcacggcgtgcttgggcagcatggagcccaccggttccagatggtccacgagcgcgggcatcagggattccatgccttcgaccggaatggcgttggcgatggattcgagcatgtcctcagcattgggaatcgaaccgaccaaggctttggcgcgggcgcgcacggcgtcggtcagctgcagttcacggcatgcggtggcccagatggtcttgaggccgtcgccgtaggtacgctggtcggaggcgtggaattccttgatggtgtcaatttcgtcgccgaagaattcgatacgcaccgggtgcggtgcggtgggcgggaacacgtcgaggatgcctccgcgcaccgcgaactcgccacggtccatgaccaggtccacgcgcgtgtaggcgttttcgatcagacgtttggcggcttcgtcgaggggcaggtcctcccccacggtgaacacgagcggctcgacgtcgcccagtccttggacgaccggctggatgagcgagcggatcggcatgacgagaatgcgaatcgggccgaacatcggatcggtatcgctcggatgcttgagtctgcggaacacggccatgcggctggccacggtgtccgcgcgcgggctcagacgctcgtgcggcagggtttcccaggcttcgagctgggcgatgtcgtccgggtcgccgtcataccaggagcgcagcgagcccacggtctcttcggcttcgcggccggaggccacgaccagcacgaccggcttgccgggtttgccggtcacaccctgcccgatggcggcggccaaagccgggcgcaagccttcggaaacaccggccagaacggaattgtcgatgtcgtccgaaacctcgatgtcaccagtggcgagtctaaggaaggtcttgtcctgttccagctcagacaggatgcctaccagtgagccgttgatcaggtccgggtgcgtcgcctcaccggccattgaacttctcctgggtcttggcaagaccgcggaagatgatgtcctcggcggcgtcggcaccgtcagccaggaattcgggcagctgcttgcgctggtccggaccgaatccgcccagcacccagttcaccgtgttgtcatgcgcgttcgcaccgcgcttggagtgaccgacgcccatgcgcacacgcgcgtatttcggcgtgccgagggaacggtcaatcgacttgatgccgttgtggccccctgcggagccgcctgccttgaccttgatacgaccgaattccaagtccatgtcatcgtgaatcaccacgatatggtcgggctcgatctggtaataggcgctaatggaagccaccgcattgccggaatcattcatataagtcagcggcttggccagaaagaacttgacggtgcggccgtccaggttcatcacgcttttaccgagcatggccagacctttgtggtcggcgaagttcaccgtccaacgttcggcgagcacgtcggcggtcatgaagcccatgttgtgccgcgtgtcctcatattttttgccggggttgcccagtcccgcaatcagccagaaatccgatgccataatccactcctcgtccgtcttcctatattcccgtatgcacgttctgtacgttccgtacgtcatgcgcgcgttcgcctcgcgcactggcccatgcccggccggattcaaccgtcaagattgtactcaacgccgccgtcaagccttggaatcggcaagcagcaaggcacggcattgctcggcatccatcgatcggaccgatgaatggtgaaacgcttcgacgtcacgagtcacgatgacgtcggcgtcattgtcctcggcaacggcacggatgagcccgtcctcgaagtcgggctcatcggatcggtacgacatacacgcatggcgttccataagtggacggatgtcgaacaattccatcagtccaccgatatcgtctcgcgccgcccgctcctcgccataatgcttgcgcaacacgcaatacacgtcattcaatgacgataccggcgccatgatctcaatgtttggctgtgcaacggcttccatgagcaaatcaacacattgtttatggaaaggcgctcgtttgtcattgcacaaatcgagcagaatattcgtgtcaaacagcagtttcatcccgtcccccaaatcgttccatacgtgcctgcgcgagaatctcctcatccgaaagatcgccttccgcctccggcaaattccggtcggcgaaacgttgaatcaactcctgctttttcctacgctcccgctcctgaatcagggagagcgtcagacgctcgaattccggcagttcccccgtatccgcaaggtagtcggtcagatcacgaatcaggtccgaataggtgcgcccattacgcttaagcactttctccgcgtcgcgcttccgttcggcattgacgcgcgccgtcaccatggccatagtcatatcgcacctccttgtaataccagtattacaagagatggggacgagtgaatcgcgtctattaggcggtgccgccagcgaccttttcgcgctgtttgccgttgaggtaccagtaggccagcgccacgaacagggccgccgaggatattgccgagcgtggctgcggacaggttatagaggatgcccgacacgtcgagcgccgcgacgcccgccgcgtcggcgccgaaaccaaacgttttggcgaccaggcccatcggcaggaagaacatgttggccacgcagtgttcgaagcccatcgccacgaatccggcgatcggcagcaggatgcccagcaccttgtcggatacggagcgcgcggcgaatccgatgcgcacggccaggcagacgagcacgttgcacaggatgccgcacacgaacagcgtgtcccagcttggcgtcactttaacatcaactccggttggaaaaaatctcagtatgtagcattcggttctcaaataggaggaacatgcagcggcaatcaacaacttgtcgtttacgacgccaagcaagggaaacagctcagacagatgacgcttccctgcaatcggatgacatattgcgggacggcagcggattttgggcgttcttggcgtggcatcccgcaagcgttatcgcacgttatctgcaccgaatcataagaatggcagaattccaatgatttcgcaggaagagttgcgggacgcgagctatgtgcatcgtttgacgtgtgtggcatcccacgtgattgcgggataccacgtcaaaacggacgaaaatcgcgtgccgtcccgtagtttgccgttatctgggataagcgcgtccgatatatggcgttcgaggaaaagagctgatccgatacaactttttagtgttataggacaccggaatccatggagagcaagggtaaaccgcctcgggcctacaggtccaaataccagtaggacatgtcccgcatggtgccggtggagtcggtggcagcggcgggcatgaggccgaattgggtgaagccgaagcggtgcatgagggcaatggaaccggcgttatcggcgaaaatgatgccgcaggccttgcgcatgtggcgggcccgcgcctcggtgagcagcctgtcaagcatgaacgtgcctactcccctgccttgccatgccggatcgatgtaataggccaaatcggtgacaccgtcatatcccgcgcggtcatagaacacggagagcgcaccgaagccgatgattgaaccgtcttccgattccacaacaaaaacgccgtagggcggcgtatgggattcgacccaggcgcggcgttggtcgagggtgcgcggggtgaggtcggcggtggccccacccgccaccaccgcagcgttgtagatgtcggtgatggcttggatgtcggattcgacggccggatggaaggtgtatggcatgaagttcctttgaatacgcaaatagcccgtccttatgataaggacgggctatgtcagttgaggtaaccgactcccttcagtcgccttcggcgatagctcccctcaccctgagggaagccaagttacttgtcgagctcgatggccttgttgagggcgtcttcaagctcctgctgcgccttgccgtaggcggtccagtcgccgttcttcatggcggactggctgtccttcatggcttgggcggcatcgttcaacgcctgctggagttcggggctgcggtcggaagacgagccggaatccgactttccgtccgtggtgccggactgaccaccattggtatcggaaccagattggtcaccggacacgttctcggcatcgcccgcggccgcaccggaattgccaccgaacacctgatccaaggcctcatccaacgtatccgcgaatccaacctgatcaccgaatgcgaccagcgtcttcttgagcaacgggaatgaggtcacgcccgaagacttgacgtacacgggctgcacgtacaccagtccgccaccgagcggcagggtgagcaggttgccgcgcaccacttgtgtgtcgccggattgcagcaggttcagttccttggatacatcggcgttggcgttgaagttgttctgcgcctggccggggcccggtacgttcgaatccttgggcagctcctgcaatcggatggtgccgtagttcgagcctatcttgcccttctcattgccggcatccgagtcgaccgacaggaagccggtcaggatctcacgggtggactggccagccggaatgtaggtggaggtcagcgagaacaccggttcctcggtgccaccggtctgcaaggtcaggtagtacggcggctgcaggatgtcctggtcctgctgggactgggattcggtcggatcgaccggcgtctgccagaagtcttcgcctgagtagtactggctggcagaggtcacgtggtacttggagagcagctcgcgctgtaccttgaacaggctttccgggtagcgcatgtggctcatcaggtcgccggagatatcggagagctggtggtactggccagggaagatcttctcccatgccttgatcaccggatcggattgatcccacacgtacaggtccacggaaccgtcgtaggcgtccacggtggccttgaccgagttgcggatgtagttggccttctgagagcccagggacgagaccgttgcggaagagacggtggtggaatccttggtggcggagccgaggtcggttatttgcgagtacgggtaggcgtcggaggtggtgtagccgtcgacgatccacttgacgcggccatcgaccacggccggatacacgcggccgtcaagcgtcaggtacggtgccaccttggccacgcgctccttgggggaacgatcgtagagaatctgcgattcgctggtcacacggtcggagaagagaatctgatcggagccgaagcggatagcgtagagaatcctggagaacaggttgccgaccgaagggccgccgtcgcccttgaacgtggtcagagcaccttccgaaccggtcgggtagtcgaactcccaagcctgcgtgccttcaggggcaccgacaatcgagtattcggtggtgttcggcgagaagtagatgcgaggctcgtacttttcggattcggtgagcttgccctgggtggggatgccggattcgaagaattcgggctggccgtcggcggtcaccttgttgccgtaggcggccaccacgccgtaaccgtgggtgtacacggtgtggtcattgacccagttgcggttgtcattgccggccagatcgagctcgcgggcggcaatcacggtgtcctgggagacgccgtcaatctcgtacttgtcgaccgccagggtgtcggcgaaggtgtagtactgcttggactgctgcaactgtttgaacgtggggctgacgacctgcgggtcgagcagacggatctgcgcggtggtgtcggcctccttggccagagcgccctgctcacccttgtcggtcaccttgtattgctcggtcttgagcttgtcaagaccgtaggcggcgcgggtggcgtcgatgttgcgctggatgtaggtggattccatctcctgtgcgttcgggttgacgcggaagcgttgcaacagcaccggccatgccacggtgagcacaagacccaccacgaccacgacggcaatggaggtcaccggcacacgccaggccttgagcgcggcggaagcgcgcacgccgatggacgcctggccttcgagcgtgtgggagcgcatgagccagatgcccagcaccacgccgaggatggcggtcagcacgaccatgatgaaggtgacggggatgttggcatgtacggcggtgtaggaggcaccggtgatgcgtgaaccctgcacggtgagctggtcgaagacgccaatcatctggcgcactgcccaagcgaacatgttgagcatcagccagatgccaagctggcgacggcaacgcttggtaatggagaacaggccgcgtccgttaaccggcatggtaatgcggataccgcccatcagcacatgcgtgaccacggaaaacacaaggcccacgcccagcagcatggccacggcggcgagcacgagcttcaggcccggcagcacgaacacgtagaagccgttgtccagaccgaactgcggatcggtggtgccgaacgactgcgcgttgaacatgagcagaatctcgctccagttcgcgttaaactgggaaccgaagatgacgccgacgatcagcgaaatcaccacggccacgcggcgagcggttttcgagctgacggatttgccgacctcgaccacatcgccgttaatgcgaatggtggaaccgtcggccgaatcagggcgtgctcgaatggccagccaggcggaaacgaagccggtcagggccatgagcagcgcgtaggccacccacagaccgattttcaccccgagctgggtccagaccacggactggaagccgagctggccgtaccacatcagatcggtgatgaatcgggacaggccgaagaacagaccgacgatgatggccaaggccagcaccacgccgatcagaatcttgctgccacggctggctcctgaaccaccggacgctggcttacgggtgatacgcggattggccggaccacgtggagggcgggatgacccggaggggccagcgttggtgttgtgggccggaccgtccccatcggcctcgacatcgaggatgatcggatcgtcattgttcgcattgttgcgtcgtgaatcgccgccattgccgaacagtactgagaaaggatcgttaaaagacataactcaagcctatcgaaagggcgggaggtcggttatgccctgagcacagaatgaggcaacatcctgttctacgctctgttctacgcttgccgctatgaacagacaacggccacaacatatgcgtccctcagcacacgccacacgccaacttcggcacaggagcattccaatcgtggcggcaatatgtgctttgacggtggtgttggccggtgtggcagtctacggatggcatgtcggatggttcgccaaatccacatcaaacggcaacaccaccactccccagacctcccagacgagtgcgttaccgcgcaccgacgttccttccccgaagaagaacgacgatccggcggcacaagcccaacgtgcggtatccgccatgacgcttgaggaacgtgtgggacagttagtgatggtgccgttgttcgccggttccgaaccctcctcgttggcttcaacaatcgccgacgaacacattggctcggccattctcattggcaattggaataccggcgtcgatacggtcaagaccgcgaccgcgcaactccaaggatatgcgccggccggcaatcgtctcatcatcgccaccgatcaggagggtggtcaggtacagcatctgactggtaccggtttcgacacaatgcccagtgccgttgagcagggcacaatgtccgctgacgcattgcgtcaatcggcaggcacgtggggttcgcaattagccactgctggcataaatgtcgatttggcaccggtgctcggcacggtggtgggcgatcgtgcctcaaatgctccgattggcgcgctggatcgtgatttcggattggatgcggccggcaacgccgaacatggcatcgccgttattgaaggtttgcgagacgctcaggtcggtgcggcggtcaaacattatcctgggttgggcgcggtaagcggcaataccgacttcaccaccgaaggcattctggatacgaccaccacgttggacggggccgaggcaggtgcctttgaccaggcgattaccaaggccgatcctgcaatggtgatgatgtcgtcagccacgtatcaatccatcgacccgaataatccggcggtgttttcttctacgattatcgacggtcatattcgcaacgtcctgaagtacacgggcgtggtgatttcggattcgatgtctgccgaagcgttgagcagctacgatgtaagccaattgggagtaaatcttgtcgaggcgggcggcgacatgtcctgcatcggtcagacggattatgtaaagccaattgtggacggcctcaacgaacgggcgaagtccgatccggctttcgcttcgaaggtgacggcggcggcgactcgcgtaatgacattgaaaatcaagatgggactggcctgaccgttcatccttgcactggcgaggattgatgcgcgctgattcgcgctaatcctcaccagccctcgtacaaatgcacactagtcctcgtacgaatcgtcagttctcgtacgaatacagaccatgcttgccgatgtattgcaccacgccgtcgggcaccagataccagaccggctcgtcgtgttcggcgcggcggcgtacatcggtcgaggagatggccaaggccgggatctcaagcgtatcgaccttgccttcgggcaaggtcacgccgtccgggctggagtagccggggcgcgtgacggccacgaagtgagcgaggtcccacatgaggtcggcgtccttccactgcatgatttcggccacggcgtctgcgccggtgatgaagaacagctcggcgtcgggatgttgggcgcggatatcgcgcagagtgtcgatggtgtaggtgacgcccggacggtcgatgtcgacacgcgagacggtgaatttggggttggatgcggtggcgatcacagtcatcagataccgatcctcggcgttggtgacgtgcttgtccagcttgaacacaggtcggccggtgggcacgaaaatcacctcatcgaggtcatacacccaggcgacttcagaggcggcgaccaagtggccgttgtggatcgggtcgaacgtgccgcccatgatgccgacgcgcaggcgtgtatgccagttgccgcgtgcggaaagcctgcctttgccgtggctgctggccccggccggtacggacaggtcggacatgcgccgttcggtttcgccttgggtgacggcaatgatttcggcgggctcggcggattccactgttttttcggactgaactgacgcagccgttttgtggctgccggtaacaccactcatgcctggccgccctcgccggcggcgtcatcggctgattcggtttcctcttcgatttcgccggcggagggattgtcttccttgggatcgatcttgcccatgtcttcatcccattcgtcttggaccacgcgacgaatctcggcgaaggtgggcagcgggaagtccggctggtagaggcggcggacctcggccacgcgctcggtgatgcggatgagcgtgtcggtcatgccgtcgaggtcgccgtcgtgctccatctggctgtatttgccgatgtagccttccatgagttccatgtgttcgcgcacgatcttgagctgggcatcgttgaggtccacgacttcgggtgaatcggtctcgggccagccgatgagcacggcgtccgcgtattcgagcgacgcacgctgggcggcggaggcgatgccgtcctcaatctgcacgaggaacacatagcggacgatgctgagccgttcggccgcgatcttcaggccgagcttgggatcgttgaggtcgatgtcgggccgcagttcgcttgccttgtttgccgtgtcagccgtagtgttcatgttgccgtcctcgttcatgcgcgcacctggcctgttccgtaaccgatccacttggtggtggtcatctcccgcaatcccatgggaccgcgtgcgtgcatcttctgcgtagaaatgccaagctcagcaccaaagccaaacacgccgccatcggtgaagcgagtggaggcgttgaccatgaccacggccgagtcgatgcgcttggcgaattcctcgatggccgcataatcctcggcgatgatggattcggtgtggcccgtggaatgcgtgttgatgtggtcgatggccgcgcccagatccggcaccaccttgatgcccatcttgagggccagatattcagtgtcccaatcctcctcggtggcgcggttgaggtcaaggccctcgatcgccgcgccggagatgatgtcatacgacgtggtgtcggcctgcagtacaacgttcgcctcggccagagcggcggcgatctgcggcaggaattcggcggcgacatccttatggaccaatagcttctcggcggcattgcacacacccacgcgctgggttttggcgttgatgatgatcaggatggccttggcgagatcaccggacttgtcgatgtagatatgcacgttgccggcgccggtttcgatgaccggcactttggagttgcgcacgacggcttggatcagacccgctcctcctcgcggcacgagcacgtcgatatggcctcgcgcctccatcatggcggtggctccggcgcgtccgtactggtcgacggattgcaccagtgcggattcgaaaccgtgtgcttcaagcaccggggcgatgacgcccagcgtggcagcattggtgcgttcggcggcgtgaccgcctcgcagcaacgcggcattgccagatttaaggcacaggctggccacgtccacagtgacgttcggccgggcctcataaatcatgccgatgacgcccatcggtacgcgcgtctgggtaaggcgcagaccgttgggcagattgtatccgcgcacgatttcgccgaccggatcaggcaaggtggccacatgacgcacgccttgggcggcggcggccacgcgcggcacgtcgaacagcaggcggtcaagcttgcccgcatccatgccgttttccttggattcgagcatgtccagcgcgttggcggcttcgatgtccgcggcgtgcccgtccaacgcatccgcaatggcgagcagcagttcgtttttggcttcggtatttgcctgtgcaagacgctcctgcgcgcgtgcggcctgatcggcctggcggcacaccgcgtcgaacacctcaggactcaattcatcgctcataacagtcaagcgtaactcacaacgcggctgattgcttactccgacccgcttgttatgggatgtctgacgttttgaatcgcaaacagaaccggctcccctccgtctcaggcgggaagccggtgacgtgatgcgctccggtcagcgaatcatcactaaccggtacaccacggtggattagtgaatcagcaaatcagtggatctggtccaggtcggggtagagcgggaagtcttcggcgagcttgtcgacgcgagccttcagcgcggtcacgtcggcggacggtccggcggcgagcgcggtgccgatgatgtcggccacctcctcgtattccttcggcccgaagccgcgggtggccagggcggacgtgccgattctcaggcccgaggccaccgaggccgggcgcgggtcgaagggcacggtgttgcggttgatggtgatgccgcaggcggcgagcagatcctcgccctgctggccgtccatctcgctgttgcgcaggtcgaccatcaccaggtgcacgtcagtgccgcctgtcagcacgctgatgccgttggccttgacgtcatcggccagtagtcgttcggcaaggatcttggcgccgtcgagcgtgcgctgcatacggtccttgaattcgggggtgccggccaccttgaagctcacggccttgcccgcgatcacatgcatgagcggaccgccctgctggccggggaacacggaggagttgagcttcttggcgtattcctgcttggcgaggatgaagccggagcgcgggccgccgaaggtcttgtgcgcggtggaagagaccacgtcggcgtacggcacaggactcgggtgcaggcccgcggctacgagtccggcgaagtgggccatgtcgacccagaatttggcgccgacctcgtcggcgatctccttcatggccttgaagtcctcgatgcgcgggtaggcggaccaaccgccgatgatcatggccgggtgggtttcgagcgcacgctggcggatgatttccgggtcgatgcggaaggtctcggggttcacgccataagcctcggcatggtagaagcggccggagaagttgattttcatgccgtgggtcaggtggccgccgtggtcgagggccaggccgagcacggtgtcgccgggcttgacgagcgcctggtagacggcggcgttggcttgggcgccggagtgcggctggacgttggcgtattcggcgccgaacagggccttggcgcgttcgcgggcgatggtttcgacttggtccacgtattcgcagccgccatagtagcggcggccggggtagccttcggcgtatttgttggtcagcacggagccctggcattgcagtaccgctcgcggcacgaagttctcagaggcgatcatctcaaggccattgcgctggcggcccagttcggagtccagcagttcggcgatctcaggatcggtttcgcagatcggcgcgttgaaagcatcggtcgctttctgcgcaaggggtgaagcggtcatgggtgctcctttggtatgggcgacaattgattcgccgttgccgccttactgtatggccggtttgtagccggcctgtttcatgatatggccggtccccgttcgatggcaatggtgattttcgccggtgcgaccggtcggctacgcgagacggacggcccttctgcccacggcccacgctagactggtgtggattcatcatccctttcaggcagaaggattcatcgtgacaaccaccttccattccacccgtagcaccaccgattcgctgaccgccaagcaggcgattcgtaagggcatcgccgatgacggcggcctgttcgtttcggacgcgttgggcaagaccaaggtggacgtggcctccctgccgggcaagtcgtaccagcagatcgccgccgaggtgctgggcgcgctgctgccggacttcacggccgaggagctgggccagtgcatcgccgacgcctacggcgaacagtggtccgatgagcgcatcaccccactcaagcccctgggtgacgattacgtgctcgaactgttcaacggtccgacttccgcgttcaaggacgtggcgctgcagatcctgccgcgcttcatggcgcacaccacgccggccgatggcgacgcggacgagaagatcatgatcctcaccgccacctccggcgacaccggcaaggccgcgctggccggcttcgcggacgccccgggcaccgcgatcaccgtcttctacccggaaggcaaggtctcccaggtccaggaactgcagatgaccacgcaggccggctccaacgtgcaggtggccgccgtggaaggcaacttcgacgacgcccagtccgcggtcaagcgcatcttcggcgaccgtgccctggccgagcgtctcgccggcaattcgcacgtggtgctttcctccgccaactccatcaacgtgggccgtctggtgccgcaggtcgtctactacttctccgcttacgcccagctgctcgccgaccaggtgatcaatgtcggcgatgaggtcgagttcgtggtcccgaccggcaatttcggcgatatcctcgccggctactatgccaagctgctcggtctgccggtcaagcacctcgtggtggcttccgacaagaacaacgtgctgttcgacttcctgaccaccggtacctacaaccgccagcgcccgttcttccagaccatctccccctcgatggacatcctcatctcctccaacctggagcgcatgctgtactacttgtccgagggcgacacccgtctgatctccatgctgatgaacgacctcaacaagtggggcacgtacgagatcccggaagaactgctggccaagattcgtcagatcttcggcaccggttgggccgatgaggatcaggtacgcgagtccatcaagcactgctgggacgagaaccactacgtgatcgacccgcacaccgcctgcggctactacctgcttgagcagatgccgcgagacccgctgaccccgcgcgtgctgctctccaccgccagcccctacaagttcccgcgcgtggtgaacgaggcgttgggcttcgacgccaccggcaccgacttcgagtgcatggatgtgctggcccgcgaaaccggtaccaccgctccggccgccctgcgtggtcttgagaccgccgacgtgcgcttcaaggacgtcgtggccatcgacggcatggaagattacgtcgaaaaggccgcccagacgctgtaaacataccagcacattggctcccctcagagaggggagccattttttacatcagaattgcgtttacatcagtatcgcggcgactggcagtcctatggcgattgccaacagcacgatagtgccgatgatcacgctggggcgtgcgaggttgacggtccagccgacgccgaaacgtttaggaaccatgatggccggatcgtcacggttgatgtagatgatgccgccaatccagtgcaggtcatcgtcatacggcataacatcatcgtccgaatcgtcaccgccgtcactgtgccgaacaccggcatagacgcgcgccccgttctgcccgtaatacacgccgatcatcagcgcgccgaccagagccgccacagcgatgaacatgccgatgatgccgattagattgacatccagcacgccaatggcgacaagctgaacgcctaggcccaatccaccggctgtcagcagtccgatgaccagcacgtagatgctccagacccgcgagaacacaccataggcatacccggtggtggcggggtggtcgggatcaatcgggtgcttggcgtagatgatcgcgacatggctggccaccatcaccgctgccagcaccacctgcgcgagcacggcgtaccaaatcaccatcggactcttctcggcccagccgttcacattgccggcgatatccgcatgaatcggcacccgctccggcatccggtcatagcccagca

SEQ ID NO: 1270 - DNA, 4289 bp, Unknown
  R157_18m  MAG No. k141_2038
ggcgatggcctcgttgcgggcacgcatcagctcttcctcatagccctggctgcggccgccgaacatgttacgcaggcccgcgccaagatccttgaacatgttcacaccggataccacttcgccgaagacgatgccctggtagttggtgatggtgtatccgtcgacggacggggtggtggtgacgagaatcatggcgaggctcctttggcttgtctgcgtagataaatcactgccgagagtcggaccgttcccgaatctcacctcggaaacggatcgcttctcttggctaccacaatagtcggcagcgtccacaccgacattttcgacccgtccgatcgcataatcaaaagcatcaggatcgatatgcaaaaccaccgaggatcgtggatcgcttgtggatcgtgaagcgttgtatcctggttgttcatggagcgggaacgcaaaatcattaacgtcgtgggagctgcaatcgtcaccaacggcaccgtactatgcgcccagcgtggcccgggaaagtcgttggccggatactgggagttccccggcggcaaaattgagcctcatgaaacagcgcggcaagccttgcaccgcgaaatcgaagaagagctgttatgcgaagttgaggtcgcggaagaggtatgtaccagcgaatacgcctacgactttggaaccgtgcggctcaccacattcatctgtcacctcatcgccggtacgccgcatctcaccgagcacaccgatatccgatggctgaatcctgctgatatgccgacattgaactgggctccggtagatcgcgaagcagtcgcgattatcgcgaacaaacaactgacgctccgatgaacgcgccacagcgcagtcaggcagtcatcaaacgatccgaatcgcaagggaacagggcaacatgtctataaatctggtcagcacctcagactctccagccaacacgcaacatcacgattctgatccaaccccctcgatcctcgaagatgtcatctcaggtctgatcgagccgcgctcagatgctcccagcgaatataagccgaccctcatcgcaaatcgccccggtggattgaccatgcgcgaggaaatcggcaattccttggctactagcgattccttcgacatttctgtcgcattcgtctcggctgaggccgtgctcagcttatttgaagacttcagaagtcaccatgaaacagcgacccgagcgggcacactgattacctcaacgaaaaatcatttcaacgatcccagggcattctgggagctgctgcatcttcagaacaccactggtgttgacgttcgcgtgtgggaaggttcccgtaatacctcagtttccgcaatggctcaaggacaaccattccatcccaagggatatatcttttctcgccgcatgaaagacggcacaccctattacgacctgtacgttggcagttccaatctcactggagccgcattgaccacgcaacgcgaatggaatctcaaagtctcatcgctggcggatggagagctggtcgggcagttccaggatgaaatcgactcacaggtggctgattccgttccgctgaccgaagagtggatcaaacagtatgaggaagatttcaagaaatacgccccaccgcgtcatgagattctgcagtcgcttgaggggcatgacattcagccaaacgccatgcaacaggaggcgttggcgaatctcaagaagattcgtgaacaaggcgagcaccgcgcaattatcgtgtcggccaccggcaccggaaagacgtacctttccgcattcgacgtacgcgaatgccagccgaagcgcatgctgtacatcgcccagcagcagatgattcttcaaactgcaatgaagtcttaccaaaaggtgctcggctgcgatgaatccgaattgggattgtattcaggcaccagcaagcaacaggaccgccgctacgtattcgccacggtacagacgatgcggcagccggaggttttggcgcaattcaaatccgatgaattcgactacgttctggttgacgaagttcatcacgctggagccgaaggatatcagcgcgtcatcaatcatttcaaagatgccgacttcatgctcggcatgaccgccacgccagagcgcaccgacggcatcaacatcttcgagctattcgggcataacatcgcgtacgaaattcgcttgcaaaaggcgttggacgagaacatgctctgtccattccactactacggtgttgcggaataccttggctccaacgacgatccgaatggaatcgcccatcgtctcgatgtctccaagggccttgatgcgaaggactcgaaacagctcaagtacgagatcgagcagcttgccaccgaaaagcgagtccgctacatcattgacaagttgcaggaatatgggcagttcaacattccggtcaccggactcgtgttctgcagtcgacaggaggaagcccataagctatcccagctgtttaaccaacagtggaatcaacaagccgaacgcccctatcgcaccgctgccgttaccagcacggacgatgacggcaggcccgtgtcccaaacgcagcgagacgaatacgtccgcaagctcattgaaggcgaactcgactatctcttcactgtcgatatgttcaatgagggagttgatattcccgccgtcaaccaaatcgtcatgttgcgcagcaccgaatccagcattatcttcacgcagcagctcgggcgcggactgcgcaaattcccgcacaaagaaagcgttgtggttatcgatttcattggcaattacaacaacaactatctgattccggtggcgttatacggcaacaccggcgaccgcgacagagctcgcaagaacctgcagagaaagtcaatcggcctgtcgtccatcagtttcgacccgatcgccaaggagcgcatccttaagtctttggacaccgccgactggtccgacatgaaaaagctgtccgaacagtatcgccaagtccgttacgagctgggccgcatccccatgcttacggacatctataactacgacccctcactgccgtataccatcgcatcgaagcgcagcaactatcttgatttcgtgcgttcccgtgaaaaaagcctgggcaaaggcaaacatcatgaagcgacatttgaggatcagttggagccggtgaccgacgttgaagacgcgatactcaagatggcagcggagctgctgctgcccggattgcgaccgcacgaattggtcattcttgctcagctatgccatttcgtcagcgaacggctcgacgacgacgtaccgcagcattggagtgcgggctcgccaatcggccgcagcgaattgctcgatgcgattcgtactgaattcccgcagtccgatagttcagacacgcaattcgactctgcgatcagcgtgctcgattactcatatttcaccggcccaaactgcaatcgtttcggcaatcagccattagtcgaagccgtgaacagcaccggcacagaaaacggtaccgcatatcggttgaacagcagattcgccgatatgcttgccacgaacagaacgttccgtatcttctttgcggacactctgcgcaccggtatggccaattgccgagatatattccgtgaggccgccgacaggcaacaggtctttgatcacatgttcttgtacgaacgcaaatattccatggcagacgtcatgcgactgtgcggatggaagaaggagaatactccgcaaaacgtgggtggttacctcctcgacaaggaaaccaataccatgcccatcttcgtgaaatacgcggcaagtcaatacgaagatgaattcctgagcacacaggaaatgaaatacttcagcaagaatggacgaactccgcagtctcccgaattccaatgggcgcttaacggcattggcccgaattggggccagacgcatttcgtcccgttattcgttatgcgcaaggcggaagaggccgagggtaagtactactacgttggccacgttgctgcgtttgacaaccctcagctcaccaccaaacctgacgcaagcggacaaggcagcgtgaaggtcacgctgtcgatcctgcggttggcccggccaatcgatccggagctctatcggcatttggtcagctgatgcctctcaactccgcaagcgtacggcggcggccattccgccgtcgccgtaggtggggtggagcatgaaggcttggctggcggcgatgtcaccgcgcatcaacgattcccacatggttaagcggctcatggagatggcttcaacgccgaggatggcgtcggcgatgtgcgcggcgtagaga

SEQ ID NO: 1271 - DNA, 42157 bp, Unknown
  R157_18m  MAG No. k141_2058
gcgcgaaatcagcggtcgttcttcgcttggttgggcgcggaaagtatctgcggcttcgcgcagttgggtggactacaggaacagcagatgaccgttgccttgctctgcacgagcgttgcacttacaaattgaatccgggcgctggggtttcccacgtggcccccgactagactggatgaatatgcgatccttcttcgaagccatatccgtgtcctgcgtcatccccgcgcaatcgccggcggatgacgaacgcacggtgttcgacaacctgtccttcagcatggaacgcggcgacatcatcgatctggtgggtccgtccggctccggcaaatcgagtctgctgaccgcatgcgcccgactcaacccgcacgcgcacggcacgttcgtcctcgacggcgtgggcagcgacgaattcagcgcgcagcagtggcggcgggacgtctcctatctgccgcaaaaaccgatcctgaccggcaaggacgtggccgaggcgatccgcctgccctggacgctcgcgattcgcggcaagggcggcaaggccgagcagctgctgcccgacgagcgcatccgcacgacgttggacgcgatgggctgcaaggacatcgacctggcgcgcgccccgcacgacctgtcgggcggtcaggcggcacgcgtggcgttggcccgcacgctgcttaccgacccgaaggtgctgctggccgatgaggtggacgccggactcgacgacgacaacgcgtccaaagtggccgcgatcatggcggacgcggccgcacacggcatggcgatcatccgcatccgacaccgtccgccggacggacgcgccacccgcacgctgatgctcgatgcgggacggctcaccgatctgacgcgggataaggaggtgcgcccatgaacggcgcctacgacatcgacacctggggtcttgttctggcgttgggcatggtggccgtggcggccatcgtcagcgaactcatgcacatgggcatcggcaggaccctgatgtggtcggcatgccgcgccctcgtgcagctgtgcgccatgggattcatcatcagctacgtgattcgttcgaacagcgtgtggatggtgttcgccctgatggcggtcatgctggtcgcggcggtgcagatcgtgatatcccgcgcgcgcggcatccccaaaggtcttgccgggccgatcttcctgagcctggtcatcacgatgctgctcatgctggcgttggtcaccgagctcatcgtgcgcccgcacccgtggtatgcgccccagctggtggtgcccctgaccggcatgctgctgggcaacaccgtttccgcgctcgctgtcgggctgagccgattctatgaaagcatggaggaacgccgcgacgaggtggatatgatgctggccttgggggcgacggcatgggagtccgcccgcccatccatcatctcgtcgattcggctgggactgctgcccaccaccgcttcgctggcctccagcggcatcgtgaccatcccgggcatgatggcgggccaggtgatagccggcggagatccgctgaacgccgccaaataccagttcgtggtcttcggtgccatcgccgcgctgaccttgctggccgacggtctgatcatggccatggtctatcgcacctgcttcactaccgacgaccaatatcagacgcctaaagcacgatagcctcagtatcgatcccaggccaagcctcaggcgatggtgaccggcgtgccttccggaatttggttgtagaaccattcggcatcggccacagtgagtcgcacgcaaccatgtgaggccggctgaccgagcttgttgccttcctcttccatatactcgccggagttcgccccggtcggcaccgagtggaagaggaacgggccgttgaatcgcacccaataatcagcacccatgccttctgcgggattgtagaagtgatcgcctctcatcccgataacatagttgccgcgcggggtcgtatcgttgagcccggtgctggcgatcatcgtgtagatggtctcaccgccggattgcacatacacttcctgcttggcgatactgactttcacgctgagatcggagtattgcgacaaatcaggctgcttgccggtgggattcgtccatcgcgcacgttgcgcttccttgtcacgctgctcctgaatcgcctggttaaagaccggtacccgctggcggtccaaggatgaggccgatgcagacactcgcgatgccgactgttgcgcggattgactcaccttctgcgcctgcccctgaacctctgcctgcccctgtgcgaccgactcaccgcggggccacacccgttgggcgtcaatcgtcgagaagacggcaagaacgcagcacaacaatgcgcataccgcaaccacaatgcgccgtacaacgtaaattcgttgacgacgaatcctcatccgtgctcgacgccgctcagtcatgtcttccttctcgttgcaaagacttttgccgtaagtattgtagccgcttttacgatacgtcgcgtaccaatatcacgcgcgctattccgctgtcactattcctattccgttgccgtccacttacgtctcagcaacatccacaggccgatgatcacagccaccacgccgagcccgatgccgaacagtcccgaggattgcgccgcgtgcgcggttccctgggattccaacagcacgtcctgcgtgaccaccagcgacagcatcgcatcgagaaggtcacgaatttgaccgacgaatcgatggggttgtgcgtcttatgcgaaatcaccataccgcgaatcgcaatcaagaagaacccgcaacttacgcagcagacggtcaatcgccttaaggaggcgttctggaagctgtatgaaaccaagccgatcgagaagatctcggtgcgtcagatcaccgaactcgccggctacaatcacgccacgttctacctgtatttctcgtccgtgcgcgacgtgcgtgaccagatcgaagacgacctcatcgcccagcgagacctcatattgaagcagtgcatgcatgacggcacactccccagcatcgcaccgcatatgcaaatgccatcgcaatcggaagcagcgcagcagccagcggcatcaccgcaagcccagtagcgaggtcaacccacagctggcggcgcgggaaacaggtcgcgccgcccagtacacgaatccggcgagcttctaccgagtcgcgaggaagaagaaacgcgggaaggggaagatgatgctgccgtccgactgtgtggggtattcctcgcggacttgggagaacacttcggcctcgaacttcttgcggccggcgtcgtcaagcgcctgcagatacggacgcatgccggtgccgcgataccagtccataatcgcctcatgcgagggcagcgtgtgctcccgtttgaatcgcagatactgttccgaatcccgggtaaccatgctccccacgctaatcagccgttcacatatcggccgatattatctcacaattcagccaagcagggcgtcgcggcgggcgatgagcccgtcaatcgcggcctcgccttcgatgacggtgaaggtcagggacttacgttcgctggtctgcggggcgatggtgtgcaggtcgccgcgctgctcgtgccagccgcggccgtggacgctggagttcgagggttcgaggccgaccacgtagtcgcccgcacccatcgacttccattccatgaagtatgggaagaggctggcgtcgaagtcgatgacgactccaagtccgagcttgcggttgaccacggcggcgaagctgcggccgttcttgtcggcggcgagctcgtgcaggtacacgctttcggggcggctcgcctcgggtgcttggatttcgttccacggcgtggtgtcggctgcggtggtctcgtcacgcggggtggccttgcggctggggatcacgacttcggcaccttcggcgagcaacggccagccgaagttgcagtggtacatccacatcagcggctcgtcgcggaaggattcgttggtcacctcatcctcgaccgtgatcgacggctggccgtacacgctggtgatcttgcggcgcatcaccagattctcgccgaacagttcggcctcgcgcatttcgccggagacctcgagcacgtagtcgccttcggcggtccagtgggcgtcggagcccacatgctcggccggcgtggtgcggatgcggccgtgcatcgggaagctgccggccgggtacttgccgccctcaggcgtgacgtacggcgcgcagatgttctcgaagccgcaggtgaagaacaggccgcccatgatggagcgctgcgcctccagcccgttggtgtcgaactggttgcggccgttcaggcccggcttggacaggaaggtgaggttctcgccgcggtattcgaactggcagacgtcgagggcgcggtcggccatggatacgaagcgtagcgggccgttcttcacctcgatggccttgagaccgtgggcacggccctcctggtactcgatcgggcgcacgtaggcggcctgctgaaggctgcccatgtgggccaacatgtcggctcgcgtattgtgttctgtggatgtcatcgtcgtcaccgctccttgcaatcatcggcttgttgtccgtgtgcacatcatactgtaagcgttttccgcaattgtcgctatcaacaacgtatacgcatgtcgaaaagttggaccgaagaacaacgcaagcacaacgaaggctccccgaagggagccttccatcgtagcacacgttacgcgagaattcgtcgctcgcgctttacgcttccgcggcatcgtccttcagcgcacgcagcagggccttgttgcgggtttcgatgatgcgcttgccgtcctcgccctgccaagagaagaagccctgaccggtcttggcaccgaggttgccttccttgaccttttcggcgagcagcgggctcgggccggtgccgttgtccatgtcgtcgaacaggtaggtgctgatgttgtagaacacgtcgagtccgccgaggtcgatgctggcgatcgggccgaccaggttccagcggcggccgaggctgtacttcatcacgtcgtccacggtggccgcgtccgctatgccctgctggacgatgtagaacgcctcgcgcaacacggccagctgcaggcggttgcccacaaagcccagcgattccttcttgatctttgccggcttcttgccgatcttggccatgaggtcgaaggtgatgtccaccaccttcggatcggtcttttcacccggcaccacttcgaccagcggcatcaactgcgcggggttccagaagtgcgccaccacgaagcgctcggggtgccccatcaccgactgcagcgcggtggggctcaggccggaggtgttcgtggacagaatcgcgtccttgggggcggcgtgctccacttcggcccagacggacttcttgacgtcaaggttctcggccacggattcgatgacgaagtccacgtccgccacgccgctcgcatagtcggcgtaaccggtgatgcgggccagcaccgtgtccacggtgtcgccggccttgagcagtccggcttcggcgaagtcctcggcatcagaacggatcgccttcatcgccttctccagcgaggcctcgctgcggccgaccagatgcaccggatatccggccagcgcgaactgcaacgtgatcgcatggcccattgttcccgtgccgacgttcgcaatcgtcttgatatcgtccgctgtctcaatcatggagaccccttctttccggcggttcgcctggcgttggtgtacgcaggaacagcaccgtgccgttatgcgtttgctcgcattctatgccgatttcgctacgtgaacatttactgaacatttcgcggattcgactagcacaaatccctatatcagcacaaaagcgtggtgccgcaacaccgaagtgttacagcaccacatgcaccacgcacgtcacgcacagcacgcgtcacagcatcacgctgccatccggaacgtcgacgatatcgccagacgcgcccaaacgtgcacggaacggacggccatcggagctcgcgacctcgatgccagccggcgtacggcgcgcggtgaaggttacggcggaaccgtcgatttccgtaataacggcttcggcggtctccacatcatccacgaacacggagaccagcgcgttctcaccgtacacgcggtctggcttggtttcgccggggttggtgacgatgacgctgccatcgcgcgcccacagcggaatcgaatcgtagccgtgggtttccttgcgccaaccaccctgcgccttctcgccggtcagccagttggtccacacgccgtccggcagatagtaggaaacctcaccggagtaggtgaacacgggggcgaccagcatggacggaccgaacatgtactggcggtccagcgtgcggcatgccgggtcatcggggaactccacgaacatggaacgcatgaccggggtgccgttcacatgaggctgcaggccaagctggtagacatacggcatgagttcaagcttgagcttggtgaactcgcgcaccacatccacggcggtctggccgggcaccaatgcgacgccgttcttctcgtcttcctcgtcgaacagccacggcacacggtacacggtggaaccgtgcagtcgcgagtgggagccgagcatgccgaacgccacccaacgcttgtagacggccggatccgggaacgcaccttcgaagccaccgatgtcgtggctccagaagccgaagccggaggaggtcagcgacaggccggcacgcaaggactgggccatgccgttgaaggtggactcgcagtcaccgccccaatgcacgggctgctgctggccgccgacggtggcggagcgcgcatacagacaggcgttgcccttgccgtaggtttcttcgatggcttcgaacacggcctggttgtacagctgggtgtaccagttgtgcatggagagcttcggagagccgtcataccagacgacgtcgcgcgggatgcgctcgccgaaatcggtcttgatggcgtccacgccctgattcagtaggaccttgaccttgtccttgaaccattcacaggcggccgggttggtgaagtccaccaagcccatgccggcctgccagaagtcggtctgccagacttcgccattgggcttgcgcaccagatagcccttgtctcggccttccttgaacatttcgccgcgttggccgatgtacgggttgatccaagcgcagatgtgcaggcccttgtcttcgtgcaggcgcttcagcgtggattcgatgtcgccgaagaaacgcttgtcccactcgaaatcgcaccagtggaactcgcgcatccagtagcagtcgtagtggaaggcggccagtggaatatcacgctcggccataccgtcgatgaaggagttgatggtggcctcgtcgtatttggtggtgaacgaggtggtcagccacagaccgtagctccatgcgggcacattcgccgggcgtccgacgagcttggtgtagcggtcgagaatctgcttgggggtggggccatagatcacgcagaagtcgatggcctcgccgggcacggagaactgcacggcctcggtgttctcggaaccgatctcaaaggagacgtggccgcggttgttgaccagtacgccatacccattggaggtcatgtagaacgggatgtccttgtagccctgttcggaagcggtgccgccgtcctcattccagatgtcgacgctctggccgttcttgacgtacgcgccgaagcgttcgcccaggccatatacgtcttcgccgaccgacagatgcagctggatggcggtgaacacgtcggactcgtcatgggcggagccgtccatgctcacaccgaattcgccgaccggctgggcggtgacgttcgccccggcaccaagattgaaccgggccagcgacttgcctgctgactcggtgagcaccttgccgtccccatcaaggaaggcaaggttccaaggcgcgcccttgacgaccttcgccgtgagcccgccggtggtcagcgtgacgtccgcgccattgacgccgacttcgccgtcgccattgccgtcagccctgacagtcacgtaatcccggctgccgggcttgtcggcgttgagcgggaatccggggtattcggtggcaccctgccagtgttcggcacgcacacgaatcacgccttccgcaggtgtggtgatgtccacattgaatgtgggcaggttcagggtatcgtatcggccgcgcaccacggaggtcggggcgaggacgttgaggctttcggtggtggcatccgccgccagttcgtaggcttcacgagcgtagagggcgtcgacgccgtcacgaatcatccagtagccgttggtgaacttcattgttgctgctccttggtggagaggtggtttcgacccccagggaacaaggcggccgaaaccaaaatcaatatgtactgcttgttgattgaattgcctgttgtgcgaatgaccttacttcaccgcgccggtggtgatgccgttcgacagcgtcctctggaagaggaggaagaaaatcaaggtcggcacgatactgatcagcgaggcggaggccgtggtcgtcacatccatcagacggtcgccggacagcgaggcgatggcgatcgggacggtctgcgaggagttgtcgatcaggaaggccatcggaatcatgtagtcgttccaagtccagatgaagaagaacaccagcatgacggccagggtcggcttcgaaatcgggaagacgatatccttgagaatcttccagcggcttgcgccatcgatggtggccgcttccagaatcgccttcgggaaggtgccgtacaccgacgacaacaggtatgtgccgaatgcgctttggatcacggtgaagatgatgacgatggaccacgggttgttgtacaggccgatttccttgaacatgatgtacagcgggtacaggagggcttcctgcggcagcatgttcgcgagcatgatcaacagaatgatccagcgacggcccttgactcggccgatgccgagggcgaaggagttgaacacggacagcaccacggcaaagattgccaccaggccggaggtccagatcgagttccacaccttttcggggaagttgacgcgggtccagaacttgatgaagccatcaagcgtgaacgaggcaggccaggacagcgggccgttggcgttgtagtcggccgaagtcttgaaggcgttcaggcaaagaacgacgaacgggaacagcatcaccaagccgccgataatcagcagtacgatgatcagccagtcgccggcggtgcggttcttcttgactttggcgattttcttcaattcagctgcgctcatggtgctcattttttcaatcactctccgtcctcagcttcgaccttctgctgaaggttggtgaacacgatggccacgataatgatgacgactgtcagagcggtcgcaatcgcggcgccgtagccgacctgctgtacctggaagaactgggtgtaggagtagtaggacggcacgatggtggtagtgccggggccacccttggtcagcatgtacaccggggcgaacaccttcagtgccgcgatggtgcaggtgagggccaccacgaagatctccggcttgatggacggcagggtgatggccctgaagcgctgccaccagttggcgccgtcgaggctggcggcctcgtacagttccggatcgacgcgctgcaggccggacatgaagatgaccaacggatagccgacctgaatccagaccatgatgagcatcaggaagatcagggccgtatccggtttgccaagccagtcatgttgcaggcttccaaggcctatggcactgagcaatgagttcagagcaccgttctcagctcggaaaatccaacccatgaccagggagccgatggcgataggcagcagctgcgggaagtagtagacggcgcgcatcgtggacgcggccttggggctgaacttcttctgcacaacgtcgaagatcagcgaggagaggatcagaccgagcagaatcgggatcaccaccatggcgatgatcatccagatcgagttgcggaaggaaatccagaaggtatcgtccttcatcagtcggacccagttcttgaggccggcccagaccggcggcctaatgccgcgatagttagtgaaactcagatagatgttccagatgcccggaacgatgatgatccaggtgagcattgccacaccgggaatcaggtacaaccagaaacgattcgaagggctgcccgggatgcgcgacattgcggtttcttccgggtgcttggctttattggtctttgttttcatcagacacttctaaacgtagagcatgcaagattgttgggacacgaacggagacgcgtggcggcaagggaaggagaaaccgaccacacgccttcgttcgcctattggaggaagggaagaggaaagaatcgaatgctaatcgacgacgatgccggaagattcaaggcccttgtcgtagttgtccttcatctggttcagcgcggtcttcacgtcggcggtgccgttgaccagctcctgcagggaggcattgagctcatcgtagaaggtggaggtcggccaatccgggtagaagccgagctggtcttccttgacggcgtcatcgaactgggccacgaattccttggtgccctcatccttgatggaatcgacgtcggagttgatggccaggccaccctgctcggccatgtaattctggacttccttgctcagggtgatgttgatgaacttggcagccagatccttcttggcggagttctgaggaatgacccagacgttaccggaggagccgacaatcttcttggtgtcagggaacttggagtaggaaacattcagaccggcggcctcttccttgaagcgagcgtgccaccaggtgccggagaagaagatcggattggtgccggtcatgaagttctggccggcgtcctcagccttgaggttggtggaatccttggagatgtagcccttgtcgacccattccttgatcttctcggttgcgtaggtgagcggttcggaattccaatcgaccttgccgtcgtacatctcgtaggccttgatgaacttgtcatcggccttggagagcaccagctgccaccacaggtgctgggtcgggtactcggcggagccgacggacagtgcggtgatgccgttctccttgaacttggccatcgcgctttccagctcgtcgaaggtggtcggaatcgcgatgccgtatttgtcgaacatgtcctggttgaagtagagcaggcagtcctcaccgtagttggtgatgccgtaccagtcgccggagcccatcacgccttgctcatcgtacttgccggtgtcggccaaggaaccggtaatgatcttgtcccagccatattcggacacgtaatcgttgagattggtgagcaggccttggctggcgagcaggccggacgtggcgttgcccttgttgtattccataacgtccggagcgtcgtcggagttgaggatctgggaggcgttctggcgaatctgttcgaaggccttcttctcgaattcgaccttgacaccggtctccttttcgaagatttcgatagccttgtcccacgccttgccttgcgctgtggtcgattcctcgtagtgccagatcttgatggaggtggggttctcctcctgtgcgacttcaccgctgccaccacagccagcaacaccgatcatggtcgcaactgcaagtccagcggcgataaatttgcgagtcgacttcatcgttttctccttttcagcttctttactgatgagagaacatttcgacgattattgaaaccagtcgaaatgccatccactggaaatataacggattggcaacgacgttctcaaattatttcgataaatttcgacgttaatttcaacgacttttcgatgtgagcgctctcattcttaacgctgttaattcatgttcggaatactgcataaaatgtgactattcacataaggcgaatagccataaacacccgagctcctgtcagctgcgcgagcatttcgccatggtgccacgtgcgatataacgcgaaggaagcatctccacacggccgacatcgtcacggtcgccgttgagcacctccatcatgagatccactgcacgcgagcaggtttcggtcggcatcatcggcatctcatccacaccacgcggcaaagatcccagcccatgcgtgcatgcggccatcaccgaaacgtcatcgggcacgcgcaatccacgatcctgcagaccgttgagcacgttggccacatgcgccgcattcgtctggcaaatgatcatggaaatcgccgggtcttcaaggaatgtctcatccaacatcagattgacgtcgtcacgcccattgccggtagagggcttgaagatcacggatatgccgagatcatcgccctttttctttgcggcgtcaagaaaacggaccaggtaattggagccgtcttcatacgcgctgctgtccacgccggacaccagcacatggcgatgccccagcgcatacgccttctccatcgcctcgcgacccatacgctcgaaatccaaatccaccgaatacaccgcatcggaattgctcgggtacccgaccgccaccacaggcatgtcgagagcgcgagccacatcggcacgggcatcgcacatcagcacatccaacagcaggatgccatcgaccatgccttcggcggcgacccgggtcagttcctgatcgccgtattcgtgcatgagcagcagaaggtcatacccatatcgcttggcgcgtatggcgagcgcaaagaagaacacggcgtaattcgagtaatcggtgtattcatggagcggcgaactcaacgccagaaccttggtcggaccgctatgccgcagctcctgagtgcgactcggcatatatcccagctctttcgccgctttcagcacctttcgtttggtctcttctttgatggagcgctttccgctcatcacatacgacaccgtgctaatcgatacgccggcacgtgccgccacatctttgatacctgccaccaccacacccccttaatggacccaccacaccacgaatgttgactctttatcatacgttatatacgccggtctcacacattttcatgctttatgcaaaaatgtgaggtatacgcacatttcccatcaaacgcacaggtgcaagaatggcagcaattcgccattttctgaaatcaccatgtgcgtttgacggcgcgtaagcctcaccttgttctcagcaggaccgaatttctgtgagctccctatagcgctcccctacgcaatatgtccgcaaacgaccacaccacatgggcgatacgcgccaattcggcgtagcggccgatggacagccactgcacacggtaccgttcgaaccacaactccagatcggcggcaagacgggcgcggcgcgaggcatccagcgcacggccggtcacatccttggtgtcacaggcgtcctcgccgccagccagtaccagcagttcctcgcccagtctattgaacaaccgctgcccatccagcatcacccacagcagttccgggttcaatcctcctcgtgccgagccatcgagcaccgcaacaaccgcactgccgcaatcgatcaacgcccggtcgcaatcccggcgtcgttcgagtcgggcatggttccgcaggagcagccggcggcgcgcatcggcgcatcccagcgtacggtcaaacacgagctctcccccgcacgaccgttccacatacgatgccacatccgtattcagcatgccggtgccggaaccgtattccagctccagcacctgcacggcaaggtcccaggggaatgacaccccatcggagtcgatgcggacgaggcaatccatgatgcgaccggactcgtcgccatacaccagaacggagatccgacggttcatctcatgcgcatcgatctcaatcggattccacgcgttctgagcgccataacacaggcccggcacgctcagacgcggatcgttgacgtggccgtaatcgccccaatcggtgaccaccatgccttccgcgccatacttgacacccgccaatgccatgtgatacgtgttcagccaggcacccgcataatcggggaagaaccggctccaagcccgcaccgcggggcacacgaactggcgacggccctgcgcggcgatggtctggatgttgctctcgtcgatctgcggctcgtacatccagttgagcatcgtgatgtcgccgggcagcagatccatcgtgcgcgggctttcgagcgcgatgtccgcccacaacatcggctgccgaccatggcgggcgagcgtttcgcacaaatccctgacgaaaccggcatacagttcatcgcggccggcttccggcgcgtcctgcgcggacctgccacgtcccaagtcgaacgtctcatcgccgccgatattgaaggacttcgaacggaacagcggcgcgtattcctcaatcaggcgcgaggcgaaatcatgggccttgggatcggcggcgttcagcgtgtgatgctccatgcgttcgatgaagctgaacgggcggtcggcgtcttcggggaactcacccagcccacgatgctcacgggtgcgcagattcatgtacatgtgcccgaacgtggccaacgacggcaccaactcgatgccgcgacgcgcgcagtactcgtccagatacgtgatgtcggcggccgtgagcggatcggtgccacgccacgcctcgctgagctcgacgaacgcgaaggcatgctcgacatatagctggaactgattgtatttatataaggccagctggtcgacgaaccaggtgaggaactccatcgtcggcactcgtccgcgtgtcacgtcgagactgtaggcgcgcaccgcgaacgcgggcttgtcttggatatgcaggcagggaatggcacgcgaggtctgcccgatgatctgccgcagcgtctgcagaccgtaccgcagcccgctttcgccgccgccacgcacggcgatggtatctgaggcgaacacatccagcgtgtattcgtcatgcgccaatcgtgaatccaggcccagggatatgacggtgccgttcatcgctgccggcgcacccgcacgcgcatctcgcgcatcttcggcggcattggcgctggcgtcgtcttcacctgtggctgcacggacacggcgcgtacggacggtgacgccgcagtaacgctcgagctcgctggacagctgctcaatcggcagcgtttcccaagtctcatcggcaccttcggtggcggcatattcgggaattcgtttctcgatcgtcaccagggacccgatcatagccgtgccatgcgtgtattccaatgtcaccggagcgggaatcagggtgagacacagcgttgcggcatcgactgtatattcgaatgtgggcacagctgttcctttcatactgtttttattatcgttcgtccgctaatggcaggcgacacgtggtcgcgccgccatcagcggacgaatcgttggtgaggtacggcggcatacgctatttcacggcaccggtcgtcacgcccttcatgatgttacgctggatgagcatgaagaacaccaccaccggcagcgagaagatcaccgaagcggccatctgcccgccgaaatcggtgcccatggtgggtgtcgagaaggacgacagccataccggcagcgtgtacttcgactggtccttcatgaacgtataggcaatcatgtagtcgttccaggcgttgatgaacgcgaacaccgaggtcgagacgatgccgggcgcggccagcgggaaggtgatcttccacaggatctgccagtcgttcgcgccttccacggccgcggattcgaagatgtccttcgggatgttcaggaagaacccacgcatgttccagatcgcgaacggcagcaccatggcgatgtacgccaagatcagaccgctgtatttgttgagcagcccgagctggttgtagatgatgaactgcgggatgatgccgccggaggtcatctggatggccagtacgaacaccatgatcggcttgcggccgcggaagcggtacagggtcagggccgcgcacgcgaagaacgcgacgatgatcgacaggacgatcgagatggcggtcacgaccacgctgttcttgaggttggtcaggaacgaggtctgggtcacggcaacgatgaagttgtcgaacgagaggtgcgtgggccagaacacgggggtcgtggtcatgatctcatcgcgaggctttacggcggtgataatcatccagtagaccgggaagaaccatacgacgcagaacagcagggcgaggatagtggtgccggcgcggcgcgcgatcttgccggggttggttcggcggcggggcgctgcggcctgcgatacggcctgtgcaggacttgcactcattgacgtactcataggtcctctcctgacttgagcaggtaacggatgtacacggaggtcagcgcgagcagcacgatggtcacgagcacggaggcggccgaaccggtgccgatttcgaagctgacgaacgccttcttataggtgaagatgccgatggtggcggtcgtgtcctgtgggccgccctgcgagatgagccagatctggttgaacacgttgaagtcccagataatcgagagcatggtgatgaccatgatgctcggggagatcagcggcacgacgatctgccagtagcagcgcagcttgctgcagccatccagctgggcggcctcgatgcaggactggtcgacctgggtggtggccgcgtacagcgtgatggcgatgtatggcacggcctgccagaccacgagcagccagatctccagaaatgcgagccaggtgttgtcgatccaggaggtgttggtcatgtcgccgaagacgtgcagctgggtgagcagccagttgatgacgccgtaaccgggctggaacagccacttccagaccaccgaggatgcgacgttcggcatggcccacgcgaagatgagcacgaagatgaccaggtagcgcatcacaccgccgagtttggtcatcagctgggcgactcccatgccggccagcacgctgccggccacgagggctgcggtgaagccgaaggtgcgtagcagggccgcatagaaggccgggtcggtgagtacggattggtattgcttgaggccgacgaagtcgaattcgccggtgaacagcgtgcgctggctgaaatccgtgaaggacgtgaagatcatgaatcccagcgggatgaccaccagtgcgatgatgacgatgccggcgggcgtcagcagaaacgccggggcgcgattgccgcgtttcttagccggccgtgaggccggggcctcgccgtgcgcgagttgcgttgagcttgtcatggtccaacccatcacttggcatacagctcgttggcgtgttcgtcgaacttcttggcggaggcctcggccttgctggtgtcggtggcgatgtccttgaacagggtcagcgagccgtcgctttcgatggtggtccactgcggggaggcgggcgtggccttggtgcgcttggcggcctcgaagaagccggtcagggcggtcgggaagtcgtcggaggccatggccttgtccagtccttcgacgttgttgggcaggtagccgtccttggcgaacacgtagtcgttctggatgtcagggctggaggcgatcttgatccacttcagggccagatcctgcttggagctcttctgggccacgccccacacggagccggccatcatcgacggctggttctggccgctcaggccgggcatcgggaaggagccgagttcgtcggcggtgatgtctttgttgtattcctgaatcacgcggatggaggcgctgttgccgattacggcgccgatcttgccttcggccatgagctggctggtgtcggggctatcggtgtcgagcgggcgggaggcttcggatgaccacttgtgctggaattcacgccactgctcaaggccggacaccgattccttggtggacagggagctgacccatttgccgtccttctgcacggcgtagtcgccaccggcgtcccacacccactggatggcggtcttccaatcggcacccggcacatagaacggggtgaagtcctcgccttggtgcgcgtccttgagaatctgcaggtcggcttcaagctcggcgtaggtggtcggcggctcgttgatgccggccgcggcccaggtcttcttgttgtagaccactgcgcgggcggcaccgagggccggaatgccgtacagcttgccgtccacggtggcaggctcttccagaccggagagccaggtgacgccctggcgcaactcgtcagcgtggtcggtcaggtccatgaggccgccgctggccgcgaagccggcgacctgcgtattgccgaggtcgagcacgtcggggggggtgctggtggacagagccgtggtgattttggtgctgatgtccttccactgctggttctggatgttgacctcgacgccggtctctttggtgaactggtcgttgatggccttgatggtggcctcgctttgatcgccctgcatgacccagacggtgagcttgccatcgctcgaaccggtgtccgaggatggtgcgcccatcgagcatccggcgagggtaagggccgctgccgtgacgatggccgtggcctggagcaccctgcggatggcggggcgtacgttgtgctgctgcttcatgatgttccttcccgtccagttgtgaaccgttgcggctcgcttgatctggccgtctccattgactggtgatttcttgtaaacgtttacgagaaggagtataacactcacgtaaaggtttacaaatatcatgtgcgtgtcgtacttcacttaatatcggtaaatctcttttactatttacttcgtacacccttacggcagagaatgtttaccgactttcatacgccggcacggcaatccacaggcaccggacatgggccatgcggaatcatcaggaaaatcgcgcggtacaatcactgtgaacggccctaggacaggaaggagacgggcatggccataccccgtaagccggccactatcatggacgtcgccgcggcatccggcgtctcctacgccaccgtctcccgttatctcaacggcaatccgcatgtctcggccaaggcagccgagcgcatcgccgccgccgtcaagcaggtgaactacacgccgaacaacgccgcccgatcattggtacgccaacgcacgcaaaccgtggcgttcgtggtgcacgggcagccggattcgctaatcgccgaccccaatatcaacaccatcctgctcaacgccaaccagacgctcggcaatgccgattatcaactcatcacgctgatctccgactcccctgcggccggcgcacgcatcgccagactcgcctccagcggattcgccgacggatggattctcaacacgttccataaagatgacccgctatttcagagattcgccaatatcagcgtgccggtcgccatttccggcgtcggctatggcagcgccatccccttccccaccgtcgatatcgacaatcgactcgcttcacgcaagctcaccgagcatatgttggggcgcgggtatcggcgaatcgcctatatcatcggaccgccgtacttgccatgttccgacgaacgactgctcggattccaggatgcgatggccggcgatttcgacccggcactggtcattcggtccgacggctggacccggcccgatggccgcaacgccgtcgtgcggctgctggactcgctggctgagccgtcgggtagccgacttgccggcgccgacgccagcgtgcccgagctcctcgccgagcatcatatcgacgcgctgatatgcggcagtgattgcatcgccgctggagccatgaattatctgctcgaccgcggcgtgcgtgtgcccgacgatattgccattgccggcttcgacgacagcgccgacgccacagccctgcacccgcagctgaccaccgtgcgccagccaatggacgcattcggcgtcagcttggccaccctagtgcttgaccagatcgagggccgaccgttccagcgcacggtgttcctgcccaccgaggtcgtggccagaggctccaccggagagtaggcgcgcagagaacggttctcaataatatctgtgcgcacttctctacgcccgaagcgcacatggaatatgccctaatcactgccatgtcgccatttgcgatgatgtgagattgttatgttcttgttcatttgagcgcacagatactactgagaaccgttctctgcgcaaatagacaatgtggataactccataagctggaaccacattgccctgcctggcttgcattcaagtccaaatcagctttacggtcgcatcatgagctcttttatgcatgaggatattgtcggccgacgccgagcagaacgtgaacgttgcaatgatgctgcgcgccgttcaaaaggtccattgctggtgggatacatcaatgcggccaactactacggcgcgcccatcccccgacattgcacgctatctgttgatgccgtgcacgcctgtgtttccagtgccaacaaacgcagacgaatcaaaggcgtggtcttccatgtgtttaagggaaaactggatatccgcaaaaaggactatgaacatttctggattgcctcgccggtcatgatgtgggctcagatggcccaatactccacattggaggaacttgcggccattggagcctctttgatgagccgcgataaacggcgcagaatggccactcgcaaggatttcgatacttacttggaaatcagtccgcggttcataggtcgtaacaaatgccacgaggcactgccctacatgacagagaacacggattctccgccggaaaacacgctgtttgggatgctgaaggattcgggcttgggatgccccaccgccaactatcgcgtgaatatcggcaactcatacgtcatattggatatggcatatccggactgccgcgtcgcgttcgaatatcagggagcctatcacgccgatccggcacaaatgcgaattgacgcggcaaagcgaaacgcattgcaactgctcggctggatcgccattctcgtcactgcggatgacctgagaacagccgacacgcggcatcgttttatcgagatggcccatgtcgtggtgtcccggcaacgcaatctcgccgattggaaccgctcatgggccattacctcttagcatcgcaccgataatgcgctatgccgctatttaccgcgaggtgcccgccagacatcgggctcgacgtagatccccccattcataccaaggcagcgcggcacggcgtcctcgtccatgtgaatggcctgcaggttaatgcagcctatccacgccggcagtgcgctccactgcctcgaccaccaagtcgcgggtgctgtggtcaagcgattcgcccaccagcagcgagccggacttaaacgccagcgccgcctacaaaagtgtgaggccgcgcaggctcacactgccaacagccgttcagccaaccctcggaaggtctggccaatgccatccgtgcgcaaggcgccatcgacatccagcaccgcgggacggcctgcttcgccgatctcgcgcacttcgggttccagcggcagctgggccatcagcggcacgtcatagccaagcgccgcgcttaactgttcagacacgcgctgaccgccgccggcaccgaaaatctccagcttctcgcccttgtgctcgtagtagctcatgttctccaccacgccacgcaccttcatcggcacctgcagggccacgagtccggagcgcacggcgatgtcggaggcggagggctgcggggtggtgaccaccacgagttcggcgttgggcagcgcctgggccacggaaatcgccatgtcgccggtgccgggagccaagtcgagcaagaggacgtccggctcgccccaccatacgtcagacaggaactgttccaaggagcgctgcagtcgcggcccgcgccacagaatcgcccggtcggcaccggcgaacatgccgatggagatcagtttcacgccccacgcggtgaccggcatgagcataccgttcagattggtgggctgcgtgtgcacgccgaacaggcgcggcagtgagaagccatagatgtccgcgtcgatggcggccgtgtcgaagccgagggccgcaaacgtggcggccaggttcgcggtaaccgaagacttgccgacgccgcccttgcccgaggcgatggcgaagatgcgggtcttgacgcccggcttgctgaaggggttccgcttgcgttcggccttgaggtcggcaaccagatcggccagcttgtcacgactcattgaaccgacttcgatatgaggcagcagctgtacgcccggataggagctgaccgcgccgttgatctggttggtgatggtctcgctcagtgggcatccgggaaccgtcagctcaacgtgcacggtgacgtcgtaagtgccggcgtccgacgatgcgggcgcggcttcgatagcggcaatcatgccgaggtcggtgaccgaacgaccgagctcggggtcgatgaccttgctcaggcgttcgtagatgtcggcttcgatctgacgtgcgtcgctcataaatccgtatcctcctttagggcctgttctaccctagcgtgtgatgcggcggcatgccagagggagtggagtaagtcacactggggcgggattcgctttttctctcccccagtcagcctaaaggctgacagccccctcatcagagggggttaatgaagcgtctgagggggctattttagatggtgccggtttctaggagctgggcgaattgggcttcgcccagcatggggatgccgagttcctcggccttggtggccttggagccggcgtttgcgccgatcaccacgtaatcggtcttcttgctcaccgaaccggccgccttgccgccgcgctcgataatcgcctctttggcggagtcgcgcgaatagccttccaacgaaccggtgaccaccacggttttgccggccagcgtctgcggcagcgaactggtctcggcctcgtcgacgcccacgccggcggcctgccaagcacgcaaagtcgcgccgcgccagtcgccgggctcgcgggcggcggcgaaccagttcaccaccgattcggcgatttccggccccaccccgtcgatggccgtcagatcttcaatcgtggcgttttcgatggctgccagcgagcccatcgccgaggcgatcaggcgtgcggtaggcggaccgagccggcgaatcgacaacgcgaccagcacacgccacaggtcggcgtgacgggccttgtccatttcgtcgaacatcttgcgcgtgttttcgccgggccgaatgatcaccggcacatccgtgacgccggtgcgcgtggtcttgtggtccacgcgcacgatgaccgcgtcggccggcacgtcatactcgggataggaggctgcggcaaagcccggcatagtaccaagtggagcctcagccccggtaggtgcgccggtcgtctcgctggcggcacctccctgtgttccggcagattcgattgcggcctcttcttgcgcgcgttcggccaactgcttggccgtgagcttcttggccggcgtgggcgcggtccagaaggcaggcacctgatgccacaggccagagccgccgacacgcttacgcacctttttcttcttaccgttcgcaccgaccgtctcatgcacttcgacgattgcggcctcacgccacacacgcacgtcgcgcagatcggcggaggtcaggtcgaacaacccggattcgttggacaacaccggcttctgcgcggccggcaattccagcccctccaccggctcgtacggttcgggctcttcgccgggggcgaccagaacctcggtgatgttcggcgcgtaggtcgccaccgaatcaggccggttctcctccgggttggtcagagcgatggccgactgttcacccagatgctcgatgtcgaacgccttgcgtgaggccagcgaaatcacgcgctcggtcaactgggccgggcagctttccacattcgggcagcggatgtccttgtcaccctccttggcgggtgccagtttcgcgccgcatgaaggacagaactcgggcatgacgaattcgcgcagctggccctcacgccctttgcgccgttcaagcaccggaccgaccagttcgggaatcacatcgccggccttgcgcaccaccacggtgtcgccgatcaggatgcccttgcgtttgacttcaaatccgttgtgcagcgtggtacgagccacggtggagccggccacgtagacaggtttgagcacggcgaccggcgtcacacggccggtacgccccacctgcacgatgatgttgagcagttcggtgttgacctcttcgggcgggtatttgtaggcgatggcccagcgcggcgcgcgcgaggtggcaccgagggtgcgctgcaggcccaggtcatcgaccttgacgacaatgccgtcgagcgcgtgctcgatgtcgccgcgatgctcgccgtagtactcgatcatgtccaggatctcctggaatgaggtcaccgcacgattgtgcggggagaccggcacgccccacctggtgtatagatcgtaggcctgcgactggtcggcgaccacatcatgggtgccgcgcggatggtccgccccccaggtgagctgccccagaccatgcgcatagaagctcaggcgacgggtggcggtgatgcgagggtctttttgacgcagcgagccggcggcggcgttgcgcgggttggcgaagggcgctcgtccggcgtcctcctgctcgttgttcagggtgtggaagtcatcccagcgcatgaacacttcgcctcggatttccacgaagtccggaacgtcttccttggggccgccgaggttggcgggaatggagccgatggttcgcacattcagggtgatgtcttcgccggtaacgccgtcgccgcgcgtcaagccctgttcaagcacgccgttgcgatagatgaggttcagggcgaggccgtcgattttgacctcgcagctcatgggcaggggcttggattcgggccaatcgaggtcgcgaatcaccgaatcgtaccaatccttgagctcttcgatggagaagacgtcatcaaggctcatcatgcggctggggtggcgcacggaggcgaagtcgttggagaaggagccgccgacgcgatgggtgggcgactgtggattgtccaatgaggggaacgccgcttcgagtcgttcgaggcaacgcatgcgcgcgtcgtaggcggcgtcggagctgacgggtgagtcgtcgatgtagtaggcgatctgatcggattccacccatgcggccacgcgagcccacaggcgggcggcggcctcagcggtcatcgtgttcacgtcgaaacggtcgaggcatatcgcgtcgtcgtcagtgggctgcagtgcggctatccattgttcggagccaggggcaaaacgtgcaataccggtatcaggccggacctcggccacatccccatcgtcgaaatcccatgccagttgttcgttcgtgctcatggttgtctatcctagcgggctcggctcccctcggccggctataccgtcaactcccctcaggcggctacgcggatagcgagcgcaggaactgggcttggatgatgtcgatgttgtcgccttcaccgtcattcatgcgggccacggccaccgagagcgtgcgggccggcacgaacatgccttcatccacgcacacgcgggcggcgtcacgcacgatgtcagccacttcgttatgcggccagaccggcagatcatgcgtggcaagcacatgggcggccgtctccaccgattcaggcaccggcatgcactgcgagtccgcacgggaaaccagttcctgcagttcgctttccaacgaaccaatggccccgggagcgatgtgatcgctcataatgtaggctgcggcggctgtgtcgaaccggtcaagcatccattcggcgtacgcgaaccggtagtaggcgaacgcggcatcgtcgcggtccaaggccacgcgcagagcattcaggcaggcggcgcgtgccgaatcccaatcctcattgcgggccagttggatggcgagcttcagatgtgagagcgggtaggcgggcgcgtacgccaccatacggttgaggtgcgggatggccgcctcggcacccttgatctggctcaacacgtcagccagctccatgtgtgcgtagaacagattgtccgggatgagcaccgtacgctcgtccaatgtggcgaacagccggttgtagaccacacgctcggcataggagttgaagtatcgaggtacgccatggcctgccgcatacacctgatccaaatgggccacagccgcttcggccgcttcgatggcctgatcggcttggcccgagaacagcatgtctcgggcgcgcagacgctccttgtcaagatcgtcggcaagcgtgaacgtgaagtccggggtgtccttgccatcgatcaacgcactggtgacctgagaggccaaaccggtcagttcgggatcgcatatcgattcgatgatctgcatggctcgctgggccttttccacggagccgagcgacgtgttcctggcgatatcgtggaattcgttgacgccatgctgcagtaagtccactcgctggatagccagtccggcactattctgtgcgcccagcacgtgagcggtcgccgggctgaattgacggtcggccagttcgggctcctcctgggatccggtgggagagaaccggctgtccgccaagtcgaagtcggcgctgatgggtttcaggccgccttcgccgtccacgtccatcacggcaccgaacatgcggtaggtttcctcgggattgtcaagcccatcggtgtccagtcgcttgaggaaggcatcacgggtgaaggtgacggtgaccatattgcgcacggtgggattgcggcgcagcacgctcatcggatcatcgtccatgccggcggccccatcagcatcgtcagtgccgacgccctcgccgccgataccgcccaggtcgtcgcctgcgccggtatcgtccggcatgccgaacgccatttcgtcgatatcgacgcccttcatcaggtcttcgaactgcgaatcgatggacgcggcgccatcggcgtcagcggattcggccgcggcctgatccgtagcatccgcagacggtccggtaccgttgcctgttcccccggccgtgccgcgttcgtcaccggacgccgcctgcccgaacgtctcctcatgggtgatggggcgggtcgggtcgccatggaaatcaccatctttggggtcggctttggaacccacacgccccaaatcgccactgcgcagatgttcgaaggcgcttagggcctcgctcatcatcgcctcgatggcggaatcctgttcggcaatcgcctcttcaagaccaatggaatcgatgtgcaacgacacctggcgcacggattcgctggtgccgaaactcagcgctgccatcatcaggccgacacgcaggttgtaggcggcgctcatcgacgcgcgttcggcgctgctcagcgcacgccacgtacggcgagtggtgtcataccggctatcgggcatcatcgaggtgccggcagtggtgaagccaatggccacttcacccgaatccaagcgcgaccggaactccacatcaaaccgatacggcaaccgtaaccggcgcaacagtgaggagagggtctgacgatacacccattcgtcgctcctcgccggcgaatacgaaggccgagcggcttgagtgttggtgtcgctcttattggtccgctctacagcgccctcaacactctcagtactttcagcgcccgcagcattcgtcacacccgaatccggcacgttctgctgggtcagcacatctcgaggatcagggaattcactgcgaatctgcccagccgtgcgtgcggcgatatcgaccaggctcagcacggcccgacgctcctgctcgccatcatacgggtcaagcgccataatcgcagggttctcaatgagtttcatgtcgatttgcgcggcctcggcacgggtcaccgtatcttccgtagggttgcgccccaaggaagcgttgcgctccagccaagcgctcaccgcagcgaatcggttgaggttgccttcgatcttcaaggatttcagcgcctgcccgaatgccaaggacttatcccacgtaaagaaatagccgctcgaatacgtcgaggtgtacaggtgcaacggttcggcgccatgcaccgcttccagtcccggcgtggtgtcgagggcgccggcttcgcgcatcagatcggcgaagtgatcctccagaccggaggcccgcatgccgtgggctcgtgccgccaaagtgtcacgcaccgaacggcgaatcgcaccgattggcgcctcacggttgagacggcggaagatattgccggaaccgaatccgatgagcagaccattgatctgcggcaacatatacgtggcgaagaacgcgatggtaatggcatcgcggtattccaaatcatgacgcatcacaggcggcagattggcacgcatctgctcaagcgtgtaccggttgccggccttgagccatgaggcgagccacgtcatgcgtccggtgtcgtcacgccccaccacgccaccggtaatggccttcacgccgtcagcaccatgaccaaggccacgccccaaaccacgcccatgatgcagcgcacttcccaggccatggcctgcacgggagaaaccggaacgtgaacgcggctcgtcgctttcgcccagccgctcaccgtccggcagagtcacttccttttccttgccgaacatgaatcgcgcctgcatatcctgcacgtccatgttggggtcggtgcccacgaatacgcggccatgcgtatcggcgaacgccacctgcgcaaaatgatcgcggtcggggaaaatgccaagcgaaaagccacggcctctggtggagggcagctgcgcccatccaagcaccagcccttccggcacgttctccaattcggggaaggtgcgtcgcttgattacaggactcagcgccactgcatggcgagtcagttcgtcgataatgccgcctttacgctcactggtctcccgcaaggcatcgccgaacggattcgtatcgtgcttcttcggcttggacagtcccagatcggccgcgagcgcgttcatcgaatccttcagcccgcccagcagtggcgtgcggttgtgcttcccatggtccgatgtacgttttggcatgattcacattgtctcttgtttgcccgacatcaagcccgaataaagcctatagaataaatgcgtgcattccatagaccacactcgcgcagaccgtccgatgccgtcgaatcatgaacggcacctgcccagccgcccggatacccggcaccggctgcgtttggtgcgcctgctgatcgccttgctggccgccgtcgccgccatcgccgccatggagtgcatcgtgttcaacctgccgttctggcgtacgctcggagcgagcacggatacgaacgccgtgcataacacgctgggttcgggtctcacgcgccggaatgatggcatgttgaccgtcaccgatccgaccaaggcctatcttgaactgaccgcggacggcacgtcggattacctacgcatcgataccgagagcagcaaggtcatcgataaggcccgcgagcaggccgaggccgaatccaaagcgaacgacgataaggaagtcttcaaaccgctggcgaccattcatgtgcgcgcggatgtcgatggcatcaccggcaaggcccagtcgatgaatcccgacgctattcgcagccattatgtcaaggcgccgggtgccggcatcgtgcgtatttggattcaggaagagcgcggcgcgatcgtaccggtcaccgacgcccgcgccaacgtgcgcgtaccgttcgtcatcaattggatgcgcgtgctcgccatggccttggtgttgctgatgattgccgtctggaggccgggatcgcgcctgtggcgtatcacgcttgacccgtccagcactcggcaacgacttgctttcgtggggcttctggcgattcctaccctgcttatcggcgtatccatcatccacgaactgtggtacgcgtcttcgctcgtcttccacgtttccggcgattacacctatgatttcgaccagtatgggcatgtggccgatgcgctggtcgccggccggccctggctcgacttgccggttcccgaacaactggccgccaccgagcacccctatgacgtagccacacgtgcccagctactcgccaatggagccagtccgctctactgggattacgcgtattatgacggtcactggtattcctattttggcgtgttgcccgcagtgctgctgttcgtcccctatcgtctgctggccggtcataatctgccgacatccgccgccgagtatattctcgtgctgctgttcatcatcttcttctccttgctggtgctgcgcgtcatccatcgtgtgatgccgaagacttcggtggcggccgcgtcgttagtagtggtctcatcgttggtgagcgcgcaagtggggtatttgctgtatcgcacgaacttctatcagataccgttcgccgcatcgctgacgttgacgtcgctgggactatggctatggctcggcgcggacacgtcccgccgtccgctgagaccatcggaccgatggcaggcgggcgatgccaagcctctctccctgccacgactggccttgggcgccttgtgcattgcggcgaatttcggatgccgaccgacgttcaccttggccgcattgcttgcgttccccctgttctggccgcagattcgcgcgctgggcaccggtctgcgcacacgccgcatcaagccgttgcaggcgttgcgcgcgccgctggcggtaatcattcccgccattctcgtcgtgacgcctctgatggcgtggaacatggttcggttcgattccccgttcaatttcggcaatgcgtatcagttctccatatccgatatgacccggtataccaccccgtccgcggatatgcccgccaacatctggtattacctgttcctgccgctgcgcttcatggatcgtttcccgtggctggcgggctctcccgccccgatgccgcaatggggttattacgaggtgatggtcggcgcgattttcacggccacgccactgaccttgatggctttggcgctgcccctgctgcgcagattggaaacacacggcatgcggccatggctgatgtcttgcttggccgtggcggcggtgctggtcgtattcgacagccgcgtcggcggtttgggatggcggtattccgccgatttcggctggctgatctcgctggcgtccataccggggctactgtggctggtcaatgggcgcgaaccgagccggtcattggcgggggccaacgacgccgcttcaggcgatggcatcgcccgcgtcactccgtggcgttggctgatgcgctgggtcgtggtgctggccgtattgtgggcgctgggcatagccatactgagctgcttcgtgcagtcgcgcagcgatgcgatgatcgacaacaatccgacgctctggcatcaggttcagtcttggttcacgatgctctagtctcgtatcggcgtcggatcagatcctcataaaacgccacagcctcagccggcgctccgtcaaacacgaccgcgtgctcgtccagcaccagtatgcggtcgatggcgtattcgggccggcggatcatatccgtgtcatgcgtggcgaaaatcacctgcttgttgtagctgaacaacgccttggccacatgcgcggtgccaatctcatccaatcccttgctcggctcatccgccacaatcgcactcggctcaaagctcagcgcggccgcaatagccagcaggtgccgtttctcggagtccaattcgccggccttggccttggagacctgcgccaaatcaaaatgcgcgaacagattaccgatgcgcgcatgacgttctgactcgggcaccttgtgctttttcaacgcttcggaaacagcctcggaaatattcgccgcttggtagaaactgttcggaatctcctcgcggcgaactttgccgaccagattatcgatgcgcttcgcgtccttcttcacagccgggtcaagacgttcctcaccgcccgcaatggtcaccgtgccggcgttggccttcaacgaaccgtccagcagacccagcaatgtggatttgcctgcgccgttcagtccgatcacggccacccgccgctcgctgatggtgatgtccgtgggagcaagtcccacgtgcccatcatcatacgtatgcccggcctgttccaaagtgaacgtcagcgatgccgggtgtggcagttctttcggtctaaacaagaatcccatgccgccattgtacgtggagtacaggtgtggtgccggcaaacaccggcctatcgcagcaaagcggcgacggtattgagcacggcgcggatgccacgctcgaattcgtccggttcgggcagcagggaaacggccaggtatccattggaggtcatgtcgaagaagtagccgggctgtccggtgagttggtgctcgtcaatcagccgcaacaccagttcgttctcatcgatgacggaaggcactcgtaacagcacgttccagccgccttcggcccgtagcacgctgaccagcccgttgggatcggcgtcaagcaactcgtgcaacttggccaggttattgcgcacgcgctcccccacccgtctggtctgtgcgggcgcggcgttcaataatgcgggaatccgttcggcgatgatgtcgcccatcggcagataatcgtcggcgatgacgtccagtcgacgctgggcctcggcaacgtcctcggcaggtccggacacctgaatccacccgactttggcatgcggcgcggccagcattttggagaatccgtctagggcgaaggtgagcacgccgcgctcccccgcgagccgtgcgtcgccggggaaaggttcgagagagtaatcgaagaacacttcatcggcgataagggcgatgccgtgctcacggcacaatgtcacgatacgtgcacgctcggttggttttacgtacgaaccggtcggattgttcgggttgatgagtaccaatgctctgacgcgttcgccaccgggctcgctgagtagccgctcgagttcggcgatgtcgatgaaccaggagccgtcgaattgcaactggtattcgaccgtatcgacgcattcaagccgtgcaatcgactcaatcagcggatagccgggtttgggtgccagcaccgcgtcgccggcatcgcaaagtaacttaatcagccacgaatacgcctcggacgtggagctcagcaggtacagggcgtccgggtcggcgccctcgatggcggtattcacattggtgaaagcggcatggcgctcgttcctgccctcgccggcggcgggcgaagccaactgagggctgcttgcgtctaccacgtttgccgtattgaggaatgcggccaatgattctcgtgccgcacgcggtccacgcgggtcggccgtatacacgctcggcaccaattcgggtgccaacccgtggcgggtcggattggaatcgttgagtttgctgagtgcgatgccgtttgccttggctgccgcctcggccgccgcaatgggattcggcgcagaaatatccacacgagaagagaaatgcacgctcataccctccacgataaaaccacccctgccgagccaggtatatcgaggcctcatatccaccagcatccagcactacgacaatcgtgcggcacggcagcggagtcgtcagacatactatgacttcaatccacatcgaataacggcctagctacattcattaggtcattttcgcgctcattaggtcactgctagtcgagcctcacaattgttgatgcttgaaacgccgccattccgagcccattgcaattcaggtttggaatgggagtgacctaatgaacacataatcgacctaatgaacgaattactcattaaaaaaaggccgcccgaaatacttggacggccttacatatggtcaatacggctcctgcgccagcagaaataactcagctcactgctgcttggtgctggcgtagtaggcggcaccgacgatgccagcctggttacgcagcttggcgggcacaatcggggtcttgatatccacgtacggcaggaacttttcgctctgacggctcacgccgccgccgacggtgaacaggtccgggttgaagtacttttccataaggccgtagtacttggtcagacgcttggcccacttcttgtagcccagttcctcgttctcgcgaatcgcggaggaggcatacttctcggcgtccagatgcttggcgctcaggatgatgtgtccgagttcggtgttcgggatgagcacgccgttgtagatcaaggcggtgccgatgccggtgcccagtgtggtggcgatgaccagaccatcctggcccttggcggcaccgaactggacttcggccaggccggcggcgtcggcgtcgttcaccacgacgaccgggcggccgcaggcttcggagaacacttcagtaacgtccacgccaatccaagactggtcgaggttggccatgaagtcgagcttctggccgggcttgatcggcgcggggaaggcgatgccaacgggtgcggattcaggcacttcgaagtggtcgagctgctgcttgacgattttggccacggcctgaggcgtggagacctcgggagtgagaatcttcaatcgcggctcggcgaaatcgcccttggtcagatcgacaggtgcggccttgatgccggaaccgccaatgtcaacaccgaaagcctgtgcagtttcaatcatcgttgaccttcctttccatacgttttcatcagttcgtagggttgcgcccagtctaacgcgaccatcacgcggacgcgccggacgggccggggcatggccgtcattcaagcggcggcatgggcttccaggtggggtcgtgcatcagcttgcgcgagtcccaccagcccttggcaatctgcaccaaaccggtcttgaggtgttcgcgatccaccatcaccaggcgaatgacttccttggccgcggtgagcacggtgcccagtccaaacaccagcggacggaagtcgccgtaggtcatgaagtaccgggccatgtatccgcggttgcgcatgatgtgataccggttcatgtcggacgtggagttgagctggcgcatgccggcgatatcccaattgccgatttcgcgcgtacggcgcaggatcacgtcgggcaccacaatcgggttggtgaccttgctggcgcggtagccatacatcgtgtcatcccagtagatgaagaagcgcgggtccggcagaccgatttccgtgaccacacggcggttgaacaggccgccttcgaagcacagcgtgtccatcactcgatacccggccgggccaaatgcggcgggcgcgatcgggttcggaatgcccagcggcacaatgaagtcgtactgccagtagaacgggccgccatcgtaatcgaatcgggatccctgaatcacctcgtgcttgtcggtccacttggacagcttggcaatggcgtccggcagcacggccacatcgtcatccatcacccagaaccatgcggcgcccagatcatacgccttggccacgccggcggagaaaccgcccgcgccacccaggttctcggtctgcggcgcatagaccacgcgctcttcgttgccagactggtcggccacggtggtgccccactggccggtcaccttgccggcaaacgcagcgaccatgtccgccgtctgatcggactgctcattgtccacgatgacaatgcgccacggtgcctgctcaagcgccagaatcgaatcgaacagtacctcgagcagctgctgacgtttgtaggtggtgacgatcagggcaagcttgtcaatggtgttgttgggtttcttcacttcagccatggctcccattgttgcacttgaccggcacaagacgaatttctgcacagtgaaacgcgggttgcgtacgtccggcgcatggcgtatgaataagcctgtcagtttcagggaaggtgcaattccttactggcggtaacctgtaccccgggtttcataacggggatggcgggaagcccgcgacccgcgcaagcggctgatccggtgagattccggagccaacggtatagtccggatggaagaaacgagggctcattatgagcgtatcttcgcgtatccgcatgcaagttgttcgttctgtggcgcccgaggccgagggttcggccagcgcgtccaccgccagcaccagcgccaaactcggctcgcacaccactggtgtggccgattccggccgctggtccacgcgccgtatcgccatgtatgcgctgttcgtggcgctggcgatggtcaccagcttcattgaattcccgattacgccggtcacttggctgaagtacgacccgtccggcatcgtctgcctgatcgccggctttgcgtacggtccggccgccgccgcaatcgtgtctgtgctcggctttgtgccgcacatgttcgccgacccgtggggttcgctgatggctgtgctggtggcgctgttcctgtctgtgccggccgcgttcatctaccgtaagatccgtacgcgcaagggtgccgccatcggcattctggtgggtgcggtgctggccatcgtggtggcgctggtgggcaacctcatcgtcacgccgatttacgcgcacatgacctaccaggctgtggccgcgatgattctgccgattctgctgccgttcaacgtggctaagatggcgattcacgccgtgatcaccttcctgatctacaagccggtctccaacctgctgtccaagcagcagtgaccggcctgagacgggcctatgcccgccacgactaacgaccactcaacgaccactcaaagaacaagaacgcagaactccggcccttgccgggattctgcgttttcgcctatcagttacggattgctgtttcatgaccgttgcaccccattccttcgacgccgacgagttccacgattccgccgagcccgctccccccgccgccgtactcaaggacattcgtttcagctatgaccgcggcacttcatgggctttggatggcgtttcgctcacggtccatgccggcgagcgcctatgcttggtcggtccgaatggatcgggcaagtccacgttggcccgtctgattgcgggattgaccgcgccggacggtggcgaagtgacgctactggaacagcgcgtgtacgcagccggcccgaatgccgacgcctatcgcgctgcccgccgcggcatcggtatggtgtttcagaatcccgaggatcagctggtcaccaccgtgttggaggatgacgtggcttttggcccggagaatctcgggctggagcgcgggctcatcggcgagcgcatcgttgattcattgcaggccgtggggttggcgaacttgcgtcagtccgacccgacccgtatgagcggcggacagcagcagcgcgccgccatcgccggcatgctggccatgaacccggcgatgctggtattggacgaaccgaccgccatgctggacgaatccgcacgcgccgaagttatgcgcattttggatgatttgcaggcgcgcggcaccactattgtgcatgtcacgcatcatccggatgagaccgttcatgccgatcgcatcgtgcacatggaggccgggcgaatcgttggtgtcactgcagccgccgataatcgacccccgctagcggaggctgtctcgcaaagcgagaccgagggtggtatcggcacagaagccgcccccagtcgtcctacgaacgacagcccccgccagcgggagcgcgaagacggctccgaactgccgctgctctccgatggcatcggtgatatgacggaccctattattcgcgtctcgcatctgacctatcgctatccttcggccaaacgggcggttatcgatgacctgtcgttcaccatcgcgcgcggtgaaaccgtggcactgatgggcgtgaacggttcgggcaagtcgacgctggtgcgcatgctgtgcgcgctggccgcgccgaccgccggcagcatcgaggtggccggcgttccggtggcctcgaccggcaaacgcggtagcaacgcacggccgaagccggcgaatcgcaggcaattggcgcaattgcgccggcatgtgggttacgtgatgcagcatccggagcaccagttgttcgcggacacggtggccgaggacgtggcgtacggcccgcgcaaccaggggctcgccgaggccgaggtggccgaccgtgtgcgcgaatcactggacctgctgcatatcgggcatcttgccgaccgctcccctttcgacctgtccggcggacagcagcgattggtggccatcgccggcgtgctggcctgcaatcctgacgtgctcatcatggacgagccgaccgcgagcctggacgtccaggccaaggagcgcatccatgagctgttgcgcacgctcaaatcgcgcggcgtgaccgtgctcatcatcacccatgaccgagcggaggccaagcatatcgccgatcgcgtggtacgtatgccgattgccggcgcggctggtgctgagagcatctcggcaaccgagactgccttccccgccgagtccgtctcccctgacaaacccgcgcactcggtgatccaccgacttgacccgcgcgtgaagatggtgggcttcctggccgccatgttcacgatgttcgcggtgaacacgcccctccagcttgcgctgggcatcgccatcaccctggccgttatcgcggcggcacgcctgaacccgttacgggtgctcgaatccattcatccgattctgatcctgctggggctgatgggcgtggtcaatctgtttgtggtacgcaccggcacgccggtggtggcgctgggcccgctgagcatcaccgatcagggcgtgaccatagccgtgctgtacgcctgccgtttcgcattggtaatcattctgggcgcggtgttcctcatcaccaccacgcctaccgccatgaccgacgccttcgacaccctgatcagcccgctcaaccggctcggtattcatgcccaagaaatcgcgctggtcatgagtctggcattgcgattcattccaacgctgaccgatgagacccgcgccatcgtcgatgcccaatccgcgcgtggcggttccatcgaaaccggttcgctggcccagcgtatcaaggcgatgagcgcgattatcgtgccgattttcgccggcacgttgcgtcacgcggacaacctgagcctcgcacttgacgcccgctgctacgaggagagcatccgccgcacccactggcgtgccctgaccatcgccgcgcaagatctcgtgttcgccgtcgccgtcatcgcctacatcgccgccatcatcgcgctgtagggcggcaaacagcacagacagcaccggttgctatgctggtgtggttatacgaaagatgtaaggaaattcccatggcattgaccaagaagcaaatcaagcagctgcgcgcgatggcaaactcgctgaagcccctgttctatgtgggcaagaacgatttgaccgagtcggccgtcaatcaggccgatgaaaccattgagaagcacgagctcatcaagtgcgccgtgcaggacggttctggcctgaccgccaaggaagccgccgccgagcttgccgagcagctgaacgccgaagtggtgcagtccatcggcaatcgtttcgtgctgttccgtcgctcccggcgcgacgatgtggagcatatccgcttggtgcgcgagtagcgttcgctctgctcgatcccgtagcttgatatgagtaatggcggttggaatcagtccgattccaaccgccattattcatattcgcccagcgagcaccgtcactgatccaagatggacccgacgattcccgcaacaatggtcagaaccaaggaccccagtaccgaccaccggaaaccgtgtacgaagacgcccacgccgaacagactgaccgccagccagctggcgagtcgcatgaacagccaattgataatcaaggtgaccagcccgagagacagaatcgcaaacggcagtgcgattagatgcacaatcggcttgattgacgcattaatcagcgccatgaacaaagcgaacgcggcgatgccgagaatcggaggctcccccaccggggtcatgccgggagtcaccgcgaccatgacggcggcggcgatagtcataatcaaccagctggtcaggaaacttttcatggcccaatcgtagcgcggcaggttttactattaggcaaaacgtgagatgatgttgtgcagaaacggtaagaaggtactgccgttcccgattgagaagggatagacccacatgactgataatcaacaacaaccgtacggttcggacagtgttccgcagccggcacaacctgcacagccggcacagccgtcgtacggccaagatgccgcacggcagccgcagggctatggcgccccacagcccgccgcatacgctcaacccgtcgccggaagctacggccagcagcagccgcaatacggccagcccgccggcgcatacgctcagtctcagtacgctcagccgcagtatggccagccgcagtatggccagcccgcacagcccgcagcgggctacggccagcagcccggctatggacaggcctaccagcagccgaatgcctacgcacagccgcaatacaccgccgctccgtatgccgccgccccggtgtggcaatcatccaagtccaagttggctgccggcctgttgggcatcttcctcggcggacttggtgtgcacaacttctatctcggcaacaccggcaaggccgtggcccagctgctgctgacgcttgtcggctggattctgctcggacttggcccaatcgcagccgccatctggggctttgttgaaggcatcatcattctgtgcagcaagcccggctcgccgtggcataaagacgccaacggctacgaactatcagactgagactgacctcgggccacgttcattgggcctctgatcaaccacgcctctgcaggtatcatctcgatgccgcagtcgtagcgggatgcgacacgccggccgtgtacatgagttcatgtacacccgatacaggcgaatcagtatcgcacgagattcaacagttcctgctgtttggcatagcgggaaacgttggtcagggcgatgcggatgatgtgttcggaagtcttttccaaatgattgccgccggccacatgcggggtgatcaggcaatgcggctcatcccacaacggactttccgccggcaacggctcaggctcagtgacgtccaatccggcaccgtggagccgtccattgtgcaaggcgtcggccaaggcctcgggatcgatggcgtcgccacgcccggcattgatcacgatggccgtggatttcagacgccccagacgatccgcattcagcagatgatgggtctgcggcgagcgcggcaccgccatcgccaccacatccgccaatggcagcagtgcttccagccgctcgaagccatacatcttttcaatgcccttggccggcacgtccgcatgacggcgcacgccgaaggtacgcatacctacggattgggcaagctgagcgaaatgcgacccgatgtcgccgacgccgataatcagtgcgatgccaccttccgggctcaataccgggccttcatcctgccactgatgatcacgctgattggaggcataccggttgaggttcttcatcaatgcccacatggtggcgaacatgtgttccgacacgctttggccatacgcgccgctcgcattggtgaccatggtgccgcgaggcagcacacccgggcggatgtacgcatccacaccggcgctgaaggtctgcaaccattcaagacgggtgtattgagcggcctgcgagaccgggaagttgccgatgactgcggtagcttgggagcgaagctcctcgggagcagcggccgaccagaccatgtcgccgcggtgcgcttcgtcgcccacgaattcctgcggcacatcgcgggccgccttggcgaaagcgcgccgttctccttcgttgagtggcaggcagttgacaatcagcttatgcgtgttctcaatacccatggttcaccaaactaggcggcagggcggatattatcgcgtgtttcctcatgctgaaccaatgccgaacccgccccgccggaccaatgccgaacccacccca

SEQ ID NO: 1272 - DNA, 22408 bp, Unknown
  R157_18m  MAG No. k141_2157
catgaacacaatgtagacaatgcccgctgcggccgcgattatcgcgccgatgaacaggatgccaaggctacccgctgcggctgtggcatagtagccgctgtcagaggggcttccccagactctgaggacgccgaagagtgcagcgccgccgccaacaatcatgaggattgcgccagcaaacacggctccatagaagatggcaagccaccagccgggcttgttgatgtcgtggagacggcgaacggatagtgcgatgctcgggacgagtatggccaggctccacagcgaagagaggaatgacaggtggtcattggagacatccacgagggttgacagcacgacttgaatggcaaagctggccagcatccaccaccagaattcgctgcgggatgcgcggcccttgaacaccacgtacttcttccaaaaacgcaggaatgcctcggggaagaggcagtcgtaatacggcttgttcaacggcacggctgctgtggcagtgggagcggcgtactggttgtatgcgggtggcacctgaccgtaagcgttggcgtccggtccgggctggccgtaggtaggagccgcgccgggagcggggaattgcggagccgcattcgccgcgtacgggtcggcggcgggctgaccataggcgggagttgcaccgggcgctgcgccgggtgcggaagaatcgggagcgggctgcccgtatgcgggctggccgtaggccggctgtgcgggggccggagcgttgaattgcccataatctggctgtgcgggggctggagcaggtgcgccgtattgcggcgtgctgggattctgctgggccggggtaccgttgggcgcgggcatctgcggcaacggcacgttgttgggatcggtcattgattcccctttcataagacgattgcgtcgactcctattcttccatcgtttgggtaaaaaactcaacaattgcgccaaatggtgtcgaagccttgcgtgcgggcgtgtggatggcgccaaagtaggtgtcaaaacaggtgtgaagacaggcatcaagatatcgggcactaccaaagacaggcaaaagagatttcgttggaaaatggccgttttgggatggtgttggctcgaaatgtcaataacgaagcaaaagagcgaggagcgctgctctccgcgtccggcgcgcgcggcacaataggggactatgactgatgctgaaaacaccaaacccgaactgcccaagaacgttcgtgttcgcttctgcccgtcgccgaccggaaccccgcatgtcggcatgattcgtaccgccctgttcaactgggcggaagctcgcgccaccggcggcacgctgatcttccgtatcgaagacaccgacgccgtgcgcgactccgaagaaagctacaaccagatcctcgaatccctgcgttggctgggtatcgactgggacgagggcatcgatgtgggtggccctcacggcccgtaccgccagtccgagcgtaccgccatctacaaggatgttgccgccaagctgctcgaagccggctacgcctacgagtccttctccactcccgaggaaatcaaggagcgcaaccttgccgccggccgtccggccgagttcggctacgatggctacgaccgcaacctgaccgatgagcagaaggccgccttccgcgccgagggccgcaagcctgcgctacgtatcaagatgcctgatgaagacatcgccttcgacgatctgattcgtggcaccatcgagttcaaggccggctccgtgccggactacgtgatcgtgcgcccgaacggcgacccgctgtacacgctgaccaacccggtcgacgacgcgatgatggaagtcaacgtcgtgctgcgtggcgaggacctgttgagttccacgccgcgccagatcgtgctttaccgttaccttatggaacttggcatcgccaaggagatgccgctgttcggccacatgccgtacgtgatgggccagggcaacaagaagctctccaagcgcgacccggagtccaacctgttcaaccaccgcgacaacggcttcatccgcgagggcctgctcaactacctggccctgctcggctggtccattgcaccggaccgcgacgtgttctccatggacgagatgatcgagaagttcgacgtgcgcgacgtcaaggccaacccggcccgcttcgacatcgacaaggccatctccatcaacgccgagcacatccgtatgctcgagcccgaggacttcctgcgccgctcggtgccgtacctgcaccgcgatggtgtggtttccgccgacaactgggatgccctgaccgaccgtgagcgtgaggtgctgaccgccgccgctccgctggtccagccgcgcgtgcgcctgctgggcgaggtcgccggcatggtcggctccctgctgtccaccgaggagtatctggagcctgcggacgacgccaagaagcagctcaaggattccgccggcgaagtgctggacaaggccatcgccgcactcgaggctgtggatgaagctgactggaagaccgacaacctgcatgagaccctgaacaaggctctggttgaggagggcggctacaagccgcgcctcgctttcggcccggtgcgcgtggccatgtccggccgccgcgtctccccgccgctgttcgaatcgatggagatcgtcggcaagccgatcaccgtcgcccgtctcaagggcctgcgggcgcatctgtgatgcgtcgtccaccgcacgccggcggatgatgggagcgtgacgcatggcgggcatccgtacatacggatgcccgctttcgcgttgcatggggtgttcccgcagaacggcggaaaatggcgcgacacgccgggatttgcgtgagagcagggtagcgcgtaatatatctacctgttgcgcggttcgcctcgcagccggttgaaaaactgaatatgcccccatcgtctagcggtctaggactacgccctctcacggcgccaacaccggttcaaatccggttgggggtacgacgaacaactcttcggagttgctacgccaagccaaattggggtgtggtgtaattggcaacacagctgattctggttcagccattcttggttcgagtccaggcaccccagccaataaccctcgcggattagcgagggttttttgtttttacacgtcctgctcctgagatacggccgagagggtaatcctgaatagacaactctggggcaaagactgggctatagtcccaatccgtgactcaaaaacggcagaaatcccgcgtccgaacgtaaggggcgcgggatttctgccgtttcgggccgtgcaggaccggccgacatcgcgcgttgccgcgacttgagcgctgtccgatcctgaaaacgtgagggagaccgccctcgtcttacttcttgaccgcgttgacggcgtcaacagccttctgcagcgacgtggtgtgctcgtggtaccacgtgacctgctgttcgagtttcttggtcgcggcctggtagcccttggtgtcgtcggccacgcagccttcgtacgtcggcagttccacggtcagttccttggacagcgcgtcgagagcggaggcgtccgagacgtctgccttggtcagagcggcggcttctgcagcatcgccattgaccaagttgttgtagtcgttggtggcgttacgtacgtcttccgaggcggcggcgcaggcggccactgcactatcgtactgagacgcgctgtatgcgcgggtgccgaacaccgcgaccgcggcgataatcgccaccgccacgatggcaatcactatagcgacccacttcgtcactcgcttgttgtgcggctgtgccgtcgcttctgcttggttctgggattcgggctggttgccgttcgcctgctgtgcgtcagtcatatttacctctccttctcactgcccctgtttgtatcttgcggagggcctgtttcaaacaacgggtatccaacatatcgaggagagccgagattgccgggcgtttcctactggttgcgctgtggcgtggccgtttttgtctcatatggcgaaagtatgcgccagaggctattgccggccggtgacccacggcgcatccgaatggacgtgcggaatcatcatcgcgatgaccgccagcagacacccgagcatcaccatcaagatgatgttctcgtgtccgtgcgcctgcagaagcgcgccggtcagcgcgccagacgccagcgccagcattacgaccgcacgccgcccgagcttcgactgctggtggccgtgtgccgaagcgtctgcgacgacgccggtcagcgtcatcgtgagcacggtggtgggcaggtccggcaccgacagcttgcgggcggtggagttctggatgcccattgccggggcgagcagcacgatcagcaggatgatgtgcaggtcgatgtgccgtgcggtggggaagttcaggctcggctgtgaggcctgtgaggcctgggtggtctgtgcaagccgtgcaatcgaggagacgccggacgcatcgtctgcggggccggtgatgagctggttcaaaagatagacgccgattagcgcggcgagtacgaacgacgcctgcacgcaggtagaaaccaacagatgcttgacccggttctcctcgaatcgccggatgatgcgcccgccgataagcgcgccgaccatgaaggagacgagcgtcagcgccgacgtccaccagacgaagccttgggcatgggcgatcgaaaacccaagaaacacgatgttgccggtcacgttggccacaaacacatgccccagcgacaggtagctcagcgcgtccaccagcccggcgacgaacgtcagcaccaccaaggcgggggagagcagaccgtatctgtcttccttgcggggaaccaacgttcgtcctgcttcggcaagatgtgatgtcatggttgcgacgaggctccttttcgggattgaaattatggcgagaacatgcgtcggtcgacgccgccactctactccctactcccgtacggttcctccggtttccgctcgtgcgcagatcgtcgggacggagaagacgccggtgatgcagatcgatgtgccgaaatcccgcagcgtggtctcgaccaagtcgggcaaggtgttgcgacgccgtatgaaggtggatggtacgccggagagcgtgccgatgtacccgtacgagatcgccacgcgcctgtccgatttgggacgtttggacttttccgcgcagccggtgccggatgcgacccgtgatgatttcgatccccttgaacgcgaccgtctgcgccggattatcggcacctaccaatccagtgaccgtaatttgttggaactgaccgatgaggagctggagaaatccctgcaattgacggtgaccgtcgatggcaagaccatgccgacgctgaccggtttgctgctgctgggcaagggggagtctctgaaacgcttcgttccgactcatcgggcgtctttccaagtcatgtctggtacggatatcaaagtcaaccaagactatgccggaccattgctgaagaccatcgagcaaatcaacgacatgttctctccttggaatccaagcgtcgagctatccgtcggtctgttctcaatgatggtgccggaattcgaccatcgggcgttccgagaggcgctggtgaacgccttcggccatcgtgactacaccctgctgggacgtgtgcgcgtgcagttggatgatgcggggcttaccatcgccaatcccgacgggttcgtggagggcatcaacatccataatctgcttaccgccgaaccgcatggtcgcaatccctgcctgatggatgcgttgaagcgaaccggtctcgccgaacgtacggggcgcggcatcgaccgtatattcgagggtgctttgaactatggtcgtcctctgcctgattattcgaggtccaacaggcgtggagtgtcggtgctgttgcctcgtagtgtgcccgacaaggcgtttgtggagctgctggccgaggaacgtgagcgcagcggcaagtccatgtctctcgatggtctgcttattttggacaagctcaagagtgaacgtcgttgtggctttgatgtgttgtcgggctccctggacatgagtgaccagcgtctgcgcaccgtattggggcagctgacggaggcggggcttgttgaaagcgctggcgttggagctcgccgcacgtatatgttgggtgcgaaagtgtatcggcgcagcggtagggcgatggattacgttcgccaatcagacatcgatagggtacggtatcccgaactgatcatcaagttaatgcatgaacagaaatcagtgagcaaaaacgatgtgatggaattgctgcatcttgaggggaatcaggcgtactaccagttgcgaaaactagtccttgaaggacgcgctaagaaggtcggcagtggacgcaacgtgcggtatgcggcagtacgttgaatgagatacgcagatcattcttgaacggttttctctgaatcccgagatttatctctgaattcagagaaagaatctcggaattcagagaaaaccagtgtgcgatgtggctattccgcttcaggaattatgtacgacttgaacgcggcctgcacctgcgatgccgtcagccgctttatcggtacgcttcctatgtggggcttgatgtggttcccgtagctgttcccatagcgcgtccttgtgctgtcggcgatgttccagatagttcacgtcatgctcctttgcgtgatgactcacatgattcgcgtcttcatggtagcgtctcccgccggcgcatgagtgactggtcacgctgtcagtggaatctccccgacggatatcccgcctatgcgggatatccacgccggcgtacggagattcgcatgttcgggcgtacgatggacccggttttttgcaggatgcggccaacgccttggatgggcatgggcctgcaaccatcgtgagccgccacgggcgttcggcgatcgccgggcggtggatcgagaaggatcgggcgatcgggaccgcccaccatccgaaaccatcgtcggcgtcgcttcagcggggcatgccgacggttcgcgttttccggcaaagggtcggccggcgctttcctcattgaagttcgacgggtcatggtcccgccgtgagggttggaccggtaatcgggtgatgccgaaagtcccgacgggacggcggccgtgtcatcaaagcgaccgcacgaactctccgcccggaagcggacggcgctgattttggaggacccatcggccgtggcattcccgggcccggaacatgccatggggtttgcggaccccgggcgacgccgcatggccttcccgttcccgcgccacgggcggcggcatggttcatggcgccgacggtgggtccgtccgcacgcggagcacttccatgcctcgttgacggatggtggcgatcccccacggagaggagtattgtttcatttgtagataacattgttacacagtaggagagcattgatatgcaatctgaacgttcgttgattcccacccccatgccggtccggagacacgcacggtccgggaacagggggctggccctcaccgccctgtgtctggcggtgctgctggtcgtgatggacaacaccatcgtcaacgtcgcgattcccacgatgagcgacgcgttgaacgcctcgtccacggacctgcaatgggtggtggacgcctacacgctgtccttcgcggcgctgctcctgcccgccggcaaactcagcgaccgatggggaagaagacggatgctgctcgtcggattggcgggattcgccgtggtctccgcagccacggccttctcctgggccctgtggcagctggtgacgctgcgcgtggtgttgggggtctgcgccgcgctgatctatccggcgacgctgtcatcaatcatcgtcatcttcgaaggctccaggtaccgtagcctggccgttggcctgtgggcggcgacatcaggggtcggcatcgccctgggcccgatcatcggcggcgtcctgctggagcactatgcgtggaattccattttctgggtgtgctccgtcatcggcgtggtggcgctggcctgcatcgcggtggcggtgcccgaggtacgggcgtaccgttccgagaggttcgatttccccggcaccgtgttatcggtggccggcgtgggcctgctggtgtggacgatcatcgaacgcccgacttacggctggttctcctggcaggtcataggcggcatctgcgcggccctgatcatacttgcggtgttcgcggcggtcgaggggcatacgcacgccccgctcatcgatgtcggcctgttccgaagggccacgttcacgagcagcacctgcgcgatctgcgtcgcgttcttctgcctgttcggcttcatcttcatcaccacccaatggttccaggcattgcgtggatacaccgtattgcagacggcggtcgcgacgctgcccttcgcggtggtcatggcggcggtcgccccgctcgccacgcaattggcgaaacgtttcggataccggtcggtcgtctcgacgggactgctgttcctgtcggcgagcatgttcgtggtcacgcgtgtcgacgcccattgcagctactggttcgtggtcgtacccaccatggccctgatggcggccggcatcgccctgatccaagggcccgccacggacgccctgatgagcaccgttccggaaagctcgaccggcgccgcatcggccgtcaacgacacgatccgtgagatcggcggcacgctgggcgtcgccgtcatggggtccgcgatctcctccgtctaccccgacgagctctcggactcgttgtccggactgcagatcccgtcttccatcgcgaaagcagcggaggattcggtgatggccgcgaaatcgatccttccgcacctgccggcaggtatccgacagaccgtggagcagtccgtctcgaccagtttcatgagcgccacgcatgcggcatgctggatcgcctgcgccctcgcattggcgttcgcgctgctctgctggatcgcacttcccaaacacgattcaggcaatctcccccaatagaaaggaacatccatcatgaaagacgacggacggatcccacggatcaaggacacggatatgacggaccgtctcctgacggccggcgcgatagcggaggacacacgcaaccccatcggtgacatcgcggcatgctcccccggtcacggcagccagagcgtcggcatgttccacggccgcgccggccagcgttcctcgacatgtcttggctcggtggcaatctcaatgcggtgggaccagccatcacacccatcgaggcgcggtccaagagcgtggctggaccttcgaccccacccatcatgggacggtgcagggacctacgggccggatggcgtttttcatccgtaacggcgggatgatgcggagaagcatatgaggactattcggaaaacgacaaaaagccagcggacgcccaccaccgagatcaggggcctcatactcgacgcctcgaaacgaatcatcgaagaggacggctatgacgccttcaccatccggcttctctcggaaaaggcggatgtgtcccccgcgagcatctaccggcatatcggcgacaagcaggccgtcatcaacgctctcatcgacgacagtttccagacgttacgggagaagctcctgcgcgtcaccaccgaggatcccctgcaaagactctacgatgcgggagtcgtataccgcgggcacgccaaggcgtcgcccggcatctacgccctgttgtggcgatggcatgcgggcgaggcttcggaggcatgcctcgccgccatgaccgagctggtgcgctacgggcaggccgcgggaaagatccggagggatgacccgcacctcatcgcatggtccatatggtccgccgtgcacggattcgtccaattcgagacacgacccgaacatgatacgcccgtcgacgatgacgatgcggcctattcctttctgctccggctgctcattcgaggggtccgcgcccctcagacggtctccgagggaacggcgaccatcgcggataccagccgatcgtagaatcgccattggccgcgaaacgccacatcccgtctcacagcggcgaacgttccatccgccttcaggctcacggataccttacggaagtcccccgtcccgtccaatgcggacaacgccttcgaggcggcctccttcgcgcagaaggccgccctacgttccaccgaggaggccatacgcaatgatgcgagctcttcggaagagaacacgaaccgcatgatcccgtcggacaatccgtccgaatcgtccacgtccactcccacggcacggattctttccgccgacgccacggcggcgacgcacagcgacggacaatgcgacagcgatcccacgatgccggatggccagagcggttcaccatccgaacctttgagtatgggcccgtcatggccgatacgtcgtaaggcctcgtgggccaaaagacgcgtctccgtgaattcccttcttcgtttggccgtggcgttcccgaccaaggcccgctcaccgtcgaacaatcgcacgcggcgcgtcccctcccccgagatcagcacctcgcagccggaggcgagcagcggcccgaacaggcgagcccgtcgcatcatgaggtctgcgcacatcatggagactctatctaccgaaacccacaaacccagcaacagcaaggctttctaccaattcccagaatgagtgtaccactctgttcgccgctcaaagcccgccagaaggaaacttgcgcttttccataccttcacgccgacaagaggtgtcacgattacctatatctcccatactttctatgttttcttaaaaacaatctatacatctagcagaaccggggagaccgtagtcccatggtctgctgcttgcatctatgaggaagtcatacggcaggaaggctaccgtctccgacggcatatgcaccttcgtaagcggccgccacgcaaaaaagtggcgccgatcccagcgtcatcgaagactgagtgtttcaatatccggtgcggacttgtgtgcatcagacgtctgcgcgattgaagcaaaccgacatcgaatccataggccatacggcccggatcatttgaatcacgattcagagtcaacagatcgtcgacatgaaatgtgcgtgcggcaacgaaacgagtgaatgaccgaccgcaaaagccggattgcgggtgaacaccttacaaggaaagctcgcgatagaccaggtcgtctcggattgcaaagccctgctgctcccagaagtcgttgccggccttgttgtccgcatatacgccgacggcaaccttcggcaacccgagtgcgcgaagcgcctcgaccgcatgcccggccaaaagtgagccaacacccatgccgcgcgcttcaggatggaccgcagtgtgatagatgcgtgaccgtctgccgtcatggccggcgaggatagccccgatgatgttcccgccgtcgccctcgtcttgctcaccacgattctgggcggttcccagtcgccgagtcttatatgccgttcaacgtcagcgagccaggcctccgccattgcggtgtagtcggcgtcgaatcgtctcgaataatgcttcggcaaatcgggccatttggcataggcccataccggcggctggtagcgtgcctccacatacctgcgttttccgtccctagaggttctggacacgaccgaaccgaatcctacggcgcccgctcatcgcattcctccggatccctgaatcccaaagattccaaggattccaacgcattttgaggatcccttgtgcaatagacccgcgaaaagagcaaaagtgtaaaggaaaatggtcttcaatcccaatgattccaatacttccaacacttttcgacctgaaggaaaagtgtaagaaggtgtaggaagatgtaaaagtgtaaacaccgtcggaatcgacggagacgttctcatatggcacgccgatcgatcatcgaatgtcatgagtggctcccttcagacatagagtggtgcaccgatttggcctaccggatgcaccacgtaacgtgccaccgatatcgtcgggccgaacaccctctgaagacactacaaggaaactattccgacagtccaagccgttcggaatcgttgaaaggaagctgttttcggcaaaagaaaagggctttcgaatttcttcgaaagccctgctagcggaggatacgagattccggcggcgacctgctgttttcggcttgatttcaacgtttctgggctgccgcttaagtgcttcgccgcttaattcgccgcctctccggcgtgtcgtgacgggttgaaacggacggttatgaacaggtgttttttgggttgcgtgaaacaggggagactattgaggatgctttttccatgaagagcgtgtagttcaaccagtatatagaacggcctccctttgccagcagtagtgatgtgctaaagattacgattccgaaagaggtaatgcgatttgtctcccataggcaaagtgaaaataaaggtaaaatggccgtcgttaaagtccagatgataatacttagccagtttcttgctaattcttcggggaatctctttcgtgcttctaccataaaatgtgaatttgactggtatagcatcgtacatataaatgttgctgtagccatgactaatccggagagggtcgatagcccgatgaataaatcattgggactgccatctccaggtagttgaggtactggattgctgagaagccaccaagtagcggttattatggttgcgcctaggatgtcagtggcgggatgcgccataattccatttattaatgttaaatgtggcattaattactctttgaaatatcgtataaataagtctctttatcaactgaaacagcaattaaatgattgattaggccagtgaataatcgtggttcgtcattggatattgtaatctcgctttgttctactacaggatgggatactaaatttaattccaacagtttgtctgcgaaatcaggtccacttacttgaacttttctgttctgatttactgcagatatgatgaaatcttgcattatgtctttaaaaacgcgacgagcttttccatatgctgtatcgtctgtcaggctaatcctaatgtcgatatcaagatcggctcccactttttgtgcaatttcttgataaaattctcctgcgttaccttttatttcataagctttatcaataaaattttttgttgtgaatgatgctgtgagggaatctattccgcgaagttcttttttgaaacgctcgatgctatctgctgtgatgacgggaataacatcccattcataatcttcttcaggccagtaatagtttagtgcttttttgagggggtctacgcttttaccagcattgccacttactctgctgacaagagaatattttgggaagaaggcgaatgctgacgattttgctaaattgtttgtgttgctatatgcctcgctgtccatgaaatcagtgactctcttgtgttcctgatcaatgagctgcataaaatttggctggaattgttcaaaaactgtaagtactggataatgcttgtctgttacagaatcaaaaataatattatcgagtattttattttcccaagggaattcacgaaattcactgagacgcttcatccaattgatatgtcccgtggttccattgctgataccatcacgagacctcagccggagccagtagaactgcactgttctttgaatcacgcttgtcaagttgttcacctgcttagtaagtcatatctacctaatgccaatcattgtacttcatttttctggtgcgacgattgggatgaaggactctacggcccttcctaaagaaagtgtttgtggcagccgccgtagttgtattgagcgcatgctttatgtgtggaaaataacggggagaaatctgcccaatactccggggtagcgtggagcaggccggggaggagtatcctccctggtgttgttaagcggcgtcggcgaggaagatgtgcttgtggtggtattcgatgaattcgtgtgaaggttggctgattgtcggtaatgagatttcgcgtccttcgaagttgtagagccatttgtcgttgatgtcagagtgccgaaccttgtcatgattgaccatgatgcgatagtcatcatcgatggagataaggccctgatcgaaggcacggtcgtggaaggcgttgagcagcagcccgttggatgcggcggttttctcaacggctgacgatgccttccacggtttgatgtggctggcgatcagcagcttaggaatctgcataccggttatacagcaggtgctgtggtagttctgcaatagtgagttgcggaaataggattggttgactcgctgaagtgttgttattggtcgttcctctccggtgggcgtgtgttcggcaacgagtagggtcgttgcggtttcgagaggggaataacggtcggaggccagcggtgctgggttgaagttgttcgcgtccgcttgcaggagcgcgtgccgaagtagattcagacattgctccatgaacgtatcggggtcttcggcataccactgccagacttgggagtcgagtttgctgccgtgcttcatgcctacgcgcccacgggccttgcggttggcatcataagctgcgatgttccagatcttcaacaccactgagctgggagtgcggtgcaagaacgatgcgagacgttgcacgtcaagtcctttgtcatcgcattcgcgtggtttaagcacgatgtacaaggcgaacgccatcattgtttcctcgcgtgaccaattacggcgaggtgttgatgtactgacgtctgatgccatgaatccaggatagtgcggaatggttcgtgtctgtgctttgtatgcggtatgtcttgtgagtcttagcttgtactcgctgcttcgtgtctgaaatctagtgggaagcagtggtaagcggactgattttcttgaagctgccgtaaggactatgctttcaatgattttggggtttgctttgcgtgctggtcgtgcgttctacagcgacaagagcgacaagagggaatctagtgagaagtgcgaggttgagggggtcaagcatgctaggaatcctaatgttttcaagggttattaacccattggaagagttcgatcggctttgaatcttcggcatatagagcgattacagagaatctagtgggaactagagcgaatctagtgagtctacatggaaatcaagtgctagtcggagagacgcgtcgaaatcccaataatttcaacgatttcaggggaatcagacaatgctgtcttacgacagcattgcggctagatggaaatctagagtgcgtacatggaaatccggtagggctgcatggaaagcaattcatgttaaccaatgggtgcgcgaagtatgcgtacagtccttgggtgcattgagaccagtatgaagagcagttggcattgatatgaactgatttttgttccgtatttcctctgactcgatgggagatgatggaaccatggcaaagggcgctcgatatgcgccggagttcaaggcgaaggcggtcaggctgctggcggagtcgcgttcctcgtattcgtcggagacgaacgcgatctccgcggtggcgaaggatccggggatagcgccggaatcactgcggcgttggcgcaaccagtcggacgcgacggtcgcggaggagacgaggcagtcggccgaggacgcgatggcggagctgaggaggctgcgggccgagaacgcggaattgcgtcgggcgaacgagattttgacgacggcgtcggctttttcgcggccgggctcgacccgacacggcgttgatggccgcgtacatcgacgagcatgaaagccgtttcaaggtcgggccgatccgcagggtcctttccgaatcgttggactgcgggtttctcacgccgcgcggctgccgcatgttcagaacgcgtcccgtcagccgcatgcgggcggggcatggggcgctggcccgcgacatcctccagatccactcggatttcttcatggccgtgtacggttacgggaagatgcacgcgcagctggtcgcccagggctgggatccggccgaggtcggccgcgaccaggtgatgaacatcatgcgcgagcttggcatccggggcgtgcgccgcggcagaaccccggtgacgacggaacccgccaagggcacgggcggcaggccggatccggtggacgggaggttcgaggcttgtgcgccgaaccgcctgcacgtggccgatatcacctacgtgcgcatggccaacggctcgttcggctacacggcgttcgtcaccgacgtggacgcccgtcggatcgtgggatgggcgtgcgccatgaccatgaacacgcaggagctgccgttgcaggcgttggagcaggcggtctcatgggccgcgtcccgcggcggcgcggatggtcttatccaccacagcgaccatggcacgcagtacaccggcacggtgtacaccaccagggttatggaatatgggatgctgccgtcgaccggcaccgtcggcgactcgtacgacaacgccatggccgaaagcgccgacggcgcgtacaagaccgagctggtatggcggcgcaaacccttcgcggatctgaaggacctggaattggcgacgttccggtgggtctcgtggtggaactcgaagcgcctgcaccagtccctgggctacaggacacccgaagcggcggaaaccgagtatcatcaacatcaagcggcacaagccgccccactataagggcggaacaaaaatcaggccacttcacattgacctggttacgggatgctgggcggattaaaacaaatcagccgttgtattcgatgtgtaggctggggtcgctttcatgttcgtcaatgatttggttgtaagccttgaccagacgcgaaagggtttcgtgacgtgctgcgttggtgaagtggccatgctcgtgcacattgctggaaagaaacgattgcaagtcccagacttcaaggcggttttcgaagcccatgtcggaggctaagtcccatgcggttttgacgcggtcgcgcacagtgatgatgattggatgcagtccagccttgatgttgcgctggcatttatccatgagcagggatgctggggcagtggtgcagtgtatggctgtgtcgccgacgttgaaatcgcctccgcgcccggtcgggtcgtcagcaacggacgcgccgttgatttccacttctggggcaacgatggtgagcttcgctgcgacaagatgttgcagaacggtaccgacgtacatagtgcccggattttccttttgtcgctgcgctgcctgttgcagcagatgttctacagccgcatcgacggaaagagagttgtcggattccagtttgaatggtttgctggtgaagaatgcctgaattcgtttgacccagtattgctcgatctcgttgaattgctccgctgttgggcgtaattcgttaatgagctcggcgtagtcgtgcatcaatgccatggtgccacggctggttcgtccgccctctgctgcgaggagtcgtgtgatgccatattcggcaaggattttctggcagttatctttgctgattcccctgacttgaccttccttgttcgtgtgatagtcgctggcgtcaatgggaagcgtgtctgcggaaaagaagcgattgagctggatggcagcagccaaagcgcccttggtgtttacctgatgggacttccggaaatcattgatgggagtcagatccattgtttgcctcgcttatgcagtgtgatttgagagcagagtttgctccacgtataggtctttgcctagggtgccgttcagtgcaggcatgaagtagtgcttgccaagccattccacgacggggacggagacggcgtcgccgaatccgaacatcacttgattggggcgtagacccgtaatgttgtagtgggctgcgcccataagagcagcgtattcgcgtggtgtcatccagcggacagcggttttgccattgcccatgcgaatgatcgcttggcgagaggagccgcctcgtgcggtgcgtaggcagccggagatgtcgtctgcgcggacttcccacacggctttgccgttgcgggtgcggcgataagcagtccggtaggaatcggttgccccattgcgcaacgtttctacacgagttgcctgaaccggcgacagcgaatcaaggaatttggcagttctctcagcgttccaccagcgttcgtcgtcgttagccatgctctcgacgtacatattgaggccagacatcaggggggacggcggttcgggcagtggtgcgcgatgcgtgcggagagaggtgtccgcaaagacctgctgcagccagtcagggcgcagggaagaatcaaactgttcggcggccggcggattctgcaggcccactaaaaagagtcgcggtcgggactgagggataaatcgacgagtgtcgatggacaatacgtctacggagtagcccagttcattgaaggcatgcactgctgcggcaaggtcttccccagagtgagaagtggccaatccgttcacattctcgagaacggcaatcggcggccgggtgttcccaagttcttcgagcagtcgcacgtattgccagaaagcgccggattgcttgccgttcaggcccgtacgagtgcctgcaagggagaggtccgtgcaaggggaggatccccaagcgatggaggcatcgtggggcagatcgtcgccggagagctcactcatatccccctcgacaagggtgtggcccggcgtatccgtgaagttattgcgatacatttcgcacttggcggcgtcgatgtcgttcgaccattcgacctggaagccggcttcttcgagtccaaggcgtgctaggcctattcctgcaaagaattcgagggcttgcgggcgtgctgtgttggtagccgcgtgcgtgcgattatcgtccatgtccccaccttacctcgtcttgtatgcgtattagtccatgatagctctaggtgtagaacatttgttcgacttgcagccgtgtcctggagcctattgaagatcacctagatttgggaactggatattgtttgttttacttgctaggcctgcgaaatcggggtagatgaaggactcgcggtatccaaacgcgccttctaggtaacttcgtatctctttcttagctttcttggcaatgacgaatgaatacgttggtgctagattgcgttgattcggacgtgcgttgtgatttggcgagaagggctttgcataaattgaggaagctgcgagtatatctggcctcttccaatattctttgcccgtaggcttgcgaaaatattgaaggattcgactatttgtaattggaattccatcgaggataaatactgcattttgagcagcgatacgtgattcgtattctggtggacgccatacgatacggcgtgatccggttccccagttggctgctgcgcgttgctcgtaatcgtgcaggttgaaccagaaagggtcgcgacttagcagttcttcggagtagtctggttgctcattattgcctgatgcgtatccagctaaagcgaataggcgcgcgtcatgatcttcgtgctcgtgcgttgggtcatagacggcgaaccaagcagctatatatgggttgcaggatgcgtcgagtaggcgtgtggggccgccaaagtgctgaatgcgtgcgaatatctctaaagcagacatgtttccatatcgccagtcttgacgagcaagattaagaatctgcttctcagcttgaatcatctggtcttcggtcggatagggctgtttggttttgggcttctgttgaggggaaacaactccattttgcgtcattagtaggcgaaataatttgctatgtagtccccaagaggcattattctgtcctcgccagtataacggtatatttgatacatgcttttgcagtagaaggattgcattatttaaatcttctatactctcgatgcgtccacttttggagtcaaaaaaatctgaaggactggtcatctcaggagagtagtaatgaggtgactcgttagagctatggaaataactaggggttatggatcgataatatttttgcaggtttgattgtgtctcttcatattgttttaatacttgcgaaatcccggaatatacgttcagatatttttcgtcgtaatgagcaaaatcaaattttgttagtgcgtcacgaaggctgtcctgaataggttttatggaagacaggattgtgcttgaagataagttagagattgttttgagggctttctcttgctgctctaggaaagtttgaattgctgaagtgcttgtttcgaggggagtggatataagtcgcaggttgttgctgatttctggggttttttgaatggtatctagcagctgatgcgtcatgttggggcttattgccattagattcggcgttgcttgcgttattttcgctatagacggcaacgcgcttacatgttcatggtgttcttcatccttaagcatggcttgatagtatatcgagttgttgccattggattgtgctgatcggttcttcattcttaaaaagaaaggccgctattgtttttaatggcggccagatgtttgagtcgtcttctgcgatggatacactgggcatctttcatctcagaaagttggctatctgtaattgcggtgccgcatctcctgtttggccttgctggcccacaggcctcccttgccgatgagctcattcaattgcgtggcgttgagctgttggtagtgcaggtctgttgcgtagggagggagactcgccttccatccggcaatgtctgtgacggaaccgtcggtttcgcctgttgcgggatgatgagtggcgttctcgctggtgccatcttgccgtcttgccagttcagatgtcggttcgtttgccgtaaggccttgcaaatcttgcgttttctccgggatcgcccacggatcggcatcgtcggacaaggtgggaaacgccgtcttgtctggttcgtgcagaacgttgcaatagcttggttttgacgaaggcggcaagatggcagtagctcttgtgacagcgaccggatccggcacagttgcttctggagtctcagtttgttcaccgctgagggtgtccgtggcttccgcattcaaatcttcagagctctcctgattcggatgatccgcataatccggcgacagccaccaccacatgttgccgtacttcttgcttgccagcagtggctttgggcgtcgtctgccgtccagaacttgctgcttgctgaactcgcctttcgcttcgttgattactctgtacgacggcacaccccaatacaagccatccggtgtgagctccttgttgtggtcgaagtagtcttggatgatggcccggccacaaccacaacggtcgctccggttccacatcagctaaacgggtcagcgaataggcgcggggcgtcagttcagtcttaagctcagactcaggctggctgctttcgcttggcaaaatctcaaactccaagccgctcatcgccgcgtcggaagcgtcgtgagcctcaccagccgcctggataaacgtcaacgaccgcacgaacggtgtcagcgtctgcgccacttgctccttccagcgagtgccggtgtcgtccttatccataatggcaaccacatcagctccactaagggctaagcacgctgaatcaagatccagtttcgcggcgaagttgccgccgcctcccgatgcggttacagcggcatagccgagcgctcgcaatgtgccggcatctttttctccctctatcagatacactggcttgcccgatgccacggcacgtttcgcgtcggcggccatccacaacgggtgcttgccggcggtgttgccgctttgcgagattcgcttggtgggagagcgacgaacaatcagaccgtccgcatattcatatgctgtgccgcgctcgctgtcgtagatcattgcttcatagccattggaacgagccagcgtagcgggagcgttcagcgcgttgagcacatcgtcggcttggcaagtgctgcagcggagcaatgtggcgctttccagcggggaatacagcacagtgagcgagtcggctgtgccgcagtttgggcaagcgccgtgcaacaggccggtatttggctgaactgcaatagctgcgcagatggcggcgaacataggggattggcctagggccaatggttccaagtacggtttgggcatcgcgtactgttgtctgatttccgcagagttttccgtgtgcgtaggtgtaatcgtcgttgtctcatttctgttgagaagtggagcattcgcatgccgtatggccgccaaatcggcggcagtgagccggctatcgcagctgtaactgttgtagccgctgtaatcggcatggccttgaggtccgctttgttgatcgaacaggtcgatgattttcaatccaagtgcaccggcaatggaagcggcatcgcagtgttccgctccg

SEQ ID NO: 1273 - DNA, 22866 bp, Unknown
  R157_18m  MAG No. k141_2275
ccagtatgtcgacatgttgcgtcggcacatgatggacggcatcgtcatgtgtgcgcacacttcgcatcccggcgattattggacgtcgattcatcgcccgatcgtcgcgttcgaccgtgtgcttggagacggtatttcgtcgattggatccgaccacgagcagggtgggcgattgattgcgcagatgctgatccgcaatggtgccaaacatgtggtgatgattggcggtccgcgagatcaattcttcgatttggctgcgcgcggagaagtcgaggaaggatcgttcgatttgggaaagaccacgttcccgacggtgcgctattacctcacgttggaacaggaattgacctccgcaggcgtgaaatacgagtatgttgaagctggcgaagtgatggattttgccggctgtcatcgtgcggtcagcaatgcgctcgacaaggtggcgaccgacggcgtcgatgccgtggtcagttccgacattggtgcgtcgttctgcgtgcgcgaagcgttgagccgcggaatttccattcctgacgagctgcagatcgttgcctacgatggtacgtatttgactgatttggctggcatgaagctgaccgcggtcgcgcaggatttctcggcgatcgcacagtcggcggccgaccatatcgtgcaggctattgccaatgaggaagtggctgcggctaacgcttcacgcaggaacatccccaagccgttcgagccgaacgtgcttattcccatgacgctggtgccaggcgataccacgcgttgatgctgcgcgttggaacgctgagtggggatcggacaggctgggctgcatagaacaccgcatcgaaccggttcgacacgcgcgttccgctgtgtgactggacattgactcccctctcgaggtaatatcgaaccggttcgatgcatacgtgagtatgcaaatacgtaaacaacaaacaggcagacgcgtacacattgcacctgcatccatgaaccaagggaggtcccatgaaaaacaaagtgcagctcatcgcttacgccgatcgtctcggcgatggcactcttagctcgatgaccgacatcctgcgcacccgcttcgacggcgtgtatgacggcgtgcatatcctgccgttcttcactccgttcgatggtgcggatgcaggctttgacccgatcgaccacaccaaagtcgacccgcgtctcggcagctgggacgacgtcgctgaactttccaagacccacggcatcatggtcgatgccatcgtcaaccacatgagctgggaatccaagcagttccaagacgtgcttgaaaaaggtgaggaatccgagtattacccgatgtttctgaccatgagctccgtcttcccgaacggcgccaccgaagaggaactggccggcatctaccgcccgcgcccgggcctgccgttcacccactacaagttcgccggcaagacccgcctggtctgggtcagcttcactccgcagcaggttgatattgacaccgattccgacaagggctgggaatacctcatgtccatcttcgatcagatggccgcatcccacgtcagctacatccgtctcgacgccgtgggctacggcgccaaggaggccggcaccagctgcttcatgacccccaagacctttaagctcatctcacgcctacgcgaggaaggcgtcaagcgaggcctcgaaattctcattgaggtgcatagctactacaagaagcaggttgaaatcgcctccaaggtggaccgcgtctacgacttcgccctgcctccgctgctcctgcactcgctgttcaccggtcacgtggaacccgtggtccactggaccgaaatccgcccgaacaacgccgtcaccgtgctcgatacgcatgacggcatcggcgtgatcgacatcggctccgatcagctcgaccgcagcctcaagggcctcgtgcccgacgaggacgtcgataatctggtcaacaccatccacgccaacacccacggcgaatcccaggccgccaccggtgccgccgccagcaacctcgacctctatcaggtcaacagcacgtactactccgcgctcggctgcaacgaccagcactatctggccgcccgcgcagtccagttcttcctgcccggagtgccgcaggtctactacgtgggcgcactcgccggccgcaacgacatggaactgctgcgcaagaccaacaacggccgtgacatcaatcgccattactactccaccgccgaaatcgacgaaaacctcgagcgcccggtggtgaaggccctgaacgccctggccaagttccgcaacgaactgcctgcattcaatggcgagttcagctacgaagccgacggcgacacatccatcaccttccgctggatcgctgccgacggcaagaccaaggccgccctcatcttcgagcccggccgcggactcggcacggataacaccactccggtcgccagcctcgcctggaccgatgccgccggtgaccacgagactgatgatctgctgagcaacccgccgattgccgatatcgactaaccgttggcccataaacgccactccgctgtgcgcgctccaagtagtgcgtccggcgtaagctgggtccatggaaaacaaaccgcccgcagtgcactgaagctagtgcgctcgggcggttttgcatgtggcggggttgcgggtcatgctcagtcggagctggccggtacctcccgccggtgatgagagcaaagaaagagcagcaacatgttggaaccgtacgtgcgcccgggtattgacgaccgcccggatctcgacaaggcattgagtcccgaagacaaggatgccgtggcccgactggccatcaaagatcgtcggcgtcctcccgaggcatccgccgatcagcccgaggcccaggccgtgcgtctggcggccgccggttcgtcggctgctgccgctgccgcggccagcgtggatgcccctgcgcctgatctgtcgtctgcatatctcgatatgcgcgatccgatggtcgccgccaatggtcagcgacccaccacgggccaggtatcccgtctcaactgggggttcttcgccgcttccattctggtcggcgcaccttggatagcattgaataccatcgccatgcccaacgccgtggcgcgtttgttcggctacgacaccgcttctgccatatcggtcaccatcaatccgtccaccggccgtccgctgcccgtcgccactgacttggtggtgcctctggccgtgctggtggtcgttggcgtggtggcctccatgttcgcgatgcccttggtctccgcgctgtccgaccgcacacgtattcctctgggccgccgtaccccgtggatggtggcgggtggcgtgctgtgcgcgctgatcacgctggttctggggcggaacacaggcctcgtagtgctgtgtttcttctgggcgctcatgcagtttgcctatgcgatgatttccgtgccgttggccagcgccatcagcgaacgggttccggacaaattccgtccgcgcattgagcgctggcacggtatcggcgtgatgcttggccaagcgcttggtgtatgcatgggtgcgctcggcgtgatgttcgactccttcacgccgtttgcctacaccgccgtgctgtttgcggtttccggcatcctgaccgtgatcatgctgcccaaggagccttccagccaggagcagccacatcaacgattcgagtcgagccaggtgtttgaccagctgcgtccgccggcacatgcgcctgcattcgcccgtgtgttcgccgctcgcgtgtgcatgatgacgggcgttgggctgaccggggtctttctgtggtatctcgtgcgcttttgggtgtatggcaaggctgtggtgttcacttccgcgccattgaccattcccgcgggcctcctcatcgccggcatggccgcggcaacgctcatcggtgctgcgctcgcgtcctgggccgctgggccgatctccgagaagatcgaggaacggaacatcgccaccactgcagtggtggcggcatcctgcctgctgtatgccatcggcgtggcggtggcatgggggctcggcgtctggtccaccggcacggcacgtgaaaacggcatgctgctcttcgcgctgatctccggattcgccttcggcgtctacgatgcgttaggccttgaactggtgatggactctttgcccgacccgcgccgagccggccacgacctcggcatttatgcgctcgccaactcggccggtctggcgctcgccgccatcatcggcgcgctactggtgaacgccttcgagcgcagcttcggctattacctgctcttcccgtccgccatcgtcatggtgctgctggccggaatcgtcaccctcaccgccgagtccgcgcaatgacgggccggtccggctccccggccgccggcggcgttcctccccgcggcgggggcgttcgtctcggcgacgtggcgtccacaatgtgaacccttgctggattggcaagacagccaaacctatgtttacattccagttcaggtcgaacggcctgaggaaataccgaaaggaggccacgcgatgactggattcaatgcttctgcgtttgtatccgcacgaattattagcccgtcttcgctggcggactaattcggcattgatgcttgaagccccgtcaacgaaggcagggccaatcaagctgacacaatcggtaaggccctgcaagttgcggggctttttttgttgcgctcacaaggcttacggcagaatcccgcagacggaaacggtagcggacagtacacggcaacaacacagcaacagaacaacaacctccctgtgagacgaaataatcgcccgccaatgagagtgaacgagagcaaaacaggagtaacaatgactgcagcagtcgaagagactggcttagggcaggcggcaggtaaagccgctaccttggtacgcgattcggtcaagaccgtgatcgccgcatcgatggtcggtaccgccatcgaattctatgacttctacgcctacggcaccgccgcggcaaactacttcccgcacatcttcttctccgcgaaggacaaccccaccgtcgcactgctgatgagcttgctgaccttcgccatcgccttcatcgcccgcccgctgggctcgctgatcttcggccacttcggtgaccgcatgggccgcaagaccacgctggtcgtcagcctgatgaccatgggtgtcggcaccttcctgattggctgcctgcccacctacgatcaggtcggcgttggcgcagtcgccatcctctgcctgctgcgcttcatccagggcatcggcctgggcggcgaatggtccggcgcggcactggtcgccaccgagaacgcgcctgaagacaagcgcgcactgtacggctccttcccggagctcggtgccccgatcggcttcttcctgtccaacggcacctacttcgtgctcgaatccttcaacaatcaggacgcgatgctggcttggggctggcgtgtgccgttcctgctgtccgccatcctggtgatcgtcggcctcgtggttcgcgttcacatggaggagaccccgatcttccgtatggctcaggagcagaagaaggtcgtcaagtccccgctgaccgaggtcttccgcaagtcttggcgtcaggtgctgcaggccaccttcctcgtggccgtgacctacacgctgttctacacgctcgccacctggtccctcgcttggggcaccaaggagcagggcgaaggcggcggcggccttggcttcaccaaccaggaatacctgctcatgctcatgatctccatctgcgtgttcgccctgttcatcgtgctgtcctgcctgtacgcggacaagatcggccgcaagcgcgtgctgaccttctcctcctgcgcactcgtcgtgttcgccgtgctcttcccgttcctgctggacggtggtctggtcggccagaagaacttcttcgccaacatggtgttcctgtgcgttggctttgccctgatgggcgtcgccttcggcccgatcggcgcgttcctgcctgaactgttcgaggcgaacgtgcgctactccgggtccggcatcggctacaacctggccgccatcgtcggtgcggcgttcgtgccgaccatcgccacttggctgagctcccattggggcgttcactccgtgggcctctacctcgccgtgatggccgtgtgctgcctggtgtcggtcctgacctgccgcgagacgaaggacgctgactttaccaagtgaaatcctccataactaaatatcgccaagttcacaacgtgaaaaatctcaattccactaagtgaacctctgcagggcttttccgggtcaacaggactaaacctgcatatcggaaaagcccacaaggaaagccaaaactaaaaacagtttctgcagaaccagcagagcacaataacaattaaagatttcaccccccataaacaaataaataaaaggagcgccaaaaatggcagcaactatctggtacgagaaggacgccgatctgtccgtgttcgatggcaagaaggtcgccatcttgggctacggctctcagggtcacgctcacgcactgaacctgcgtgactccggtgtcgacgtggtcgtcggcctgcgtccgacctccaagtctgtcgagttcgccaaggagcagggtcttgaggtcaagccggttggcgaggccgtcgccgaggctgacgttgtgatgatccttctgcctgaccagtaccaggccaaggtctacaaggaagaagttgagccgaacctgaagccgggcgctgccctggccttcgcccacggcttcaacatccactacggctacatcaagccgtccgaggatcacccggtgttcatggttgccccgaagggcccgggccacatcgttcgtcgtgagtacgccgctggccgtggcgtcccggtcgtcgttgccgtcgagcaggacccggacggcaagacctggccgctgtgcctggcttacgccaaggctctgggcgctctgcgtgcaggtgccatcaagaccaccttcaccgaggagaccgagaccgatctgttcggtgagcaggacgtcctcatgggtggcatcaaccacctgtgcgacctcggtttcgacgtgctgaccgaggctggctaccagccggagatcgcctacttcgaggtcttccacgagctgaagatgctggtcgacctggctaacgagggtggcctgaacaaggctcgctggtcctgctccgacaccgctcagtacggcgactacacctccaccgtcatcaccgaggagaccaagaagcgcatgcagtaccagctcaagcgcattcaggacggctccttcgccaaggagttcatggacgaccaggccgctggcgccccgaagttcaagaagctgcaggaagagttctctcacccgcacctcgagaccgtcggcccgaagctgcgcgccatgttctcctggaacaacgccgaggccaaggacaaggacgaggccgagtccttcaacggcaagatcgctcgtacccaggttcagtgattgccgcccctgaaggggatttaagctagcaaaccgccgttcccgcccatacgggagcggcggttttgtgttgttgcgcgcagcgaatcattctcaataacaactgtgcgctgatttcttgcaggcaaacgaacaccgaatatgcaagatcgttgatatctcagcctttccccatatgtgggattgtgcgattctgttcaaaagggtgcagagttgttatcgagaatcgttctctgcacacggctgtccatactccaatagtgacctagctcacgttgtggactccagcggggctgcgacggcgttctcggtaggattgatttcggtttgaaggacacaatcctcgcaacacaggacttatctgcacaccgtagataccccggcgcccagcggcgccacaccccactactgaaaaggagtgccaataatggcagcacagatctggtatgagaacgacggtgatctttctgttctcgaaggcaagaaggtcgcaatcatcggctacggctctcagggccacgcccacgcgctgaaccttcgcgattccggtgtcgacgtggtcgtcggcctgcgtccgacctccaagtcggtcgacttcgccaaggagcagggcctcgaggtcaagtccgtggccgaggcttccgccgaggccgacgtgatcatgatcctggcccccgaccagtaccagcgcaccatctgggccaacgacatcgagcccaacatcaagccgggtgctgctgttgcgttcgctcatggcttcaacattcactacggctacatcaagccgtctgaggatcacccggtgttcatggttgccccgaagggcccgggtcacatcgttcgtcgtgagtacgccgctggccgtggcgtgccggtcgtcgtggccgtcgagcaggatccgcgtggcgatggttgggctctgaccctggcctacgccaaggccctcggtgccctgcgcgccggcgccatcaagaccaccttcaaggaagagaccgagaccgatctcttcggtgagcagaacgtgctcatgggtggcgtgaacaagctcgtcgagatgggcttcgaagtcctgaccgacgccggctaccagccggagatcgcctacttcgaggtctgccacgagctcaagatgctcgtcgatctgatgaacgagggcggcctgaacaaggctcgttggtcctgctccgacaccgcccagtacggcgactacgtcaacaccgtcatcaacgaggactgccgcaagcgcatggaataccacctgaagcgcatccaggacggctccttcgccaaggagttcattgacgatcaggatgccggcgccccgcacttcaaggaactgcaggagaagtactccaacgagcgcatcgagaccgtcggcccgaagctgcgcgccatgttctcctggaacaaggatggcgtcaaggatgccgacgaggccaactccttcaccggcaagatcgcccgcgcccaggttcagtgagcccctgtagctcccgctggcgcataagcgcctgaggagagtacccagcacgtaccaaaaggccgccgctccgattcattcggaacggcggcctttcgcatggtcccaccatatagtcaaacctccaccacgtagtaaaatccccacgacgtagcaaactacccaccacgtggtgacgcaaaacggctttattccgcggaatacaaaattacgctgacatcgtggtagaagattcatcgcgtggtgggcagttcatcgcgtggtgggatagacagttgatatacgccggctatcaaatcaatgatgccttgctgtgttccccgtatgccgagctgctttatcggaagcgtttcatgggatattttcccaagaaaatcagcgagatcatggtaggcctcgtcgttgagagacacgcgatcctctggagcaagtagttgagccaaacggaatacatcatatttatgcttcttgagatcttttccgtctacgtgctcgccatgttgttctcgggcgttgagatccaaccatgctttcgccttgaaaggaatgagatatttctcgttaagcacgctgatgccttgtattgattcgcggccttgctgcagtagccgatagtagctgtcgttcagcatgatggctgacaggctggaaacatcgtttgcaatatgcaatggcgtcagggacgagttcggcacaatagggaagtcagggtgacgtgaaaatagctcgatcatagtgggatacccgtacgtactggggtgcatgaaacggtacaggtgaggctgtgcggagttcttcgtgatagaggtgtatccgccatcgcgaatgaaagaccacaatcgttgtgcaaactcgcgaagatgtccctcggcaatcagcaccatgtcaatatctttggtgatctttggtggctcggaagtccaggtcgttgtcggtcatgatgatgtcacaagcggtgccgccgatgattacgtaagaatcttcgtagccggcaaaggccgttctgatgagctgcaggccttgtgtcatattgtcactcctgagaaagtattgcggatggatccttgtatggcgtcttccaaacgttcgtcggcaatctcgccaagagtcagggccgtggaaatggggtcggcaaggtagtcttcctgcgtatattgagcaagtaggcggggatcgtacctccacagctccagaatatatgcattatctggcaccttttccaaagcggggtcgataatgcatagttccttgttgtgctgcttgagccaatgacgttcaacggcatagattcgcagttttggggtggccagttgcgtcctgcgcgaaagagcaaattcgccggccggaatcagctcgtcggcaatcatctggcgattgcgattcgtgacggtatatttgctgaatattggtgacttcaggagatgccaagatgatttcagtaaatcaagtcggctggtctgccttgaagtcagtagttcgacgctattgctgcggccttgcttggtgcggtgcacgaatgccagctgttctaacagcgtcacggcaacgctgacctgagcttcggtaaactgaagcgctcgggcaatatctgattggactttgctctcgttggagtagagcaaatacagccagaccagctgtgttgcgggggagaagggccgcacctcgatatcctgtgcgttctccagcggccgtgaggagatgcgctgggtgaacaccatgcccagtgaagggatatacagttgggtaccgggcacgatgaaaggaacgtgattctgaatcaaggcttttcgctggtatgcagaaagccggggaaactgaaagacaatgggcagatccgtccgctgctcaagcctgctggcgtcggcggtgacgcgtgtgatgctgaatgggtgagcctctccgctcgcgattagcatgctcgtgttgtcgatggtgagtttgctgaatgtccgtccgttggtcagaaatagcggcagtgaggcagtgccatcccaagaagtgatttggcagggcagaccaagtgtctcgcgaatgtaatgctcggcatccatgtcgacctcaatccttaacgaaaatctgtaagattcacatctcttgttaagtatatagaatattattaagtatttcggggttggcatgtcgcgaatggaaagaaagggcagtcatccccgaaatggagacagcttagccgggaaaaaggacgacgccagcatccggagaagatggatgactggcgtcgggtaagctcgcaaaagctctactgaataacccacgcagaagtgtcggtggggagctggccttcgggggtcagcgggccggacgccagcaccacggagccatcgggcagcgcgaccggggcattgccgaagttggtgattgaggtgaacacccgcccgccaaccgccgcgcgggtgtacgccaccacatcgtcgcccatgtccacctgctcggccgtggtgtcgcgcgtggcggtcagcgactcctggcgaatcgccagtgcggcgcgatacagcgcgagcatcgagtccgggtcggcttgctccacgtccaccgcgtaatccttgaaccacagcggttgcggcaggtgcgggtcggcggccggcgtcacgccctcagcgcgcgtagccggcgagaagccgaaggaagcgcccgtgccgaactggccggcggcgcacagcggcacatggttctcgccggtaccgtcatcggccggagtcggacggctgaaatcggccaaggccggctcatcggcggcggtccacggcagcggcacgcggcagccgtcgcggcccttgtccatcgtggcctgagcagtgtggaaagcggtcggatcctccaagtgatcccacggaatatcggccacttcaaacaggcccagctcctcgccctgatagatataggcggcaccgggcaggccgagctccatcaaagcggcggcgcgggcgcggcgggtgccaagctcgcgatcctcgggataggtagtgccgttgcgcagcagccagtcgtgcggcagctggtggtagggcgcgcccttgatctgcggcaggccgtaacgggaggggctgcgcggcacgtcgtgattgttcatgacccacgtggtggtggaaccgccggtttcggccgccgccttgagtccggcggcgatggcctcgcggaactcgtcggcataccagttggcttgcgcgaagtcgaagttgaaggactggcccagctcgtccatcgaagcgtacaggtgctggtgctcgggcaccacccacgcctcggccacggcaaagcgcggcgggttgtactcgttgaacaccttgcgccattcgcggtagatatcgtgcacctcgcgacggtcgaacagcgggtggctgaagtcatgattcagcacgccgaccacgctgtattcgcggccgagctcttccaacggcttggattcgaggtccttggccaggccgtgcgccacgtcgatgcggaagccgtcggtgccgtggtcggaccagaaacgcagggtcttcttgaactcctcgtggatgtccggattcttccagttgacgtccggctgcgccttatcgaacaggtgcagataccactggccgtcggccacgcgcgcccaggccgggccgccgaagaaggattgccagtcgttcgggggcagttcgccatgctcgccgcggccgtcgcggaagatgtagcggtcgcgcgccggggagccaggctcggcggcgagggcctcctggaagaacacgtgcttgtcagcggtgtggttgggcacgatgtccacgattaccttgatgccggcctcatgcgcggctttggccatcgcgtcgaagtcttccatggtgcctaggcgcgggtcgacgttgcggtagtcgatcacgtcgtagccgccgtccgccaggtcggaggggtagaacggggagagccagatggcgtccacgccgaggttcttcaggtagtccattttctcggtaacgccggcgatgtcgccgatgccgtcgccgttaacgtccttgaagctgcgcgggtaaatctggtaaacgacggcctgcttccaccagtcgtcattgaggttatttgcggtcatgccgattccctcctgttccgggtgcgttgtggttgggttgttccggtcgcgcccgaactgctgtgtgaaggcccaaccgttgtattgatgatgacaacgatatcatgtgaattacgcatgcaaaaatcgatttatcggcgttttgcggtggtaacgtgctcacgcctgcgcgggcgctgctgtcgcggcaggcggcgcggtggtttcgcgcagtattagcggagtgtccggccgtacgaatgccggttcgattgacttgccggcaatggcatccaataccatgtgcccggcagtcgcgcccattgcgaacgggtcctgatgcagcgtggtcagtcccacggcggcggacagggtggaatcgtcgaagccgatgatggaaatgtcctgaggtacccgccgcccgtattgacgcaggcgatacagcacgggcgcggccatttcatcatcctcaaaacagaaggcggtgatgctgggggaggcgttcagtacggcgttcaatgccgcgttgctttcgccaagaccgcgttgaatgctcaggggcgttagctcgatccccggatgggcggcagcggcatcaatgacgccctgcaaacgagcctcggtactgtagcgcatattggtttcggtcggtgcgctgccgacgaacgcgatatgccggtggccgagtgcaatcaggtgctcgatagccgaacgtgtggcggcgtaatcatcaatgctcacgcctgcgtcgaacccatcggtggaggggatgttgatgccgacaatcggcacgtgcatatgcttcagtcgctccacctcagccggttcgatgtcgaaggagctgacaatcaccgcatccgcattgcgccgcacgggcaaatccgcaaagaagtcgtggcgctcggcggcgttgcgcatggggtagggcacagtgtcgtagccggaggggcgcagcgccgagtcaagaccggcgaagatgttcgaattgaaccaactggcgatggtctcgctggcaagtagtgcgatacggaacgattggccggattttagggcggcggccgagcgtgagactgagtagtcgagcttttcggccgcggccatcactcggtctcgagtctcgggaagcaccagatccggcttggcgaaggtccgggacaccgtggatacggaaacgccggcctcgcgggccactgcctgaatgcttgccttggtcatatgccgtcgctccttcgccgtcgcgaacaatcattgtcatgacaacgataacatgcccataacaagtcgtcgtcttcggctatctcgattacgaggggctgatttagggtgtcccggacatctacttccgtttcaaggggctccttgccggtgaagccacaagtgcaaacgactttgtgccaacgtcattccgccgttctcgcgttgggtctacttgggcaccagccccttgaaacggaagtagatgtccgggaaaggccaaatcagcccctcgaagccaatttagaccaatttcccattgcggaatcgatcaccgcttctctcggcgcatcacggcggctagggactgcacgcgtggcaggtcgaagacctcgtcggtatgcaccacgtggcctgagctgtccgccagcggcacgcgccagttcgaatactcgctggaagtgcccggctgattctgggaacggcattcgcccacgccgtccaccagcgctgcctgcagcagcagcgacggcgtatcggtgagcatggcgtgcatcgcttccacgatctcctgcacatggccttccacatcatccgccacggtctgcgagatatagccgttctccaccagacggttcatcatggccgtgcgttcggccatcgccgaggcggcgaacgcctccaccggctcgctcaggagatgcagctcctcgcgcagcttgacgtgttcgaagttcaggtagccggcggtgggtggcagatcgtgcgtggtcaccgaggccaatgcctgcttgcggtagtcctcgggtgcgcggtacgggtcgccggcgttcggcgaatcgtccacgcggttgaaccattccacgtcagtgccgagcacgccgtgatcggacagaatgcggcgcacgtaatccggcacggtgcccagatcctcgccaaccaccatgcctccggcgcgcgtggcttcgatggccagtactcccagcatcgcttcgtggttgtacgttacgtatgcgccgttgagggcgccgagcccctgcggaatccaccacaggcggaacaggcccagcacatggtcgatgcgcaccgcgcccgcgtgctcgtacatcgaatgcaccatctcgcggtacacctggtagccggtggcctccagatagcgtgggttgaacggcggctggccccaatcctggccctgctggttatagaagtccggcgggcagccgaccgtgacgccgccggaggcgaagcgttccggattggcccaagcatccgcgccgagcccgtgcacgcccacggccatgtcttgcatcagacccagtgtcatgccgtggtccagcgcctcctgctgcgcggcgttcacctgctcggcagcaatccactgcagccagcggttgaactcgaacaggtcgtggtgctcctcgacgagctggcgcacggccgggtcgtcgaaggtcttctcgaagaaccaacggttctcgccccacggcgcgccccatacctcgaagcacaggcaccaggtggcgaaggaatcgaggtctgggccggcggtggtcttgaaatgctcgaattcgagctcgcgcttgttgttgcggcccgcgtcgaagatcaggcgcagcgccgggcgtttggccgcccacgccgcgttgatgtccatcgggttcgattcgtcgttgcgtgcggccactgaatcatgcagcgcatccacctgcgctcggatatcggccggcagcgtgccgtattcggggatgtcctgcgggcggatgtacgtcacgttgaggaatcggcgcgattccggtagatacggcgatggctcaagcggcggaatcggcgcgccggcgtgaatcgggttgatgagcatgaagtcggccttggacttgtcggccgcgtccgccagcagcagcttcagatcgccgtaatcgccgatgccccacgattcgcgggaccgcacggaatacatctgcgtcatccagccccaccgctggtgctcggcgaccgcctccggcacgggaatgcgcgcgggggcggcgatgatggccgccttgccctcgcgcccgtccaccgtgacggtcagtgtgtggtagcccatcggcaaatcgggggcgatggtcaagtccggcttgccggaattgaggtgcggcagcagggcaaagtggccaaacgcggtgccgtcctccagttcgatggagacggtgatgtccgcgtccgacgggcaattcagggtcaggcttgtcggcttgccggtggtggccacgatggtgggtggtagcaaacgtttgctgttttcggcctcaagttcggtcatggaacgttttatggcctcgtcgctggatgcgtccacatcgagggccttgagcacggcgaccaaggcctcgtcgctgatttcggtgtaggtgccgagctggtcgatgaacgaggtggaaagcccgcatgctttggccagcttgaccagcggacgggcgagtcgttccgcgctttccgcgcgctgcggggcaccggaagcggcgtcgttggtggtgtctgcgatggtgccggtgctggtcgctgcgtcgttgccgtgcgcgtcggtcatgatgactccttgcttgcaaatcgggtactgctagtcgtttgcattgctgttcgagggccgctctgcgttgaggttccggcaatctggcagaccaatgtccgagctgttctatctttaccgtaactcatattgacaacgattgcaatacattcggtgagttgggcaattagcgggctatccgagcacggcgaacgactgcggggagagcgtcagctgcccgtcgcccacgaccggttcgccgatactaagcagcctagcggcgtcaagtgcaacgtgctctctgatgaagacattgccttcggcgtcggcacgtccagtagttctcccgtaggctgggcttgccgatttgtttattgttcatctgaagttcctttgcgcgttcgctggattactgctgtcaaatgttttgcggccatatcgtaaaggcgatcggaatcctgcactcgcgtgaaggattcggcctcgaaggcctcatcgattgttcctgaagcgaaaggaagaatagtgaagaatcagttgaaggcagtcggtgcggcagttgctgcgcttgccatggtggaggcgctccccggtatggcccttgcgcaggacggcaagggtgttgacgcattgtcccagcacggtggcgcccagcgcattgcgggtgtgtacggtaacgccacggcgaaaaacgttattctcttcatcggcgacggcatgggtgattctgaaatcacggttgcccgtaattacctgcatggtgccaatggttcgttcgatggccttgacaagattggccagccgaatctgaacactgcggaagccggcaccggccagtacaccactttctcgttgggctccagctccagcgatggcaagtatccgaaggcaggcggaattaacgagaacgctggcgtcgtcactcccgtgaccgactcctcggcttctggctccgcttgggctaccggcaccaagacctacaacaacgcggtcgacatcgacatcaacggcaatcctcagctgaaccttatcgagctcgccaaagccaagggtcttgccaccggtaacgtgactacttctgaaattcaggatgccacgccagcggtgctcgagtcgcattctaccgagcgctcgtgctacggaccgcagggcaagaccgacggctcgtccaataacgcggataagcagtgccgcgccgaacagctcaaggagaacggcggcatcggctccatctccgagcagctgctcgacacccgcgctgatgtgaccatcggcggtggctccaagtacttccggcagaccgcacagggtggcgattatgcgggcaagaccctgtgggagcaggccaaggaacgcggcttccagaccgtcgagaacgatgtggacgctttctccgcgttgcggtaccaggagaaccagccggtgctggctctgctgggtgatggcaacctgccgacgcagtacaacccgtccgttgcgaccaagcgggatcccgccaaggatgagaacccggtggagtgcactaccaatgcaaagtggttgggcaacaagaccgctgccggcaattcggcttctttggccgacatgacttcgaaggcactggatctgcttcaggccaacccgaagagccagaacggtttcttcttgcaggttgagggtgcgtccatcgacaagcaggaccacaacggtaacgcttgcggtcagattggcgagaccgatgacctcgacaaggctatctccgctgcactcgagaagattaacctgaatgacacgctggtcatcgtgaccgctgaccatgctcacaccagccagattgtggaatcccagccggcttacgcgctgagcaccgtgctcaagaccaaggacggcagcaatatggtggtctcctacggcacgtctgcgagcaacctgtactccgatggcaatgacaccgaaggcacggcggattcgagcaaggctcagggcaacatgagccacacgggcacccagctgcgcattgcggcttccggccccggcgcatcccgcgttgatggtttgaccgatcagaccgataacttcttcaccattgcccacgcgctgggcctcgcatctgaaaccgccgatcagcaggcgctgtcttcggacgctaaggttgcggtgaagaatgagaacggcaagtttgtcgccgacctcaccggttttaatggtgacgcggtggtctcctacgagctgaaggaccagtccggcaaggtgcttgatgcgtctaattcctccacgcctgtttccggcgtgagggttgccaccggtgaaaccaccgctattgcgctggataaggtagctgagggtggcagctacacgctgaccgttaccggtcgccagtctggcaagactgtgcctctcgatttccagggaccggctcagggctctggcgacaagacccctgatggtgttgtcgctgagggccaggtccagcaggataagaagaacgagggcatcggcaaaaccggtaccgctgtgcttggtgtagtgatgatggcgattgctctgattgccgctggtctgaccatcaagttcgctcgcgaacgtcgctgagtctcgagagcagtcagcgggcggctgtgaatagtctgctcgtctgctgccgtgagttggccgcattccgcacatcgatgcggagtgcggccattttgctgtgtcgattgcagttttctgtaatgattggctgcacctgttgcatagacgataccttcagtatgggtgccgaaagtatcgtcacccatacacgatgaaaggggtctcctatgcatacagtgggacggcaaatacgaagtttcatagttgtcatcgccataattgcgtctatgctggtgaatccaatgacagccaacgccgatgaaacagataccgctggctacgtcttgattggtaacacccgtgtatctcgttcgttgggtgtccagaccgaagaacagttgacggagcggctgcgccaaggctatgtgagcgtgacctttaatcaatatgcccaaccaattgaggttgagccactaaacaatgaacagactattcagccgcgtaatagtacgagagttccttgtcggtcgaacgatgtgtgcttgacgttcgtgaacggctccaatcgtggattctacggttctggtgtgcgtgcaggagcatggagcggtgtgaagaaaagcgacaacgggaaatggttcacccgattccgcgtaagtctcggtggctccacatactctaccggtgtactggggccgtatacgataggtaactggaacactgcagcttctattacgcaggtgacgatttactagcaaatattgctgtcctatgatgagcttgacgattctatcgtcaggctcgtttgttattggaggctcggtgaagaagacgtttggcgtatgcgagacagtagtgctggttgcatttctgttgcttgggatgctgccacagtggaccgcagattattggagcactgatgccgttgcgggctatgtcttggttggtaacacccgtgtatctcgttcgttgggtgtccagaccgaggaacagttgacggagcggctgcgccaaggctatgtgagcgtcacgtttgacgatggactgacagaggtgtcgccgttgtcgtatggggagcagttgcaggccggcaacacggtgtgcccgccgtatttccgctggtggtgcggtatcggttagccggcgttattgattagccaatggtattgaccggcactgaagcgtgcagtacccactgtccgcgttcttcccgcacgttccaatctccgtgcatgttctgcacgcgttcccgataatatgcgagtccggaatgcctcccttcgagggatactccgtcttggcgtggatgatccgttatgtcaatggtgacgcggtcctgagaaacggcaatcagcattacgtagcgctgcgttgagtcggcatacttggcgatattgccgaacaattcccgaagaaaatcggcaataaacactgtatctgagttgttcagcgtatcgatagctccggtgatgatgacgtcaccggcgtaacccatacgctgcaatcgagcgcgatgcttcgcgatgtcgtcagataggtgtcgccgagatgccacagtcacgtcaagagccgactttggaacttgcggcggttcttcctcaagcgtggcgatggcctgtcgggtgtgctgcagcgcatcatcggcaatcgtgcgtagggcctttagctcagcggccgatactgagccaggcgctaagcggtaccggtcaatcagcagcatcatgtcggtgatgtcgttggtggtgtggtcgtgcaagtctcgcgcaatgcgaacattgcgctgccgtgcgcgccgttcatgctcgttaaggctgttgtgcgccgctgaacgtatgcagatgccgatgcaaatcgcggcaatatccaggccagaaaaggtcagcgaaccgccttgtcccatcacaccatacggtgcaataacaccgtagccaatagcgcacaatgcaaataatgtgccgcagaccatgccggctattgcacggaagtagctgattgaagcgatggctacaagcgccagaatatacgacgtaaacggcgtggaaatcggcgcaaacatttcggcggccagtagcgcgagcagcccataagcgccttgctcggggcgcgcggtgaaccagagcgccaacgctgtgcgcaatgcaaacaaggccaatcccagtgcggtgactcctgcgatatgcaatatatacagcccctccgcaaggttgagcagtgcgaacgccgccgccacgcacgacagatacgggtggggaacacggctacagaacattgcgctctcctgcatctggcgacaacagatgattgcgccggcaatactccaacgcctccagccatgtgccgacgtgcagtttgcgcttgatattgcgcctgtgcgacgacactgtattggccgtgatgcccatacgcgcgccgatttgcttggtgctgaggaactccatgctcagggcgatgatattgcgttcgatgtcgcttagtgcaggcgtatctggatcgggtactgccgatgataggtctgatgacgaggccgatggcgagtcagatggcaaagacgctgtggagctcgattgacgcggcgactcggcgtggtgggccgcctctcgtaaggccggtgcaagcgtttcggtgagattcgccttgtccagcagcgtgacgattccggcatctgcagcggcctgccggtacgtctcaagacggtatgacgtgagcccgatcagcgcaatgccgggcgctcgccggtggatttcggtagcaatctgtggcccggtaacgccgtcaagtgccatgtcgatgagcagtacgtcggtatggtggctgacggactgacattccataatcgccaccgccggagaagtagtgctccatacatcaacgatgcggccatggataggggtcgaagacaccagccgagcgatgcaatccagcgcgcaggcgtcgttatccagaatgcctatgcggaaagccgctggtggttcatgtactgattgagtcgcgtccgacatgactccatacagtagccgttccgccctgtcccagtcaccccttgcagttttctgcataggcgggtttggcctcaaacgcaccaatccatcaccctcaatcgcctctccaaaaaacttgagccagacacgctcaactttttgtggggaatttgggaatagaacttgccaaatggaagttgagtgatgtaggctcaaattttggaaggttcaagagacggccaaacggaacttgggcgaagaacgtaagaacaaacgaaaaattaaggagcacacattatggcacgcgcagttggcatcgatcttggtacgaccaattcctgcatcgcgactctcgaaggtggcgagcccaccgtcatcgtcaacgccgaaggcgcccgcaccacgccgtccgtggtggccttctccaagtccggcgagatcctcgtcggcgaagtggccaagcgtcaggccgtgaccaacgttgaccgcaccatctcctccgtcaagcgccacatgggcaccgattggaccgtcgacatcgacggcaagaagtggaccccg

SEQ ID NO: 1274 - DNA, 52488 bp, Unknown
  R157_18m  MAG No. k141_2451
actcgtgccgcaccgttttcggtatcgaccgattcgattgatccggtcatggcattcgccatgagcagggattcgcgttcgatctcccacgcatcccaaacggcgggttcgtccttcaacagctcgtatcggcccagtcgggtgccggccggaaccagttcacggccatgctcctcgtcaagcagcgacgagatcgtaccgtcggcctcgatagtgacggacagtacgccgttggccagcagtacacggccgttgtccaatgtctgggtcagtacggaaagcgcgtcggtcggttcgttgatgcggttggcatgccaagacgcgccgtcattgcggaactggctgatgcgggcctcggcgagcaagtcggcctgcgggttggccttgcgcagcacggcgcacatgtcttgggcgatttcagcgagacgcttcaggtcgcggcgatagtcctcgcgggcttcgcggtgcacccatgcgatggccgagccgggcaggatgtcgtggaactggttcagcagcagcgtcttccatatgcggtccagctcctcgcgcgggtagacgtactccggatcggacaacacggcggctgcgcccaggtattcgaccgtgcgcagccgcgattcctcttggcggcagccgcgtttcatgtcctgttgcgaggtcaaagtgccgcgatgcagttcgaggtacagctcgcccttccagacgggcatttctgggccggcgttctctgcaagctgctgatgcgccttgtcgaagaagtcattcggctcttcgatgctcaccttggagacgccttcgaggttctcgtagcggtgcaggtgctccatcatgttgcgcgtggggccgccaccgccatcaccgaaaccgaagagcagaagcgagcggtcggagagatccttgtcctggaagttcttctcggcgtagtcgagttcctgaaccttgcaccaagcggcataagtatccgccggcgggaagtgggtgaagatgcgcgagccgtcgatgccttcccacatgaacgagtggtgcgggaacttggtggtgtcgttccacgagatcttctgcgtgaggaaccattcgtacccggcacggcgggcgatctgtggccatgcgccggtgtagccgaagctgtccggcagccatacgcccttgggctccacaccgagatgttccttgaagtatttgcggccatatgcaatctggcggatcagtgactcaccggcgggcaacatgccatcggcttccacccacatgccgccgaccgggatgaaccggccttcttcaatgcgccgcttcatgcgcttgaagatgtccggatgatcctcttccagccagacgtactgctgggcggagctcatcgcgtatttgaagtcggggtcggcgtccatcagcgccaatgcgttggatacggtgcgggccaccttgcggcgggtctcgcgcaccggccacagccatgcggagtcgatatgcgcgtggccgatggcgctgacgttcatggccgaggcattggccggcttagccagtacgccggcgagtgctgcgcgcgcggcttccacggattcggggttgcgctcgtcgtaggcgttgagcgaacgctgcaatgctttggcgagttgccagtagcgcggcgactgtttgtcggcgaattccatcagggagctcaccacgtcgagatcgacggagtagttctcgtagcgttcatcgaattcggccagatcggcggacttgaatacgtacggctcgtccggcttgccggtggcatggtcgcccagttcggtctcaacgaacggaggcacgccgagcagcagcgggttgctggcggcttcgaggtacagggtgaagctgccgtcttcggcgaccggcacttgcgcgttgccctcagcatccatgaacggcacccaatagttgagcgggtgtacggctttgatggcggtgccgtcggcacggtagacgaggccctcgatatggccgccgcaggagtgcgggtaccagccgaggtcgaggatgagctccagcggcttgcctttcgggtagccggccggcacggtaccggtcaggcggaaccagactgtgccccatgtggtgccccattcaccgccgagcgtaaacggcttgaagtcgatgtcacctcgattgagcttctcgaagaactcgtcagtgggcatcggctctccgggaatgtcaaaggactccaccgcaagctgtgcgatcgatgggtggatatgagggtccacgcgctggcgcactatgcgcttgcaccgctccagttgctgttcaggtttcaggaacatctgctgttcactccccttatctctgccgcttgtgcggccacatcattgtgctgcccgttcatgggaaacatatcgacatgcgccctcgcccgcagaagactaaagcgctttagtaacatattggagggaacgggatatgatgtcaaattactatcgcaattcagcgtgttccgtcaggcatgtcatgctcggtgtcgatgacgatggtcaccggcccgtcattgaccagtccgacccgcatatgcgcaccgaaacgaccttccttcaccggcactcccccggagcgcaacgcctcgtcgaacttgatccacatgaaatcggcatgctcgggcttgccggccttgatgaagctcgggcgattgcccttgtgcacgtcggcgaacagcgtgaactgcgagatggagagaatctcgccgccgatatcctggatcgaacggttcatcttgccctgcgcatcctcgaacaccctgagattcagaatcttatgggccagccaggcgatctgcttgtcgccgtcctcatcggtgacgcccaccagaatcatgaatcccgggccaatctgctgcggctcgaacgtgggatccagcgtgcccaattcattgaccacgtccacggacgcttcggacactcgttgcaatacgactttcatggttccctacagtacaacgtgtgcagtcatcaccaccgaaccatgccaatactgcggcagccagcaggtcgaggcaccatggacgctctgccaaggttgaccgcaggccgcgcacccgcaggataatcggcgtctgccccgaatgcggacgcgaagtgatggccgcgaagggcgaggagctgcgcctgtgcaaatgcggcgaccccgtcaacgtggccgagctgcgcgagcaaagccaagccgaggccgaggcaatacacctgaccaagacaccggcaggcatgagccaatggctcaagggaaactacgggtacgaggtcagccgtaagcggatcagcaactggctcaaccggggcaaactccccagctcgagacccgtcgatgacggctaccgggagttcaacatacgggagattcttgcgttggctatgggctccagcggccgttcggcttgacatgatgtagtctgtaggatacaatagaggtgtggaaatcaagcaatccgccgaataccgcaagtggttcaagaaactcagggaccacaaagcgaaggcctccatccaagcccggctcgatgtctgcaagctcgcaggcaggccattcggcgacatcaaacccgtgggaggcccggtcagcgagatgcggttccacaccggggccggataccgcgtctacttcgccatgcagggcaacgtgctcatgctgctgctcgcaggcggcgacaaaagcacccagcagaccgacatcagacaagcccacgacatcctcaacgactacaaggaacaacgacaatgagcaccgaattcaccgactacgacaccagcgaatacctcgaaaacgaacaggacatcatcgcctacctcaacgccatagccgaatacgacgaccccgcactcatgcaggccgcgctcggcaacgtcgccaaggcccggggcatgacccagatcgccaaggacgcgggcgtggggcgcgaaagcctctacaagagcctcagcaaggacggcaaccccagcttccagaccatcgccaaggtaatccacgccctcggcggacgcctcaccatccaagccgcctgaaaaaacaaaacacaagcgggagtagggtgaatccaccccgtggcatactccgtatcaggattagtgtgaaagcctctgaatcaaccggttcaggggctttactcatatccacccaatggtcatgtgccatggcaatcaaccggcatgaccgcctatgcgcgtagctcagctggtagagcggcggtctccaaaaccgcaggtcgtcggatcgaagccaaccgcgcaatccccagccgcgtctacgacatcctcaaatggttgggcctcatcgtcctgcccgcactcgtcctgttcgtcagcacggtcggccccgcatggggctggactcacgtggacgcgatagtgaccacgctcaacgcgctcggcatcctcgccggcgcgctcatcggcgtcagcgccatcaaacagcgcctcgacctcgccgcatgaccaccacgcacagttcggccccgtccggcatcgcagacgactcaacccgagtcggcctacttgccggtcggggccgttctcgcgttgtgacagagggcttcgcgggctcgatttttgcccacattttgcccacattatcccgtgaaaccgagagaatacgagggaatcgacgggaataagaaaagccgctcagccttactttcgtaaagccaagcggcttgtttccgccgaggcggattggtggaggcgcggggaattgaaccccggtccgatgaccgagcccacagtcttctacgtgcgtagtctgctggccaagttggcgatttttctgcccccatcgatgtcgcagacaactgatggcgagcatatccgcagttaaagtcccgatgcagccctgaggctcaactgcatcagcaagtcttctaaacgacgctcagcatcctcccaaagacgaggaggagtgaacggagcggctgctcactggttaatcctgactaaaaatcaggcagcgagagcgaactcagtgcggttagatttagcacttattcttttgccggggtcatccacgagcggacccggcgttatcggcacgcttccctgcagcgaacaggtcaccgtcgaaaccgatcgcccccaatcttgagttatcaagcttccggcttttcggccggacttttcagcatacaccctatggcgctactcgcgcaaatcgccggcagcgaacatcgccccggcattgacgggaccaacgttgtcagcagaaccaacggagcgaacgccgccccggaaccaacggaaccaactgaatcgccgtcacttgatgatgggcttctgggatgcggaaacatcaatctgatgtttgccggcaaagccagccgtgccagcggtgatgttcttgtcgatttcctcgacttccgccagcttcagcttcagttgcgaggagtctccccaaatgattacgcggtcaccgtcgttaagcgtggtggtcaccgaatcctgcgtctcagcggtgaccttggtaatggacttacgcatcgattccggcaatgcgcccagaatcgccagcgcctccttcaccgaacggttcttgagactggcgtctatatccttgacctcgatcaccgggatgccatccacgttggcgttcttcaccgagttcaacacgcgcgcctgggaatccaccgcggtcagggtatcgcctcttttcagcatggccgcaggccgttgcgccttgacttccacgctcatcgacttggggaactgtttggagaccttggcctcgctgacgccgggaatggacttgagttgctctgtgacctcatgggtggagaccaggaacaacgactttccagcctgcttatcggcgatggcatggatggtctgcgcgctcacccattcgttggcaccggatacgccgatctcgctggtttccagacggaacaccgacgagaagagcagcagccacgttagccccgtcactacagccacgctgacgacagcaatcaacacgcgtaacgcaacgacacgtacgttcgcacgcttgcgttctttggcgcgttcggtgaaattcaccactttcgggcgtgatacgactcctagggagccggtggtctggtgcagcgtttcggcaacgtaatcctcgctgtgcagccgtcgtgcatcgacgaaggcaccggcctggcccttggctaccgtcacatcgtcgatgatctccggctcgttgatctcatgcccggaagacacggaccggggagcgcgagacttcgacgagtgacccgtgtttccgcgtgaaccgatggtgcgcggcttgcggggacttccggacgaacgacgtgagccgttgtcattgcccccggatctgaccgtgcgcccggacatcactcgcagctttcccgatgggcctcaagtgcggtgagcagcacctgatccatgtcagtgatgtcgcccgcgcccacggtgaagatcacgtcgccgtggtgggcacgcatggccatcatcttggcggccaggcacatatcctcgaccggctgaatccacgtgcctgcggaagcgtccttgagtccctcagccgcgtccacgatggtggaggggctgatgtccgggaaatcggtctgcttttcacgggccgggaagatgccggtgataatgacgtcatcggctttggccaaggattcggcgaactggtgcgcgaagaacttggtgcgggagaacaggtgtggctggaagatcacacgaatggtcgaatcggggtaccggcgtcgggccgcatccagcagggccgcgatttcggtgggatggtgggcgtaatcgtccactacagtgacctgcttgaccgtgccgcgcacctggaagcggcgtgccgcaccgaggaatgtgccggccgccttggccgcgtctgcggggctcacgcccagcagcacggcagcgctgatggcggcggccgcattgcgcgcattgtgcacgccaggaaccttcagggcaacgctctgagacaccggctcccccgccgtcaccgcggccggcagatgcagggtgagctgttcgacgccgctgcctgcggtctcgctttccgaagcgatccagacatacgcggcaccgcccaaatcgggcagggattcacgcgcggtagtgccgtaggcaacggtatgggatttcacgtcggcgggcatggcctccagcacggcaagtccgtcggggtcgtcgatactgatgatcacgtgaccggtggcccggccggcgtgggcaacgaacgcggcacggtagtgggcttcgtcgccgtaatggtcgagatgatcggcttcacagttggtgataatggcgatggtcggatggtatttggcgaagctgccgtccgattcgtcggcttcggccaccagaatatcgcctttgcccgcgtgtccaccgtccagcgtggtgccgtccgggccttggataaagccgccgatggcgtagcttggatcagcaccggcgttcaccagaatgtgggacagcatggagctggtggtggttttgccatgcgctccggccacggtgacggctcgtttgccgttcatgagcagagcgaggatgtcactgcgatgcacaatgcgcttgcctgccgcgtgcgctgcgacgatttccggattgtccggtttgatggcgctggagtagaccacggtctcggcctgggcgacattttcggctcgctgcccgaattcaacggtgatgcccagcgtttcaagtcggtcggttttggcgctgtgcgcgcgatcggagccgtccaccgcgactccttcggcgtgcagcatttcggccagaacgctcataccggcgccgccgataccgatgaaatgggtggcgccgagatccgcggggcgggccgcagcatcgaacgaggcatacgtggggtcaagcacgatgggctgatcttgagacaattcaaaactcctttggggattccagcaccctatattatgaccgtatctcgtgttgcgggacgggattggtctgtatcgcgcacgggatgatatctgaatactatttggatggttcggctaattgcagaacgtgccgggccatgatttcggcagcgtttctgatgccgtattcccatgccttgcggccgaattcggcaagtcgttcgtgatcggcgagcagatcgggcacatgctcatgcacccactgcggggtcaggtccttgtctgcgaccagaaggccgccgccggcgttcaccactggctcggcattgaaacgctgctcgccgttgccgattggcagcggcacgtaaatggccggcagacccagtgcagccagctcggataccgatccggctccggcgcggcaaatcaccaagtcggcacaggcgaaggccagatcgattcgttccagatattcggcggtatggtagtcaccttgtccggccgattcggggccgatgccggtaagcacgtccgcgccggccgaggccgtgaccagttcgcgtacttcgctgattttgcctcgcccggtcaagtggatgatttgtgcgtgggccaacaggtctgcggcggaggaggcgatggcgcggttcaggctttgcgctcccagcgatccgccagtgaccagcaccagcggacggttcggatcgacgccaagctgcgcggccgattcacggcgtacggcggcacgatcgtcaccgatgcgtttggtcagggaggcgatggtcgggcgcaacggcagaccgacacgctcgacgtcggctccggcacgcggtttgagaccggtgccttcgtacacggtaccgatgaaatcggcccaacgagcgcccagtttattggccatgccggcacgcgcattctgctcatggatggcaatcggaatgcccatcttgtgtgcggtggcgtagacgggggcggaagcatacccgccgaatccggccacgacatccgcatgccgcgtttcaagaatggagcgcaccttggcggtttctcgcttccattttgccgggaagcgaagcatgtacaggtcagggcgacgcgggaacggcactttttcgatggtgtcgagctcgtagccggcctcaggcaccaaatccttctccaaacccaccgcagtgccgatgacggtgacctgtgccgtgggttcgatgtcgcgaatcgccccggcgaccgcgagcagcggattgacatgtccggcggtaccgccgccagcaagaacgatatgtggtgtgccttgattcatgattaccgagtctacttacgcgctctgacgcgactgttttatctgcggttgagaacgcataagtcccacaaccagtccggccgccgtcaagcacatgatcattgatgagccacctgcggagacgaacggcataggcacgcccaataccgggaacacacccacgaccacgccgatgttgaccatggcctggcccacgatccaaatggtgacgcacatcagcaccatggcaacataacgatcggtgacctgcaatgcgatgacgatcatgcaccaggcgagaatcgcgaagaacagcaatacgatggcgcaaccgacgaatccggtctcctcgccgatgatcgcgaaaatgaaatcgttatgggcggccggcaggtaattccatttctcacgcgaattgccgatgcccaatcccagaaagcctccggaggcgatggcgtacttggcgtgaatggactggtagcatacgctctgcgcgtcagcggccgagcaatcaccatatgtggccagaatacgacgcatgcggttcgggctggaaaccgccaatgcaccgaccataaccaccgcgcccaatacgccgattcccatccatttgccggggaatccgacgatcaggaaggccacgcctccgatggagaccagaatcatggccgtgccgaggtccttgccgcccatcaccagcgccacgcctatcgcatacaacaccaacggcgcggcatatgctttgattcccttcttgtggtacatcttgctgcaggcatgcaacgacgagggcagccatatgcacatcgcgaacttcatgaattcggccggctggatagtggtgaagccgaggttcagccaacctttgttgccgtagacgtcgatacccagcggagtaaaggtcagcgcctgcaacaggcaggcacccaccacaaagaacacgccggtccgtttccagaacgtcaccggcatcgtcaatgccacgaagcccagcaccaagccgatcaggcaaaacgcgccctggttcagaagctgaaggaacggcgacttgcccagtgcggccatggtgaccgtggagctggagaacaccatgatcaggccgaagcatgtcagccccaccacggccatgcggaatccgtggtagcaccatagcgggttgagcaagcttcgccaacccgtgtagtcggtgatctcgagtgcgggcctgtcaggggctctgtatgccttacgcttatgggtatcagtggaggccatgcacctcgctccacgtcttggctgcggcggcgaatcgattgcctcgatccgcataggacttgaactggtccatggaggcgcaggccggagccataagcacgatgtcgccggcggcggcatacgtgccgcaggcttcgacggcacgatccatgacggtatcgttgtcttcgggatcgatgatggtcaccgggatgtccggagcttggctggcaaacgcttcgaccatcggctgctggtctttgccgatgatgacggccgctttgatggtatgtgcctggtccttgaccaggtcctcgaatcgactgcccttggccagacctccggcaatccagatcacagacttggccgggaagctggacagcgaggcgcgtgccgcatgaccgttggtggctttggaatcgtccacgaaacgaacggagccgccctcgactgcggcctcagccacggtttcgatgcgatggccgcccggcttgaacgaggtaagcgccttcaacgcggtatctcgatcagcgccaagtcccagcaccaacgccaatgccgtcaatgcatcggccaccagatgcgggtacagtgagccgtccggctctgccagatgcgtgaaatcggtgatggcggccagtctgaccggctcccccactgcgccgccggccacgccgctcctgtccacgatccagccatcttcaatgccgatctgaccggcctggggggcctcgagcgtgaatcccaccttgcggcatccttcggcggtttgggcctcggccgccagttcgctgactttggcgtcctgcgcattgtagacgatggcgcgtttggcgttgtggaacaccttggatttgtcggcggcgtaattctcgcgcccgccatgccagtcgaggtgatcgtcggcgatattggtgatcgccgcgcagtcaagtgccagcgaatcggtgaagtgcaattggaaggagctcagttccacgcacagtacgtcgtgctgaggattggtggcgcaacgagacaggctcatgctcatgtctccggaggcgatattaccggcggtcggcgcgtcgagtccgcaggcggtgagcatttccgaggtcatctcggtggtggaggttttgccgttggtgccggtgatgccgatccatggagccggagtaccggtgcgctcgttattcacacgcagctgccatgcgaattccacctcgctcatcacggggatgccacggcgttgggcttccagcacgaacggggtgcgggggttgaacaccggggacgacatgacgtagtccacatggtcccagtccacgtcatcaaaggagcggagaccggcctcgggcttcctctcatcgacgccaatcacgtgggcgccgcattccctcaatacctccgccaacgaggtgccggacacacccagtccagcgatcaccactgtcttatccgctacttgcattgttcctcctgatataggaattccgtgggtgagcataatcccacccagatttccgctagctgaacagcaggccggagcgggtgacccagtcgccgtagaaaatcgtcagggcgagcagcacgaagatgagttcgatcatccagaaccgcaccaccaccttggtttcggtccaacccttcagttcgaaatgatggtggatcggtgccatcttgaatacacgtttgtgggtcatcttgaagtacccgacctggatgacgtcgctcatggcttccatgacgtacagtccacccagaaccaccgccaggaattcggtgtgcgtggcgatggacagggctgcgaacaggccgcccaaggccagggacccggtatcacccatgaaaatcgatgcggggttcgagttgtaccacaggaagccgaagcaggcgacggccgcgcatacggcgatgacggtcagatcgagaggatcggacacagcataggaatatccgccatggctgccgcccttgatgtggtagctttcccagaatgcgatgatgccaaaaccggtgaaggcgatcatcgacgaacctgccgccagaccgtcaagcccatccgtcagattcactgcgttggtccatgcggtcatcaggaagttcacccagatgacgaacaggatgatggccacggttcgaccggcgaaatcgaagttgaagaacggccgttcgatgaagctgatgcccgcctgcgcactggggaatcccgatttggtgggaatcagcagcgcaagtaccgcgtagatggtggcgaagatgaactggccgatgaacttgccgcccaccgataggccttcgttctgcttcttacgcaccttggcgaagtcgtcgataaagcccagcagacccatcgacagcatggcgaacagtacgagcaccgcggaccaggagggcacgtcgcccgaacgcaggtatcggtacagtgcggaggatgcccaaccgagcagaatcgcgaagttgatgaccacgccgcccaacgtgggggtgccgcgcttgaccagatgcgactgcggcccatcctggcggatgtactggccatagtgcagcttgtggaccagccgaatcagcagcggggtgccgactaaggtgacgatgagcgacaccagcattccaatgatcagagcaatcacgtgcagcttctctttcttgtcggtttcttggggtggttatcgggtcagttctttgcccagcgttcagccaaagcgctcaggcctgacgcgtgcgatcccttgagcagtaccacagcgtcggaatggttgcgcgccaagtcgatgaccagctgttcggccgcatcgatgtcgtgtacgcaatccaccgacgcggattggctctgacgggcaccgtccgccagagcctgtgccagtgcatcgagatgttggtcttgggcggaaccgaccgcgatgatcgcgtcgatgcccaattcggccgcatacgtgccgatagaggtgtgcaatgccgtctcatcggcgccgagttccagcatggcacccagcagcgccacgcggaacggatccttgccgtcatttgagttccaagccttcaacccgttcaggccggctttcatggagtcgggattggcattaaaggaatcatcgatcagtgtgaaggaagtcccctcgcgattcaccgtggacaatgccatgcgatgagggctgatggtgtgctgcgaggccagaatccgcgccaccgtttcgggtgccataccgtaacgcatcgccacggttgcggcggccaacgcgttcatcacgttgtgacgtccaggaatgcccagatgcaccggcgtatggttgccgtccgcatcgaccaacgtgaattcagcatgatcggaccggtcggcagtgacatcaatggcccgcacctcgggctcctgcgacgatcccaagccgaaccacagcacatcgccgctggccaggccggccatgggaaccacgtgttcgtcatcggcgttcagtaccgcggtgcctccgggaagcagtccctgcacgatttcgcttttcgcctgtgcgatgcgttcgcgggagccgaattctccaaggtgagcgacgccgaccttcaatacgattgccgtgttcggcggtgcgatacgggtcagtcgcgcgatttcgccgatatggctggcacccatctcagccacgaagaaccgggtgtgctcatcgacccgcaacgcagtgagcggcaggccgatctcattgttgaacgatcccaccggagccacggtcgggcctacggtggcaagcagggaggagagcagatccttggtggtggtcttgcccaccgaaccggtcaatccgatgatgtcgaagtcgccgtccagctcgcggcggcgaacgatgttgtgtcgggcgagctcgccaagggcgtcgaccgtgtctttcactacgatctgcggcaggccatcggactccacctcatggtcgacgatggccaccgtggctccctgttcagcggttttcgccacaaagtcatgcccatcgacacgctcgcctcggatggccacaaacaccgatccggggccggcctgccgcgagtcgctgaccgtattggtggctcgagactcggaatcggcgtctccgatcaatcgaccatcgacggccttggcgatctcctccacactcatcggaaccatggtgtttcaaactcctttacgattacgcttcgtcccgcatccacggacttaattgagattgttggccacatgcagggcactgcgtatgttgtttttcctcacgccggcggccagtaccatggcgatggccaaggacatgtgcccgagtcggacgcggtcgtacattgccggtgaatccgcagccatttcatccgattcgggtgtcgacgaggtcatggacatgtcatgttccgcaacgaatgcgtagcgtgtcttcaattcgtccaagcttgcgcttgcgttgacatcttccgtgcccagcacatccacgttcaccgattccaacgcatgctcggccaatgtgcggtcatccatggcgatgatcacggccgccacaccgtcttcggcgcacacggacagcgcgcgctgcatatcgaggatgcccagaggatagttcaggttcatggtacgtgtcatcgacgtggacccggatgcggtgattaccgccaccggattgcccagcatgtgcaggaattcggagagctgggacacgcctgcgtcaacggcctgctcatccgcaccggtcaccgcgaacaccgccatggcgttggatggtccgccggccaggccgctggccagatcgccgagtacgcgatcgtcgaaatcgccgtagagcaacggtatatcggcattggcgatctgccctttggacgcgcgtggcagcaacgccgcataggcaccggcctgtgcggcatgcagcacatcgggttcctgctcatgcgtgcagatgaacagcgagccgggaatcacggtatccacggcatcgctgagtgaggtaatggtgacattggtggcgaagggtggatcgacttcaaaaccgtaccgttcgaccagcattcccaaggtcacccgctgggcgatggattcgctcactgcactcatgggctatcgcctttctcccctgatccttaccacgtgactggaatagcattttttcgtggactggagacaggcacctcgtatttctgcataaggaactcacaaatctgtgcggaaacagggccggccgtcagaccgccgaacacaccattcggatccttcagcaccacggtgaccgcatagcgcgggttgtccgcgggaatcaccacggaataatcggagataatggacgagagcgcgccatccgaaccctgcacctctgcggtaccggacttggcggccatgcggtaaccatcgaccttgacgaacttgttgtagctctccgccactgattccatcgcattcatcatgtccgatgcgaccttttcatccaccacgcgggtggcttcgcccttcttggtctcagtggtcttgccattggcatcggtggttgatctgatgatcgactgctgctgcttgacgcccttgttcgcgatggtggccaccacgttgttgagctgcagggcgttgacggtgtaaccctgaccaaacaggatggtgttgcgcgtacgcagatcccatgccgaagggctggtgagcagaccgctcgattcaccgggcaggttcagtccggtcggttgtccgatgccgaatttggtcaggtactcgtagcgttgctcatccggatagttctccccggccataatcatgccgacgttcgatgagttctgcagaataccggcgagcgtccagtgctcagtgccatggtcgaatgagtccttgtaggtctggcccttctgtgtgatgtggtccgggaccgacaattgatcgctcatcttatgcagtcccgtctgcagatagccggacatggagatgaccttgcccaccgaaccaggctcgaaggtttcggacacggcccgagacgggctcatcttcgccgcatcggtaccagcctgtacttcatcgctatcggccagtgcgagaatctccccgctctggacatcctgcaccacggcgatcgcccacgctgcaccatacttggattcggcctccttcaaggcctttttgacataccattgcacatcacggtcaatggtcagggtgacatcgtcgccatttttggccgccaccgattcggtcatggtgccgggaatctcttcgccgccattaccacgctggtaggtttcatggccatcggttccggtaagcgtcttgttctcgacctgctcgatgccggcgacgccatcgccgttgtcgttcacgccgccaagcagcgcgcccatgagatcgccatccgcatacagtctttcactgctcagctcaccccagacaataccgcccaggtgcaacgcctcgatgctgcgcttgacctgtggggtcacgtctttcttcagaatcacatactgcccggtaccggacagatcagcgcccagttccatggcgttcatatccaggactttggccagcagtcggcccacggccgccgctccggtagcacccacgggtttgccgtcaatttcgtggcagtaatcacgggtgttgtcattgcaggtaatcggctcgaactcctgtgcagcctccggattggcgacgatagtataacgctccacgctttgagcgagcacggagccgttggcgtcgaggatacgcccacgcttggcgctcaacgtcacggtcagggtgcggttagccgtggccgcttgtgcggtttgacggccgccgatgagctgtgtggaggccagctgaatcacgcatgccgacgccaccaacgccaatgcggcgccgatggcaatgcatttgaacgcgaaggtcttgaccttggcgaactctacgatgcgacgaatggtgttcactgggttccgcctttgttggactggtatccgcttaagtcgatggacactgatccttgctgcgggaccatgcccatgtcgctggccttgtcgggcaggttcgcgactaattgatcgagtttggcctgatcgtcttcgacatcttgggtaagtctgttgatattggtttcgatctgtgccgcctcaaacgagttctgcaccatctgggtacgcaacatcagcgcgccgaacaaggtgccgacgaggaagatcactgcgatggccacgtgcaccagcggtgcgcttcttgttctggtccattcgatgacccgtccgacgacattgccccgctcgtctccacgcgggttggagaccacccgcagctcaggtcgggaggaggactgatgcttggtgtgcggtcggttcgaggccggagccgcgttcgatcgaatgttacgtgcggttgccatatgccgttatcccctccttgtacgaattcgcgctgtgtttttggctctgcccggagacgcggagccttgtatcttgacgtcattcaggccctgcgcggtttgcgtaaagcgtttcctccatcgtgacggaatatcacggctgacttccaccgcccgcaaccgcaccgaagccgatctcgggttggctgcgatttcatgttcgtcggccttgatggcacctcgcgtgagatccgtgaaaaacggttgggcatccggcggtatgacaggcagaccagccggaacatccactcgcagcccttgtgccatgaacgatttgacggttttgtcttcgagcgaatgataggactccaccaccagtcgtcccccgacatgcagtcggttcgcggcttgcggcaatgtggaggcgagcttgtccaattcgccgttgacttcaatgcgcaacgcctggaagacgcgtttggcgggattgcccgccgggcggtgggcttgcggcaccacttcatcgaccagacggttgagctgtgcggtggtggtaaacggctccttgtctcgacgtgccacgatggcgcgggcgatctgacgcgagaaacgctcttcaccgtattccttgaatatacggaccagttccgccgcatcataggtggcaagaatccgttcggccgtcaacggctggctgacgtccatgcgcatatccagcggcgcatcatgcgaataggagaagccacgatcggtttcgtcgatctgcaggctggataatcccagatccatgaatacggcgtccacacgttctatgcctcggtccgtcaacacctgatcgagctgatcgaaggcggcatgcaccgggatgaatcgatcggcgagcccctcccgttccatgcgttcggtggccagccccagcgcttcactgtcacggtcaatgccgatgagccgagcctgcggtgcggctttgaggaaggcgatggaatggccggcaaggcccagggtgcaatccgctgcgatggcgttctcatgttccagggcaggcgccatcaggttcacgcaatcgtccagcaataccggcagatgaatattcgccacatcaaccatcagaattccacctccggcaacacatcgtcagcaatatcggaatatccctcttccttctcggcgaggtaggactcccacgtgtccttattccacagttcggcacgggtgccaacgccgatcaccacgacgtcggaacccagattggcgtaatcgcgcagcatctgcggcaccagcacgcggccctgcttgtccggctgctgatcgacggcgccggaaaggaacacacgcaggtattcgcgggcggctttgtttcccaccgacacacgctgaatctgcgaggcgatacggcgaaattcatcgaacggcagcaggtacacgcaccgttcctggcctcgggccatgaccaggccctgccccagctgggagcggaatttggccgggagcgccatacggcctttggcgtcgatcttcggcgtatatgtgccgagaagcagcggcggcagaccagccatgagatcagccatagtggtggagccttgtgcgttggcatcagcgtcgcgaatcgtctgatcggcaaccatggctccacctccttcatcgttacgtgggatacacttcggccaactggttcaccactctaccccacgattccccatttctccccactcctgcacgatttgctcacccttttagggcgattaccgatggattgcgcgtgtcggccacgactgtcgcacgaatgggcgctccgcacatccaatccacgttgcgcactccaccgaccgagcagcatggcgaattcacgctgaattcacctattccgggttgtccgcatcactgacgtagggggtgtgcggtaaatttgaatgccttaagttttttctgccccacggaaatggaacgaagagaacagcatgtcgagttacgcctcccagctgcatgaggagcagcaggccgtcgatcgcgcctatggacgattggatgatctgcgagccgaaatgtggcaacgcctggacaccgtacgcgccgccggctcccacggatcccccacgcaacgcagcgaacgagactcctttgccacaatgtacgaaaaccgcctcacgcaattgcgcagcgttgaggatcggctggtgtttggtcgtctcgacgccaagaacggcgaccgtcattacatcggccgcatcggcctgtcgagcccggaccatgagccgattctgaccgactggcgtgccgaagccgcacgtcctttctatgaggcgaccccctccaatcacggcgacatcgtgatgcgcaggcatatcaccttgagtttccgcgaagtcgtgggcgttgaggatgaggtgctcgacgtgcattccgaccaagtcggccaggcgtcttccgccggcacgttgaccggcgagggtgcgctgctggcttcgctgagctcacgccgcaccggcaagatgaccgatatcgtggccaccattcaggccgagcaggaccgcatcatccgctccgacatgaatcgtgccgtggtggtgcagggcggtcccggcaccggcaagacggccgtggcgctccatcgcgccgcctacctgctgtacacgcaccggcgcacgctggaacgttccggcgtgctggttgttggccccagctcggcgttcctgcactacatcgatcaggtgctgccctccttgggcgagaccggcgtggtctcacgcaccatcagcgatctgattcccggcatcaccgccacggcggtcgactccccttatgcagccaagctcaagggcgatcgacgcatgacctccgtagtggccaatgccatcgccgcgcgcgtgcgtgttcccgctgttctgccgacagtaaccattagcggcattcaggtaccaatgctggccactgatatcgagcaggcgcaggcggacgcgaagcgcacccggcaacctcataacaaggcccgcgagacctttatccgttcgatgctgaccagcatgcagaaccgttatgccgaacagcttgattacacgccggatcaggcggagctgaaccgcgcgatgtcgttgctgcgtatgaacgagcaggtgcgcaagaccctgaacctgtgctggctgccgatgaccgccccatggctcatcgatcagctgttcgcccatcccgaacgtctgaagtctctggctggttggctgaccgacaacgacatcgcggcacttgcccgccccaagggctccccgctgacccgctccgatattccgctgctcgacgaagcgatggatatgctgggccccgatcccaagacggtggcccgccagtccgccgccgacgcacgtcgtgccgccgaagagcagtatgccaaagacacgctggccgcgaccggtctgggtggaggcatcgtctccagtcagatgctgctcgaccagatgaacggggacgacgccgagctgaccgcgcagcgggccgcggccgaccgtgaatggacctacgggcacatcgtggtcgacgaagcgcaggaactgaccgccatggactggcgtatgttgatccgccgttgcccctcccgctcgttcaccatcgtgggcgatgtggcgcagacctcggcgctgggtggcacccgacgctggagcaaatcgatgaaccgcctgttcggcgaaagccactgggatctgaacgagttgaccatcaactaccgtaatccgcaggaagtttccgaactcgcctcacgctttgccgagaaggaaggcctctacatctccacggtcaatgcggtgcgcaccatccccgattcggtgtcccgcaatgtggtgcccgacatgtcgtccttgctggaaacgacggccgagcaggcggcgcagcttgccgaacaattcgtttcggcagacggcaccggccgcatcgccgtcatctgtccggatgatctcatcgccccggtgcgcgacgccgtgcgccgcaaactggccgccgttcttgacccggccgaatacgcaaggctcatcgagcagcccgaatgggatgagcaaatcagcgtctgcggcaccgaaacggtcaagggtctggagttcgatgccgtcgtggtggtcgagcccggtctcatcgaggatgacgcgccgagccgcctggtcgccgcctcggacctgtacgtggcaatgaccaggccgacccagaaactggttatagttcggacaagaacggacgaaaagtccctgaacatctaaggtatgaagcatgcccaaagcactgttattggaaaacattcaccccgacgcggccaaatcgctgcgtgatcacggtttcgaagtcgagaccatgaagggagccctgagcgaggacgaactcatcgacgcgctggatggcgtggacttggtgggcgtacgctccaagaccaacgtcacagcccgcgtgctggatgcgcgtcctacgctaagcgccatcggctgcttctgcatcggcaccaatcaggtcgatctggcacatgccggcaagcgtggcatcgccgtgttcaacgccccctactccaacacccgttccgtggtggaattggtgatttgcgacatcatctgcttgatgcgccgcattcccgcacacacgcatcacatcaagcatggcctgtgggacaagtccgcttccggctcgcatgaagtgcgcggcaagacccttggcatcatcggctacggcaacatcggctcccagctgtcggtactggccgaggccctcggcatgcgcgtggtgttctacgacattgaggagaaactggcactgggcaacgcccaccgttgcgataccctcaacgaactgctggaacagtccgatgccgtgaccctgcacgtggatggccgcaagtcgaacaccggcttcttcggcgaagaccaattcgcccacatgaagcaggacgcgattttcattaacctttcgcgcggtttcgtcgccgatctgggagctctgaagcagcacctcgattccggccatctgtctggcgcggcggtcgacgtgttccccgttgagccgaagaagagcggagatccgttcgagacctcactggccaacgaagacaatatgattctgactcctcatattggcggctccaccttggaggctcaggaatccatcggccatttcgtctctcagcgtcttgaggattactggttcaagggttctacctcattgtccgtgaacctaccgcagatcaacctaggtgaacgcaagggcgtgtgccgtatcgcccatctgcacgacaatcttcctggtgtgctggctcatgtcaatcgcgtgctcggcgaagagaacatcaacgtttccttccagtcgttggccaccgaaggcgaacttggctatgtggtcaccgacgtggctcagaagcccagcgccgccacgcttgaagcactacgcaacatcgagggcaccgttcgcatgcgtgtcatcagctgacgactcatcctcgattgatatgaaagagacccgtcgctgacgggtctctttcataagtgcagggcttcatgattggttcgcaccatggtttgcgaatcactcgcatatcacggtgcatggcattcgcatattattcacgcaaaccatcaatggcgctttggaaatcctccagacctgcaaagttctggtacacactcgcgaatcgaaggtacgccaccacatccaagtcacgcaacggtttcaggatggctttgcccacttcatctgaggtgacttcggcaaggcctcgggagcgaagatcctcttcgactttctgtcccagcaacttcagatcctcttctctgaccggccgcccctggcaggctttacgtacgccggaaatcactttgtctctgctgaatggctccacgccacccgaacgtttagtgaccagcagcatactggtttccaccgtggtaaaacgcttgttgcatttcgggcatacgcgacgccgacggatggaatgaccgtcatcgctaatgcgcgtatcaataactttggtgtcggggttctggcaaaaagggcaatgcatgctctccagaataacgtgtacgggcggaaaaaccatgccgctcgggtttcatttactcaaccggaacaataatgcgctgcccggcctgcaatgttccggactcgagattgttcagcgtaatcagctcatccactgtttccgatacatcatggccagcaggtgtaatagccgaagcatatgaccagagcgtatcccccggccgcacgatatagctggtcacctgcgtggcacccgtatctgattgggcccgctgagcggtaagcgcgccgaaaccacaccaggccagcgccaaggcgatcatcactgcgataatccgcccacgcacattccggcgggacgttccagcatgctgcatagctacacgtgcgctacgggccggggccatcaccattgaaccagtcatcacgaccacctctctcgaacagatgttctatcgaacaactgttcttataatggcacaaatgttcgacacggtcaagtcgaaactcgaacagatgtttgatttcacacgaacaacacgttatgctggtgacataacgaaaggagccctgacgtgagcaccattcccctctcccccaagcagaagccggacgagtccaccctgaccgaccgccagcgcaaagtgttggacgccattcgcacgcatatcgacgaacaaggctttgctccctctttccgggagatcggaaatgccgccgggctcaaaagtccgtcttcggtcaagcatcagctacaagttttggaagacaagggcttcattcgcatgaacgcgaacaagggtcgcgccatcgaggtgatggcaggatccgccccgaatgccgaaaagccatcacaagccagcgaagaggcaaccagcgccagcaatatggcggagatataccaattccccgccgaagccattgccgaatcacatgacgtaccgctcgttggccgtattgccgccggcgtgccgattaccgccgaacagcatgtggatgacgtcatgcgtctgcctgaacggctgaccggctccggcaccctgttcatgctggaagtccacggtgattccatggtggatgccgctatctgcgatggcgactatgtggtggtgcgcgaacagaattccgccgtcaacggagatatcgtcgccgctctgttggatgacgaggccacggtgaagaccttccgcaaggaaaacggccatgtctggctgatgccgcacaaccccgcatactcgcccatcgacggcacacatgccacgattatgggcaaggtggtcaccgtactgcgcaaattatagcctgttcgccaccagctgatcagcgtgcgctgaatcgcgctggtcgtgctatagtcgcacactgcttacgaaaccccggcctcgcgccggggtttcgtcgtattcagaccatatcgcaaatggtattgagaagcggtttcaactcgatagagcgaaggagtacatatggcccatacccatacacccgcaccatccacatccgtaaaccctgccgcgcaccagcgcaggctgattgccacgttgaccgtcactggttcggtcttcctcatcgaagtggtgtcggccgtcttaaccggctcactggccctgctggtggatgccggtcatatgctcaccgacatgtccgtgctggtggcatccacaatcaccgccatactgatgcgccgcaagcccaacaacactcgtacttggggctgggccaggcttgaggtgctcaccgctgccgcgggcgccgtagtattgcttatcgtcggcatctatgcgttggtagaggccggcatgcgtctgttcggcggctccaaagcggaaatcgacgatatcggcttgctgctgttcgtaggcattctgggtcttgtcgcaaatatcatctcgatcttcatccttgcctcgcagcgcgaagacaacatgaacatgaaggccgcgttcctcgaggtaatgaacgacgcacttggctcggtgtctgtggtggcctctgccctggtaatgatctccaccggatggaatggcttcgacgccgtggccggtgccgtcatcgcactgatgatgattccgcgcgccatcaagctgctgcacaacgcggtcaaggtgctgctggaggaaacaccggatggtcttgatctcgataaggtacgcgagcatctggaagacgtgccgcatgtgcttgccgtgcatgacctccatgccagcacggtgtccaccgacatgccgattcttatggcccacgtggtagtcgacaaagacctcaccatggaagatgccgccacaatcctcacccaactgcaggattgcctgcgcgagcacttcccggtctcggtcccccacaccaccttccagcttgagcccgagggctatagctccccctcctccaacgaattccacgaataaaaaatgctccctctggaagcattcagcagggtataaaaaatcgctgtacgtgtgcgatttttcgtgccgcacaaggtgaaggcctacaaaggtagttcgaaccttgtgcggtgtgaaaggcgctccgtacagcgattttttatcagaagccgaactgggcggcggtttccttcagcgtctcggcggagcgcttcagagcggcgagctccttgtcggaaaccggggtgttgatggtgttgttgacgccctgacggttgaggagggtcggcacggacatgcagatgtcggagatgccgtggaagtccttgagcatggagctcacgggcaggatgcggttggtgtcgtgcaggacggcttcgatgatgtcgacgccggacatgccgatggcgtagttggtggcacccttaccgttgatgatcttgtaagcggcgttcttgacttcctggtggatctcctcgcgcttggcggcgtcgagcggatcgtggccgggcagcggggtccagtcgcacatggggacaccaccgatggtggcggactcccacagcgggacttcggagtcgccgtgctcgccggcgatgtaggcgtgcacgttcttgacgttgacgccggtctgctgggcaatcaggaagcgcagacgagcggagtccaggttggtgccggaaccgaagacctggttctcgggcagaccggtgagcttctgagccacgtgggtagcgatgtcgaccgggttggtgatgagcatgtagatggcgttcggagccaccttgaccaagttcggcatgatggccttgaggatgttgacggtagcgccaacgagctcaagacgagactgacccggcttctgacgcggaccagcggtgatgacgaccatgtcggcgtcgcggcagatttcaggatcgtcggaaccgtcgatggacacggtcgggtagaagctggagccgtgctgcatgtcgagcacttcggcttccacgcgctccttggcgatgtcttcaagcacgatctcgcgagcgacgccacgctgggcagcggcgaaggcgagggtggagccaacggcaccggcaccaataacagcaagcttcgtgggcttaacggtagtttccgccatgatggatgaacctctcttcaaaggcggtctgctgatgaatggcaggccttgtaactaacggttttcactctataaacccgctaagacgttttgctaccagcacaccaccctgtctgataacggtatggtaatgtttccaacggttgttagcgctcacaaacaaactgtgatgtttatcacgttagtcaatggactgttcgaccacctgagcggcaagatgggcgtcaacgtccgcttcaagctgtatgccatcatcgcggtactccaccttgtccaccttgccgtattcgcgtacacgagagatcagggagccagcggtatacggcagcagagcgttgacatgcacatgcgggaccggcagcagactttcgaccgcggtacgcagctcgtccaatccctcaccggtataggcggagacgatgaacgcatccggctgcagtgcggcgagtcgttcacgtgtcgcctcgtccgcctgatcggccttgttgaatacgagaatacgcggaatcgaggccgtgccttcgatgtccgccaacacgtcattgaccgcgtcgacctgagagaacgggtcagggtgggagccatcgaccacgtgcaggatcacgtcggcctcggccacctcttccagggtggatttgaacgcctcgatcagctgggtgggcaggcggcgcacgaagccgaccgtgtccacgtaggcgtaagcgcgtccgtcgcgggttttggcgcggcgcacggccgtgtccaatgtggcgaacagcgcgttttccaccagttcggccgaaccggtcagacggttggtcaacgaggatttgccggcgttcgtgtagccgaccacggccactgtgggcaggccgaagcgacggcgtgaaccgcgcttgacctcacgtgccggagccatctcacgaatctgacggcgcagtctggcgatacgcgtgcgaattacacgacggtccatttcgattttggtctcgcccgggcctcgcgatccgatgcccgcatccgcgcctgccgcgcgaccgccggcctgacgggacagcgaaccaccccaaccacgcagtcggggcagcatgtattcgagctgcgccaactccacctgcgccttaccttcacgcgaggtggcgtgctgggcgaagatgtccagaatcaccgcggtgcgatccaccaccttgactttggctgcgtcctccaatgcacggcgctgtgacggcggcaggtcgtcgtccacgataatcgtatcggcttcctcacgcgccacgatgtcggcaatctccttggctttgccggaaccaacgtacgtggctgcatccggcttggagcgatgctgcagcaaaccatcgcataccaccgcaccggcggtttcggcgagcgccgccaactccctcaacgattcctcggccttggcttgcgtggtgacggcggacgaccagacgccgacgagcaccacacgttccagacgcaccttgcggtattcgacttcggtgacgtcctgcagctcgccgagaccggcgacatgcttgagctcgttgcgggcctcgcgctcctcccattcctggttggcgtcctcatgccagccggtcgcgcgctggctgtcgtcgagcagcacttcggactgcccggccagcacaccttcaggggtaacgtcgttgttgccgcggtcgatgtcggtgtactgggtgttgtcggtcaagtgcgcctcgtttggttggaatggttcacgattcttctatggtcctttattatcatcacatgaggtgacatgctggcatagatcggcacgtaccggcataggccggctgatacaggcggcatacgagagcggcgaatcccgcagaaatggagcgaccatggcagaacagtatttctctgcggaacccgcgtcgaaggatgtgcgccgcacattgaacgtaacgttgcgcggccatgaggcgaccgctcaggtgtcgaacggcgtgttctccggctcgcgcgtggacctcggtacgtcggtattgctgaagcatgcgcccgagccgccgcttaccggcgatttcctggatttgggctgcggctggggccctatcgccctgacattggcgtttgagtcgcccgaagcgaacgtgtgggcggtggatgtcaacgagcgcgcgctggacctgacccatgccaacgcacaggcgaacggccgcacgaacattcatgcggctcaggtggacgagtccagcactcccctgcccgccgagaaccagccggcgttctgcgagacggtgccgggcgacctcacgtttgatgcgatttggtcgaatccaccgattcgagtcggcaaggaagcgctgcatacattgcttatggcttggctgccgaagctcaaggtgggcggcgccgcctatctcgtagtgcagaagaatctcggctccgattcgctgatcccctggctggacgatgcgctcggcgaggggttcactgcgagcaaatacgcgagctccaagggcttccgtatcattgaagtccgtcatgaaatatgagtatcctgcagaacttcccgtatctgccgcgcgtgatgagatagccagcgcggtcaaacgttcccaagtcgttattgtgtccggccagaccggttcgggcaaaaccacacagctgccgaaaatcctgcttgagcttggccgtggcacgcacggcaagcagatcgtgcacacccagcctcgccgtatcgccgcgcgcacggtggccgaacgtatcgcctcggagatgggcgtgaagctcggtgacgaggtcggctatcaggtgcgtttcaccgacgaaagctcgcccagcacgcgattgagagtcgtgaccgacggtattctgctcgcccagatccagcgcgatccgaaactcacccaatacgatacgatcatcatcgacgaggcgcatgagcgcagtcttaacatcgactttctgctcggctatctgacggcactgctgcctcagcgccgcgatctgaagctcatcatcacctccgcgaccatcgattcggtcaagttccaggagcatttcgagcacgccttgcatgagaaggtgccggtaatcgaggtttccggccgcaccttccccgtgcaggtggtctatgagccgcttggcaccgcgcccgcgttgatgcgcgaagtgccgggattcgcggtgggcgcccgccccggcgacgccgattacgacgagctggccagcgccatcgcggaatccgattccgaccggccccgcggccggtccggcgactcctatgccgatgacggcatcaccgatatgcccacggccgtggctcgagcctgcgccgaactggtgatccactcctcccatgagcgcggtccccgcgatattctggtcttcgcttccggcgagcgcgacatccacgagttcgaggccgcactgcggcatcattacggtccgcgcgccgacgacatgcgccgaccggacgccatcgagatcatgccgctgttcgcgcgattgtccgccgccgaccagcacaaggtgttcgaatcgcatttgcatcagcgcatcgtcatcgccaccaatgtggctgagacctcgctgaccgtgcccggtatccgctacgtggtggaccccggttccgcccgtatctcccggtattcgaagaccgcaaaggtccagcgtctgccgatcgagccgatcagccaggccagtgccgaccagaggtccggccgatgcggccgcgtggccgacggcatcgcgatccgcctgtattcgcgtgaggattacgagacccgaccgcgcttcaccgagccggaaatcctgcgtacctcgctgggtgccgtggtgcttcacatgctgtcggtgggcgtggcccgcacggccgaggacgtcacgaacttcgggttcatcgatccgccggatatgaaggccgtgtcggacggtttcaatgagctcaccgagctcaaggccatcggccgaaagcgcggcgaggtgacgctcacccataccggccgtcagctggcgcgcatccccatcgacgtgcgtctgggacgtatggttatcgaggccgcgaaaaccggttcgccgaatcttctggcccaggtgctcgtggtcgtggcgttcctgagcttgcaggacccacgtgaacgcccggacgacaagcgtgaggatgccgaccgtatccacaaccgatatgcggatgagacttccgatttcctgacggccctgaacatctgggatcgcgtgttccaagcggacggcgacccgagcaacaacgcgctgcgccgtatctgcaaaaccgagtatctcagctggctgaggatacgccagtggaaagatctcgtctcccagctacgccagatgtgcaaggagctgaagttcaaggtcggcgacccgttgcccgcctcccgcccaggcttggagattcgccagctgccgttgaatcagcaggccgcgcattcgctgtgctgctcgtgggatgcggatggcatccacaagtcgatgctcgccggattgctgtcgatgatgggcatgcaggtggtgcgtgagcccaaggcctccgatttcgcggggctgaccggtgcggcgcgcgcccgtgcgatgaaacgcgcccagaagcagtcgaagaacgattatcagggcgcgcgcggcacccgtttcgccctgttccccgcctccgccgtggccaagaagaccccgtcatgggtgatgagcaccgaactggtggagacctctcgcctgtgggcccgctattcggcggccatcgacccggcgtgggccgaaccgttggccggccaattgacccgcaccacgtatgcggagccgcactggtcgggttcgcgtggctcggctgtggccaccgcgcgcgtgctgctgtatggtctgccgatcgtacaggaccgtgccgtgcagtggggacgcatcaatccgcttgaggcgcgcgacttcctgattcgccagggtctggtcgagggcgatattcagcagcgcttcagttacgacgactttgtgggcaaaaaccgtgacattctcgaggatgccgccgatgacgcgagccgcacccgccagctggcggacaccgtgtccgacgaggatctgttcgacttctacaacgcggtcattcccaacgatgtgaccagcgtggccgatctggcgaaatggtggaagtccgagcatgaccgtcagccgaatctgcttgatttcgacccggccaaggtggagcgtctggcatccagcgattcggtgagtctggacgattaccccgaccattggcatacgaccggatcggacggccaacccatcgacctgcgtttgagctacgtatacgatccggccgacccggccgacggcgtcaccgtgcatgtgccgttgaaggcgctctcgcgtatcacgcccgaccagttcacatggaatgtgccgggcctgttggatgagctgattctgtcgatgatcaaggcgctgcccaagcagctgcgcgtccagttcgtgccggccccggatgccgcgcgtgcgattcgtgactggatcgacgagcattacccggatctgccgggctcgggctcgcagcagaagccgaatctgccgccggtggatgaggatggcacgaccgttggctggcctgatttggcacatgtgttcaccaaggcggccatcgccaccaagggtgcgcagattcatcccgaagtgttggggccggaactggtcgagcgtctttccccgtatctcagggtcacgttctcggtggagcagcaactgccggccggcaagcaccctcgtggacgccggcatgcgcgcggccccgtcaaggtgctgggtgtgtccaaggatctgaaggcgctgcaacgcaagttcgccgcgcaggcggaggcgtcggcccgtcaaatggtcaagaagcaggccgatcaggctggagaacagggcaagctggtcagtcaggcgaacctgttgcataaggcgggtgccaccaccgagtcccgggccacgatgctctggcgtggcgcattggatgcgctgcggttgccggccgaacgcatttcgtcgcgctggctgggtaccgaggcgttgatgctggcttctgctccgtacaagtccaccaaggatctggtcgaagacctgcagctggccacggtcaaacggctgatgccgaatgtcgacaggctctcggacgatgaggcgttggccaatgcggtgctcgatgtgcgcgaagtgtacgaggacaccgtctatcaggtggcgcatgacgtgatcgccgtgctcaaggcttatgccgaagtcgacaaggccactggcggcaaggccgacttgccgatgctgtcggtgctgcagtcgattcgcgaccatatcgccacgctcgtctaccccggattcatcgggcgtactcccccggatgcgctgaagtcgttgagccgatatttgagagccgatctgagccgactcaataaggcgaaaaccgataagaaccgtgacgtcaagtgggcctggcaggccgacgaggcccgtcaggtggtcgataaggcgttggcccgtgccaaggcggagccggccggcccgaagcatgaggcattgatgaagcaggccgaacaggcccgttggatgcttgaagagttctacgtgtccctatgggcgcaggagcttggcaccgccaagccggtgagcctgcagcgcatcaagaaggcactggcgtagcgatggcgacgacgcaacggcgcaagccggccaatccgcgcggcagggcgaacgtgattgtcgcggggcggggcgtgtcaggaggcaatcgcaaacgtcgcccgggcaaacgcccgcgcaatcgcaggtatccgctcagcccggcgcgctggtggaagcgggccgggttggcgcagcgcgtcgcggctgtgctggtcaccgtggtggcggccgcatgcgtggtcgcgctggtcgtgggcactgtgcgggtcgtccagtggcgtcgcgacgtgcaggaggccgaggcccgccagctgcagctgacgcagcaatacgacttcaatcccggcgacatcatctcggacggccagttcttcaacgccaatgcgatgagcgaggccgaggtccagtcgttcctcgacaagcagggcgcggcgtgcagcggttcccggtgcctgaaaaccatgaccttcgacaccgaggaccaggcggcgaacgagtattgcgcggcgtacgagggcgcgagaaaggagaccgcggccgcgatcatcgacaagtcggcgcgcgcgtgcggcatcagccagaaggtgctgctcaccgtgatgcagaaggagcagcacctggtcacggccgtcgatccgacggacttccagtacaaggccgccatggggctgagctgcccggacgacgcgaactgcgatccggcctatgccggcttcttcagacaggtgtacggggcggcgcaccgctaccaatactacgtggcgcatgaaagcgcctacggctatcacgccaacgcgctgaactacatccagtaccacccggatgccgggtgcggcggcaccaacgtgtacatcgagaacaaggcgaccgcgctgctctacatctacacgccctaccagccgaacgacgcctcgctggcggccgggttcggcgagggcgactcatgctccagctacggcaaccgcaacttcgccctcatatacaccaactggttcggtgccgcgcgccgataggggcgggacggcaaaaaaccgaaaccacggtaaggctaggtgtcatccgcgccgtcgccgccccgccgcacggccggagaaccggccggatgacgggcggcacggctcacaggtcgatcttcggggaggcgtcgagcagggtacgcgtgtactcggccttgggatggttgagcacgcggccggtctccccgctctccacgacgcgcccgtggcgcagcaccgtgatcacatcggacatctcctgcacgatgcccaggtcatgggtgatgaacaggcatgcgaaaccgtgctcgcgctgcagccggcgcagcaggtcgagcaccttgcgctgcacggtcacgtccagcgacgacgtcggctcgtcggcgatgagcagcgacgggttgagcgccaaggcgcgcgcgatgccgacgcgctggcgctggccgcccgacagctggtgcgggaaccggccggccacatcggcgggcagctccacctgatcaagcaattcaaggacgcgcttgcgccggtccgtctcgctgagcccgccctgcacgagcatcggctcaccgatgctccatgccacggacttgcgcgggttgagcgccgatccgctgtcctggaacacatagcccatatgcttcaggatctcgcgcttgcgcctgccatgcgccttggcgagatcctccccctcgatgagcaccgtgcccgaggtaggcgcgagctggccggagatcaccttggcgatcgtggtcttgccggctcccgattcgcccaccagcgcgcgggtcctgccggccaccagatcgaacgagatgtccttgacggcgaagctgccggccttgtacgacatggccacgtcgttcacctgcgtgatgcgcctgccgccgccgggcgcgtcactttccgtgatgcgttcgccgccggccgcatgttcgccgtctgccgcatgctcgtcgatgcgcaggcgcggcacggcgtcgagcagcatccgcgtgtagtcgtcggacgggtggcggaagacctgcgcgacgctcccctgctcgacgatcacgccgttgtgcatcacgtacacgtcctgcgcggcctgccacaccacgcccatgtcgtgggtgatgagcagcacggccagatcgaggtcgaccgccagcgaggagatcagggcgagaatcgccttctgcgtggtcacgtcgagcgcggtggtcggctcgtcggcgatgagtaccttgggtcggttgatgatcgccatggcgatcatcacgcgctgcagctggccgcccgacagctcatgcgggtacgacgaccacacgcgttcggcgtcgtcgagcccgacctcgcgcagctgttcgagcaccttggccttgcgctcggcggcgctgagctgcttctggtggtatttgagcgattccgcgacctgtacgccgagcgtgaacaccggattgaacgcggtggacggttcctggaacaccgtgccgatgtattcgccgcggatgcgttgcagcggcgcgtcggcggccagcagatcgatgccgcggccggcggcgtccttgccgtcgccgcccggaccggagtccggcccgtcatccacaagggcgtcgtcgaggtacgcgtggcccttcacgctggccaccgacggatcgagacggggcagcgccatcgccgtcaccgacttgccggagccggattcgccgaccagagcggtgatgcgccccgggaacagcctgaggctgacgccgtgggtcacctcccgctcgtcgaagctgacggccagaccgtccacggtcacgatcgcgcgtggttcactcattggaagctccttggatgcacaagcgttggaatgcgtccggcgcgcgcgccagcggaccatgccgccggcgcgcgccggatgcggatgccggctcagttcgcgctggcgagcgagacctgcgtgtagtccgggtacgccgggaagttgccgatgacgaagttggtcacgttcgatccgtggatgaacgtgttcttcgaatagatcagcggcacgaccggcgcgtcggccatgatcgtcttgtcggcctcggcccagatcttgccggcctcggtccgatcgatggtctcggtggccttcttgatcagctcgtcgaccttcgggttcgcgtaacgggccaggttgtagttgccgtggccgatctgcgaggagtcgaacagcggggagatgttggcgtagggcgacgggaagtcgggctgccacgagctgatggccagatcgtagtcgcccttgtcgttggtcagcgtatcggaatacacatcgtcgttgagtgtctggatgtccaccttgacgccggcccgcttgaggctcgtctggatcgaggaggcggtttcggcctgagcggaggtggcgatgagcttgagggtcggggcctgctcgcccgactccttgatcagctgcttggccttgtccacgtcgccggtcggatcggccttgtacaggtcgtagtcctcgcggccctcgatgccgggcgtaatgagcgtggtggcgaagttgccggcgatctcgccgccggaagccgtctggtaggccttcttgtcgaccgcgtactgcagcgcttggcgaatcttcgcgttcttcacgtgttgggtgttgatggcgaggtattccagcgcgccgtcgccgctggtggtcagcagcttcttgtagttcgggttggcctgcgcctgcgcgagctgcgcggccggcacgaatccggacaggaacgagttcttgccttcaccggtgccctgcatgatcgactgggcggccaccgaggtgtcctgtcccatcttgaacacgatcttgtcggggcccgcggtgcgcaccggatcggtcttcttgtcccagtaggtgttgcgcacgaagacggcctgcttgccggcctcgttcgactcgaccttgtacgggccggaggccaccggcagcttgccgtagccggacgccgggcccttgccgtcgggcacgggggtgaacgcggcgagcgagacgacccacggccagtcgccgaacggcgcgttgaggtggaagatgatggtcttgtcgttcggcgtctcgatggagctgagctcctggccgtcgaacgggccgtggtagtcctgcgcgccctcgagcagcgtcttgtggtagctcaggccgccggtcagcgagtcggcgaaggaacgctccagcccgtacttgacgtccttggaggtgatgggcgtgccgtcggagaacttgagcccgttcttgagcgtgtacgtccacgtcttgccgtcgtcgctcgacttgccggtgtcggtggccagatcgggcacgaccttcgtctcgcccttgtcggtgatcttccacgcggtcaggcggcggaagatgttgccgttcgtggtggtcggcagaccctggctcttggccgggtccagatccatctccgtgctggacagcagcacgttcagcgtgccgcccttgacggtggtgccgctcgccgagccggtggcggcgttgtcgttggacgcgccgcagccggacagcgccagtaccgcggcacaagcccccgccgcgaatacgcgccatgcgttgttcttcatgatggttttcctctctatcggtgccggtccgtggagcagaccggcaagtatcgcgtgttgcggccgcagccgcactacttcgtgccgagcgcgaccctggggtcgagcaggctgtagcagatgtccacgatcaggttggcgacgatgaccagcacggcggcgaacatcgtcgcgccgaccagcacctgcaggtcgaggttcgacacggaatcgagcagcagcgagccgagcccctgcatcgagaacaccttctcggtgagcaccgcgccgccgagcagcccgcccagatcgaggccgaacatggtcatcacgggcagcagcgcgttgcgcagcgcgtgcttgaagatgatcaccgattcgggcacgcccttggagcgggcggtgcggatgtagtcctggctcagctcgccaatcatctgcgtgcgggtgaccctggtgtagccggcggcgctgagcacggccagcaccagccacggcagcagcagatgcgtgaaccagccgacagggtcgtcgtggaagttcacgtacccgccgctggggaatatctgcagcaccagcgaaaaggcgatcaccgtcagcaggccgatcaggtatgatggtgccgaaacgcccacgatcgacagcccgagcagcgtgcggtcgatcagcgtatcgcgcttgagggccgcccacacgccggtcgccacgccgatgaccagccacagcacggccgcgccgaccgcgatcgacgcggtgatcgggaagcggtcgaggatcagctggctcaccgattcgttgagacggaacgaatacccgaggcatggtgccgagcagaccacggcaccgccgccgctgccgaaggtgcgcccgacgaagatgcccgccacgtaattgcccatctgctcgtaccacggcttatcggtgcccatgaaggcggagacccgctgcagctgctcgggcgtgcacggcttgccgcacgacagctgcgccggattggtcggcagcaggaagaagatcaggaacagcgccagcgtgatgagcaggatgacgacgatcgagctcgccacgcgcttgccgatgtattgcaggattctcatgcacgcacccccttgcgcgggtcgatggcgtcgctcaggccatcgccaagcaggttgaagccgaaggtcagcaggaacagggcggcgcccgggaagatcagatacatcgggtcgaccagggcccactgcacggcgtcggagatggaccggccccatgagggcgtcggcgggttcatgccgacgccgaggaacgacaggcccgcctcggcgccgatgcgcccgggaatcgacagcgtgatgttgacgatgagcagcggcatgaggttcggcaggatctgatgccacagcacatgggcaggcgaggcgcccatcaccttggacgcgacggcgaaattgcgcttgctcagcgtcagcgtctgcccccggacaagacgcgcgatgccgggccatccgaagaatccgagcactagcgtcagcagcaccggcctcgggaagccctgcggcaccaccgccgacagcgcgatcgcgaagatcaggaacgggaagccgaagaagacgtccatcgtgcgcgagatcagcgcatcgaccaacccggggaaatagccggccagcagcccgagcgccacgccgatgaccaacgagatgaccgacgagacgacgccgatgcccagcgagatccgtgagccgtacgccacgatggagaacaggtcgacgccgcgcagcggggtgacgccgaaccagtgccgggcactgatgccgccgccgaatccggccggcaccgacccggcacccaaggcctcgggatgctcggcgtacgggtcgttgccggtgatggccgacaacggcccggccagcggcgccagcagcacgaagaacagcacgatggcgccgccgaccactatcgatgagcgagcgccggaacggagaacgcgccgccgtctttccgccttcggcgcggctttcgccgtcgcatccgtcatattgtcatccccattttcacgctgaacataccgataatcatcaatccgcgcaggtgggcgcccgtgagccgggtccccctgcagccggtgtcctaacattaaggtttcgcagcaggatgacatgctgtggccttatcggttatttggatagcaggttatcaatggacggcaatcggcggataaggcatgccgcggggacatgcgggaaaaacccttcgttcccgcgcgtcacgccacccgtcattccccgaccgggctgacgtacggacgcagcagggtcgtggtgccggctgccagcaacgcaaaaatcgcgccgaccgggccgagccaggtcaggccaaggaggtcgttgaccaggccgccgaccgcggagccgatggcgatgccgatgttgaacgacatggaattcagggaggcggccagattcaccgaaccgggatgggattggtaggccacatccatatacagcacctgggaagcggaattctgcaggtacatgagcatgccaagcgccaccagcagcagtgcgccgccggccggcaccagcgaggcgaaagccagcaggcacaggcagacggcctgcacgcagtagatcggtcgaatgtgggtcagcggctcgacccccctgccccgatcggccagcttgcctccgtacaggttgctccacaggcaggcacagccgtagaccaccaagccgacgctgatatagcgttcgggcacaccgatttcgtcgcgcatgatcggcgagagatacgtgtagaagacgtaggaggcggctgcgccaaagaccacatccgccacgccgagctggatgcggcggtcgaagaacagacggaattgcctcaggaaaccgatcttcgccggatgtgagttgcgtggcagagacactgccatcgatgccatcagcacggcggtgagcaccgaaaccaaggcaaaggtgacacgccagccgaaagtattggccacccaagtgccggccggtacgccgaccacagaggcgatggagaaacccgagaatacccaagcaatgaacttggtgcggtatttgtcggtggtcacgtcgggcgcgaaggtcatggagatggccaccagcgtgccggacaccgaggcgatgagcagtcgggcgatgagcagcaccggatagttcggcgcgaagacgcacaggatattgccgacgaggaacacgcccatcaacgtcagataggtgagaaagcgcgggaatcgggcggataatgcggatccgagcggcgtgcagggcgcgtacacgaatgcgaagatggccaccagattacccacggtcacttcggagaccttaagtccggatgcgatgtccggcaggatgcccactaccacgaattcgctcatgcccagcatgaagctggcgaagatcaggatggtgaccggcagattgaagaagcggtcggtgcgcgcggtgttcgcaggtgtgttcgtcatgggtgctctcttgagtgctctcgctcgtactacaagctgattcgtcggttacgtcaatcgtttttcgtatcaactcagcgacaacactattcccacctctgcccgctacccaccaccacgacacgctatagaaaaccccgccgatgaccaatcatcgacggggttcggcacatgtgcaacgcttgcgattacagcttcggcagatacttcttcagctcgtaaggcgtgacctgctggttgtactcctcccattcctggtgcttgttgtccaggaagtagccgaaggcgtgttcgccgagcacgtcggccacgaagtcggatttctccatgatcttcagcgcctcgtccagcgagcgcggcagcggctgaatgcccatagcctgacgttcgccgtcggtgagctcccacacgtcatcactggtgggttcgcccagctgcatctgcttatcgatgccatcgagaccggcggccagcagcaccgagtaggcaaggtatgggttggccaccgggtcgagcgcacggaactccatgcgcgcggagttgcccttgcccggcttgtactgcgggatgcgcagcagcgcggaacggttgttgtggccccagcagatgtagcttggtgcctcattgccgccccacaggcgcttgtacgagttgacgtactggtcggtgaccgcgcagatttcggccgcatggtacaggatgccggcggcgaactggcgggcggtcagggacatgttgaactcctgaccggcctcgtagaaggcgttggaatcgccttcgaacaggctcaggtgcgtgtgcatgccggaaccaggcgcgtcggccaggggcttgggcatgaagctggcgtgaatgccacgctccaaggaaatctccttgaccaccgtacggaatgtcatgatgttgtcggccatggtgagcgcgtccgcgtatcgcagatcgatctcgttctggcctggccccgcctcatggtgcgagtattccaccgagatgcccatttgctcgagcatgttcacggtggcgcggcggaagtccatgcctgggctgcgcggcacatggtcgaagtagccgccctcgtcgatcggggtcggggccttggaccagtcgtcctggctttcgaacaggtagaactcgatttccggatgcacgtagaacgtgaagcccttgtccttggccttggcgagcgtacgcttcaacacgtgacgtggatcgccgagcgaaggctcgccgtctggggtcagaatgtcgcagaacatgcgggcggtaccttgcgggccaccgcgccacggcaggatctggaacgtcgcgggatcgggttgaacgatcatgtcgtcttcggacacgcgggtcatgccctcgatggcggaaccgtcgaagccgagaccctcctcaaacgcggcttccagttcggccggagcaatcgccacggacttcagtgttcccaacacgtccgtgaaccacagacgaataaagcgcacgtcgcgttcttcgaccgtgcgcagcgcaaactcctgctgtttatccatagtcgcctatcgttccataaccgtgttacgaggggcgttaacatctcactgtttgtcacctgcgagtcgcgagatttcatcaacatgccccggtccgcatgtcaggcatggttcgggcccatgccggcacggcactatggtagtgactatgagcgaaccggcgattcgatcgcgatcgccaattacatgggtggcaccgacgaattcgatcaggccattgcctcgttcgccgtcagctacgccgaacagaatgatgaagactacaccgtcttcaaaaagctcctcaaatccggcgaccttccttgctgagccgttaagcggacagcccagtgggctgtccgtaggcgaggcctgagtgaagcgatagctgagcaaaggtagcttaacagtctcgctaaggcgagtcctttgcctacttcgcgactgcgagcgcttcctggagcgtgaacgcacgtgcgtataacgacttgccgaggatggcggaatcgacgccgatctcggccagttccttgatggcgcgcaaatcgtccagcttggagataccaccggaggccgtgaccttggcgtcggtgcgttcggcgacttcacgcagcagttggatgttcgggccggacatcatgccgtccttggccacgtcggtgaccacgtaacgcgagcagcccacggagtcaaggaacttcatggtctcaaacaggtcgccgccttcgcgcgtccagccgcgcgccgccagtgtgtgaccgcgcacatccagaccaacagccacacggtcgccgtacttcttgatgaccgaagcggtccaatccgggttctccaaagcggcggtgccgatgttcactcgggcggcaccggcctcaagggccgcgtccaacgaagcgtcatcgcgcacgccgccggacagttcgatgttcacgcggtcgccaagctcatgaacgatttcacgcagctgatcgcgattgttgcccgtaccgaaagcggcatcaaggtcgaccaggtgaatccattcggcaccggcctcaacccaggtacgggcggcctcaaacggcgaaccgtaatcggtttcggaaccggattcgccttggcgcaggcgcacggccttgccatcgcgtacatcgacggcgggcagcagagtcaacgacataagaagagcctttcttcagttacttatacataatttgagctctctcgtcagaggggagcttcatgctttttacagcgtggcgatccagttcttgaggagctgggagccagcgtccccggacttttccgggtggaattgcgtggcggacagcgggccgtgttcgtaggcggccacgaaacgcgaccggccgtacgagcaccagctcacgcgttcgggcgcaccgctcagatcaatgtcgaagcgggacgtatccgccggcttcacttccatcgcggcgtaggagtgcacgaagtaaaaccgttcattctccacgccgttgagcagcaccgaatcgggggcggcctcgatcgtgtcccatcccatgtgaggcaccacgtcggcgtccagcaggttcaccgttccgccgatcagcccgatgcccgcggcatgggccccgtgctccagaccgtgttcgaacatgatctgctcgcccacgcacacgccaagcaccgggcggccggcgcggatgcgatcatagatcacacggtcgccgtcgaccttcttcagtccttccatgcatgcggcgaacgcgcccacgcccggcacgaccagaccgtcggcctccaacgactgccggtagtcggaggtgagggtggtgtcgacgccaagattggcgagcgcacgcaccatggaacgtacattgccgaaaccgtaatcgaaaacaaccgctgtggtcatattctctcctatcccctactggttggttggcgtctattcgatgcgggagccgcgtccgccacgcccacgcttggtatggttggcgagaatctgcatcgcctggtcatggtcgagtccagcggaatccaccacttcgaacccttgggtcttgagttggttcagggttacgatgccgagcatcaggtcctcgacgaagcgcggtgtggaggtgaacagcacgggcggcgcgaaactctgtccggcctctccctgcacgtacatggccacttcgagcttgtcggcacgattgactgcaagaatcacggccatgccggataccacggtggtcaggtccttggctgcggcttccgggccgtcgccgtccagattcttcagcaccgcgacggccccctgattggcaccgacgcatgcggcggagatgtccgacagctggcagaacgcggccaacagttcagcggaggcaagacgggtgacgatcagcgccaccttcgccttgttacccaacagtccagcgagttcgttgtcgaagccgagcgaggggtcgaccacgtcggccatggcctcattcaccgcatcagcgaccgacccggtgacgtcgtcggtcataggctggccggaatcagcggaagccttatcagccgtatcatcattcgcgtcggaatcggacttcgctgaagcagcgtccgccgttttatcggcatcactggtatcactggcatcgccggatgccgaatcgtccgcgaattctttctcgaatccggcgagcgcggcctcaagctcctcgtcggagaagtgcgattcgtccggatcgaacttgtcgtcggccatcacagggctcccttggtgctgggcacgccgtctacacgcgggtcgatttccacggcgaagcgcagcgcacgggccagcgccttgaattcggcttcggcgatgtgatgcggatcacggccggcgagcacctgcatgtgcaggcagatgccggcgtggaaggcgatggattccatgacgtggcggaccagagagccggtgaagtggccgccgatcatgcagaattcgtagccttcgggctcgccgctgcacacgcagtacgggcggccggaaatgtcgaccacggccttggccagcgcctcgtcgagcggcacggtggcgtcggcgaagcggcggatgcctttcttgtcgccgagggcccgcttcagagcttcgccgaacacgatggccgtatcttccacggtgtggtgcacgtcgatgtcggtgtcgccgtgggcgtggatggtcaggtcgatcagcgaatgcttgccgagcgcggtcatcatatggttgtagaacggcacggatgtatcgatatcggttttgccggtgccgtcgaggttcagttcgaggtcgatgtgtgattcgctggtttcgcggacgatgtgcgcggttcttgccatcatgtctcctgtgtgattcgtcatattggattgcggcgggactcgaatcgcttcgggtctcgccgcaatcggaaagaaacgtcccttatgctgcttccactatacgaagcgcttcaacaagggcgttacggaaggtttccatctcctcgtcggtacccatgcacacgcgcagccaaccgtccggtccgaccacgcggatgagtacgccgcgcttcaggagctcgtcgaagatggcttcgcgcttgtcgaagtgcccgccgaacagcaggaagttcgagccggattcggccacttcaagcggctggtccttgtaggtctgttccttgagccatgcggcggtggcctcgcgggtttcgcgcagatgctcgacacggctcagctgttcatcggtgtgttcgaaggcggccagtgcggcggcctgggtcacggcggacaggtggtacggcatacgtacgatgcgcacgcagtcgatgatgcccttggatgcggctaggtagccaactcgcgcgccggcgaaggcaaaggccttgctcatggtgcggcttacggccaggttcgggtggtccttgatcaggctcacggcgctcggggtgccgggcttgcggaattccacgtacgcttcatcgatgacgagaatcgggtgcacgccctcacccgcgccggccacttcggcggtttcgcaggcggcgagaatacactcgatatcctccatcggcaacggggtgccagtcgggttgttcggactggtgagcagcaccatcgagggcttgacctcggcgatggcctcaagcaccttgtcgacgttcaacgtgaagtcggcgttgcggtgggcgagcttccaaccggtgaaggtgtcgcgagcgtactccgggtacatggagtacgtcgggtcggcaccgagtgcggtgcggcccgggccgccgaaagcctggaacagctggagcatgatctcgttggagccgttcgcgccccacagctcgtccacgtccagacgggtaccggattcacgggccaggtaatcggagaatgcctgacgcaattcaatgtgctcacggtccgggtatcggttgagtgtgggggcgatttcacgcacacgcttggcgatggtgtcgcatacggccgggtccggcgcatacgggttctcgttgacgttcaggcacaccggcacgtccagctggggagcgccgtacggctcctcaccgatcaggtcgttgcgcagcggcaggttttcgggaatcgagctcatcgcagaccggctcccttctcctgctcgcgcagggtggccttgtcatacggatccttgacgaagcgggagagcacgcactcgccgtgggcgggcaggtcctcggaaacggcgaacgcattgatacgggcggccagggccttcagaccctcctcgtcgtattcgatgacttcgaccggcttcatgaacgtgtgcacgccgaggcctgcggcgaagcgggcggtgccgccggtgggcagcacgtggttggagccggacatgtagtcgcccagcggcaccggggagaacgggccgcggaagatggcgccggcgttcttgatgcgcttgacgaccgcatccgcatcctcggtctggatctcgaggtgttcggccgcgtaggcgttggccgcgtcgatcgactggtcaaggccgtcggtcagcacaatggcggactgggtgccggacagggatgtgtggacgcgttcggcgtgctcggtcttcggcacgcgatagttgaggttctcctgtaccttgtccgcgatgccggtggagtcggtgaacagcacggagccggcaagctcatcgtgttcggcctggccaatcaggtcggctgccagcaggctcgggttggcggtcttgtcggcgatgatgccgatttcggtcgggccggcgaccgcgtcgatgcccacgaatgcggagacgagcgacttggcggtggccacgaagatgttgcccgggccggtgatcttgtcgaccgggtcgcacagcacgtcgccgtcctgcggctcgctgcccttggcgccgtaggcgaacatggcgatggcctgagcgccgccgaccgcgtacacctcgtcgacgccgaggatggcgcaggtggcgagaatggtcttgttcggcagaccctccgcatcatcgcgcgcaggcggggtggcgatggccagggattcgacgcccgcggcctgagccggcacggcgttcataatcacggaagatgggtagacggccttgcctccgggcacatacaggccgacgcgctggatcggaatccaacgttcggcgacgcgagcgccttcggccagatcggtgtagaagtccttcggcacctggttggccgccacggcgcgggcgcggcgcacggattcctcgatggcggcgcgcacttcggggtcgagcgtggtcagggcattctggatcgcttcggccggcacgcgcaggttcttcggacgaacgtggtcgaacttctcctcgaagtcgcgcagggcagcggcgccgcgctccttgacatcgtccagaatcggacgcaccagatcggtggcttcggaagtacccattgcggcacgcggcatcgcggcgagcagttcggcacgggacagtttctgaccacgcaggtcaatgattcgcatgatgttctcactcataaagccccatcgtaccaatgtgagggtcctaagcgtcgaggaacgcccatgttcacccgtatcgtgagattatcgtgcgtgatgtggattcgtgatgcaggttattgacgcacgccaaatgcccgagcggtctcatcgataatcggcatgtcatgtacggcgacgtgactcacttcggaccatcgcggaccaatggctaattgctcaaccaaggcttgcactgcgtcgctactgccttgtgcttccagctcaaccgagccatcgcggcaattgcgcacccagccctgtacaccaagtcgacgtgcctgagtcaccgtaaaataacggaatcccacgccttgcaccagtccggtgaccgctatatgtttgcggaccaaattcgctgattgcctcatgatgctcagttcctaatccatcgttcgcagcatcgggtagaggctcaggaatcgccggtatgcgtcggcatatgtgcgtgcggtgtcaggattcggctggtatacagtgcattcgcatactgattgcagcaggtctggtacattgaataccaacgaggccattgccactgctggcagaatatcggcattggcgaacacttcgatgggatgctccaacacatcggccagaatctggcaccacgcattttctctggctccgccgccaatcagggaaatctcgctgggtttggcgtcaaaactttccataccttgacgaatggagaaggccacgccctcaagcgcggcacgcatcatgtctgccttggtggtgtctggatcgaggcctacataggccccgcgaatattcgggttcattacggggaaccgctcccccaccagatatggcaggcacatcacaccgttggagccgggtttggatgtttcgataagctgatgtgcttccgcgtaatcgccatcagcgaatacgccggtaacccatttatgcacgtcaccggcgttgaggaatggcacggcattcacgaagacttcttccacaccaaatgccagattcgcagcaccgggcttgccggtgaacggttcgggcgaaacggtggcgatccaacctgaggtgccgatattgatgttgtattgaccagggcggctgacaccgctggccagcgtggtggcacccgcatcgccaatgcccgcgtataccgcagttccggcggagaaaccggtgcgttgtgcagcggattccgtcactgtgccaatgttgtcttgcggattgtgcaggtgtggcaacatggccatgtcgattcctgcggcctcgcacaattcggcatcccattggccattacggatattcatggcaccggctgtggaacaagccgccacatcgcccacgcattcgccggtcaattgggcgatcaagtagtccttggaactgatcaatacatgacgaatgcgcgcgtacgtttccggctcgtgttcacgcagccacatcaacttgggcaacggcaagcagccttcgagccggttgccaacggtgttcaggaaacgttctactccaccctgatatgtcttggcgagttgcttggcctgttcctcggctcggccatccgaatacagaatggcattgcggacgggattgagctcgccgttcaaagcaataacatcctgcatctgaccgctgaaaatgatgccacgaatgcgagtcacattgaattctgactcggattgccgcgcctgctcaatcatgtgcctggaggccgagcagaaagcttgccaccattgatcggggctctgttcccgatagtcgccgttgataataaggttaagctcactactcgcactggctacgatacggccttgcctatcaaccaaggcacccttcaacgccgtggtccctgcatcgaatgcagccacatattcctctgccacgtgctctccccttcaatctgggtcgtgattctactggttattatcgtagccgcttactcgttgcattcattaggtcgatttcacgttcattaggtcggtatgccgtaagacggctcttcaggaatggcgtaatgactgggttctgatgccgaagaccctggacccattgacctaatgaatgcaataatgacctaatgaacgagaatcacgccatcattacgcaattctttgcccgcgaaacgcggctcattgcatcgtcttgtttctaaaataggaaattgaatgaacactacgaatagtgaggcattatggcaattcaatcgacaattatgctgaacaacggcactgtcatcccgcaggtgggcttgggcgtattccagacaccggatggtgatactacagtgaacgcggtgcagacggctctggagaatggctaccgccatatcgataccgcaatgatttaccgcaacgaagcctcagtaggtgaaggtattcgccgtgctggtgtgccgcgcagcgatttcttcttgaccaccaagctgtggaatgacgatattcgcgcacgccacggcaaggatgcattccaagaaagcctcgaccgcttgggcgtggattatgtggatctgtatctgattcactggccggcagacggctggcagcaggcctgggatgacttgcaggagatttatgcctctggccgtgccaaggccattggcgtcagtaacttccaaaagcatcatattgatgagctgctgacccacagcgatatggtacctgccgtagaccagattgagtcttctccgcagttcaccaatcaggaacttatcggacatctacgcgccaaaggcattcacactgaagcttggagtccgctcggcggtaccggcggcaacctgctgagcaacccagtattggccgagatcagtgccaagtacggcaagtcacctgcccaagtggtgattcgctggcacatccagcgcggtatcgtcgtgctgccgaaatccactcatgccgagcgtatcaagcagaacttcgaggtcttcgacttcaacctatcagtcgatgatatgaccgccatctccgccatcaacacaggcaagcgcaacggtgctgatcctgacaatttcaatttctagacctttatcggtccagatacgcaaagagggaactcttcgtcattggagggttccctcttctatatgctttcgattcggccacaccctaggtgcgagagcctatgtcttgttggtttcggatatagggaaagccccttggggcgtgtgctccgaggggcttcctgtacgtgtggtgcggcggcgtgctactctcccacaccctgtcgggtgcagtaccatcgccgtgccaggccttagcttccgggttcggaatggga

SEQ ID NO: 1275 - DNA, 20961 bp, Unknown
  R157_18m  MAG No. k141_2681
cgcacagctccgatacgggaaacgtgcgggtgattccataacgactacgtatttcaggaagtgacgtgtatcacattatggtcatgtgttcagtgccgcagataggcgaagtttattcatgagccgaatagggccggtgaagcgggctctcactgcgttcataatacggcatatcgtgaacggcgttatcatcacagtcaggccgaattaaaggaggctcggtcatggtcgccgcatccacggcattcagcccgtcaagcacgatgacggccagtttggtggaatcgactggcctgcccagtgccgctattcctgtgcgcgaggatggtaacaacggcaacggcgacagtagtgccgatggcagcggcggcgacggcggcatggtcagatcgctgagcctgtggaactacttcaccatgggattcggcgcaatcatcggcaccgtatgggtgctgctggtcggtgactggatgatcgtcggcggtggcccggtcgaggcgatgatcgccttcgtgctgggcgccgtgtttctgctgccgatcggctcgacgtccggcgcggttaccatggtcgggtcgtttctgcccggagtgctggtgatgacgccgctcttctacaccggtttcgacacgattccgcagagtgccgaagaggcaagcgaaggccttgactggaagaagttcggtatggtcatctcagcttcgctgctggccgtcggcttaatcatcattggcctgcaggtgctgccgttctccccggccgcgctcaaacccacatcatgggcaatcgtggcggtgtggatttgctgggtctggcattgcgttggatcagtgcacgttcacggcgcgaatagcggtgcgccggtaggtcgcgagccgttcagtcgcgcgcgacccaaagcgtatcgaggtcgtcggcctcggtcgcctttttgcgcttgcgtacccactgttgcaggaaatacgccccatagcaggccacgatgaacacgagctcggccacgagcgcgaaccgttgctccacgtcgaaaatcaccaatacgaacgatgcggtgcacaggatgaacgccgcccaagacacgtacggatagccgggcgtgcggtatttgagttcgctggtggaatggccggactccagccaacggcgacggaacacgatctggcagtaggcgatggcgatccacaccaccacggcggacaggccggaaagcgccaccagcaccaggtacacagtcgaggcggcgatcacggaagacaggagcgccagcaggccaccggccatcgcggcgcacaaggcgagcatcggcacgccgcgacggttcgttttggcgaaccagcgcggaatcatgccttcgttgcccatcgaccacaccatgcgcgtggaggcgtacaggccggaattcgaggcggaaagcacggccgtcagcaccacgaaattcatgatgtcgcccgcataggggatgccgatgctgttgaagacgagcacgaacgggctttcgcccacgccggcctggcgccacgggatcagcgcgcacatcacggtgatcgagccgatgaagaacagcgccagacgccacagggtggtgtggatggctttcggcacggcggtttgcgggtccctcgtctcaccggcggtcacgccgatgagttcggtgccggagaacgcgaagttgacggtcagaatcgtggcgaacaccggcatgaagccgttggggaagacgccgtccttgatgagattgccgaacatcggggcatgttggtagccggcgaccgggatgacgccgaagatggcgagcgatccgatgacgatgaacgcgcagatggcgaacaccttgatggaggcgaaccagaactccgcctcggcgaagaaacgcaccgacaaggcgttcagggtgaagatgagtgtgatgcacgccgcgctccacgcccatgtgggactgttcgggaaccagcgctgcatgagcagcccggcggcggtgaactcggatccgagcgccaccgtccatgtgagccagtactggatcgcgatcacgaagccggtgccagggccgatgaacttctcggcatacacatggaaggagccggtcaccggcatggccacggacagttcgccgagcgtgagcatgaccaggtagacgatcagcgcgccgatgccatacgccagaatggtgccgatggggcccgcctgctggatggtgtatccggagctcaggaacaggccggtgccgatcacgccgcccaacgagatcatctgcaggtggcgggattccatgccgcgcttcaggttggtatgcagcgcgtgctcgcctttgccgtcatgtggcgactcggactggctgatttgcgctggttggttcacctgttccggctggttttgacggccatccgtctgaatctgcggttcctgctgcgaggacggcgactgtgccgccgtgtcggtgtcgggctgactcatgtttctctctttgccatgcgtgcgttccataggcgtcgtcgtgacggcccggaatagtatacccgcactgaggatatagctgcgctgcatgatgctgagtcaaaatcagcttcaaggggctgatttggcgtttgccggaggtctacttccgtttcaaggggctggtcaactggcggaacgcagatagaaatggcattgttctatcactattccgccgtttttaaccagtggctactttggcatcagccccttgaaacggaagtagatgttccgcaaagtcaaaatcagccccttgaaacggagataggcactcgcagcggctacttcaccttctggatacgcagcacgaacacggcagcgcacacggccatgacgatggagatggcgaacgccggcgtgtaggtgccggtcgtggtcttgaccacggaggtgatggtgggaccgactgcttggccgagcgtggtggccaagctgaggatgccgaggtccttgccagcctcttccttgttcggcaacacgtcgacgttgagtgcctggtcgatggccgagtacacgccatagccgaagccggcgatgcccgcgtacaggtacatgcccgtgacactcggcatgatccacggggtgcggcgtcccatcttggaacgcgtgtggtcggagaggttgccgaacacgaggttggaaaccaggcccacgatggcggtgaccgagttcaacgtgccgactgccacatccgggttagcgacgccgatgtccttgaacagctggggagcagcacggtggccaccacgtacaggccgctgctccacagaagaccgaaagccagaaacccgacagtaaatcgaatgttgtttgtttttccatgttctcggacatgttcgatgacctcctatggttttcgttgacgttttggttattttgtcgaccatctcatattggtggaattccgggctttttgggcgtgctgttgcctttgttgcgccgttgcgatatcggtcttgtgaacggttaatctactcaggactcaaaatacattccagcccgcggcgcgttcggtgttgcaggacagtaattcgaggatgagcgactttgatatgcagtgatacgtcagtggcggagcgctacaagtcagcgctacaagtcatggtggatgagatgtgattttcgtcgaattggtcagtgcttttggacaataccgaattggtgtcgaatcgggtatatactgggaccgtcttccaggcggaaatgtggttcagaaggaatgggtagaacatcatgaacggcattgcacttggcacccggctggggtttgccgtatgcgtgctgctgatgatgccagttcttctgcccgtggcctgtgcggagtcgttgcggcagcgtttggtcggtgcgtggacgatggctgcctcgcgtgggcgggtactgtcgcgtccgatgccgatggcggacatcatcgtgttgatgacgttgttgttgtcgttgagtgccactggctgctggattgccggcggtgattcgcagactgccttggccgccatggtcttcgtcgccacggtgacggctgtatgtgcgtgctgcgcggtcgtgctgttgtcgttcgtaggttcggccggccgccgaccgttgcccgccagcttccgcttcgatgcgacggtgatgaacgccgtccgctcatgggcccgcccgcaatggatgccacgctggccccgttacacgctccccgattcccgaatctgatttagcttctcttttcagctctcatcgttgcgccccacggtctaacgcaattgtgttgtttaggcgacatgtggatacgcatttatgcgatgttcttgtttccccctaatttggttcccctctctgaggggagctgtccgcgaagcggactgaggggagttcccagctgttgccgtaccagattgcagttgcttgaactcggaaacacatcccagattcgtcaattcatcaggaatcccaatgaacttcatcaatatcctcaaccacatcctgcgacccctagaatgggttgtcgcccaactgctcaccctgtttcaccacgccctggtcacgtttggcatgactgctggccccagccccgcgtggggcatcgcgatcatgtgcctcgtgctcgtcatccgcatctgtctgctgccgctcttcctttcccaaatgcgtgcgatgcagcggatacaggtgctccaaccgcagattcaacgcatccagcacaagtacgccacgcgcaaggacccgcgttccaaagaagccatgcaacgtgaaatcatggccttgcagcagcgacataacgccaatccgcttggctcctgcctgtcttcgctgatccaagcgcctattctgtgctcgctgttctacacgctgcaatccctgcccgcaatcgccgatgggaatgcggaaccgttgggcggcatcgaccacaccatggcgggcgacatcgaatcatcgtccatattcggcgtacgcatcgccgactcgttcggcacggttgcctcgccgcagtcacgcatcatcatcggcgtggccgtggcgttgatgtgcctgacgttgttcgtgatccagtggatgcttattcaccgcaatacgtcgaaagatgctatggtctcgccgcaattccgtgtgcagaagatgaccgtgttcgtctttcccgccatttacgtggtgtcgggcgccacgttgccgttcggcgtgctgctctattggttgaccaacaatctgtggaatctcggccagacgctctgtcaattgcgatggttccccacgcccggttcggcggcaggcgagcgcaaggtcaggcgcgactacgagcaggacaaccgtcgccgtgccgcagccggtctgccatccctagaggaggagcgtgcgatggccgcccgcgaggaggcgaaagcccgacgcgagcgcgaaaagtcggccgccagccgcaaccgcaaacaacacaaaaccccatacctcgccaagcgctcaatcgtgaaacggtaacgcactactcgtctactggctcccctctggaggctgagccgttaagcaaacagcgaagctgtttgtaagcgagggcgaggcgacagccgagctatgtagcgcggtcgccagaccgtcttcattacggctgaactggcgccgtagatgactgaggggagttttgctaaggtcgcatgatgttgtcacattgtttttcaatggttttcacttggcgtgtattgactgattacattggagtacaacgcaattgacctatacggataaatttcgcagctcaaagatggggaatagtgtgcgtgctgtgcgatgctccgaacgagcatcttgacgttctgcacgaagcatgaggttcctgccccaacgatccggcatgcagtcttgaaagatgcgatgcatcgcattatgctcggccgggaacgttccgggggagaggggcatctctggacagagggatactgcgtttgaagagcgcatataggccgtatcgtatgtggaatgtgccgattcgatgccgcgcctgatactggtgaataatttcccgacggtgacgtctgtgccgttgagctgcagggtgacgattgcttccatgatgtgttgcgcctcctgctgtgctatcgaatacgtttcggagtgtcttcgtcggcgcgtagtttgccgatatctgtgttaagagggtccgtcgcttgctgtacgccgcccagcagtccaagcagacgaacaatgcggaggaagttctcaaagctgccattacccgtacgcagcattttggtgaccgttggcacggataatccagcccgctcggccagcaaggctacgggaatgcgctgttgtctgcgcgccaaatcgaggttggcggatatctgacgcatcgcccgactgaccgggattggtgtgcgtgtcggcatattggcacctcctatcccaaattttaacataaataattctttagcttatagttacatagctaaagaattatttatgtaaatttgtatggactagccttatgcggaggttacgccaatatacgacaagaacgaaccaacgtcagcccggaatcttttcgacgatggtgttcaaggtgtcgaaagtctcatcgatttggtccactacctgcttgccctggttgaccatttcggtgatctgttccgtgcggggttgcggcagcgcataaatcgacgtcttgacgcgcttcaagaccgcaccggcgtcggacaggtcctgcttgatggaagcgattttgggaatggaaagcgtgccgtcggagaagttcatgccggacagcagctcttcgatattgaagtccaccaacgtgccctgcgcggcactgtcgattttgggcagggcgttggtcgcggcgtcggcggccgcgcccagcatgccgcgcaccgctttcacgtccgaaccgtaatatggcacgtattcggcggcctgccatagcgcgccctgggtttcgtcgtgcgccgtgacgatgtgactgccagcgctgtccatctgctcaagcgcctgcttgaagtcgccctgcccgacggattgctgtgcttcagccgcatattcgcccgcctgctgcgcctcgccgatcacccgttgtaccgactgccagaatagccagccggaaacgcccaccgccagcagaatagcgaccagtattgcaataacaacagtgccgatatgtttgcgcttagccataggaccaatgtacctgccactctgacaagtattatttacggattagcatcgtggcctgggcctcattctggctcatcggtatgttattggcgatgcgtagcggtggttatgcaagtgtcttttgattgatatcggcgcatgacaggtgaataacgtgtagcgggaaagcacgtctatggtcatattggcgttctcggcacagcaataaccgcggtattttttaaagtttgccaattcttccatctggtatgtgccgaacatggtgctgtcatgcgattgcttgacggcatattgcctggcttgaacgatacatcccattatcgcttgcggttgacgttgcgtaaacgtctatcctgacggcaacgccgcgaaacacgcacggcgggtagaggataatcggcttcaagggggatgatcgatcatgaacgagaacgacaacacggcgaacgccgtcaacggttccggcgcgttcgatgtggagggcaatccgctggatacgggccggttgtggcccattgatcaggcggcattgatcagcggcgtgacgacgcgcacgttgcgctactgcgacgagaccggtctggtcaagaccgcccgcacccgggcggcacagaatcaaaccgcgaccgtgatgaacgccatgccgctgtccggctcgttcggggccattcgctccgcgctggtcggcgatccgcgtttcgccgacccgtgtggtgaggcgctctacggcagcaaggcatgcgccgacttcgtcaacgaagccaagaacatccacgcacggcaaatcgccgaacggttcgcggcggaacaggatgtacggaatcagccgaaatgacagggcgtccggctccgattgcgcgacgaaccctgcgaccacgtcaccggcttaatcatccaagctgcgcgaagcggcgcaaaagatgatgagtcggcataagcggcgtagggttcagtctgcgtgttttgcacagtgagttacaggtcctgaacgttcatacgggccagctcggcgcgacgattgatcttgtcacgctgatacaagtagatgccggccagcacgatggtggatacgttgttggacaggaacgcgatgaatgcggaaagcacgacgttccacatgttgccatacgcaccgatgtccgccctggcgaagacggtaatcgccgccacaagcgacagcagcaatgtgatggcgggcaataccagaccgggccacttgctgtccatcttcgaaagcctgatctgcaatatgatgaagccgatgcagatggcgatgagaaacacgaaaaacactacggcaaatcttgtggcgccaatcatgattactctccttgcttgagctgcttgcgatattcgctgatgaggattttggcggtgtcgaagtcgagcttgtcgtcgaccgcgagccgtttgatgagcgcgatatacggctcgttctcgatctgctcgcccaacttgattttctggatgagccggtcgagccgaagccgaacggtggggtaggagacgtcgtactgcgcggcgacctccttcatggagcctgatgcgagcagaaaccgtttgatgaacgtcatatcctcgtcatcgaggttcgacatccacggcgggatcatcgtcgtatccatacctgcctccttcaattcacggcgggtttaataaaattaagtataccataaataatattaaaatcaaatagatatctgtttaaagtttttcgtagattagtttgaggtcgtgatgtaagaatgcgtacgcggacgcgaaggaccggcacatgccggcacgcatgtagaagcatcggtcaatcggatatgcatcgacagaaccctaaggcattgacggatagccgattcctgtcatgcgatcgcttgacagcatgttgtctgattgactctttgagtgccataattgagatggcatgcgtacgcgtcggactttatggaatgcggggacgatatggttgcggacgatgaggtgcgggcctcccatggtgggcgtcggaatcaaggtctgctgtggtttttcggcgcttccgccacattgggcgtggccgccgtcacggccatcacgtgcgccgtcatccggtacggctggaatgacggggagttctggaagctggtggtgccggcggccgtggcgttggtggcggccatcgtgtgggcggcgctcggcttcatgcgtcgcgccgggcggacgcctgacgttccggccgacgcgaacgataccagcccggccgaatccaggttcgattcggcggccgcccagattctggcgatcgtcgccatcaacgtgtggggcgtcatgttcatcgtcttcgatacgttccagattgacccgtggcggtacgtgacatgggtcgtgcccgtgatgttcctgctttatctggcggtcttgggcatcggcagggcttgtttccgcaaacgacagaaggatattcgcttcccggaggaaccaagtatgacgagcagccgtccatcatacttggcataggcgggcagttggacgatgccgggcaggtcctcgttgtcgctggtctggttgagggcatattgggtgccggtcatggaacgctactggaatctgtcaccctagggtgtcactttccgtgtttacctcgacctgccatgcccctggcgcgaaggttgagaaaaacggcgtcaactttcacgacagggggctacctcatgacttggcaaaatgccggcacaccgattcaggcgctcggactggtgaaacggacagggttcgatgctcgaaccgcctcccgacccgcaaacacgcagactgttctcaataatgtttcgttggatatcgatggagcgggcttgacggcgatcgtcggtccgtccggcgcaggcaagacctcgctgctgtatgtgctgtccggattggacaggcccgattccgggcgggtgaccatcggcggtaccgacgtctacgcactgaatgaggaacggcgttcgcggttcattcgcgggcatatcggtttcgtgttccagcaatacaatctcgtgccgtatctgacggtcgaggagaacgtgatgttgccgctctcgctcgcccatcgcaaggccgactacgtgcaggtcacgcagctgctgtcccggttcggtcttcgccagagggcgaagacgacggtaagcgccctgtccggtggcgaacagcagcgcgtcgccctgtgccgtgcgctgctcatgcgtccggcggtggtgttcgccgacgagccgaccggcgcgctcgacaccgcgaacagcgagcttgtgctgcaggtgctgcgcgagctggcggatgcgggctccagcgtggtcatggtcacgcatgacacggatgccgccgctttggccgaccacgtgatcttcctgcgcgacggtcaggtcacccacatcgctggcagactcaccgccgagcagattgccgatggcatacgccgcactttcgtaccggccgggtcgccgccgttggttgcggcggcgcggtctgtcggcccgatgatggtgaacgcccagcctatccaatccgtccaaccgggccgaccggtccagcgcgtggcgtatccgcagcagcggaaggaggctcatcgtggctaggtatgtgctgcgtgtgttccgcgacaatgtcacgggatgggtacccacgattctggtggtcgcagtggtgaccacgctggtgggcatatgcatgaaccaattcgtgtggacctcgtctccgtcgttcacattggccgcgcggcaggcgggtcttgatccggccgagttcggcatggtgtcggtcacgatctatgtggtggtgtcattactcgcgttcttctcgttgacggtggtcggctcggccacggtcaaccgtattcacagcacgttcgcgcaatggcggcttatgggcgccagcccgagtcaggtgcttgccagcatgtggatgctcgtgggtgtggcgagcctgttcggttccctgatcggctctctggctgcagtgccggccagcctgctggcggttcccgagttcaacgccatggctgcggaaagcttcgccgatggattcggctcgttcgcacctcctgcgttcacgccgtcgatggccgcgtggctcggatccctgctgttgggtgtggccacgtgcatgttgggcgcgtccatcccctcgctgcgcgcagcgaagatccgtcccatcgaggtgattcgcggcacgggagccatcgggatacggcacggttggcggtcttgggcgcactgggcacttggtttgattgtcatggcggcggcgctggcattggcgttctccggcatgggcacgccacgggcgctcgcgttcggccaggaggcggggcagacattcaacagcgcgctgtgggccggcatcatcgcctcgttcggcatgtacatccttgtcagcatgctgattccgattctgttgggcatcggacgtgtcgtgtgtcgcctgtgcgggtccgcgaccggcgtgctcgccgcccgttccgccgaggcgaaggccgccagcaacacgaacacgattgccccactcgcccttgccatgggactgtcggtcaccctgctgacctgcgcgcgatcctatggccggatactcgccttgggcggccatccgaagagcctgaactacgcggactcgctgctgctcataacgatgctgtgcatcgtgtccctggccaccagcatggcggtcatcgccctgtcgaaccgcagcatggtcgccgaccaggcattgctgcgcagcatcggcctgtccccacgtcgtgtgatccgcatgtatctctggcagagcctgcagctggccgccggcgcggtcattctctcgctcatcccggtcgccgtcagcgcaagcgttttcgccgcaagatccgcggcgctcgtcggcatccccgtggccgaaatcccatggccgggcgtaatcggcatgggcacggcctgctggctggcattgttcctcatccagttcacgcagattcgccccgcgctacaccgcagcgtggccgacacgatacgcacatgctgacatgcacgcaacatcatacaaaaagagccacaatgggagccatgaaaccgcaatccgcgcaggccaataaggtcacggtcctggccgtgccactggtcatcgccgtggtcgaatgtgcagcgatgctgtgggagcatgcgatcggagcgccggccgacaccatgtatacgtttgccaaagatccgctgggattggctctgctgctggcgatgaccatagccagcagtgcgatactgcttgtccgttactggctgccagccgttgccttggcgcttgaagcggtattgttaatagttgcctcgtactggcggttggactcaatcgtgatgattcagacgctcgtcgcctgctatgcgttcgcccggacagcgagggggcgcgggctgtgcgttggaggcatcggcatgatgctgtcgatgaccgcgtcggccatcatggtgcatccggacgttctcgcgaccgaatgggtgagtcgagtggtaacgttggcagccgtgggaggcggcgcgcttgcagtacgtggcaggcaacaggccaaggaagccgaacacaaagctgccgaggaatgccggcgggcagccgagctggccttccaacgcgatgccgcaatacgccgttcgcgcatagccggtcaactgcacgacagtgtgggccaggatctgaccgtaatcatcgcactgtctgagggtctggccggcaaaaccgatgacccacgcgtggaggatgcgctgcacggcatcaacgaaatcgcacgagagagtctgggcgacacgcgcaaagccgtccgcgcactgaccgagttcaatggagcggcgaacggtgacgatacgcacacccaagaatcagaccagcattcatgggatgacattcggccgattctcgcgcacgcacgccggctgggcatcgtcacggtgttcaccgagactggtacgcgcgccgatgacgaagctcaggctgatttgtgtttcgatgtgactcgcgaagccatcaccaacgccatacgtcacggacagaacgtggtgcatatcagcatcgcctggaaccacagcgagaacggcaccgtcgccgtgattatccgcaatgacggcagtcccgcgcgcaaggacgcgcgcaaggatgacggtactgggctcgtccgtctattccaccgcgtcgaatcggcaagcggcatcttcgaatacggtccaaacgaagacggcgaatgggtcgtcgaggcgaccatcccgtccaacggagtgaacgaaaaggaccacaccgcatgattcgtataatgctcgtagacgaccagcgtttcgcgcgacttggcttccaactcatgcttgacgatgcttccgacatcgtcgtcactgcccagtccgctgacggccgatccgccatcgagacgctcgaacagctcgccgttcagcatcgtccattgccgaatgtaatcctcatggatgtgcggatgcccggtatggacggcatcgaagccactcgccgcatcaccagacgctggcccaccatcagcattctcatccttaccacgtacgacgaggacgattacgcctttggcggtctcgacgccggagccagcggcttcctgctcaaggacgtcaccaagcacaacctcatcgacgcggttcacgccatcgccaacggtgacgcaatactcaccccacgaatcaccagacaagtgcttaaacgaggcgttccgcatcccaccagcagccagcgccagcaagaaatgcgcaaagctttcgacgcactcacccctcgccagcgtgaaatctgcgcactcatctccgaagggctcatcaacgaggaaatcgccaatcaactcaccgtcgaacctgcctccgtcaaacgtgccgtgacccgtatcctcgcaactttgggcctacgcaatcgcactcaaatcgccatcggctggttcaaagcaggcatgtagacctgctatttgctcagcagctcattcaagcggattgttgttacgaatgcgactaccgcacgcccccccccaagacggattccatgttcgacaccccattcggcaaggtgggcttggcggattttagtggtggttgcaacacctgtgtgttttgccgctcttgatggcggtcttggattggtgcgatcgtatcatgctgtgttgatgagttcgagtattttctcggatggtttcctgtagccgagtgttttgcggggccggtcgttgagttcctcggcgaccgcgtcgaggtagtcctcggggtatgcgctcaggtcggtgcccttggggaagtattggcgcaggagcccgttggtgttctcgttggtgccgcgctgccagggtgaatgcgggtcgcggaaatacacctgcatgtccagcgtggtcgagatgcgtttgtgcagggtgagctcgcttccctggtcccaggtcagcgagttcctcaggagcttgggcaggtattgcattttccggatgacggcctgccggacgtgtttggcgtcgtgcccgtcgggcaggtgcaggaggatcgtgaaccgtgtcgagcgttccacgagcgtgccgatcgcgcttttgttggccgcgctgcagatcaggtcgccttcccaatgaccgggtatcgcccggtcctcgacttcggcgggccgctcgctgatcatgatcatgagctcgcggaaacgggcctgcgcgaacccgcctgcccgtgcggccggcgttgggcgcgcccgctcctcagggccttgatgacgtcctttttcagttcgcctttggcctggacgtagatggcctggtagatcgtctccgcgcacacatgcatagcatcattatccgggaaatcggcgcgcaggcgccccgcgatctgctcgggactccaatgcgcccgcaatcctgcacgaatgtatgcgagcaggccgggcaccgtatggatcttcgcgggcttgggtcgtctgggccgtccgcgctcatctgctggggccggtacggctcgtacatgccggtcgcgggattcgtgttgcgcaccagctcgcggctggcggtcgacgcgagacgattgagcgtgcgcgcgatcccgcgcacgctcatgccggccttccgccagtcggcgatgctgatgcgctcgtcctggctcagatacctcgaactgatcttttggggaatgtccacggtggaacgataccagtccaccgatggcttctcgttcctgccgttcgatcgtgtccttccgttgcgccacaccttgccggtgcgtttggacacgcccaccgcccgcgcggcctgcgtgaagttcatgcccgcctccagcagctcggcgtagcggcgccgccgcgccgcgcacatctcgccacgcgtcgcgtactccacgccctcgaacacccacctgtccacctggccctcccatcagtcagccaggcgttgcgacgatcactggaacccgcccttcgccattttttttttggggggggggagagaccggtggcggcaagtgtgcgatgggagtcggatgcatcgtccttgcggatgatgcgcaggttcattcctttggccgatggatagtttcggcgaatcgagggagcatggagctatcgtcatgcgattggcctgacatgttgttgcgtttgcggccgctgaagggtgaaatggcggcgacattgcaacgcgcgggtctgggcaaggcatcctgcctttgccttcaggcccgcctttcgtgaagggtgattatgccagttatatcggctacgaatctctcgatcgggtacaagggttccccaatcgtcagcaacattaacctgcggttgagcacgggtaggatcatctgtctgcttggggcaaacggcgcgggcaaaaccacgttgatgaagacgctactcggacggataaagcccgtgagcggagaggtcacgtacacagggacgaatatcaatgagatgtccgcggcgatagaccatcccagtttctttccttacctgagtggtagagagaacgtcgaggtggtctccgcgttctggggtctggatgtggacccggaggcggcgttggacggtgtgggcatcaatcgcgcggtgtatgggcggaaggcgaaggactactcgacgggcatgaaagagcgtctggagctgtgcctcgcccttgtgccgcatccgaggttcctgttcctcgacgagccgcagaacggtctggaccccgatggcatagcctccttgtccgaaacgcttcgcgcctaccgggacaaggggaactgcgtcgtcatctccacgcatctgcttcatgagatccagggcgtcccggacgagtgcatcatgattcgtcacggccgggccgtgcaggtcacggatctgaccggggtgaacctcgcggatctgtatcaggggaggtagggtcttgaacgccgtttcccctgttcgcgcgttggtcgcctactactggaacacgtggtatttcctcgccgcggtgtttggggccgtctcgtcccttctgctgggtgcgtggatctcaagcgcggcgaacggaaccccgataaccggagggtattgcgtctatttcaccgccacccagccgttgatctgtctttcgctgctcttcgcatgcgatgccagggtcgcgaaggcgcactacggtggcctgccgcgccacgtgtattccgcgtggacgccatgctcgctcagggccgtgttccgggccctgatcctgacctccgtgaacctgattggcgtactgtgcttcgacgccatcatggtcctgacgggtaccggaatgcacccgcatctggcagctgtcctgtgcttcgtcgtgctgcagagccttgcgacctccctgatctactcgatcgtcgagatcgccgccgatcccagaaccgccggaatcgtctcggccatcctttgctatgcatggattctcctgccgggcgaccttcccgactatgcgacgccctacgtcgcgaacgccctacggaccgtcgggctgaacctgaacggcaccgtgatgtcgccggcggaagcggcgagtcgagcgtccgtcggccccgtgatggtcgtcgtcccgatcgtggtgcttttggttgcctatgtgctgttgagccggttccgtcgcgaaggagtggagaggaaatgaagtccctattgcgtattgagcgtgtggcggtgatccgctggtcgacgctcgccttcgtggccgtgctgctgtttccgttgttctttttgcgttacgggaacacgggtgcggtggtgcagtcggcgatggtgatggcgcttcccgtaaccgcggccggtctcgtcttctcccatgcgagggtgccctcctcgtaccgttccttcagcatccacgaccggctcctgcttcgcttcagcgtgaagtcgctgtcgctcggcgtcgtgatcaacgtctgcctgactttgctgtacgggcttgccgtcgggctcgtcgtcaacgagccgctttcgtcgcgtaccattctgatgcttgcgttcaccgccgtcgtcctttccctggcatgcttcgttctgcgactctatgccagtcctctcgtcgcctggaacgtcgtcgccttcttcatcgtcgccggacttacggtgagttccggcatgttcgaggacgcgccgatgctgtacgccgtcataccaaccacatgggtgttgaacggggtgaaattcgccggttacgtgattccggtcggcgtcgccatcgccgcgataagcgcatgtctgctgttcaaggcggtgaaacgtgtctgaccgaagccgtatacgggtgcactgtttcggatcgtaatcgtccggcagccagctttctcgccgtattccgttgcgggagtgagcctgccgctttccgctgatcccgccatacaaagtcgactccgcacgtcgcgagtcttcgccgaacactatcattggtggcgcagaggtcgtgtgggaatggccgtgacaggggaggggtattgggcaagcttcgggcgccgcgttcggcgcgtggccgtgtgatggcggcggccggcatggtgatggtggggtcgttgggtatccagacgtcgtcgtccctgtcggcgtcgttgttcggcgcgttgggaccaattccggtcagttcgatgcgcatgctggtcgccgcgatcgtcattctcgcactcacccgcccgaaactggctggccggtcgaaaggcgaatggctgggcatcgtaatctacgggcttgcgatggcggcgatgaacgtctgcctgtactcggccatcgaccgcattccgatgggcgtggccgtcaccctggaattcctcggaccctgcgtggtcgccctggccggttcgcatcactggcgcgagggcctgtgcgcggtggtcgcgctggtgggtgtgggcttgatctcgtttacgccgggcggctacttcaatccggccggctacctgttcgcgctgggctcggccgtgtgcttcggcctgtacacgctcttcgccgaccgggtcggcaaggcaggcaccgggctcgacgggctcgccctgtcggtcacggttgcggcgctggccacttcgccggtatccatcactcgcgcgccgcatgtgtcggccgcccagtggggcgtcatcgcagcctcggcggtgctgggagttgcgattccctacacgatggacacgttgtccgggcgtatcacgtcggcgcgcgtggtcggcacgctgttctccatcgaccccgccatgagcgtgattatcgccgcgctgatattgcgacagaccatcaccgcggtggccgtgatcggcgtcatcgtcgtctccctcgcgggtgccctgctggtgtggtcatccggcggcgatgccgtaaacggatgattcttgtcatacgattgcttgacagcatgttgtgaatgcttgagccccgctcataccattcaaatataatggtttttcgcatgattcgttagcgttgacggatcccccaataaggaggtaatcatgtcagatcctcgcgttgaaggcggaagattgtcggtcgcgcccgaggccgtatatacgggtgctctggtgatgttcttcagcaatctcgctatgccggacaccgatccgcagggcaggcccatagtgctgtggttcaacggtatcatcgccgtctgcgccctgatctggggattggcggagacgatgcgcgtccgtaaggaatacccgtggcggtgggcgcgcacgctgttctacgacgtcctgattctcgtcgggctgctcatccgtaattccgattggacccggctcgtcgtgctggtcgcactggtgctatacgcgattgttacggagaaaacggcggcggaaccgcgccggtcctgactgcaagacgatgatgaaccgtcagcgtcacaggattctcgcggtatgcgcacggtggtcgacatcgacacggccgccggcagcgggcgcatgattatttcacgtcgcagacggtgaaggcgaagctggtgagggtgccggtggatttgccgtcggcgaggagctgattgatgtcgggcaggtccttgttgtcgctggtctggttgagggcgtattgggtgccgtcgggcgcggtgaagcgcatgacgggatcgcctttgctgttgtgcgtgcagctgacggtgccgtggtcgacggtgaggggccatgtgtggccgagctggtcggcgctgatgtcctgtgggttgctggtcgcggtgattttcttgctgccgttggtagggtagttttcggggtgttcgatgccgtccatgcaggcggtcagtcccagggccatgatggcggcgaggccggtggcggtgatggtttggatggcgtgtgtcgtgttggtcatgctggtttcctttgtcgtgttcggtggtggtcggggtgcttgttcgtctgccgtcaatgctggtcggggtgttcctcgatgaggaccatgtagccgtcctccaatgtggggtccatgggatgcgcgtcggcgggcggggtgtcggtgatgacgcggtagcgtacgccgcgtgcggtggtgacggcgttggcgacgatcatgccggccggtggcggggtgttggatggctgggtgagccagacacggcccgtggcgtgttcggtgaggtgttcggtcggcccgtcgtagcggatgcggccttggcgcaggacgaacacgtatgggcaagtctgggcgatgtcgtcgaggatgtgggtggacaggatcacggtgcggtcgccgccgaggctggcgagcagcgtgcggaagcgcatgcgttcctcggggtcgagtccggcggtgggttcgtccacgatgatgagccggggatccgccatgagggcctgggcgatgccgacgcggcggcgcatgcctccggagaagccgccgatgcgccggtcggccacgtccgtgagcccgacccgttcgatgagctcgtgcgcctggcgcatgcgctttcgcgtgtcgtcgatgcctttgaggacgcccacgtagtcgaggaattcgagcggggtgagctgcgggtagggttcgatgtcctgcggcaggtagccgagcgtgcgtttgagcgcacggcgggtcctctcgtccttcagatcgtggccgtccatgagtacctggcccgatgtggggcggatgatgccggcgaggatgcgcatgagcgtggtcttgcctgcgccgttcggcccgatcagaccgaccatgccgtgcggcaggtcgcaggtcacgtcgtccagcgcgcggggcttcctcaggaagtccttggtcaggtggttgatggagatgaacatgacgtcttctttccgtgtgatgttttttcggtgggggttccgccggtgccgttcagcgcgttgtgcgcgggtgtgccgagcaccatccacccaacgccatgagcagcatggcgacggcgagctgcgcgatcagggatatggccgc

SEQ ID NO: 1276 - DNA, 12900 bp, Unknown
  R157_18m  MAG No. k141_2863
acgagggcgatgcctgcggccatcactgccatgacgaccgcgaacggcagtgtggcaatcgccgtctcgagcgccgaatacccacgcagcgcctggaaccattgggttgtgaggaagatgaaaccgaacaggcacaggaaggcggcgcaaatggccaacatgccgatgacggcgcacacccagaacacgctatcccatgcgaaccgttgcagcaggatgccgccgatgaccgggccgagtactatgcccaccccggatatgccggcccacagtccgacggccagcccacgcataggcgatccgtcgaacagcccgatgatggatgacagctcgactcccatcaagttgtatatcaatatatcatacttatggaacattgatacacatcatgtcgggaacaggcatccgcatcgcaaacaccgacctacaacacgatcaggcccgacgaccatcaaaggtcgtcgggcctgattcatacgcgctgtcggactaacggcgtccggacttcatacggaatggcgcattattgcgattcttcttggaatggcggcggttcgggccttccgtgttgccgtatttggcgatcatgcggcgttcgtgacgcttggcaccttctgaacgctcgtcgcgtacgatgcggttctcgttcttgtgatggatgcgcttgtcgaattttccgcccttgccgtaccgatcattgcgacggttcttgccgtactcgttgcggccatcgtcctggcgctcgtcgtaacggtttttgccgtatccgccgcgacggccgcccttacggcggtcatcgccatgctcgaacagatagtcgcggcgctcggcctcgaggtcgctcatgccggcgcggcgttccgcacggttgcggttcttcttcacggccttcttgctggccttgtcgccgtgcttgcgctgcggctcgccttcggcaacaaactcgccgcctgcgttctcgtgctggaatccggtctcggcaacgttctgctcggcgcggtcgcgattgcgattgtgcttgcgcctgccgctgcggccggactcatcgcccgccgcgttcttggcgcccctgttcttgcccttgcgcgggttgcccacgggctgcgacttgtcgaggctccaaccatccacgcgctcggcgcggtcgcccacaagctcaagcacttcgggcgaatcgtgggtcacttcgatcatcttggttttgatgccggcctggttcagtaagcggcgcgtctcgcggcgctgctcgggcagcacgagggtgaccacgtcgcccgccttgccggcgcgggcggtacgaccggagcggtgtacaaaggacttcgggtcagccggcggctcgacctgcaccacaagctccacgccgccgacgtctatgccacgggcggccacgtcagtggccaccatgacgcgcacgtcgccggaatcgaatgcggcgaggttgcgatcacgctggttctggttcaggttgccgtgcagctcggcggccggaatgccgttctgcgtcaggttcttggcgagcttcttggcctggaacttggtgcgggtgaacaggatgcgacggccttcgcccgaggcgagcacgcgcacgagttcgtgcttgtcgccgcgcgtggtctcgaacacgtggtgggtcatcaggtcaggttcggtggtggccgaatcgacctcgtgcaccttgggatcatgcaggaaggtgttcaccacttcatccacaccgtgatcgagcgtggcggagaacagcatgtgctgggcgtcgggcgaaatctgctcaagcagtcgcttgaccggcggcaggaagcccatatcggccatttcatcggcctcatcgatgaccacgacttcgacggacgagagcgtgagcgcctgctggcgcagcaggtcctcaaggcggcccgggcaggcgaccacgatatcggcgccggccttcagatcgcggatctggtggatgtacttgacgccgccgtacaccgtggtggtgttcatgccgaacgtgtgggccagcggcatcagcacgtcgttgatctggttcgcgagctcgcgggtgggggccagcaccaggccgcgcgggtgcggcaggaaatcgtcagcgcggcgctcttccaagctggccttcttgcggcgcttgatttccttgcggaactcctccatcgcgatttcgccaagcgaatcataggagccaagccgggtgaccagcggaatggagaaggcgagggttttgccggagccggtgcgccctcggccgagaatgtcgcggccggccagtgaatcgggcagggtgtcggcctgaatggggaatgcggtcttcttgtcatctgccgcaagtacgcgcaccagcggtccgggtacgccaagttcgccaaaggtaagggggcgggattccgcgctgtcgttcatctggaaatcagcggaatcgtcacgatcatcgaaattattacggggcacagtggcctttcatgtcaaaggttacgcaaattacgcaagctttccgagcttagcgtaagccccctactttgcttgatgctcgccacgctgtcatcccactctttactgatgaccccatggggcggtaactcgcccatgaggcggtaacttgcccatggggcggtttgaagaaactgtgaaaccgcagaataaagccattttcgtctaccgccccatgagggttttaccaccccatgggatgtttgccgccccatgggccaattaccgccccatgggttctaccaccacgtaaggcgagcaccgccccatggaacacgcaaatggcccctacccgtgaaggtaggagccattgtgcaaaagggctgagccacaatacggcccagtagccctaaaacacactacaaaatatccggatcgtctttggcgatagtgccggttgccttgccaatggccttcaggccgtggtaggccacaagaatcacgatcgtgccaatggcaatgccgttgaaggaaatgccaccaacagtgaacgcgaattggccgatggcaataatcatggtgatggctgccaccatgatgttcagcggcttgtcgaagttgaccttgttctcaacccagatgcggatgccgatcatgccgatcatgccgtacagcagcgtggtcacgccgccgagcacgccggcggggatcgtgttgatcacggcgccgaacttcgggcacaggctcaggatcagggcgaaggcggctgcgcaccagtaggcggcggtggagtacaccttggtggcggccatcacgccgatgttctcgccgtaggtggtggtgccggagccgccgccgaagccggcgagcgtggtgcccaggccgtcggccatgagggcggtgccgatctggttgtcgtagtcgcggccggtcatctgggccacggacttgacatggccgacgttctcagccacaagcacgagcacaacagggacgaacatgggaaggatggaaaaatcggcctgcggcaggtggaacttcgggaagccgatccatgcggcgtcaccgatggcggagaagtcgacctggccacggatgcaggcatatacatagccgataattacgccgaccaaaatgttgaggcgacccagcaagcccttgaacagcacggccacgagcagcacggccagcagggtaaccagtgcggtgtccggcgcggcttggaagttggtccacacggaaggtgccagattgaaaccgatgatggccacaatcgcgccgttgaccacgggcggcatgatgatgtcgatccatttggagccggcgtaatgcacgagcacgccaatcagggccagcagaataccggtgaccatgatgccgaagctggcgaccgcaatgcccttgttggcggtggtgaccgcggtgatcggtgcgatgaagccgaaggacgagcccaaatagctcggcagcacgttcctgttgataagcaggaacagtgcggtggacatagccgtgaagaacagggtggtggacgggtcgaagcccgtcagaatcggcaccaggaaggtggcaccgaacatggcgatgacgtgctgtgcgccgataccggcggtgcgcacccaagtcagacgttcatcgggctcgactacctcgccgggcgccagcgtcttgccgtcgccatgcaattgccattggaagatattggacattactactctcctcgctctcgcttggggcacggcattcacaaccagccgcaccacgcaccattctagctcacgaagattttgtgaagtctctcttccgggaaaggctatttgccgtaatactccagcaggtgtggatcgacggcctgcaccacatccaccaaatcgccattggagagatacgggcgcttgaattcgcgccacggctccaccttgacctcccagcggccggtcgtctcgtcgagcacgggccgggcggtctgctcccagcgcacacgcttggaggtgcggccggtttccgggtcgcggcgtgtatagtgcaggcaggtgcagttggtgatcttccagtcgtccgagtcggcgcgatgcaggaattcctcgtcggccagatcctcgatggtgagcatcagggcgagcatgaagtcgccgtgggtgaccatgaccacggattccgaatcggatttgcggctcagcgaggtcaggatgttgtgcacacggtcctcggccacatcggcaatcgactcgcctgccggcggacgccagtacagcggatcggtgttcttgaagttccagttgcgcgcgtagttgtttttgaattcgtccttggtgatggtgttgatctcaccccaagaacgttcacgcagcacacggttctcctcccatttggccttgggcagggccatggtggctgcggtttcgcgggtgcgcacgtatggcgagaccatgtagcggtcgaacagctgctgctggctgaccagccagcgaccgatgcagtcggcctgcttgcgcccggtggcggtgagtctccaggagcgatcgggcacagtgacgttgtcctgcgtgtacagggaattgtcgccctgctcgcccgcctggacgatgacgttcgcttcggattcgccatgccggattacgtatagatcgagcggcatgctcatatatgttcccctttcgttattggttacgttgtgttgttttctgttgtttcctacttgacttgcgtgatggtgttccccttgaccatgaacgcgtgccgggccatgtcgatcatcggctgatcgaatttggagtcggtgtagaactcgtcgatgacgacgtccggaccgtacagttcgcggaaccgtttggccttgttggtgctgaagttgaggtacgtgaccttcatcgtccccacatccacctcgctggccacgagattcctcacgccgagtctgcggcaggcctcccccaccgtcagatcgaaggatgcggtgaggatcacatcgtccgactcaggctggtaccaaggcttgatacgtgcgtaatatcggtcccagaaatcgtccacgagctgttcgacgctcgccacccgtttggatcggctcagttccgtgagatagccttcggtcatcttgcccacgccgtattccatctgttcaagcgtggcccggccaagcttgtatttgaccgcgtaccgcagcacgggggcgatatagcggaacactttcgggtcgtggcgggcggaatacaggtacaagtcgaacaggctttcgccatcatagatggttccgtcgaaatcgaatacgcgcataccttctgcttctactctgttattccttgtctaaggctaatctcggtaagccggcgaaagcgcaaatacgcagtgaatttcacatgaacactgttttttggattgatttcggtacaggtaacgtacactggtgacagcgtggaaggaggtgcgtaatggcgacgtctgaaatcgaacaatggtggattgataagtttcaggagaacctgggtccgattcgcaaggtagccggatggacgactcagcaactggccgacgagctgggagtcgcgcgacagacggtgtctaacttggagaccggcaaaagcccgatgaccaaactgcagtatctcgctttacgtacggtgttcagcgccgagatcgcacgtcgtgaagaccgcgatctggcacgcatcatcaagactttggtcgacgatcccattgagcaacgcattcgcgaacggcgcgcccaagagcaagacggcgaggccgttgccgacaatgccccagtcaatacggacggtggcaacgctgccgacaacgccgccaccgagaaacgcaagcccagtgccgccacattgaaggcttcaaagactgccgcaacgggcaagcccacgctcagcacggcgatgcaggctctcgccgtcatcaccggcgcattggccagtggaaccgccgccggcatcatcacctacttgatgttcccggacggcggcccgaacaagcgctgagtcgccgaaatatcgaatccgttactcgcaggccacgccatcgtgatcgcggtccaacttgccgttgtatccaggctgcccttgatacaacggagcagcaccagccgcacggacttcagagcaattcgcataatgcacattttgctgcgcttgctgttgctgttgtgcctgtcgagcggcctcctcagcttgccgctgggcctcggcctgcgcggcagcctgttcttcagcggcctttcttgcagcctcttcttcagctgccttcttggcggctgcctcttcagctgctttcttctcctcagctaccttcttcgcttcttcctcctgcgctatatcgctggctttacgaacattgataacaggcttgtccccatcttccacggattggacaacccagttcgaagctctgagcaccattttatccgtgtcgcttttcacctcataatcagaggaggaaaaaccggcatccttgagctcgtctttcacatcggccagcgaacgccctttcttggcgatggcgacaattttcgaatatgtggattcctccttgccgtccgcaccgtcagaagaccccgagcatccagcaagcacaagacccagaaccatcataagaatcacggtcaacgcccaaaccgcacgattgacacgcttcatgttcccgaaacgaaccctgttgttcaacattattctctcccttgtagtcgcagatctgcggatggtcggaaccacgtcaatgtgaatccaaccatcctgataattactgcttattcaatgatatattcatccattgttttcgccgatatatcgcaccagcgtttccctcattatcaactatttcgagttgcatgaatgcgccgtttataggccaagaatttcgtgcttttttgcatcaaattcttcttgggagagaatgccgatatcaaccaattccttcaattttttcatcgcctcgacttgttcttccacagacatggatgccgtgtgagaggcaggagcagcggcttccggtgccggcgcaggcgccggcgcttgaaccggggcggccgtcataggattaatggcttgtgccatattcatgcccagcaacatgccaccatcgccaaagccgttgtcttggatgccttgcgcaatgcgctgctgggcagccatattgccagcttgctgggaaacgccctcgtatgcggcaacattcatcttattcgaggcgaactgctgcacgagttgacgtgattgctcggtgaactcgatactttcgatgcccacactggacacttcaaagccaaaacgatcattccacgtacccgcattggcccgatcgccacgcacgcatgccgcgatgtcattcgtcttgccgggcaattgcgaaatacgatattcattggacaacgaattgatggccacaataaacgactgtacgaattcagacagaatctgcctacgtggcccttcatcatcgaatgaatacgacacggtagtggcaggcacaaagttacgaacgaatcgaactggatcagtgacctttagcgacatggatccgcgtgcgcgaatttccaaatcgacgccatagaaccggtcgttatacaccagcggcgcagaagtgccgaatttgatgccacgaatctcacgcaggttgacgaaggccacatatttggtgcggccaggctgacctccgaaggtgaatcgatcggcaacctgattgaagaacgatccgatgccgtctccggcgagcacgctctgctccccgttgcgatattcataaccgcccgactcggtgatgacgttttcgatacctgtttcagagaaaatgaacgccgcagtattctctggcacatagatacgcgaaccattggtgattattccctcggaaccgtattcattcgaaccgcgatcgttgttgcttccgcggggaatgcccggcacaacgacggtgtgttccgtgaacggaccagcggtgatgatatcacgccacaggtccgcgaatgtaccgccgagcgcgccggcgaacgccttaataactgccatctgttttttcctcgatatctcatgcatatggccgatcttgcgactctgcaatcgcaagaccggccgttatgctggcatgttggttatagctgcgtttcgcgatcgcagtattcgcatcgaacgacttctttgcgatgaccggaaagcggagcgccacaaccttcgcaattcaccgaaaccacaggttcggtaataccaagcccactacggaatgcgccaaaagtgtccttcagcgccccggccagagcctccgttccggggatggccttgttgaaggccggctcatccattggcgtatactgtctgccgcgtatacccatataccgtcatcgttcctttcttggaaaaccgtcacctcgatacgccagtctgatcactggcccaccgatgcgagcttctgcgcgcatcgagtcatgacctcggtgtagtaggccgaatcctcactgctgagggagttttcgtcaatggcgtctaccttctgggagaactcagagtaacgcttcatcatgccggcatagtcggtagccatgctgaccacgttatcggatttctgatatttgttcatgaaggcaacatactcatcgataaaggcctcgtagctgtccatcgtggccttgaagtcagcactgtcattggtgttctgctgcgccttctgatccgaagactggtcgctctgcttgttggcatcgctggaatcagtgcccgtatcagtgctcttatcatcctgcttcgcggcgtcgccgtccgtagacgtatcttccttcttttccggaacctggatagtgatggacatgatggtctcgtcgtcagtgttacgagaaacgctcacactgtatccatcggcgttcttggcattgaaactgtcagcggacttgctatagtccacggtgaaaccgttgtcttgcacggacttgacgtagtcggcatactgcttggcgtcggtaccgcacacctcgatggagaaatagtccgaagactcgcttctaatttcaccctttgtggatttcggctgcggcagcagcgccgcgatatccgactccggccatgaatatgcttcgcacttggtggcgagcgatgcttccaattccgcccgatcagccttggccttcgcatcgtcacgaattacgaacacgccaccgattaccagacccacaacggtgataccgactgccacccaggccagcactcggccttgcaccttgccactcgggcgggtcacgtatacggcgaagcctgaaagcagtgccggaatcaccgtggcgaacagcagtccgccccaggatcggccagaaacatccacaaattgggcgagtacgaacaacactccccaaataatggcgaacacagccagcttggaagtcttcttcaccccttgtgcattcggagcaagcacggcaggcgcagcggcaccagcaaaaccagtggcagcaccggcaccatgtgtggcgggtgcaggagccacaccaatacgcttgtccagagcggcgaggaactcatcaacgcgcttggcgctttcgtttccagtcgcctccagacgaatggcggcccctgccgcaccctgcgggactacggttagcgtgcagttcaccccatcataggagtggaaggaaaacgctccggtctgggtgttttcgttatccaaggtaaacgtggcgccagtagtcagctggtcgtgaataacttggaacagctgttgcggactgaccgcatatacacgatcaaatggcgcgccggcgggccgctgcgatgccgtagccggagtcatcggagtggtggtagcaccatcagacgctacgttcggttggccagccggtacagtattcggcacggtaggcgcattcgcgcgatcttccggtgcgtcattcgtgccttcggacggtggaaccggctgaggttgttgatcaaatggcgttgtcatgatgcccttctttccttaagcagcagcattaccagcacagaagaggcaagcccggcaaccgttacggtcaatccgactgccatggcaagccggtatcgttcgctcatcattgcgtcccttcttattgctcgctttgctctgcgatacatcgaaaccagtgtatggcgttgttattatgtacgcaaattagcattttgtatgcatattagctttattgtcgatgcttgataccgcgcatgaacatcctttccgccaccgcacctacacggatggcatcgaccattgtcggcgacacgcgcgggccatacatcagctgacaactgaatttttcggcgtgtttccgaaaagtcggcgtcctgtacgctgggaatcgagcaaccgcgtacgatggcgcagcacagcacccgcaacacagcgacaaggagcatgggcaatggcagacatccccgaagaacatttgaccgaggaactgttggatcggctgctcgccagcgccagcattgagcagtatctcgatgagggactcgtcagcgcacgcacgctgaccgactatctgttcgaccgtatggaagcccatgacctgagacgagccgacgtggtgcgggcatccggcctcaacgccacagtggtttatgacattttctccggcaaaagccgccccggccgagatcacgccattatgctggcttttggtctcaagtgcacattacgtgaaacccaacggctacttcgtcttgcaggcgtttccgaactgtggtgcaaacagcgacgcgacgcgattatcatctggtgtatacgcaatggattcgaccgcattgccacggacgacgagttgtatcgtatgggagaggcgacgttgctaccggccgattgacgacattcggcccaacaacactcaccagtgagacgcaagtaagagggcatcaaggagagacatggacgataagcaggcgatgcatgcgatgagcatcgacgatgcgcaccatgtcgagcgtacgctcgctcgcggaccttccggcgtcaccgaactggtgagcattgacggcaacggcccgttcgtacgcaagaagattccctctcccctagcgcaacgcaatgtgtgggcggcgctcagcgcctgccagagtaatcgtctgccgcgtgtggaagcgacgtacgagctgcccgaccggttcgtcatcgtctacgattacgtgccgggcagcacgcttgcgcaaattgcggaggaaaacgggcggcttgcaccgaatgtggccgtgcagcttatcgaccaaatttgcgaagccgtgcaggagcttcaccagcacggcgttatccaccgcgacatcacgccggccaacgtcatcgtggcccaggatggcgcgcatctcatcgatttcggcatcgcgcgcatccggtcagaggcaagcaaccgttcacgggataccacggcgcttggcacctacggattcgcctcgcctgagcaatatggctttgccaaaaccgacgcgcgttccgacgtattctcgctgggccggctactcggattcatgctgaccggcgtatatcccgatgccagcgactacgagcagcgacttgccgatgatgccgcagtaccggctcgactacgcgccgtcatcggctatgcgtgcgcattcgagcccagcaaacggccacagagcgtccaagagtttcgccaggcgctgttctcccagtccaatccgcccataccgaacgcatcatcggcaaatccgccatcaacgagaacaacgaacggcagcgcgtcggcgtctcgactattccggcgtctgcacttgagcaaacgcgccatcgtgctgtggtccattgccggagcggcactgataatcgccgccattgcgggaggcattgtgttggcaggccaacttggcattatcgggtcggcaacatcacccgattcctcgacacaatccagcagccaatcaaccgataaggccgatggcgggcactcctcgaacgggtcaggaaccgacaatgccaatggcacgggcggagtaggcggcactgacggcgctgatggagacaatcaagacaccgtcaccgacaatcctctgaaaatagtggaatccggctggtcggcggaccagcaagggtatgtccactacgctttcgccctgcgcaacaccagtaagacccagcaggtgcagtatccgcagattaccattacggggcgggccaaagacggttccatcgtgttctcgcagacgcaagcactgaatatggcattcccgaatcagactgtatatgacgccggtcaagcaggcgaaggcaccgccccagaaacggttgattttactgtgctcaatccggatacatacaacgtcgccaaggctcagggaaccgccgccttccccatcagtggaatatccaaaatagacaacagggacggcggcacgacgttcaatggcgaggtccgcgccgtggcagatggattcaagccatctgatggacagcaaatcaagatttccctagtactgcgtaacgcacagaacgcaatcatctatggagatatcgcattcgtggattggccgg

SEQ ID NO: 1277 - DNA, 18298 bp, Unknown
  R157_18m  MAG No. k141_2870
acgatcttggcgagcgcctgataggcggccagcgggctcgaacccgtcgcaagtcccagcaccgcattcggctttgctttgatcaggtccgccacgcaacggccgtagatctcaccggcctcagcctcatccctaacaataatgatctccgacacgctcatatcctttcttccgtggcgagcccttcagcaacgacccgccacaatcagacccatctcatcttcaccagtcgtctgtcatccaccgtcacggcccgcctcaaaaggccgaccagacctgccaccaccagtggcacagacaatgggatgcccctcaaaacggcaggcctcccgccaacctgaccaccggtggtgcaggcgcaactcacatgtttttcacgttgtacggcatcttgccggcaaagtattcctcaatgcacttggcgatgatgacttgggacctgtattccgattccatcgaggccgcgcccatatgcgaggtgacgaacacgttcggcaggtgtagtagcggatcatccttctcaggcggctcatgcacaagcacgtcaagcccagcaccggcaatctcgccgctggtgaccgcctcaatcagatcagcttcatcaatcacgccaccacggcatgtgttgaccagataagcagtcggcttcatcagcgcgaacttctccttgttgatggaaccgtgcgtctcgtcggtcagcgggatatgcaggctgatgatgtcactggcgcgaaagacctcttcggcgctgcccacgaaatgcaggcggtcgttcgcgtcggagcggtcgcgtaggtaaggatcgtagaccaacacgttcacatcaaatccctgcatcatgcgcaccagctgccggccaatattgccatagcccagcaggcccacggtcttgccgtccagctcgttgccggtcacggtcgacggccatacgccgttgctgacgccgtcaacacatgtggtgaaacgacgcccgaggttgaggatgtgcagcagcgcggtttcggccacggccgcggcgttggcgcccggcacattgcccacggggatacccacggaggccgcgaacggcagatcgatgttatccaatccggcgccgtaacgcacgatgtacttcacctgtcccttgacggcgctcagtgtgcgctcgttccatggttcggacgagctgatcactgcgtcggccttcatacccatctcgatggtcttgtcttcatcggcgaaatcgatctgctcggcgatgaggttgtagccgtcttccttgaacttgttctgcaggtagctgacgtccaccttgtcggggtccagatccagccagatggtgatgttcgacatgattgctcctttatattgtgaatcttgtgatgattgatatgggaatgatggtgcgagcaaggtggcggcactattgatgccgcccgtctgtcgtcactgctcggtaaacagcgacttaagctcgtcaatcttgcgaatgttgtctttcagcgcgtcatcgatgctggtattcaccgtgacgatctggttgagcatcttcgcttctgggtaggtgaacatgttcttggctgccacggcgcgatcggcggtagaccgtgcggggtatccgtagtagccctccgacgtcttgacgtagttgagcacttcggcgttgacgtccttctgccacacgtccacctgctcggaatcctggaatacgggggcgaacacgggggccgtctcctccaggaagccgtcataccagtccttgtccagcaggtattcgacgagcttggtggccgcgtcgacgttcttgctggccttcataatcgacagtccggtggcgaacgacatcttcacatcgttgtcctcgcccttgggcaggttcactacggcggtattgccgagcagcgtctcatatgatgggtccgaggccatggagtagtacagggtcggcgcgttgaagatgatgccggattcgcccatgaggtacgaggtgttgttgccgccggaatcccaagtgctggctgatggcggtatcaccttgttctggtacatcgtcttgtactgctgcatcagcttgcggctcaccttgttgtcgatggtgacgttgccgtccttatcgaacatgtagccaccttggttccacatgatgttgcggaagatgttgtcgccgtcctcatccgtggaaccgcagccccagcccaggccatagaagccctgtgccggatcgctgatcttctcggctacttcgaacagctcatcccaggtagtgggcacctcgtagatcccagcctcgtacagcttgtccatgcggatgaacatcatcgtcgacgagctgcggaatggcgcgaaatacagcttgccgtcaatcttgctgccctcgtacacggacttcagatacggccggtccttattgatgcgctccacgatgtcggtcatatccatgtatgggttgccagggtaatagttcactaccttggacacggcggacgtggtgatgtccggaatgccgcgccccgcctcgatggtggcgttgagcttggtcatatagtccgtggcggaaatgaactcgtaattgacttttatgccggtttccttggagaagatttcgatacgctgcttcatctcctcgttcgacttctcgctgaacactttctccacccagatggtgagcgtgttggcgtccgaagcggaaccacatgcgccaagtggcagcagcatggctgcggcaaggcccgcggccgcgaacttcatggttttcatggttgtgcctttcctattcatcatcccttgacgcctccctcggtctggcctccgaccagggatcccgatgccagcatgtagatgatgaccactggcacgcaagccagaatcgcgccggccgtcagctggccccacggatacatgtcgccgaatatgagtccggctatcaccaaggggaaggtctgttgggaggtggatgtgatgttcaccaacgcgtacatgtattcaccccagcacatggcgaacgcgaagatcgtggtggcgatgattccgggcaacgccagggggaagatgatgcggtacatgatgcgcagtcgtccgcagccatccaccagtgctgcctcgtcgatgtcgcagggaatcgcctggatgtgcgggatcagcacccacgccacataggggatagtgaaggtcggatagatcagcgcaagaccccagatgctgttcgtcacgccgatgcgcgcgttcatcaggtacagcgggatgtacatgacggccgtgggtagcaagtaggtgaacaggatggttttggagaacgtgcgcttgcccctgaatgagacgcgggcgatggcataggccgccgggtacgccacgaaaatggagaacgcacataccaccacggcgatgataaggctgttaagcacggcctgcaggaagttggtgtcctgaatgaggtatttgtaggattccaacgtcggcttatgcgggtagaaggtcggcttttggctataaatctccgactgccctttcagggaggtgttgatcatccagtaaatcgggccgagagcgacgatcagacaaataatggtgtagatgcggctgatgattttgacgcctttggtttctctcatcgtaatctccttaccttcgcccgtctttgggcaccatgtgtcgtgcgagtacggtgatcagtgcaataagcaccggcatcgccagaatggataccgcaatacccttaccgagcatcatgctcttcatcgcggtctggtagctgaacacgttcatgacttcggtggagccgtttgggccgccgccggtcatcagccacacggattcgaattcgttgagcgtccagatggtcgacatcagcgtcgacaacaggatggtgtcacggatctcgggaagcgtgatgtgccagaactgctggaatatgttcgcgccatcgatggacgcggcctcgtaaccgtcggcggagatggtctgcaggcttgcaagaatggatatcgcgaagaacggggtgccgcgccacacgttggcgatgatcacggtggccatggccagtttgggactgccgaaccacaccagatcatggtctgcgatgcccaacgtggtcaatatgtagttggctataccgcccgtggagctgaagatccagcgccagttcaataccgccacgatgttgggcagggtccaggggatgagtagcagcgctcgcacgatgttgcgtccacggaacttggtgttcagcgcgagggccatcgccagaccgagcaccagcttaaggctgatggagatcgcggtgaacaccagggtgttcacgatagatgaccggtatgaagggtccatcaacagattgatgtagttctttaatcccacgaatgcgccgttgccgccaccgatggtcttgttggtaaggctggtgtagaagccccagcaaataggccatgccaacatgcagaccaagtagataatcaacgggatattaatcaaatacgcgaaccgcgtatccctggacattatggcacttcgttctctcctcatgccgccatccctcctgttcgtctgtgatgtgatgggaaccctcaccatcgagggctgttatgttcgccgcgtgcacatcggttgtgctgtgggcggcgatcatgtcgtccgtactcggttagcttatccgtcagcgcaaataatttccacttagactaacgaagtgggtagaactttcagctgcaacaacatagatcagcccaaaaataatcataaacagccatttaaagccagactacaccacgacctacatggtaagtattttctatttactcttttttggctggtcgaactttacaaatcgatttccagcgctttacgatgatggcacacgaaaggaggggcaatgaaaccaccaccgaacatcaaaggacaactcatcgtatcctgccaagcgctcaaagacgagccacttcattccccgtacatcatgggaaaaatggcctacgccgcagctcagggaggggccaaaggcatacgggccaactccgtggaagatatacgggaaatcaaactgcgcgtcaacttgcccatcatcggcatcatcaagcgcgactacccggactccccggtgttcatcacccccacgatggaagaggtggacgagctcgaagcagtcaaaccggacatcatagccctggacgccaccgaccgcccccgacccgccggccaaagccttgacgatctcgtcgtgcaaatccgacacacctaccccgatcagctactgatggcggactgctccacagtggacgaagccgcccacgccgaccagctgggtttcgacttcatcggcaccaccatgatcggctacaccgaggaaagccaaggcgatcgcgtagatgaggacgacttccgtatcatccgcgacatcctagccagagtcaagcatccggtcatcgcggaaggcaacatcgatacaccggacaaggcgaaacgcgtcattgagcttggttgccacagcgtagtggtggggtccgccatcactcgcccgcagctcatcaccaaacggttcgccgcggctctcgcccccgcgtagcccctatcaataggcccctacgccaacaacactgtttaccaacaccaacaccacaaccaacccaccaacaaaggagaacaccatgaccatcgatccgaacaagtaccgcggcatcttcccagccttctatgcttgctatgacgatgacggcgagatcagccccgaacgtgtgcaggctctcaccgaacacctcatcagcaagggcgtcaaaggactgtatgtcggcggatcatccggcgagtgcatctaccagagcgtcgaggaccgcaaggtcacgctggagaacgtcatgaaagtcgcgcgcggcaaagccaccatcatcgcgcacgtggcatgcaacaacaccaaggacagcgtcgaactcgccaagcacgccgaggcgcagggcgtcgacgccatcgcatccatcccgccgatctacttccgcctgccggaatattccatcgccggatactggaacgacatcagcgccgccgccccgaacaccgacttcatcatctacaacatcccgcagctcgccggcaccgcgctcacgccctcgctgctgaccactatgctgaagaacccgaaagtggcgggcgtcaagaactcctccatgcccacccaggacatccagatcttcaaggccatgggcggtaaggacttcatcgtgttcaacggtcccgacgagcagctggtcagcggccgtgccatgggtgccgatggcggtatcggcggcacctacgccgttatgccggagctgattctcaagatcaacgagctggtgagcaagggcgagattgagcgcgcacgcgaaatccagtaccaagtcaacgacatcatcgcactgatggcgagcggccacgcgaacctgtacgcagtgatgaaggaggtactgcgcatcaacgaaaacgtgaacatcggcggcgtgcgcaagccgctggagaaccttaccgaagacgacctgcccatcgcccagcaggctgcggcccgtatccgcgaggcaatcgcggcactgtaagctgtgcaatcagagggaaaggggtgaaatcatgacgcactatatctgcatcgacatcggcgggacatccatcaaatatggaatctacgacgacgcttcgcagcaattcgtacggcatgattccacccccacccatgcggatcaaggcggtccgcacatcgtaatcaccgtattggggctcatcgaggacctctcccatgctgcaacggcgccattatacggcatctgcgtatccacagcgggcatggtcgactgcgccacggggagcatcgcttactccagcgaactcattccgcgctacaccgggaccccattgaaatcgatgatcgaacagcagaccggcctgccctgcgaagtcgaaaacgacgtgaattgtgcgggtctcgccgaatatcatgccggcaatgcgcgaggcgccaaaacagcgctgtgcctgaccgttggtaccggtatcggaggctcgtacatcgatcacgggcgcgtactgcacggcgcgggcggcagcgcctgcgaagtcggctacattcacctgccgggcggggacttccaagacctggcctcaaccaccgccctcgtgcgcagggtggccacgcgcaagaatatgcaggccgaagatctgtccggcaaacgaatattcgaacttgcccagcagggagacaccgactgcgccgaagccatcaacaccatgaccacctatctgggcatgggcatagccaacatctgctatgtgcttaaccccgaggtcgtgatcctcggcggcggcatcatggcccaaagtgactatttgggcggtcccatcaggcgcgccctcgacgataacctacgcaaaccagtggcccgagccacaagccttcgttttgcacatcaccggaaccgcgctggtatgcttggtgcgtactatcatttccggtacatgcaagaaagtcggaaacatggctcattttgacaaggacgtcattccgcagatcgaagccgtatacgccacactgtcgcctacggagaaagtcgttgcggacttcttcatccataaccgccgacgtatggatttcggggcacccaatatcgcggatattctgcacgtatccctggcgtcgctctcccgtttcgccaagaagatcggatttgccgggtatcgcgaattcatctataaatacaaggaagatctgcgcgaggacactgcacagacagtgcctgaccagtggtcgatgcaggcgctcagctcttatcaggaactgttggacaaaagctatgcgctggtcaacgagcgccagatcaacgcactcagcgacatgctgtccacctatcagcgcatctacgtgtatgggcgaggcagctccggccttgccgcgcaggagatgcaactgcggttcatgcgtatcggcagtatcatcaccgccatcaccgatagcgatgtgatgatgatgaattccgtcctgttggatgacacctgtttggtgattgccatcagcatcagcggtaagacaccggcggtgatcaaggcactgcgcaaagccaaggagtccggagcaaggacagtactgatgacttcccataaatctccagaacagcatgaatactgcgatgaggtggtgctgctggcgcttcgggagaacatcgaagcgggcaaggtcatctctccgcaatttccgattctcatttacctggacatcctatacgcgcatttcctgcagcatgacagcaaccataaggagctactgcacgagcgaacgctggatatcttgcagcaggacgcaacagagcaggagccgggcgagcaggcggagtaggcatacccgctaatcaagcttcggcagccccaatcacgcttccaacacgctcaacaccttcttctcgttgtagaacgcgaatacgatgccgcccaagccgcacagcacggccgcgcacacggcggcgatgcgatagcccgcgccggacgccatgccgatggtggagacgccggtgaacagcagcatggccacggactgccccatcttcatcgcaaaggtgcgggccgcgtagaacatgccctgacggtcctggccggtggtcttggagctggcgtcggcgatattcgccacgatggcttgcggcagaatgccgaacgcggccatcggaatcgcgccgaccaccgagagcgccaaaccctgggccatcgccggaatgaagccgagcgcggccgaaccaagggcgccggcaaatgcgaacgcacaggtgaagatcacgaaggcaaccagcagcaggcgcttcttgccgaccttattggccaagatattgaccggcagatagaacagcacagagacgccggtcatgagcacgaagtagatggtcgtggtggtttccggcagcttgagcaggctggtcacgaagaacggcagaccggtctggaaggtggtgatggccacccagtagaccacgtcggaacacacgaacttgcggaattcgtcgtcgccgaacgtctgcttcagggattcgatggccgattcggaggtgggctgggagttgacgtagtccttctcgcggatgcccagcggcggcaccagcatgcacacgaacgccacggcggccatgatggtgaaggtcacgcggatggcggtgatacggcccatcatcggcacgaacgcgccccaaatcaccggcgccacgtacgcgatggccgtgccggccacccaagtgaaggagatggcggtggagatggtgagttgctgcttggagtcgtggccgagttcggcgatgagcgcgttgtacggcgtgcagtagaacgtgaggacgatgtagtagccgatcacggtgacgaacaggaacgccgcgttcacccagccggtgccgttgatcggactccagaacacgagtacggtgaccaccgcgagcggcagggcggcgaatttcaggaacggcatacggcggccggatttggcgtcgcaacggtcggagagggacgccacggccgggtccacgaacgcgtcgaagaatcgggcgaaggcggtgatgccgcccaccacggtcacgatgccgagaacgaccaggccctgcggcacgaatacggtctgaccttgggagatggtctcctggtcaggttggtagaaatacacgagccagttggagatgatgccggaaagcagcgcccacccgaactggccgaccgcaaacgcccacactttggcgatggggagatctttgatggctgatttcgccggtgcaacttgcgcgcccgttacacttgctgtagtcgtattacccattccccataacctccgaatcaacattgacacagtgtcaaaaaccagtatacaccggggttttacactcaattccctgcagggcaaaaccgcacaccacaatccacaccccgagccgccttcccctcagccatccgcaggctctacgatgagagccatgactggtctggccgaacgactaccgcacgtcgccgctttccccgaagcgctgggcaccgggttgctgctgcataccgatgtcgcgctggatgacgggctcagtaactgcatcgatatgttcatcagcacctatgaagccgcattgtcccggttcaaggatgattcgacggtcggccggatgcgcacggccacgcatggcggcacgttcgattttcctgactgggcattgggtttatttggcctgtacgaccagctgtttgcgtcgactaatgggaccatcgacccatgcgtgggcgaggatttgattcggcttggctatgacgagtcgtattcgtttacgcctgcgccagatgccgctgaacatgcaggcgcgatccacgaacgagccatttggtcagccgacgttgagcggcatggcacaacactggtgacgcgcggaccggtcgcgctcgatttcggcgcgtgcggtaaggggtatttggtggatttgcttgcggggatgttgggtgatggcgcgggtcaccctcaacccattcaatacgtcatcgacgccgggggtgatttgctagtgcacacggacgaaccaatcaccatcgcccttgaagatcctgccgatccggccaacgccgtaggtacggtcgaaatcagccacggcgcattctgcgcgagctcccccagccgccgccactggtctgacgccgcaggtcaccaacttcaccatctgctcaacgccatcgacggactaccggttgacgatgtagccgccacatgggtggccgtcacgccgccatcgagcgccataaccacgaagacatcgacgcatggcagcaatgcctcgacaacggcaaaccgcgataccgacgattcgtcgaacaccgttgcggcacacgtccctgtcacactggccgacggcctcgccaccgccctgttcaccaccccggccacccagctgcgcgctcacttccccttcgaatgcgccattctcaacgccaaccgcaccgccgcccaatcccccaattttcccggcggctttttcacacactaatgtacgaaatcatcagtatcacatccctcgggtggaccgatgggttgctcccctcagtcagctacgctgacagctcccctcggagaggggagccgagtatagctaatccgctaatccgctaacgcaggaaacaatccgtcagtcagcgagtgcgaactggctgttgtagaggtcggcgtaaaaaccgcccgccgccagcagctcgtcgtgcgtgccgcgctcgatcacgtcgccgtggttcatgacgagaatcatgtcggcgtcgcgaatcgtggagaggcggtgcgcgatcacaaagctcgtacgccccacggtcagcgcgtccatggccttctggatcagctcttcggtgcgggtatcgaccgaggaggtggcctcgtcgagaatcagaatcggcgcgtcctgcaccatcgcgcgggcgatggtcagcagctgcttctggccctgggagagcgacgacttgtcatcgagcacggtgtcatagccgtccggcagcgagcggatgaagtggtcgaggcccacggccttgcacgcatcctcgatctgcttgttggtcacgccgggcttggagtaggcgatgttctcgcgcacagtgccgcggaacacccacgtatcctgcagcaccatggagaactggtcgtgcacgttccagcgcggcacggacttggtgtccacgccgtcaatcgcaatcgagccgccggaaatctcatagaagcgcatgagcaggttgaccatggtggtcttgccggcaccggtcgggccgacgatggcgaccttctgcccggccttgacggaggcggagaagtcgtggatgatcggcttgcccggttcgtaaccgaactgtacgtggctgaattccacgtcgcccttcacttcgtggccgttggtcccaagcaaagcggacttgccggattcgtcctccatctccggctcctcaaggaagccgaacacgcgttcggcggccgccgcgcaacgctgcaggttctggaaggcctgggcgaactgcgccaacggctgggtgaacaggcggacatacatcatgaacgccacgatcacgccgaactcgatctgcccgtcgagcgcgagcgccgcgcccaccacgcacaccaccacgtagccgaagttgcccacgaaattcatgagcggcatcatcaggccggagaggaactgcgacttccagccggactcgtagaggtccgagttgtacttctcgaagcgacgaatcgaatcggcctcgccgttgtatgccttgacgatgaggtgaccggcgtacatctcctccacgtggccgttgacgtcacccagcgccatctgctgccgggcgaagtacttctgggaggacttcatgatggccatcatgatgatcaggccgatgaggctggcaccgatggcgcacagggtcatgatcacgttgttgtagaacatcatcaccagcgcgcccacgaacagcgtcaccgaggtaatcagcgagccgagcgactggcccagcgtctggccgatggcgtccacatcgttggtgatgcgcgacagcacgtcgccgtagctaaccttgtcgaagtatttgagcggcagtttgttgattttgaccgagatggactcgcgcagtcgctgggcggtgcgctgggtgacgttggccatcatccagctttgcacgtagccgagcacggcgtagcccacgtacagggccaccaaggtccaggcgatgtggcccaccgtgccgaaatctaccgagttcatcaccggtctgccgttaacgatggcgggcagacctttgacgatctcgttggtcatgtccttgagcttgtccgggccgacgatctggcagacggtgccggccgcgcccaggatgagcgcgatgatgatgacgggaagatagttgcggcagtagttcacgagtttgcccatgactttgccgaaatcatggggcttttcgacggcacgcctgccgcccattggtcctcttggcatttgttttactccttaaaagtccgtattgacctccctctgatgagggaggtggcgcgaagcgccggagggagagaagccgtacgcgactacccctcagtcagctgtgctgttttattcgctcgcttatcagctcgtcttcgcctgggaacagcccactgggctgttccctttacggctcagcccctgacatggggagctaccgctgccgcccccctacgccgtaagctccgactggctgagctgggattcggcgatctggcggtatacgtcgcagttgtcgagcagttccttgtgcgtgccctgacccacgaccttgccgtcgtcgagcacgacgatgcggtcggcgttcatgatggtgccgatgcgctgggccacgatgagcttggtggaatccttggcctcgcgggcgagcgcgtcgcgcacttcgcggtcggtcttgaagtcgagcgcggagaacgagtcgtcgaaaatcaggatttccgggtgacggtacaccgcgcgcgcaatcgacaggcgctgcttctggccgccggacacgttcgatccgccttgggcgatcgcggcggaatacccgccgtccatgcgcgccacgaactcgctggcctgcgccacgtcggcggcggccttgacgcgattcagctgctcggccggtatatcggcaccttccgcggcctcgccagcggcgatcaacgcggcctcgcgcttgcgcccggccggggtggaggtatcggccatctcgacctccgccgggtcgcccggctgatcgccgtagctcacgttggaggccacggtgcccttgaacagcacggactgctgcggcacgtagccgatcttgtcgcgcagggccttcaggtcgtagtcgcgcacgtccacgccgtcgaccaacacctggccttggctggtgtcatagaagcgcggcacgagattgataagagacgacttgccggagccggtggagccgatgaacgccaccgtctggccctgctcggcggtgaagttgatgccttccagcatcgcctcgcgcgaatccgggtaggtgaagctgacgttgcggaattccacggtgcccctctggccggttttggccacgtcggcggcggttttggtgccgttctcgacgattggctcagtgtcgagcacctccatgatgcgctgcgcggacacgtcggcgcgcggccagagcacgaacaccatgctcatgagcaggaagctcatgatgacctgcacggagtagttggagaacacgaccatgttggagaacacggtgagcttgtccttgagcccggcggcgtcgatgaggtaagcgccgatccagtagacggcgagcatcaggccgttcaggacggtgttcatcaacggcatcatgaacgccatgacgcggttggtgaacagctgggtctcggtgaggtccttgttggccttggtgaatttggcttcctggtagtcctcggcattgtaggcgcgcaccacgcgcaggccggtgaggttctcgcgggccacgaggttgatgttgtcggtcagggtctgcatgaccttgaacttcggcatgaccatggccatcatgacggtgatggacaccagcaggaccgccacggcgatgccggtggcgagcgtccattcgaagccttcgccggcgatcttgcacacggcccatacggccatgatcggcgacttgacgatgagctgcaggcccatggtgatgaacatctgcacctgcgtgacgtcgttggtggaacgggtgatgaggctggcggtggagaacttgctcatctcggccgggccgaaggactcgaccttgcggaattcgagcgagcgcagacgctgggtgaacgaggcggccacgcgcgcagcgatgtagccggtgatgatggcacacgccacggatccgagcgagatgagcagcatcttgccgcccgcgatccagatgtccttcatgtcgctgcccggcgtctcgaccagcgtggtgatgtctgacatatagtcgggcagtttcaggtcgaagtagacctgcccgacgatggtcaccagggcgatgagcatctgaccgatctccgctttggagaggtatttcatgatgcgaaacattggtttccccttgtgttggttgggttggttattggttattggcgattggttcttaagttggctgggttatcggtgattatcggttcacgatgtcttaatagtttccattgtttgattacttacactgtgagatattatacgcacttctgtatgttcgctgtgagcgtcctcaattacctttacctccctctgacgagggaggtgtcaccgcgcagcagtgacggagggagagacccgccagcgggaggaagctagtctcgctcagcctccgcgcgcttagctgccatgtgttcagccacgcgcttgtcccgctccacgaatgcctcacgcacttgttcagccgtcggccgaggccgccccggatggcaaatcgacatatatgtggtgaactcagacaccaggtcaacgaattcgcgcgtgcgccgctcccccatttgcgagaaaatccagcaaattgcggaacgcatttcctctatcatccgatgagactgctcgcgcccggaatcagtgagattcacgcgaataatgcgccgatccttggaatcaatgtcacgcgtgacccagccttttttctccagagacgacagcacagtggagatgcggccggaactggcctgcagcgccgatgccaattgcgatggcgtttgcgtccccttcatggacagctcccggagcacgaactgctcaccatgggctccacgagtgaattccctctgcattgtcgaacgattgccccacacgctggcatacagttcactaactgcttcctgctcaaatcccataagagcaccatccattcccattcgccacacggcagagcgccgcaaacacccccaagaatatctcacaccgtaaacaattcattactagaaactatttttggaacgcataatgcacacactccacgctctttgatattctgaaagccgcatagatattcacttcggggcgtcgtctaagaatatttgctgggccaacggtagcgacgttggcattgtgctccatgaggtatctggtcgaaaaggcggacgaagacagaccagttgggcggagcgcgcccatacctcaaaaccattgcaattattggctttgaccattttcgtggagccacgaaaatggtcatgaaaaacataaggacacacccatgaaccgagacgaaatcacacgcaaaaccagcgaactcagcactatcgcacacaccaccgaggactccaaagttgagtattggtatgcacgcgagctaatgacctatatggggtacgacagatgggaaaacttcagcaaagctattacacgagccaagcaagcttgcgacaattccggcgtatccgttgaatcccatttccgtgacactacgcgagacgtgactctcggcagcggtgccacccgctccatcgcggacgtcaagctcacccgatacgcctgctatctcattgctcaaaacggtgatccaaagaaagaagaagtggcacttctccagagctattttgccgttcagactcgcaaaacggaaatcattgagcaacgcatgggagaaatcagccggctcgccggccgagaggcccttgccactgcagagaagaaactctatccgtatacccaaatcacacacaacaaaaccgcacaagagcacatgtacacgcccaaccacgccgcagaacgccggcaaggatgtgatacaggccacagaaagcgttgtaccgcctaggcaatgcaacaattgtccgctatgctctgaaggcagatggcggcacggatgccatcccaaagagggggtatgaccatgattcggggtatgaacctatgcagcatcgccggctgcacgcacgaagcagaagaagcgggcatgtgcaacatgcatttcacatcggcgctggttcacggagcgctgcactacactgcggacggacgtccgtcgcactgctgagcgcaacaacaaagcaaaacaaccagtaacgctcaacggcttccacatgttcatgctctaattgcatgtacttgcagacacaatggccggtctgagccagctgccctcgcatggagcagctggctcagaccggccattattgttgctttgtactgtttgcactgtattgcgcctgcattgcgcaagctcggggtagtgcccgaaaagttgcgcactttggatcgtggccgtccatggcgcgatagtcagttcgcttccacgaggttgtcaccgagccgggacatgtcgagatagcggcgggtcgaccattcgttcgcggtgacgtgacggatgcgggcgcatatgagcatcaacgcgctgttcccgtcggggaagccgcccaccacgcgcgtgcgccggcggatctccctgtccggccgctcgatcatgttgttcgtgcggatcctcctgcggtgcccgtccgggaactcgtccagcaggtaggtcgtcgtctcgccgacgccctcgcgcaggcagttcgcggcggccttgagcctcctggattccatctccgtggcgacctgttcggccttggccagggcggattcccgggattccatggcgaatatggccttgagggcggcggacgcccattcgcggtgtgtcggcggcgtcctcgagagcacgttgcgcatgaaatgcaccatgcaccgctggtatctcgccttgggcagcatcgagccgaccgtggcgacgagtccggcgcaccggtcgccgaccaccaggcgcacgcccttcaggccgcgttcgatcatggagcggacgaactgctcccagctgtccctgtcctccttcatgccctcggccacgccgatcacctcgcggtgcccctccgcgttgactccgatggcgaccaggacactgacgttctccacgtgcccgccccatgaacgcttgtgccacacgccgtccatgaacacgtgcgggtactcgtcctccaacggcctcgtgcgccacgcctcgatctccccgtacaccttcttgagcttgtcgctcagggtctgggacggcatcctgtcgccccacagcaattggctgatgtcgtccacctgccgggtgctcacgccggccaggtacatgtcgatgagggcctcctcgacactctcctcgcgtctccggtatcgttcgatgaccgcggactcgaagaccgcgcccttgagtttgggcaccttcaacgcgagcctgccggccttggcggtcaggctccggtcgtagtggccggccctgtacgccttccgctccccggtgcgctcgtacttggcggcgttggcgatctcgtcggcctcggcgtcgagcatcgcgttca

SEQ ID NO: 1278 - DNA, 3117 bp, Unknown
  R157_18m  MAG No. k141_2884
cgtcgtcatcgagcaggcaggcaaaggatagctttgaagcacggaggagtgggccgattccaatggtgttcctcaagcgtttctaccgtgagtcgtatcgccggttgcgcccgattttggccgagaaccaagccatcgtgttccatgacggcttccgactgggccgttggcgggactggtttgtgcgggagggcatgcagggcgtcatgctcgatacgcatatctatctggtcatggccgagcaattctcgctgttccgtctgattccggatcggtggctgatggactggtatcgcttgttcgtgcgctggaacgaacgccgcatccgccgggccgcgcgctatacgccggtgatcgtaggggagtggtgcgtggccaacaatctggtgaaccgaaccccttcagcgaggaatgccgtctatcgcgaggtcgccgccatgcagcgcaaagcgtggagcgcatccgccgggcagatttattggagctaccaattacgtggtaatcgtgatttcttgcctgccatcgacccgcaatccggcacatcacgtctcgacccatgggacctcacccacgtctggcacgccggttggatggcgtgcaaccgcaccaatcagcgatatccctcccaaaggggcagaggcatcagcgcatcctcacagtcggcccacatggtattgagattttggccgggggagcgcagccaacgcagctgaatgccgtccatcatggcgaagccggactgcagcaggtgctcgatattcacatcttccggcacggcccagttgatgttgagcgccatggtggccgtgcggcgctcgcggtcggcgaaataatcgtgcgcggagtgggccgggtcgagcgcctcggcgctcagcgtggagaacatatgcaccaacgtgggccttttgttcctgggcctgccggaagccgcggaatccgagggcttcgaccgcgacaccctcgacatgcccgccaagcagatcgccctgctcgaacaggtcgccgccacgaaccagaacgtcgtggtcgtgctgtccaacggctccgtggtctccgtggccccgtgggccaagaacgccaagggtatcctcgaatcctggctgctcggccagtccggtggcccggcgctcgccgatgtgatcttcagccaggtcagcccgtccggcaagctcgcccagtcgattccgctggacatcaacgatgacccgagcatgctgaactggccgggcgaggagggccatgtcgactatggcgagggcgtgttcgtcggctaccgctactacgacacctacggcaagtctgtggactatccgttcggtgccaagatcgtggccgccgtggccgccgccggcgagctgacgaagctgcccgacaacgccatgatgcgcatattcctcaactccatgccgatcaactcgctgtccaccctgctgggcgaaggcggcaagaagatcgccaagttcatggtcgacgagtacgccaagctcgcgaagtaagggctgaagcgaggcaatcgcacggcgtaagaaacccccgttgagggggattttgtctgttaacggattacactggaataccgtaaggcagggacaatggagggtttatggacagaactatgccatacccccgtttaagggaagtattcacggggggggggtgcgttcccggcgacaacacccccggatcatcaacgacagggcaggaaagtcataccaggaccggcgacccggccccgaccatcgaggcggcctaccaaacatggtaatggggtggcagcatgaagtgcttttggtcggtaataccgatttcattaccaaacagtggattcagcatgcttttccccgagaccatgtggtgatagcggaacgagaaggcaccgtagacggcaatgaccgtctcagaatcgtcaacatgtctgacgccaacacccttgtcgacaccatcaccacatacgaatttgatcgcatcgtattcttttccgaaaatctgaccccacgcagcgatagagacggcgatctgggagcattgcgaagacttctgcatgccattcgcaacaggcaaacgcaaatactgatggtcagcggccccgaatccgaatttacctatccggaaaacgccgacgtacgtgataccagcaaaagtctgatgtctcgagcgtcggaagaactctgcctgtattatgcgcgtacctaccgtctggaagcgaaaatcattcgttgcccatacttgtatgcacccgaacgcaatggggcaaccgcatatttcggcagactgttcgaacaggcatcagcagggtcgatctcgttccgcgaacgcgaacagcagcagacatgctttctctgcgccgacgatcttgccgaactgatctaccgcatgttcgacgattggaccgccgaaagcgaagtgttccacgtgcccaacgcgtttgacttcacatacggtgatttggctgatgtgatcagcgcggcatttcccggattatcggtgacttttggcgaagacaggtcccaatgttacccagcagacgatcatgtgctgcgattgcgctatggctggtcgccgcgatattcgctcaaacaggatcttccccctgtacttcaacgctggaaagaggcgcgtgcgcaggaacaatccggaaagcacccgatctgggattttctacgcaaccattcaaaaccatggatcgcaatcgaaatcttcctcacgttcatattggaagaactgcttcgcaccgcggtacaaggcgacagccagttgggaaccgtggatttgcgcctgtttttcgtggtgatcgttggcacgatgtacggactgaacgcaggcgtgttcgcggccgcgctcgcatgtgccggtatggcgttgtcgtatgcgtcgaagggtgcgtcgttcgctccgctgttttacgacacgtcgaactggcttgcgttcgtagtgtatttcgttgccggcgcagtatgtggatacgtgcagctgcgcaatcgcgaaaacctgcgattcatgcgtgacgaaaacagcttgttgagagagcgacttgcgttcctgcgtgacctgtaccacgatgtgcttgatgatcgtcgtatgctgcgcggacagattatcggcaggcgcgacagtttc

SEQ ID NO: 1279 - DNA, 45668 bp, Unknown
  R157_18m  MAG No. k141_3126
agccagtagtcgttggcccacggcacatcgtggcggtactgatcgaacgcggcttcgagcatgtcttccagtggcttcggatacgtaatctcctgcagcttatccatacgctcgtcatagtcgagtccgtcggccttcatatcggccatcgccttgtctcgggcctgacgctcctgggcacgcagcacctgcttggggtcttcgagcgtggcctcggccatggagatcacgtccagcgcataggtgtcggactcggggtcgagcagttcgagcgcggccagcaggaacggggagagcggctggtcgagggcgaagtcgtccggcatatcaagggtcatgtagtagtccttgccgccgtccttgcggtcctcggtttcgatgacttcggtatcgaacagggtttggaagatctcgtcggcccgctggtgcagatgctccttctggtcgggggtctgcgcggaatcgtcgatgagatcgtcgatacgggcacgggcgtcaccgccctgcgccacttcattgagcaccatcgaatgcgtgattttcaggtgcgggaccagggtctccggttcagcgtcgatgagcttatcaaacgtgctctggttccaggtcacaaaaccttccggcgccttcttgcgcttgaccttcttgagtttcttcggatctcccccggccttggcgatggctttctggttttcgatttcatattcgggagcctcggcgatcaccagtccctcggtatcgaatcccatacggccagctcgtccggcaatctggtggaattcgcgggcgcgcaggcggcgcatcttggtgccgtcgaacttggtcagggccgtgagcaccacggagtgaatcggcacattgatgccgacgcccaatgtatcggtgccgcaaatcaccggcagcagaccctgctgggcgagctgttcgaccaggcggcggtagcgaggcagcatgccggcatgatggatgccgacaccggtgcgcagcagtcgctgcagaatcttgccgaaggctgtggtgaacttgacgcctttgatggcttctgcgatggcttggcgctgttccttgctggatacaccggtggaggcgagcgcttgcgcggtctccaatgcggcgtcctgcgaaaagtggaccacgtaaatcggggtttcgccgttgcggaaggcgagttccacggttttttccatcgggtcgagcgtgtattcgtagctcaacggcaccggtcgcggcgcgtcggcgattacatccacgtccggggtgtcgttcagatcggagagcttgtcggcgatggcgtccacattgccgagtgtggcgctcatcagcaggaactgggtctgcggcagcgtgagcagtggcacctgccacgcccagccgcgctccggatcaccgtaataatggaattcgtccatcgccacgaggcccacatcggcatgggtgccttcgcgcaaagcctgattggcgaggatttcggcggtgcagcagatgatcggcgcgtccgcgttgatgtggctgtcgccggtgatcatgccgacattgtcgcggccgaacacttcgaccaagtcgaagaatttctccgacaccagcgccttgatcggagcggtgtaataggagcggcggccagtgcatagggcggcgaagtgcatgccgagcgccaccagcgatttgcccgaaccggtcggggtattcaaaatcacatggtcgccggccaagaggtccataatggcctcttcctgatgcggccacggctcgatgcccttgacgtcttccacccagccgaagaaccgttcgtagatgtcgtcggccgtaagattccgttcgcgtccgtcgccgtcccattcgggggccagccgccccagggatccgtattccttctcgtcagtcataatgctcagtctacctagtggcctattccgacggcacgagccgccctccgtcgctatgcgacgcctcccgccagcgggcggagccatgcgaagagctgtgccatgcacttggctccgccaatgggaggatcgctcacgccaaccggcggcgcacctcgtcggggtccacctcgggttcgaggggaggccaggtcatgttcatgttcttcaaggtggtgcgcagcagttcggagaccacggctcgcgaataccagcggttatcggccggaacgaggtaccacggtgcggcggccgtgctggttttctcgaacacttcctgccaagcgaacatgtactcatcccatcggtcgcgggcctcgaggtcggagatatcgaatttccagaacttggtgggatcatccagcctcccaagaaagtgttttttctgttcttcctggcttaccacgaggaagatcttgaggatggcgcatccgctggcggccagttcacgttcgaaatcgttgatctggtcgtagcgggcacgccatacgtcttcgggataggtgccatagacgtgcggcatgaccacatcttcataatgggagcggtcgaatacggcaatccaccccggcttgggcaattcacgcttcacacgccagaggaagtcgtggtcgagctcctcggccgtaggcttgccgaagccatggtaatggatgcccatcgggtcgccttggctgaacacgtggcgcacaatgccgcccttgccggaggcatccatgccttgcagcacgatgagcagccgccgtgccgagcctttgacgccattcgcgtacatgagccgctggtatcgggcgatttcggaggagctgatcgaaatgaacttctcggcgtcctctttattgccgtcgaatccgggagtggaatcgccttcgacatcagtgacctgcatgccgtggtggaacataagacgttgagcgggcggcaacgaccatacggcgctgagcagttcactggatttcgccgcacgcgccagtcgttcaggcacgctggcactggagtcgatggtgtctatgcgatccaccgcgagctgtaataccttgtcgatccgtcgatcggttttggattcctttcccttgccgttcttgttgttctttcctgaggattttccggccgtaccccacttgccggcctcttcaggctcgttggttctgtcgtcgtccttggtcatgctcccgattgtacgtcttgtaactcaggagacctagcaacgtagcgacattcacatttcgcttgttactgcaaatctataggcatgcagtcgttcggaccgtaattgttggctttgcaccaattccaagcctcatctgtcgagtcgaagccctcaccggcaagaatcacatagtatttgtcggaattgctgctgtaggcgggccagtcacccgaccagataagcagtacgtttgaattcttgttgtgcatcgtgatgaattgcgcaagaatatcgcggtagttccaggtcttgccttcagcctccatacccttacgcttgctggacagctgtgcggtatacgtggaatagaacagctctgcggagtccttgtcgtgctcgacctgccaatccaatgccttgcttgcattattttcggcttcgtcatccgtaacgttgctgccgcttatcacgcctggatcagacgatccccagcaatatcttctttccggcagacccaccggaacgcggctgcgcagcgccaccgttgcctggcgccgtcgacaatgtcgaagtaagtgcagtcgccgtgttgaaacttgggggcaacggcatcgaactcgctggcacctgctggggagcagccggtaccagcgtcgggccatccatcgactgaggacttgggcttggcgcagactgtgccatcggcgcaccgcattccgtgcagaatcggcttccctccggcatctccgttccacatacctagcacttcatactctctccgttctctctcgtccctatcggccaatcccccgcccgttttgcagtacataaagaagcggcaaacggcccgaaacatacctgagctatcaggaagacggcacgatctgctacgagaaagagatcatcaccgaccggcaaatcgtcggcatcatgctgaagcatccgaccagcgcacgcggcttcaagcgctacttgcgcgccgcatcatgacgcttgaccacgatggtgacgccacccgcagcgaacagcgtcgccagaaccacaaccaacgcaaccgaggcaccggtatcggccgtacgttcggtctgctgtggcttggtgctgccattggcattgacgctaccgctatggttgccgttatccttgtcgtccgtcccggtggacactccggtaacggcaacgggcagagcgaccgtggtcttattggtcgcaccggtcactgtcaggctgatatcaccggtcttggttccggcgggaatcgtgaccttgagctcggcggtatcgccattcgcaacctgcgcttcgccgaccacctgctcgccgatggtggcggtcagcttcgtctcgtcaggcacgcccagcgaggtgagcgtaagcttcgagaagtgcagggtgaacgaatcgccagccttgactgcaccggtcgggataccggtgacggccactgcacggcggtcgtagcgcggggcaaccggatcgttgtccttgagatagtcaatccaggcgtcgcggtccaccagaccggtgtccttggtgttcgtgccttgggcgaaggcgcggaagttatcgccgccctccaacaggaagctgaacgaaccgatacggtagttgcgtttcagatccaaaggctcaccgttgacggtcaccgaggtgatgtgatggccttgcgcggcatccggatcatacgtgtagctcacgttgtgggacagtccgagttgcagatacgcgcgcgatggcgtgctgccgtccgcgttcgtctgccactgctgttccagcgcttccttgaactgcgcgccggtaagcgtggtggtccacaggttgttcaggaacggcagtacagcgttggcctgggcgtaggtgatattgccgtcggcatcgagcgtgcaggcgtcattggtgccggacttgcagaattcggcacgcagaccgccggggttgaccacaccgatttcggccgcgccgcggtcctcgcctttgagcgaatcgagcagcgcatcagccaccagattgcccatggtcgattcggaggcgcggtcgtcacgcttgccgtccttgaatgcggtggtgatatccgcagacaccttgccgaccttctcgccgcccttttcatcggccaccttaagagcctggtacacgatgtccctcaccttggcgacagtcgggttcgcggcggcgagcaggccatcgttgtattcggcgtaatcgttgtagtgcggatcatttttgtcggcgggctgcgaagccacctgcacggccgtgttgccggacttgtcgtaagacaccgcaccggtggccgtgttgtaggtgagcaccacttggccgatgttggcggcatagctaccggtctggatgatcggccggttgttgtgcgcgggatcggtgtacgagtacttcatgtgggtgtgtgcagtgaagatcacgttcactgccgcatcggtatcgtccacaatcttctggaatacggggctggcggccttctgctcgtcaagcgtgggcttggccgtggcgtcatcttcattggaggctgcaccctcatggtattcggccacaatcacgtcagcctcgccgttggattcgtcgccgtcggtgagttgcttggccacacggttcacggcttccaccggatcgccgaattcgatgtccttgacaccaccgggagccaccaatgtgccggtttcctgagtgaccgcaccgatgatgccgaccttcacgccgttcacctcctgaatgctgtactcgggcagagccggggttgtggtgcccttcttgtacacgttggcaccgaggtaatcccattgggcgttgcgcgcgccctccttgccgatcacacgatcggtaaggtcggcatagccttggtcgaactcgtggttgcccaccgccgaagccttgacgcccaaagcattgagtacatcgatggtcggctggtcctgctgtaccgaagagttgaacagcgaagcaccgatattatcgccggcggacagcagcagtgatgagtcagggtattcgcccttgagctgctcgatggtggcggcgaacggcacggtgaggttcttgtcgatacggccgtggaagtcgttgaagttcagcaggttgatggtggtgctggcgggaaccggctgattggttgccatatagcccatacgcaatgaatggccattggtcacgccgtcgtctgcccagaacaccggcttgtacaccttgccatttactaccttggtggcttcggtatcaggggtgatggcaaaaccttcggtgttctgcgtacggatttcatccggagtgtcggtcagcttggtcagctgcagcacaccgttcttgaattcgtaggtgccgattttggcaccggtgttcgcgtcattgtcgctttgggcgagcagctggttgtgctcggcgtcccaagtcagatcgcgcgggccatcatagccggcgttcaccgcggactgcggcaggtcgatgtcggccaccggatgcaccaggtcctcatcattcacggtttgcagtgcgaaagcgtagatatggccggttttctccagtgcggcgaagaacagaccgccgaaatcattgccgaaaccgtccgggtcgtaggtcattacgttcttcgggtcaaggttggactggaatccgttggcggtcaggaccgagtcgggaataaaggctatgccttccaccccaagattggcgtccgctccgtggcccagcgtcacgccgaactgcgtgagtgctgcggtgagattccactcgtgcgtagcggtcagctcttgcgctccgtcgccgttggcgtcggtggttttcgcggtcacgtcatactgcaggatggaaggccgcggcacattcttgttttcgttgtcgcgctcggcgccgatgaatatgcccttggatgaatctccgttgatcagcgtgatgccttcggagtccacaccgcccttgccgtccttgaagtgcagctgcttgccgcccttggtctgaccgttgttggtgaaggtccagccatcagtgggatcctgctgccatgtgccgttctggtagacgaacttgttgatggagccagggcccttatcagcggtgttgccgagcgtggggttcagatcgttgtcggccgcccacagcacgccttgcttgccgtctttaccggcttcatacaccagaccagacagattgccgtcagtgtggtcgccgccttgtcctttggcgccaaattcgccttcggcatccactgtggtcacatcggccaatcccgaccatgcgtccacggtcatggtctcgccggcgggcggagtcggagtcgggtcatcgaacacgttctgtgcaccgggcgtgggcgtatcggaaagcgcgaaagtgccatcgtccttacgggaccatgactgactgtcgctcatcttcttcacgccagttgtatcggtattccatgacgtggaatccaccacatcgctatcggtaaagtcgccgctggtagtggtcagataggcttcgtcggcatcggaacccaggccgggctcggccttgtcggggtcgatgtatgccaccagatatccgccggctttgatgacggtgtccgtattcgttacttcgctggtgccgatggtgtagtgcttcttggctttcttgccgctgtcgtagatgccccagcccttcacgtcaacgtctgtggagccggtgttcttgagctcgacccaatcgcaacgcttgctatccgggtctccggcagctttcgtattgccggcatagacctcgttgatgattacggatggtttggcagccgtgttctgttcggcagtggcctgctgctcgtccgcagccgcagcgggcacgccgatcagggcgatgctgctcagtgtcaccgcagcggtgagcagcgcgatggcgcgccgcgacatcgcggtgaaattgttggtgtggaacattactcccgttccttcctcgggttgtgccgccgcagcatgatgctcttcggcggatgacaccccgagagtatgagagagaaatgaagccgacaccgtatgaaggcaaactcggcagatctccaaactgaactttggctgaattaccgctgaagctggttcttggatttgcgtcgaaccgtccgtattccgccgacaatcgcgattacagcggtaccgatggctacgctgatcaacgccggtcgttgcgcggcatggagggtggcgagatccggcccggccgcaatggcgctgttttcacccgccgagccatcagacgccgggtgattgcccgcgtcggcgtactgggcattgaccacactcgggccggtaagcgccacttggtcggcggtctcgaccttggccacatcgccgtgcttatccaaggtgacgcgggcgcacagggctttggcccagttgatacgctgccagccgtcgctcgattgccatagggggtatccggaatccaaggcagtgactttcaaaatcgcgttgcgctgatcggcatgcagttcgggataggccagtcgcagcacgtccgccgccccgcgcggtgccacgaaatcagcgccggactgggcggtgtcttgcgggaaggtgtaggtcaggcgtgcggtgtagacgcgcacggccgaggcctggtccgcgaccggctcggtggccaccgggtccagaaaatcgttggtgtagccgcccgaaccggaggccttggtgttggcgatgcaggcggcgagggtagtgccgtggccgtccgcggcgcagcgggacaccagatagtcccgcagctgccgggacgcgggcacgatggacgaagcgaattcgttatgccagtactgcccgttctgggcggatgcgccaatgcgcccgcccatgatgtcaagcggataatgcacgccgagcacgatgcggttgttgccggcctccgaagtgcgggccatgatttgcggcgcgagttcgggaatcatgccggccagcgcgataccccacgaataggcgccggtagtgtggccggaggggtaggaactgtttttctgcaagttcgagtagccgggcacgtgttcgagccatgagggtgattgcttgatgtcaagcgtggcgggcagtccggcgagatcgttagtgccgccgtagctgctttccgcacggttcagataggggcgcggatgcatggccgcacgttttgaggcgtaggtggaggccacgttaaaggagaagatatcggcgacggcgttgagtttcccggatttgagcccttcgctcatatatttgccaagcaccggaccgagcgcgtccggcatggcttcctcggcttgcagatcggagtcgacgagcgcacgcttgcgttgggcgttcaggccatccttatcgagattttcggcggctttgtggttaatggccacggccaaatcttcgtcgagtttcattgtatcggcgtcgagcaccttgccaccgtgttcggcatcggtgggggcctgccaatagttcttttcgtagtcggagagcaatgccacccaatccgggttgggcaactggtcggcctgtgcgattgcgggcgtcgcggctagcgtggccgccaacgccagcggcgcaatggtcgcaatagcaaaaacggaggataggtgccggaacatcttcatatgttccaacctatcctccgtgaaggctacgtagccggagcccagtcaaacactcagtaaattcttcgtgccggcttagcggcgattgagctgattgtcaggcctctggcttgtcctcaggcttttgagactcctggaattcgccggtttccgggtcaacctgtgactcgggctgggtggcgtcatatccctgttcgtagcgggtgcgccgccagttgcgaatcgaggcgttggtgccacggtgatgcacatggtatttgcgcggcgtaccgcccagcggcagctcttcgacctccttggccacagcgatctggttgacattggacgggtcgccggcggcgatcggcgccacgggctcgggttcggcgggtgcggccgtacgctgctgcatgcgcgagggcagccattcggcgagcctcgacaacagccagcaggcgatgaagtaaatcaccgcggccatgaccagcgtctgcaggatgttgaagtacatcgagccgagtcggcgcgattcctgcagcaggtcggtatacatgatgatcgagcctagggcggtgtccttcaacaccacgaccagctgggtgacggcggccggcagcatggcgtagacggcctgcggcacctcgatctccatcagcgactgcgtttcggtcaggcccaaagcgagcgaggcctcacgctggccgcccggcagattgccgacgccggagcgcaccagttcggcgaccaccgaaccgttgtacagcaccaaggccagcaccacggcccaataggacgggctgggcaggcccgcgaacgcgaaccatcgccagaagaagatcatgagcagcagcacgggaaccgcacggcagaactcgacgatcacggcggagacgccacgtaccaacgggttcggcagcagtcggcccacgccgaacaccaagccgaacaccacggcacccaccacggccacgatggtggccttgatggtcatccacagtccgggcaggtagaagtcggtccacgcctctcgttcgacggcgggcttccacagctcccagctaagctggttctcgccgtccggcgggttgtgcaggcgcatgaggataaacacgagcaccaccgcgaacagaatgcccgcgatccagttgacgatgcgaatggtgcgccggcccttgggacctggcgcgtcgaacagcacggaattcgaagtatcggccatatccgtcacctccttacggcgagtttgttggacaggtacgtggtgagcatgccgatggggatgatcaggatcacgtagccgagcgcgaagatcaggaagatttggatgatcacgtcgggacggaattcgatcatctcgctcatcagcgaggatgtttcggtggccacggatgcggcggcggccacggtggagttcttgagcagggcgatcagcgtgttgccgagcggtgccacggagcctcggaaggcctgcggcagaatgatctcggtggcggactgcatgaagcccaagcccagcgctcgtgcggcctcggcctggccaatcggcacggtgttgatgcccgaacgcagagattcgcacacgaacgccgccgtgtacaggctcaggccggtgaccgcgagccagaagaagttcgtggtgaaggtgtcggagaagctgagcttcagctgcgcgtaggcacccagcaccatgaacaccatgatgatggtcagcggcaggttcttgaacagttccacatacgcaccggccacggccctgagcgaggaaatcggcgagatgcgcatcaccacaaggatcacgccgaggatcagggagaacagggcggaccatagggtcagttcgatattgaccagaaacgcgccgagcacgtcatactggctgaagagttccaggaatccgctcatcaggcctcctctccttcgtccggggtgggcgggttgtagcgtacgtcgggcgtgtagttggtgcccttggtgttatcgctgatggcgttctcccacgagccgtcctgaatcatgtccacgatggcgttgttgattttggtggccagctgcgtgtcgcccttcttgatgcccacgccgtagtgttcctgcgtgaacggtttgccgaccaccttgagcttgccgcgcgaggcggaggccaggccggccaggatgatgtcgtctgtggttaccgcgtccacgatgccggagaacagggcagtggcgcattcggcgtaaccgggctgttccataagctggacttcggaggcgaacttctccttgacggtggcggcggaggtcgaaccggtgacggagcataggcgcttgccgttcaggtcttcggggccgttgatggagttgtcgtccttgcgcacgagcagatcctgtccggccacgaagtacgggccggcgaaggagacggccttcttgcgctcgtcggtgatggagtaggtggcgaggatcatgtccacgtcgccgttctgaatcatggcctcacgctgcttggagggagcttccttccagatgatctggtcttcggaatagccgagtttcttggcgatgtacttggccacgtccacgtcgaagcccacgtaggtgccggacttcttgaagcccaggccgggctggtcgaatttgatgccgatgcggatcttgccggtttcgtccgcgccgcaggcggccagcgacattgtgcaggccacggcggcgagcgcggcgatcacgcggcaaaccttccgtttgaacgtattggtgaatgtcattggattgcgtacccgtctttcagtgggtgaggatcttcgagaggaagtccttggcacggtcggtctgcggatgctcgaagaactcgtcgggcgtgttctcttcgagaatctggccgtccgccatgaagacgatgcggtcggcggccttgcgcgcgaagcccatctcgtgggtcacgcagatcatcgtcatgccttcatgcgcgagttcgaccatcacgtcgagcacttcgttgaccatttccgggtcgagtgcggaggtgggctcgtcgaacagcatgaccttggggcgcatggcgagcgcgcgggcgatggccacacgctgctgctggccgccggagagctgggagggcatcttgctggcttgggagtcgacgcccacgcgggcgagcaggtccatggccagttgctcggcttccttcttgtccatgtgacgcaccttgatgagggccaacgtcacgttttcaagaatggttttgttggcgaacaggttgaacgactggaacaccatgccaacttcggccctgaggttcgcgagctccttgccttcctgtggcaagggcttgccgtcgatgcggatgtcgccggaatcgatggtctcgaggcgattgatggtgcggcacatcgtggacttgcctgagccggacgggcccacgaccaccagcacctcacccttggtgacggtcaggttgatgtccttcaggacatgcaaagcaccgaagtgcttttcgacgtgggtcagttcgactagcggacggttcaggtcctctttgccgggaaccagcggggtcaatttggccttgcttggtgatgttgtgcttgtcgtgcgcgaacgcactgctgtttcattgttcgtttcagacatgagtgggaggataacacaccgacgtttccaacgtgttcacagtatgtccacacagttgctcagtcgatgtctcatttccgcatcagacatcgtgaaggcggcattgggcatcggcatacattctcgctgagtcgcgcatcgctcggcgtctgctgcgcgctgattgcctgctgcgtggtggctgagacgttgctgcgacggcaaagcgggcacgtgttgtcctatctgctgattccatgtttggccttggtgtcgttggcgttgctgccgtgtatgccgcagtcgggcgcatggctggcggtcactttgtattgtgtggggctggtctcgccgtttcccatgtcgtattcgtataaatgtgctaggcattttgagcgtggctagctgttcgcacacgatgagtgctgttatacggtggacgacactcccgaagcgcggtggataaccgggcgcggcacacgatatgccggtggataaccggttcgcgccgcttaagttatccccatttttcggttttgcccctgtgccaccgtggaatgcgctacgctcggcgcatgaacggatacaacgaagcgccgcacaatggcgaaatcaacaactatctgcgcaaagatcttgacgccaaagccacggccaagaacacggcctgttggaatctgctgggcaaagtgcgcacgaaacgcacgttgtgtttctcgctgtataccgcattggaattatgcggcgtggagttgccgaggcacagcacgttgccacagaaggacttttatgtgacggtgaggagcaaagggacccgctcttcattggacaatgtcgactatcgcatatggaatgcaaagttcaacagtatcgctttctcaaacggcgtaacctgcatgcatcccatggatgcgtggatacagtttgcccaatatctcaacctcactgaattagtggtgctggctgaagcgctcatcagacgttatggatatgccattgaacaattcactcaacgactaacggcctttcaccgcgttattggtcgtgcgcgttgtgaggcagcgctgaagctcgtaaaaccatcggattccgttcaggaaactcgtacacgcttggcgcttatgcttttcggcctgcccataccgcaaacacaatatggcattaccgattcagagaacggatacacctacaccgttgacatggcttatccacaatacaaagtcgctattgaatatgatggcgatcatcaccgtcgcttccgcaaacaatatgtgcgggaccagcaaaaacgtcgacgtctgcggcaattgggctggaccgtcatcgaggtgttcgccgatgacctgtggaacaccgccaaacaacgtgccttcgcacaagaggttgccaccgcgatgcaaataccgcttcctggccgtcctcaaccttcatgccgggtattaatagacggcagccttaccatcaatgcgcgcaaaggggaatacaggaggcggaaacaagcaaaacacaacaaagcatcacaacattaatcaaatacggagttgcgatcgctcctcatgaggcggtaatttgcccatggggcggtttgaagaaattgtaaaaccgcggaattaagccattttgacctaccgccccatggggttttcaccgccccatgggttgtttaccgccccatgaggaagttaccgccccatggggggataatcggcaaacgccaagggggacaccgcatggtgcgaggtttgccgcatggcggaggtgccatcgggcggagtatttggcaccccttggcaggtatttggcacattgggccccacccgcaaaaagcaaatggcccttggaattattccaagggccatttgcggctaatagcaccggagcattactcctcgaaaattaatctacgcatgcggagaccgccgttcgaagccgaaggcgcactaaggtgcgtcgagtgctgaggaaaggcggtatacgctccgtagattagttttcgtcggcgtccgggtcgtagtcgacgccggtctcggcgcgctgctcgtcggaaatcggggccggagcaccggtcagcgggtcgcggccgccgccggccttcgggaaggcgatgacgtcgcggatggagtcggcaccggccaggatggacacggtgcggtcccaaccgagggccagacccgcgtgaggcggagcgccgtacttgaatgcctcaagcaggaagccgaacttctcgtcggcctcttccttggtgatgcccagcacatcgagcacacgggcttggatgtcgtcgcggtggatacgtacggaaccgccgcccatctcctcaccgttgcagacaatgtcgtaggaatcggacatggcgtgctcgggatccttgtcgaacttgtcgatccaatccttgctcggcatggtgaacgggtggtgcatggaggtccacttggagtggccgacagccacatcgtcatcatccggatcgtcggtgggcttgaacagcgggaagtccacgacccaagtgaaagcgaacttcttcggatccagcaggccttcgcgggaggcgagctccacacgcacggcacccagcagcagctgggcggactcgcgagaaccggcggcgaagaagacggcgtcgccttcctcggcaccgacggcctcgcgcaggccgttgcgctcctcatcggacaggttcttggcgacggggcccttgagttcgccgttttcgccgaagaccacgtaggcaaggcccttggctccacgctgacgagcccaatcctgccaagcgtcgaactgacgacgcggcgtggcggcaccgcccttgaagaccacggcacccacgtacggggcctggaacacgcggaacggcgtgttcttgaagtactcggtcagttccaccagcgggttgccgaagcgcaggtccggcttgtcggagccgtacttgtccatcgcatccttccaggtgatgcgcggtagcggcagctggacctcatagccggcggacttccagatggcggcgatgaccttctcagtcatggccatcacatcttcctggtccacgtaggccatctccatatcgagctgagtgaactcgggctgacggtcggcgcggaagtcctcatcacggtagcagcgggcgagctggtagtaacgctcgacaccggagaccatgagcagctgcttgaggagctgcggggactgcggcagggcgtaccaggaaccgggcaccagacgggccggcaccacgaagtcgcgggcgccttccggggtggacttaatgaaggtcggggtctcgacctcggtgaagtccatgtcttccagcgcgtggcgggcggccttagccatgtcggaacgcagcttcagattgtgctgcatggacggacggcgtaggtcgaggtaacggtacttcagacgcacgtcctcgcccggcagcttgttctcggactcattctcaagagcggtggaaacctggaacggcagggcgtcggccttggcgaggatctcaatggtctcggccacaacctcgatcttgccggtggccagatgggtgttctcgttgccatccgggcgcaggcgcacttcgccggtaatctgaatcacgaattcgctgcgcagcgggcgggccatatcctcgtcgtaaatgacgacctgcacgaggccggtcgaatcacgaaggtcgatgaaggccacgccaccgtgatcacggcgtcggtcaacccaaccggcaagggtgaccttctggccgaccagggcctcggtcacttcagtggcatgatgtgttctgtaagccgtctggctcattatcttgtttctcctcgatttttcgcgcgaatacgtcagatttcgacggtttgctgggcaaccacagtatccggctcccacgacgtgcaatcggcggcaacctgctcgcccgtgacgatgttcttgacctcgtcgccagcgggctctgcaccttccgcaccttcggcagcggtggccgggaaccacacgtacggaatgccgagtttgtccgcgtacttgatctgcttgccgagcttggccgcggtgggtgccacgtcggtggcgatgccgcgcgcacgcagttggttcgcaatacggttggcggccgggcggtcctcttcattccacacagcgaccagcacggcggccgggctgacgcggttggcgtgcgcgccggcagcgtgcagcatgtagctgaccagtcggctcaggccgatggacaggcccacgcccgggtacttgcggttgccctgggaggcgagattgtcgtaacggccaccggaacagatggaaccgagtgatgcggcaccgtcaaggaaggtctcgtagacggaaccggtgtagtagtcgagaccgcgggcgatcttcaggtcggcgatgacggaaccggggcggatggcggcggcctcgtcgacgatcatggccagggtatcaagtccctgacgagccagcgtgtatgcctcggaatccttggcgatgccgtgagactcgcacagcgcatcgaacttggcggcaagctcggcaccgtcggaggcggtgagctcggccaattcgaggcaggcgcgtgcctgtgcttcggtggcgccgcaggtctcggtgagcagtcgggccacctcatcggcaccgattttgtcgagcttgtcgatctcgcgcagcacgccttcgacgtccgtcaggccaaggccgcggtagaagccttcagacaacttgcggttattggcgtgcacggtggccttggggaggccatacgcgcgcagctcttccagcgcggagaccatgaccagcggcagttccacttcatagtggtcgggcaggtcgccggcaccgatcacgtcgatatcggcctgcacgaactcgcggaagcggccttcctgcggacgctcgccacgccacaccttctgaatctgccagcgcttgaacgggaacgccaacgcacccgagtgctcgaccacataccggctcagcggcacggtcagatcgaaatgcaggcccaaccgctcttcaatcggagtgtcggattcatgaccgacctcctgcaaacggctcagcaggtagatctccttgctggtctcgccctttttcaacaaagaagcgccggtttccaccgctcgcgtctcaatgccgatgaagccgttgagctcaaaaaccttacgaagcgtatcgataacacgctgctccacaacacgttcggaggggagccactccgggaatcctgatattgatgcacctttagccacgaaatcaatataataggtgagggttgcgtcaaaacttcctggttcgcccgggatgggagacgctcccgcttatgcattctacgctttaaggagctggccatggccgacgaaactgtcaccgaacccgtaaacaccgctgcgcccgaagagcaggcaacgacacccgcacccgaagccagcgcggccacgccggcgccgactccgtcccccgcttccatgccgaaaccgcacgcgccctcccccgccgccttcgccaagaagactccgtcggccaagccgcgcgctgccgccccggccgccgccaccgccacctattccgaggctgatgtcaaggccgccgaggccttcggccgcgtggatgacaacggcaccgtcttcgtcaaggatggcgacgccgagcgcgaggtaggccagttcccggatgtctccaaggaagaggcgttggcactgtacgcccgtcgtttcctggatctcaaggccaagctcgatctgctggccacccgtctggcttccccgaacatcaaggcccgtgaaatcgacgagtccgtgaagctgctgggcgaagaaaccgccgaaccggcggtggtgggcgacctcgcggccctcaaggcccgttacgtggaactgaaggccgccggcgaggccaagaaggccgagatcgccgaagcgcgcaaggccgctcaggccaaggccgtcgccgagcgcaccgccatcgtcgagaaggccgaagctctggcggcctccctgggcgacaacaccaactggcgctccaccgccgacaagttccgcaacctgttcgacgagtggcagaaccaccagcgcaccaccgtgcgcatcgacaagccggaggccgaggcgctgtggaagcgcttctccgccgcccgcaccaccttcaaccaggctcgccgcaagtgggctcaggctcgcgacaacgagcgtacagccgccaaggaagccaaggaagcgattatcgccgaggccaatgagctcaaggattccaccgcttggggtgagacttcccgcaagttcaacgatctgatggaccgttggaagaaggccggccgcgctggccgtaacgaggacgacgagctgtgggccaagttccgcgaagccgccgacaccttcttcaacgctcgtcaggctgatcgcgatcagatcaactcctccgagaaggagaatctggctgccaaggaggctctgctggtcaaggccgaggctctggtgccggtgaagaccgacgccgaggccaagaaggcccgccaggagctggccaagattcaggaagagtgggatcagatcggttacgtgccgcgtgacgatatgcgccgcatcgagaaccgtctcgacgccgttgacaagcagatcaaggccatcgaggatgccgcttggaagcagaccgacccggaggccgacgcccgcaagtccagcttcgaggagcagctcaacgcccagctcgccgagctcgacgccaagatcgcggccgaatccgacccgaagaagaaggccaagctcgaagccgagaaggccaccaaggagcagtggctgaacgccatcaagtaagggtctcgtgccaggttcccctctgagggaagccggcagcaaggctgactgaggggagtttacggttataccgcaagctcccctcagtcgcctacggcgacagctcccctcagcgaggggagcttcgtcatatttatgccgttttcttctgccctatactcataactccaccccatagttcctcagtcacccagcaattggtgtcttacgcctgagtccctaccggtgctgcaacaattgccgtgagcccttgatgtgcggccagatattcatgcaacggctggctgtatggcatattcagctcgccgtaattggttccggcacggaaggcggggtaactgtcgccgccctgaagcagatatgaattggatgcgataatcaccaggtcatcgtccgcaatcggtcgaccgtcaacggcgaggttcacgatacgaaccgccgcatgttcgtcggcagcacactcgtcagcgtcagcgttggtatcagcggcggcatcggtatcagcggcggcatcggcattgccgctcccaccggtcgtaccgcattcggcataccgatacgtcacgttcgaggagatgccgagccagcgccgctccagtcgcccatcgtcacggtggaattgctcggcgagcactctcttcacatcgcgcccggtgagcgtctcatgcgcggccttgaactgcaaggccatgagactatccacctcgcgcacggtgactttgccatcgccattcatatcaagccgtggagtccgcagactgccattattcgaaaatccgattaccggcaaacgatttccggcatacacatgcttcatgattgactcgcggttcgcgtccgccaccagcacaccgaccgtattcccgtgcttatccgaaccttgtttgtcgaaattcacgccggaggccaaggtgccaatcaccgcgttgccggcatgattcgaatatgttgccgccgcctggtaaatatgctgagcgcgcgatacctcatcgttcgcctcagcaccggcagacatccaagcggcttgcgccggatgcgcattaagcccttccacgcccagcacgccgtcaaccgccgtatggctggtgccattgccgaggtccacatcggccactcgcaccgtggcgcgacgcccggcaccggtgatgatcaaatcctgcacggccatattccgcccgaagctgcccgcctcgtaaataggcgcgccaccagcggtcgtaccacgcttgatcgcgtgattgtggccggtgtataccacatcaacatctcgcccaatatcggcggcggctgaggcatcggcgtgcagcaaggccaccaccgcatccacctttccggagcgtttgagttcacgggccacgcgattgatcgcgtccaccgcccgttcgtcaagatcggcatcacgcgtaatctgcggagtggctaccgagccgagcgcatcagtaagggcgcccacgaaaccgatccgcttgccgttcaccgttcgaatcgtagagtcacgtacatggctcagcagtccgtcaggcgacttactggcggcagacgtgttggcgcacagccagtcgatgccattgctgggatcagcgatgcgattgttgaaatcggcgacaccgcggtcgaactcatggttgcctaccgccgaaatcgtcaatccccacgctttggccatgtccagcgtgggttggtccttctccaccgccgactcatacggggaacctcccaccaaatcgccggtcgataccgggatcatattgccgggattatggctgtcggccacggtgaaggcggtggcgttgtccgcaccacgttcgatatgcccgtgaaaatcagtgatgtcggcgatggtcaccgtacgggtgccggaagatggattatcgccggaaaaaggaacggctcccgtggttcccgcacaagcataaggaaccaccagagccgtaaggataagcgctactgcaccaaaagcgatccccgatcgcttgccggcccaccgccggttcttcatattcctgctcacaccagtcacgttaggatcgtcgattgaacggccatgcctaggaaggcgactctcaggtgaattcttagcggcgtcttgggatgggaaaggcctgaccccgtactatcagggtcaggcctttgcaacccgtgtcactacgaatgcgtcggcaaggggagattactcggcaaattcctcgacgcagatctcagctaccgcatccacgcacgcctcggcaatcaggcggccgcgttcggcgcttgagccggccggattggcgagtccgccgtgagcgggaacgtcaccttggcgcaccgggtagcgtacataggatttcgccgtggcaccggcttcctcgaccatacggtccatgtgcaccagttccggcgcgtagtggagcatcaacgaagtttcggtgacggccgcatgctccaatgcccagccggggaacaccaatccatcgaacaccttgtcgataaccgactgcggaaccgggtcccaccaattggtttccacgatggtggccactcccccggtttcgcgggtgaccaggtcgatggcctcgacgatgaacgcctcgttttcaaaatgcgcgttcatgacgacgatcttggtgaagccatcggcgatgagttcgctcagcacgtcgtgcatttgggtgatcactgtcacgccgttcatgtcgatagtacccgggaacagcggcccgccaccggagagcggcttggacttgtatccgtagctcagggtgggcagcacggtgccgtcgatgcgttccgccagatcttcggcgacccgcgtggcgagtaccgcgtcggtaccgatgggcagatgctggccgtgctgttcggtcgaaccgatcggcacgatgacgggatgagtcttcacctccttgaattccggccaggtcatgtggtccatacggcggttgctacccattgcagtactcctttgggttggtggtggattggatggtcaatgaatgcgcccggctccctcgggaaaggagccggagctgaggagatcagatgtgattcagatccttgtcggtgttttcatgggaaagaatcatcgcgaccaaggcgatggccgcaacacccaccatgtaccaggccggggcgatggatgaaccggttagggcaatcaggccagtggcgatgaacgaggccgtaccaccgaagatggcattggccagattgaagctgaacgcgaatccggtgaagcgcacggaggtggggaacgtctcggtcaggtagctggacagggtaccgtcgttggcggtcagggtggcgcacattgccagctcaaccagcagcacgggccagaactgggaggtgttgaggatgaggaaggcaggaacggtgaggacgatgaacgccacgcaagcaccgatgagcaccttcttgcggccgaatttgtcggagatgtggcccatgccgaacaccatgaacacgtaggcgaccaagcagatggtggtgatggtgccggactgggtggcgtccatgccgacggtgtcagacagataggtcggcaggtaggtgagcacggtgtagaagccgaccgcattcagcacgcaggctccgaagctgatgatcagggccttgagatggttgtggaagagttcggcgagcggggcgaacatgccgctcttggaaacgacttggccgtcagcggaggcggcgctcttggactcaagagcatcgttcattgactggtacacgggggaatcggagagcttggtacggatgtacagcacaatcaggccgagcgggccggccagcaggaacggcacacgccatccccaaccgaccatcgcgctggagttcatgttggcggtcatcagcgtggccagcgtggagccagcgagcagaccgatggcggtggacgccggaatcagcgagcagtagatgccacgctttgaggtgggtgcatattcgccgaggaatgtggccgcaccggcatattcaccggaagcggagaagccttgcaccatgcgcagcagcagaagcagaatcggcgcgccaacgccgatcaccgagtaagacggcaggcagccaatcaggaagctcgcaccggacatgaacataatcgagtgggccaatgcggctttacggcctttcttatctccgtagctaccccagaacagtgcgccgattggacgcaggatgaaggatagcgcgaacacgccgaaggtctgcagcatggcgacggtgtgattgtcggttgggaagaacaccagggcgatggtggtggcgaagtacgaataggaggcgtagtcgaaccactcgatgaagttgccaaggaaggaagataccgcgactttcctgaccatggcctgttcttcagtttgaggggtgaaattcatcagtcgtgcagatgtagtaatcgttgcggaactcatgatgtcaccgtcctttcaaggatgtgctgttcgtgtgactgaatgggattcaagtgggaattcgtttcgcagcaggtcgaccagcgccgcgatagcctcgactatgcccttgagtatttgctgaaacgtgaatcgtcgattaacccgttcggcgtagaagtggacaggttgcccagtggtgctggcgcattattcaccatgctgttcttgccatgatttcgtgagtttggcggcgaatagcagcatcgaccagttcggtttgtcgttatagtcgacgccgaccatttgtgtcactttgtccagtcggttgtacagggtttgccgtctgatacccaattgctcgcacgcgccggttttgctatcgaggttgtcgaagcagacgcacagtgtgtccagcaacaacggagaggcggcgacctcgaatccgatggtctgcaccacgagcatgcgcatcgccttgtccatatcagaggatgcgacgaaacggtcgacgagtgcggacatggtacttacgattcgcccgtatgccggttcctgattggcgatgtcacgcaataccgcgaacccgtcgaccagcgtcaccgtgtccaatgccactcggccatgcaccacgtacacaccgtcgccttccagtacggcaagcgcatccatgcaatggcgtccgaatgcggccgcaccgtctgaggaatcggtggtggagcaccatccgaccatcaagtcaccttccagcatgcaggagacggcgcatcccgaccgttcttcgaaccgttcgaccatcatcgatacatggttgatgccttccaccaccgatctgaaccgaaaagcgaatggcatatagatgcatgatccggcaaaacccagcgcgtcgagcatcgcatgcgcttcctgcgcctcaaatgtattgacgtgcacgccgtcggccgggcccatactcagatgatgcatcatgcccatgcgcgcgccgccgtcaatatagagggcggccaccggagacacgatggtggcgatggcccgacgcatcgtggcgtcgaaagtcatggtgcgttgcgtgatctccaatgctcccaccggccgggagcgactttcaagggcgatgacggcgctcgattcgttgccggcatcgaacgcacgacccgctcgagcggccaacagaccgtcaccatcgaaaatggcgacgctttcgccgaacagcgacgcaatggtttcggccacagcctcgatattgccggtacgggacaatccctcacgtaatgaagtggacattgtgtccacctccaattgcaagtgcatctgttcgtgcacgatagcggtattgacactctgacagatgtcgacaaaaggtacgcgagatttcagaccaatcaacgtcaacccatgcagcctggccgcagacaccagttcgtccggcatccgcaccacaccctccaccagttcgaccaccagagcggcgacaccagcctgtgccaggcttgctacatattgtcctaacgtgccgtgccaatcggcggcgagcagagcgttaccctcgataatcagcatctcaccgcccgaaaggaaactggagacatcctctcgctcgttggtaaacacccatcgcactggcgtatcgaggtctttgccttcgacctccaccacaggatcggctcgtttgaactgcgtgttatgaagcgcactgcgaatcgatacagtcatacaatctgtccattcccccgcggaacaccggtcgttccggttaacctcaccgcaaagcgtgctgttgacaataacctcagttggttacgcgggcagtcggttcacgtaaccgttcggcaacacaccagttgaaggagcgacgatgactaccacactgttcaccaacgcacatatcgccaccggagaacccggcagcacggctgcaagcaccctgccattgcaggacattctcgtcacggatggcgtgttcaccgcattcggtcccggactcgcgcaacaatatgaggctcagggtggtgatctggcggccattgaggtggtcgatctgggcggcaaacttgtctgcccaccgttctgcgatacacatctgcaccttgattacgtattcacggcccgcaagcccggtgcggtgaatgaaagcggaaccttgtttgagggcatccagcgatggagtgagaccaagtccgacttgacggtcgacgagatcaagcagcgcgcgaaaatcggcattaagaaagaaatgctgcatggcgtgcagctcattcgctcccatgccgatgtgaccgacccgaacctgacctcattaaaggcgctgctggagcttaaggaggaattgaaggatacggtcactctccagatcgtcagcttcccgcaggagggcatgtactcctacgagggcccgcatggcgaatcgggggccgagctggtggaggaaggactcaagatgggtgccgactgcgtgggcggcatcccccatttcgaacagtgccgtgagtttggcgagcattccatgcacacggtagttgagttggcttcgaaatacgacaagctcatcgacgtgcattgcgatgagacggatgatccgaattcccgttacgtggagctgctttcggcgttggcatataaggctggcattggcccgaaggtcaccgccagccacacctgttcgctgggatcggcggacaacgcctacttcttccacctgaccaagctgcttaaggcggcgcatatcaacttcgcctgcgcccccaccgagaacctgtatttgcagggccgtcaggataccttccccaagcgccgtggcatcacgcgagtcaaggagctcactgaggcgggtgtcaatgtgtcattgggccaggattcaatgcaggacccgtggtacccgctgggcaatggcaatatgatgctcattcttgattatgtgctgcatttggcacagatgatgagctttgaagaaatcgacgatgcgttgaagttcctgaccgtcaacggtgccactacgttgggcctgcgcgatatgtacggcttggaaacgggcaagccagcaaacttcattgtgctggacgccgatagtgtgttcaacgccgtgtatgagcgctgctcggtattgcgttcggtgcgcgccggccgcacgctgtttacccgcgaggagaccatcgacaccggactcgccctgctgcaataacccgacaacaaacagtagttccccttgacaggggagctatcgccagaggcaactgaggggtagaccaaaaacgtgcacattatgtgtgcgtaggtctacccctcagtcagcttcgctgacagctcccctgtcaaggggagctttgctggtatgcgctagctacgctatcgaaacggactacttctgcggagcgtcaccggaatcggcgggagcggattcggctggttcagtggccggagtggcgtcggctggagtctcgccatcagtggaggcaccggcttcggacgaagtttcggcatcggtggcggcaccgtcttcggcgggcttatcggcggcggccggctcctcgaacttctcccccttgaaggtgaattcgccgaggataccctcgccttccgcatccacaatcacgcgctgaccgtcttcgagatcgcccatcagaatcttctcggagatggcgtcctcgatgtcgcgctgaatcacgcggcgcagcggacgggcacctagcagcgggtcgaagcccttctgcgcgagcaggtccttggcggcgtcggtgagttcgagcgacatgtgacggtcgaacaggcggtcgttgagctgcttgacgtccagatccacgatctggcgcacctgcggctcggtgagctgcttgaagacgatgatgtcgtccagacggttcaggaactccgggcggaactgctgcttcaattcggagctgacctggtccttcatgcgctggtagctggactcgttgttagcacccaggttgaagcccgtgttggcggccttggcgatgtctcgcgtaccgaggttggtggtcaggatgatgatggtgttcttgaagtccaccttgcggccctgaccgtcggtcaggtggccgtcatcgagcacctgcagcagcgtgttgaagatgtccggatgagccttttcgatctcgtcgaacagcaccacggagaacggcttgcggcgcaccttttcggtaagctcgccgccctcctcgtagccgacgtatcccggaggcgcgccgaagagtcgcgaagccgcgtacttctcggagaactcggacatatccacgcgaatcagcgcgtcctcatcgtcgaacaggaattcggcgagcgtcttggccagctcggtcttgcccacgccggtggggccggcgaagatgaacgaaccggacgggcgcttcgggtccttcagacccacgcgagtacggcggatagagcgggacagggcggaaaccgcctcgtcctggccgatgatgcgcttgtgcagttcggcttccatgttgagcagtttcttggactcggcctgagtcagcttgaacaccgggataccggtggtggagctgatgacctcggcgatcacgtcctcgtccacgaccatcttgacgtcggactcgccttcgcgccaggagtcttccttctgcttgcgatcggcttccagtttctcctgcttgtcgcgcagttcggcggccttctcgaagtcctgacccttgatggcctcgtccttgtcggcggcgatcttggcgatcttctcgtcgagttccttgagctcaggcggggcggtcaggcgcttgatgcgcaggcgtgcaccggcctcatcgatcaggtcgatggccttgtcgggcaggttgcggtcctggatgtaccggctggacagctcggcggcggactgcagcgcgccatcggtgatggtcacgtggtggtggttctcgtaacgggaacgcaggcccttcaggatctcgatggtctcggcgatggtcggctcgtgcacctgaatcggctggaaacggcgttccagagccgcatccttttcgatgtacttgcggtactcgtcggtagtggtggcaccgatggtctggagctcgccacgagccagcatcggcttcaacatgtcggaggcacccagcgcgccgtcggcggagccggcgcccacgatggtgtggatctcatcgatgaacagcacgatatcaccacgggtcttgatttccttcagcaccttcttcaggcgctcctcgaaatcaccacggtagcgagaaccggccaccatggaaccgaggtccagcgagtagacctgcttgcccttcagggtttccggcacgtcgccggcctgaatcttctgggccaagccttcgaccacggcggtcttacccacgccgggctcgccgatcagcaccgggttgttcttggtgcggcgggagagcacaaccatgacgcgctcgatctcgttggtgcggccgatgaccgggtccagcttgccttcagcggcttcgacggtcaggttgcggccgaactgatcgagaatggcggaaccggacttgttctgcttgtctgtcacgccgccggcgttggccagatcgcccttgccgtcaccggtgccggtgccggagttgccgcgaatcatatcgatggtcgcgctcctgagctcacccaggtcgacgtccatcttgatgagcacctgggtgcccacgccttcgccttcgcgaatcaggccgagcaggatgtgctcggtgccgatgtagctgtggcccagctgcagggcttcgcgcagcgagaactccaacacctgcttggcgtgcggagtaaaggggatgtgcccgttcggagccgcgttgcccttgccgatcatttcttcaacctgcttgcgagtggcatccagctccacgcccttcgaggcgagcgccttggcggccacgccctcaccttcgcggatcaggccgagcagcaggtgttcggtgccgatgtagttgtgctgaagggccctcgcctcttcctgcgccaacacgatcacgcgccgtgcacggtcggtaaaccgttcgaacatgcttgtccttcctcaattgacattccgtcttactctaccgattcacgatgacgtttattcatcggattccatgaattgcgccgtgagaggataagaaaacgatatgctggttctagattcacccgtagtcgattacaaggaggctcgaaatgagtgaagcgacaaccaagcccgacatcgttgtcggcgtggatggttccgatgaatcctttgccgcgctgaagtgggcgcttgaggaggcttcgttaaccggtcagagcgtcaacgccgtgtttggctggacgcattcgtgggatatgggttccgaaccggacagcgacgaggcttgggccaaagtccgccacgacatcgccaacgagctgcgtgtgtgggtcgacaaggccgctgcaggcatcgacttcgatccggcgaatctgaagctcacctcggtgaaggcctccggcacttcggccctgctgcagatcggccatgatgcgcagcagatcgtggtcggccgccgctcgctgagccgtgtggcccgctggttcatggggtccctgtccgcttcgctggccgaggccgccgaagtgccggtgaccgtggtgcgcatcgccggcagcgaggatgagaccgtgaccgaggccatcgccaatgccctgacgccaggagaccagccggtccactacacgcagcctcagccggtggttgaggaggctcgccgcccggtggtggttggtgtggatggttccgagacttcccgccgtgcgttcgatttcgcactggaagaagcacgactgcacgacgcgccgctgcatgtgatgttctgctggcagctcaaggatttgggcgttattccgggctatgagaacgccgtggcaccggtgaaggtcggtcagcgccgcgccgaggagattctctctgagctgatggccaaggcccggattcccgatggcgtcaaggtcagcacaaacgccttccatattcccgcatccaaaggtctgatcgcggcctcgcggtacgccagccatctggtggtcggctcgcgtggcctgtccgggctggacgcgcacttcctgggatcggtgtcccgccagatcgtgaacttcgccgagtgtacggtgaccgtggtgcactgagcccgcgcagatggcataacacgctaatacgaatctcggtgatgggcttttgaggagaaagcatcccctctcaaaagcccatcaccgaataccaatttatggaagatttcagtcatccatttttgctctcccgtgttccctacgatcaagagaaacgaaacatgaagaatccactcactgaagtggcctaccctaatttgtcattgattatctcatcctgcagataatacacattccaatcagatggttcattcgccgaccccacggcaccatgcgtataaggaaccagcaggaatggcctcgatgtatctggttggacaaagccaactgaacattgcccatccaggcataaataccgacgcagggcatccgaatcaacgcctttgggaaaataccaaacgacggcttgataggacagcatgtcggaacgcggcacgtcatcgcaatcagaaccggaaccttgcatacatgtcgcctcgtcctccggcccggttagcgtcaggccaatgccatgcctataaagaaaatcctggttcttatcccctcctatggtcaaggaatccgtgacgttcccgctctgtaatggatcgttcacaccgacctgtccaacaatgcttccataagtgtgcataaaccagcaaacgccatcaagacggcaatacatgcccgaaatgctgcgatacgatccgtccaccgcagctctcacaatatcgtccatcgtgtaatcgtctcgagattttagcgatttgcttactgcatcaattgccacaggaagaccatcgacccatgaatgttcctcactgcgtacggaccgtagttcccgagcagatgcgtcgccatcacaactgaaggtctgattctttatgccgtcgtaagctgtggaatccttgcgaaaatcaaatgcactgatattgtcgagaccattatcggatagagcatttttccgcgccttcgaaaaacgccgatactcagctctgcaatcagcaaacgcatggttctgatcttgtattgccttcggggtaatccaaaagctattgacgatacacaatatgatgatcaatacacccgcaattatggcagcaataatcataagaaacgaagaacgtgcagcatgcacggaattgacagtgaaaaacgacgatgtctgacgacgtcgcttatcacgatgcaggacaaataccactaatgacaggatgattcccacaccggaaataccccatcctgccatgcgcatgctgccgatatatttaacgggcaacactcccataagcatgattcccatttgagcgaccaacgctaccaatgtcagtccgattgcactgaacagcaaacaggtcaatacacggatagacgattgcctcatggaggatgcaactgctacggagtctgcgccatctgccgccacggcaaaggtatcgaacgaggtctctcgcgatgccgttgattgcgcaacggttttttgctgccatacagtatcaagaggttgtccgcagtacgggcagaaattagaagcttccatttctatatgtgaaccacacaatgggcagaacattatgtctccttttgatgtgtctttcggccttaccagtgcagctacaaacgactacgaagagctaagcatcattgctcatcaatcaactcctcaatgctccaaaatgacggtcagttcgtcatcgctgtaggtccatgtcgcggtgatgccattccatttatctgtttgcgtgccgtctatcggacgggtatggtcgattttcgtttgtatggaattgggcatattcagttcgtcgtacacacattgggcaatggcgtagttatatgaatttgcggtgatggtcagggttctgccattatcgccgatgttgaacatgttgtattcgccaccgacgttgctatcccaatcgtccgagtcaaattgggtctcacatgcgttaatcgcactctggaacgaacgataacgtgttgtccacaggccgacgccaatgtatacgattattgcagcgacgataacggctacggtgacaaccacggtcgtgctggtcccggacttggtgggtgccggtcgggaaaccgattgggcggcctgtatctgccaattcgaattcgactgagtcggcggattcgacgaatatgatgattccgcacttggagcagacaccaccactgacggagttttcgtttccggagatgtctgcgattgtgccggctcgccggaaagaatcaacttggtcccgcattgcgggcagaactgctgcccaggtgccgactgcgcaccgcatttatggcaatacatcatgttctccttcgagctcaagcatccttatcactgaccagcagcagaatgccgctgatcagattgacgaaaatcaacgtgcacacggcgaacgtggtggtattcggcctttcgccggtgtataagcgccagctatacaccgtcattggaatcatccaagccaagcaaatcagaaacaggaaacctgaaccggacgcaaacaaagtggcgacgccatatagtccataaagaccgcagaacacgatattcactatggcggcgatcagacgcaacgtgctgtcgcgactggttttcacatagccccttggcgtaaacgtctgcacaggttgctgcatatagatgtattgcggttggggctgcgtctgcgtaaactgcggcacagattgaaattgttgtgattgaggtgccgtctgctgctgtgttgacagtagtcttgccccgcatttgaggcagaatatttgcccttcaatactggttttcgcaccgcattggccacaaaacggcggcaccttcggctcctgcaccgcatgcaggaatgtggtctgcgtttccgtctccggcaatttcacgccacagcgcgcacaaaaacgctgtccgtcaatcgaaacctgtgccccacagttgccacatgtcaccatgtcgagctcctttctgcagcgctccgtctatgcagacagatgcaaactgccttttggaatacgatggaataaaatacacccgtgaaatcagccgaagcgtcctctctactcttctgaagaatcagtggaagacgatttcatatggcaatacaacatgctgttgttagcatcatacacacaacgggcatcaagatcaccatcgacggattgatactccattttcgagacggccgatttcgcctcatcgctagaatatacatatttcgacgggtccgaagccgccaagccaaacagctccgacatcaattgagtaccatcctgaaaactctgctgcgaaaaagacgaaccatcgctactgccgatacccgcctgtgaagcgatgcagcccagtaagcggaccgtttgcatggttccggaatcatccatagacaatgcaacacgaaggtgatcgccgtcatccgcaaagtccgccgcagcagcatcccgcactccatcacattccgaaacaacctttgcggtcaacgggtcacgatttgctgaatcggaatcagggttaccgttattattatttgatgtttttatccagcccaattcggctatcttgccgctatcgctcagtacatgccatcctgcgatgagcatggcaattccaactacagctgcgataataatggtaatgatcttcttttttgatgagatattatccggtcgcacgctctcagttgaagcccactgtacggccaaaggttcagccgattccacccacaatgatggcgtctgcactttgctggtccgttcgccggatattgcggaatcggtactgctggaattctttgttgtccgtttaagcaatttcgctccgcaacgcatgcagaaatcctgattatcacgagcttttgccccgcatttatggcaaaacatgattatgctccttcgtatgccgttcaatgattgttgcaattactgtttgtagaacacagagtcatcggaaaggaggtcggtttgctgccaccccattgatttgagatttataccggaaacccacaaatacggtttgtcaccggcaggtaaattagaataatccacggaatctacttgaaaatgagagcaatattcctcaatatccgtaccaggcataacatagtcaaactcaacctgcgttctgccatcattcatcatctgacaacgagcaccatcatctacatcagatgcacacaaatagaggggtacaaggacactcgggtatccagcgcctcccatatttccggtatgtaggttatacgcgacaggtgttccgtcatcggccgccggtagtggactctccccagcagatggtgcaatgctattgccagcgatgactacgcaactgccatctttgcggcaatatgtcccctcaatcggagtcatggaatcaccttcatagacggttttgtaaaggtcgaggaactgatcatagttcggcgtcacgggactttccgattgctgacttttgttttgcggctgctcctcgatatcctttttatcctgcgattgctcttccgcgtctttattgtcctgcgacttgttctcctcatccttgttatcttgagattttgtctgtgcttgtgccgcggtcttgcgagcctcattcgcggcctctaccacgttgatgctattcactgtcatcacgcatattgtcgttgcaagaaatgccgacaataacgcaatacataccggcgcaacggaacgaacgatcacgctcaattttggcgcagaccgcatcgcctggctattggtgtcatcaatcactttccggatatggctttccaaagcatcgacatcaatatccaacgacatggcctcatgctcggaatcggcggaaaacgaatggcccatgtccgctttcaacatcgcttccccggccgtgggcataaaatgcacatatttgccaacggcaatcaggaacgaactggttctgcatgacttcggcaataccttgagcagcggacgcatggcatcatgaatttccgtgatcgccgtgctgtataccggctccattcttttgtcagacaccgtctcgcggcattttctatagagttccggtgtttgtatcagcgatacgaccgatataacaatggcaatcgctgcgcacaccaacgaaggcacacctaatttcagcaacaaatcatgttgatgtgtctttccaaccgcaaatgcaatggtgatacccgctgaaacgataagagaaatcaccagaacggcgactattctcagcagatttttatgccatttgttttcggcgacatatgcatcatcgtttttttcttggaattgattgatagcagtttgcgccatatacaatatgcgtaatattttataggaaacatcttcgctgagacctataagttgatccgagagtacattctgctgttggggagcaggattggcgtttattttgtcggtgtaatataccgatgtattggcatcaatacaaaacttggaatcatccacaccatcatctaagaattcttgcaacgaaacaccacatctgccgcagaacaatgaaccttccggcagtttcgtgccacatttggggcaaaacattatggattgatcatccttgtccatcacagtgcatccctttcacgcaacattgcgatacgcaggaagtgcagatatacgcccttccctctggctctgacgttacccccccccggtatcttgtcaaaagggctgacggatcggccgcggcgacatcactttccgcgctgatgttgctcaaacaaattcagcggcggcattccgagaaagatatgttctttctggaataccgccgctgaaaacgaatggattatgggctattcgaagattattcctcgtccgccctgttctggcgcagctgctcaatgagatcgatgacggtttcgagttcaggagtcacatcgtctgaaggacgaacgttatcctcttcgtcgtccatctcatcatcctcatcatcatcggcaacggtgttgttgaggatatcctcttcggtggcctcgtcgtcagcatcagacttggactcgtcgctggaatcagctgcatcaacatccacaacggaatcggatgcgttctgtgcaacggactcatcaccggcagactgggattgcgaggtcccgtcgcctgccgcctcctcagcgggctcagtatcgacggcgttcccgtcaacagtcttctgtgcttcgatatcatcaccggcaggctcgcctgtcttgtcggtttcgccttcggcctcgtcctgggcaacctgctcctgcttgcacggacggttggcaaccacgtcgatatgcagatcgtcaaaggctggcttggactgcacccacagctggcttggctcgggaggttcgatttcggaatgctcaccgcagccgtggtccagggagaccacgcggccgtcatccggactccacttgttggcgcacacgccgaacatacggtcgagttcgcccgcgagcggcacgaagaaaccacaggtggagcacaggttgccttcggcggttttggtgctcaacgctttggggcctcgcggaccttcataccagcgcttggcagcctgcgcacgacccaacgaggtcagcacgtgacggcgggtcagtcggaaggtctcgacggcatcgttgacatcctgcagcgaggattcctcgacttcgccttcctcgatgcgctcgtcatccggatcggtaccgatcgaatcggtgggagccagatctgtgggctcaaggcgatctttccaaggaatccacttgggcggcatcaacgcgccctcagtggggatcaaggaggattcgttgacggtccaggagccgatctcctcgtcgtgatacagcgtcaccgaccattgccatccttcgtagccacggatattcgcggcgaagcggaagtcagtgacgtgatcctcaagatcatatgaggtaacgaaatcccccacctgatcgctctcgtcggccacttcgagcagcacggcgcgcgcgatggcgtgagggtccggtgtcacgatggtttcggtggtatcagtcatagatcagatcagtcctgtacatcgaattgatccgccaccgcacgcagcaacgtggccagctttttgctgtcggcagcagatgggtaacggtgacggcgcaacgtattgccggccgcatcaagcatcttgataaggtcctcgcagatggcggccatgtcatccgccttcgggcgggtggccttgaccaagctgggagtggaggcgatcaggcgaacatccatggcctgcggcccacgacggccgtccaccacggaatactccaccttggcccccttgcgcaacgtggtggcgccagtgggtagggcctgagccggcaggaacacgtccttgccttcctcactggtgatgaagccataacccttggctgcgtcaaaccaacgaactcgaccggtgggcattgcgaaccttccttaatcctcaatggaaatagtaaaccgaaggtacagtttacctcacagggcttgacctcacgctttgggctgagtcgcctgagtcttacgctcagagctgaaccaagaagtcttctgtttggcgtccttggttttgccggtgggccgcttgggctcaggagcgacgatctgctcaatcggcagcaccacggtgaaggtcaggcctcccccatcggtgccggtggcgcagataaagccgtgatgtgctttgaccacggattgcgcgatggccatgcccaaaccggtaccacccttttcgcgggcacgggatgggtccgcggtgtagaagcgttcgaaaatcttcgagcgcgattcaggcggcacgccggggccatggtccacgaaacgcaatacggcgtatcgatagccggtctgcatcgaggcacctacttcagcggcgtcgatgaaccgccgcattgacgcgtcgctggcgggcatgcgagcgagctgtcttggatcgatggcggccggcatcacaccgagcgcggcctcggcaggcgaatcggcaggcgtgtagcggtggatgttgcccacgatgttggtcaccacctggcgcagtcgagaggcgtcgccgggcagcacgacctcgggccaatcgccttcggcaaggttgaattcggcgggatggttcaaatcgcgcgccggttcgagggaaatctgcatgcggcgaacggcacggtccgggtcgagcgcatgcaagtcgtcgacggcgtcggtgaccagcgacgagagtttcaccgtgccggtcacatcgatgccgcgcccctcatcgagacgggccaaagacagcagatcctcaacaagaacagtcatgcgctggctggaccgttcgatatgttcgatggactcgtccgcacgctccaaggcaccaggcatatcgcgctgcatcttatacagctccgcatagccatggatggcggccaacggggtgcgcagctcatggctggcgtcggagacgaaccgtttcatcttgtcggtggtctcctcctgttcatggaaactggattctattcgggtgagcatggagttcagcgaggcggccagggagccgacctcggtgttttccggcgcggaaggaatacgttggctcaggtcgccggcggcaatctttgcagcggttttctcgatgcgcttcagcggcgtcatcgtgtgctggatgatcagcgtggacagggagccgccgagcagcaccacggcgatgccgaccacaatgcagtatcgggtgagtgtgttgacggtgtcgatctggtcggccagtgacaagccgatgtacaccacggcacggtccttgccgttttgctggaaggtcaccggcagaatacgccatggtgccctcgccgtgacgatggcggcatggttggcattgacagtggggttggccagtaccttggtgatggtgtcagaggaattggagtttccgttggccggatcgttctggctgtccgcactgtcggactgcaccgtgatgatctgcttggccactgcctgcgtagtgaatgcctggccgagcgtgatgccactggtatcaccataggtaggaagaatcggcaccgatacgataccgtcctgcatctgcggcatcagcggggtcacgaccagaggattgccctctttgtctttggtgccgtcggtatattgaatctgcagaaagtacgagttcggccccgatgagtcattttttgacagcagatcgatattgttgaccaccagctggctttgcgagcttaactgggtgtcggttttctgcagcatgtagttgttcaccaacgcgcggatggagaaggaaatcaccgacacgccgataagcagcacggcgatggtgcaggccaccagcttgctgctcaacgagatacggtcgatatgccgcatcagcatgtttttcttacgttcgtgccgctcttggaaatgggcggcgaacggcggcattgcaggcatgggattcgtgttcggggcggcgttcggcgtgctgctcggcggtacgccgcctgactgcttatcggggatactcatgagattgcgatgcgttatggatggggcgactagttcttcggttcgcgaatcatatatccgatgccgcgcttggtttcgatcagcggagtcaccttgcgcttgccgccttcgccgtcgtcgacctcgatgccgtcgactttcttgcgcaggtaggagatgtacgattcgacgatggctgcgtcgccgccccagtcgtattgccagacatggtcgagaatctgtgccttggacagtactcggccctcattgtccatcaggtagcgaagcagcttgtattcggtggggctcaggtcaaccggctgccctgcacgggtcacatcgtgggagtcctcgttgatttccaagtcggcgacgcgaataatcgggtcgtcttccacctgttcgcgggtacggcgcagaatggcgcggatgcgagccacgacttcctcgaggctgaacggcttggtgacgtaatcgtcaccgccgacggtcaggcccatgatcttgtcttgggtgtcgtcacgagcggtgaggaacagcacaggggcgttaatgccttcctggcggatgcggcgggtgacggtaaatccatcgatgtcaggcagcatgacgtccaacacgatgagatcaggctgcactttttcgataacctcaatggcttcggaaccggaagcggcggtgtttacctcgaatccggcgaagtgtagggaagcgaccagcagttctcggatggacggctcgtcgtcgacaacaacaatcgatgcttcaataggcttactcatgcttcctagagtgtcgcgctcttctgggcgtttcctgaatgtcatcttggagttcggccttggaatccttcttgatctccttgcgccgacgaatcaccaccatgaccacgatgatgatgaccagcgccaccaacaccacacccatgatgattatgcctacggtcaccgtggatgatgaggtggaggcttttttggatttcacgatttgatccatcattgccgttgccgcgccagaccagctcggcgggttttccagtaacggctgctgtgcggcttcggatagcttatcgacggttttgttatcgagaagccacttatcggagttcttggacacgacgaccaccaggttgccgtcattcgaggccacggcaagcatcactgtgttcggcttgggattcatggactccatcacggttgccgcccagtcttccggtttctgttgactattgaaactggaaagatacagcagatgcacgtgtacaccggtttccttctcggttttggcgatggcatccgcgacttcggccgcatgggagcccaggagattttccgtatccgtgatgttctcggtgatggtcacgccgctgtcggtgctgctgctggagctgtcagagctgtcgcccgagttatccccataggcatttgcggttatccacattgcgttcatcgctactgcagcaagggcgcaaatggcacaaacaagccattttcggaccatattcccgaaggccgaacaggacggctccgaagataggaccacaatagttgtttttccgtcttcccgattcgttgttgacatatcctccaccttagcggccggtattggcaagcggccgccatacataccattaaccctctagaaaaggagcaacgatgccccaatatcaggtagattccgagcgaatccaatcatcctcggccgcagtggccacttcgatctcgcagatcaggcaggccgtgggcggcatgtacaccaatctcaatgccttgcaggacgcatggcgaggttcggcggccacccagttcaccgcggtagccgaacagtggcgtgcggcccaacagcagatggaggcctcactcgagtccatccaacgctcgctgacgcaagcctccaccgtgtacgctgacgccgaaatccaagcttcgcgcctgttcgccagctagtttcttggctctcctccctgaggggagctcgatcgcgaagcgaaactgagggagtatccctacaccgcagctccccttagtctcactgcgttcgacagctcccctcaaagaggggagccagaatacaaaaaaggggactcccgaaggagtcccctttcagctcaatcagctagcgatcgcttgcggatcagtagcccatgtcggcaccggcggccggggcagcaggcttcggctccggcttgttggcaacgacggcctcggtggtcaggaacagaccagcgatggaggcggcgttctgcagagcggagcgggtcaccttgaccgggtcggtcacaccggcggccagcaggtcttcgtaggtgtcggtggcggcgttgaagccttcgccatcaggcagggagcggacggtgttgatgaccacgtcaccggacacgccggcgttctcggcgatctgcttgatcggggcctcgatggcgcggaacacgatggcggcaccggtagcctcttcgccggtcagggaggcgacggcctcggccttctcggccttggcagcagcctgaacgagggccacgccaccgccgggcagcaggccttcctcgatggcggccttggcgttacgcacggcatcttcgatgcggtgcttgcgctccttggcctcaacctcggtggcagcgccgaccttgatgacagccacgccgccggccagcttggccagacgctcctgcagcttctcacggtcgtaatcggagtcggtgttctcgatctcagcgcggatctgggccacgcgagcgtcgatgtcttccttggagccagcgccctgaacgatggtggtctcgtccttggagacgatgaccttcttggcgtggccgagcacggaggtgtcgacggactcgagcttcaggcccagttcgtcggagacaacctgagcaccggtcaggatggccatatcctgcagcatggccttgcgacggtcgccaaagcccggggccttgacggcgcaggacttgaaggtgccacggatgttgttcaggatcagggtcggcagtgcttcgccgtcgacgtcctcagcgatgatcagcagcggcttgccggtcttcatgaccagctcggccacgtgcacgatgtcctgctgggaggagaccttgccggaggtcagcagaatgtacggatcttcgagcactgcggtctggtcgtcagcgttggtgacgaagtacggggcgatgtagcccttgtcgaaacgcatgccctcggtgaagtcgaggtccaggccgaagcggttgttgtcttcaacggtcacaacgccgtcctggccgaccttgtccagagcctcagcgatcttctcgccgacctcagggtcggcggcggagatggtggcggtagcagcgatctggtccttggtctcgacgtccttggcggcggcgacgagttccttgacgatgacctcggtggccttctcgatgccgcgacgcagggcgatcgggttggagccggcgaccacgttcttcagaccctcgtgaaccagggactgagcaagcacggtcgcagtggtggtgccgtcaccggcgacgtcgtcggtcttcttggcgacttccttgaccagctcggcgccgatgcgctcgtacgggtcttcaaggtcgatttccttggcgatggacacaccatcgttggtgatggtcggagcgccgtaggtcttgtcgagcacgacgttgcggcccttcgggcccaaggtgaccttgacggtgttggcgagcttgtcaaggccctccagcatgccctgacgggcttcctcatcataagagatgatctttgccatggttgcgtattcctccaaatggctaggtataccggttatcactcgcaagcgtcgagtcgtgacgaccagccgtcagctgccgattatcactctcgacctccgagtgctaacccagacattagcactcgcgaccgccgagtgccaacatcatcggcggcgattgcgctttgggcatgaaaaggccccaaccgtcgaaacggtcagggccttcaatgcacatccttgcgtgcgtgttgctcactcggagcgggcttcacccgaagacagcttgacaacatcctttgcctgcgtgcctttgccggacgaagcgggcgtatactccacgcgatcgccctcgtacagcatcttgaacttattggtgctgccgtcgtccttgatttccgcgtagtgcacgaaaacgtcctcgctgccgtcgtccggctggatgaacccgaaccccttcttggcaaggaagaacttcacggtaccttgtgccatatctgatctttcctttgttcccttaggcgtcgcgacacaaaacctatagggaacgtagaaagaaccgcatcgcgctcccctacctcgcgactagatgacgattgtacagtgacgagggaacaatcccaaccgcagtggcacattttcggtacgaattatttcatagacgtgagaacgctcacagttttcgatgtattccacgccgatatcaggggcgcatcaacaacgctagttgagcagcaccaccgtaatgggaacggcgagtccttgcacctgctccacagccgaaatgccaagcgtggtcgccacatcttcggcggtggctttatcggcttcattctgataccataccacggaagaagccggcaatgtgccgcgcggattggtcgcctcgacgctggtgtaaccggcggtctgcagcacatcggcctgctgacctgcatatccttggattcctgtggcgttgaccacacgcacctgcgtggccttattcacagtcgcggtggctccggactgctgagactgctgatcggagtcttgattctcattcga

SEQ ID NO: 1280 - DNA, 7028 bp, Unknown
  R157_18m  MAG No. k141_3325
ccaccatcaccgctgccagcaccacctgcgcgagcacggcgtaccaaatcaccatcggactcttctcggcccagccgttcacattgccggcgatatccgcatgaatcggcacccgctccggcatccggtcatagcccagcagcccgaccgcaatggtgacagcgagacaaacgacttgcagcaattcccacttcaggctcagcgggtcgggattgtcccgctcacctatcaatgccgcacggcgagcactggacgcctcccatccctgattggttttgatggacagtactttgcggcgaaacacctgctgcagcacaaaaccacatatcgcaatcaccaccgctgcgatggacacggtccagaacgccgcgtcgactccacagagccgccagacggccaacgagaccagcatggcgcacacaccgattgccactacaattcccgaaaacgcgactttgtattcgcgaatgcgcgtattggtatgggcggcggccggcaccgtgacaccgaacacctcatgccggtcggtaacccatggaacccctgccaggccggcggtcactatcaccggcaacagcaagaacgcacacaacgcgatgttcatcgacacgactgtattgttcatcgttatctcccctgattttcttttgttgcaccgtcagtaacgctctgcgaggagcgcacgccgtatgcccgttcgcattgccgtttggcggcatcgaggaatgcggccgaatcaccgccgcgcgccttgtaggccaaggcaaggcgatagagttcctcgtccatccgctcatcctgtgcttcggcagttcggttcggcgcttctcccccgccgttacgctcagcgacggttgcaccggcaccacgacgcataacgatgtatccctcgtcacgcaacagcgcatatgccttgttcaccgtgtgcaggttgatgccaaggtccacggccagcgagcgcacggacggtaacgaatcgcctggcggcagctcatcgcccgcgatggctgcgatgaactgccggtgcagctgctcgtaaatcggcacgtcactgcgctgatcgatttccacaatcatggtcgcctcctcccaaaccgttctatttgttctacatcaactataacacttaccgaatacaccgcaaggcacaccaaacataacaacatatttaatatgtctgctatgatggtgcccaagttgcggcacaatggcaaggagacaatcatgtggtcagaagaggagatcgacgccttgctgaacccgctgcgttccgcgcaatcggacagtcaggacattgaggccaaggaagccgcagacggattgccggtttcgctgcccgagacgatttccgcttttgccaatggacgcggcggcaccatcgtgctgggcattgccgaaaaggatggcttcgagcccgcccaagggttcaaggcgcaacccgtcgccgaggcattggcgcagatgtgccgagacaaaatcaccccgcctataaggccagtcattgacgtcacctcataccatggttccgccgtggtcatcgccgtcatcgatgaggccgatccactggataagccatgttatgttcgcaatagaggccggtacagcggctcgttcatccgagtttgggatggcgaccgcaaactcagtcattacgaaatcgaccggcttttggaaaaccgtgcgcaacccacgtatgaccgggagctgatctacgaagccaccgtcgacgatctgctaccggatatcgtgcagggcattcttacgttatgccgcgaacgccgtccacgtgtcttcggaaaactgaccgatgaagaggcgatgagcgcgcttgggatagtcggaacaggagatgacgggaagtctcatccgacgcttgccggactgcttgtcgcaggtaactatccccagcagtttctgccacgggtgaatatcacgttcacgtgctaccccggatatgacaaggtgtttgccggcggggtgaaattcatcgacaattattcactcgacggccccatccccgagatactcggagaaaccctgaacgccgcacagaagaacatgcgcatcggaggcgtattggacggcccattccgcaaagacacctttgaatacccagaggacgccatacgtgaggccgtggtcaatgccatcatgcatcgcgactattcgccgatggcccggggcggccaaattcaggtcaacatgtacaaggaccgccttgaagtgctgagtccaggcggattatacggcgacgtaacgctgggttccatcagcgagcccggctccacttcgacccgcaatcagacacttgccaaattgcttgaatgcaccccgttccgcaatgccacagtcgcggagaatcgagggaccggatacagcctcatcaacagactgctgctggataacggcaatggcgagcctgaaatatacagcacgctgaatttgttctcggtcaccttccgctcagcggatacctccaagttgccggacagccgcagggatccccgttacgcgggttggggcgataggcccgatatcgattacagcgcggcgcaagggctgatcaacggacagcccccgaaaccggcacatccgaaaatcgtgccattccccaaaaacagcatcaaaacggaagagctcagcgacgaagagatgtacgagcgatatctcaaagatattcccggattggggcctaccattgcgcggatcgccggactggacgttccgcagtccgcggacatgccgctgattcgtgatgcatcatccatcgaaaggccatcagctcgcagcgcgtcggcatccgcattggagggcagcgcccgctactccatgctggaagagcaactgttgcaactgatcaacaagcacggcaccatgtccacgcccaaattggtggaggccaccggagccccgcgctccaccgtcacctatcagctgcgcaaactcctggaatcaggcacgatcgaacgcacgcaaccagcccgctcccccaaacagtcataccggataaagtccgcctgaggcgtgcaaagcgaaaaaaaggcgccgccgttggcctgtgcctcggcatatgcccaacggcgtgttttgtttttccaggaaggcgggaatcgccatgctgcgcggtacgcgagtgatattacgcgggtttcagtgcgttgtgtcaaccaaacgcgagaggaacatatgaccatggccaacgggcagacgcccgctgacccgatgcttatcatgcttatgatcgctgcggccatcaccctgggcgtcaacatcacccgctccatggccggcggccacgccgacattctcgaatgcgtgggcattttcttcgccatcgccctgtctgtgaccatcaccggcgaaagcgttccgagtgccaaagccgccaacaccggtatgacaccgctgcaggagaagctcgcgaagctggacgaacttcatgggcggcaccgccgaacagcagtcgaccattctgttcacgctgttcgtggtgttccagccgttcaacgccttcaacatccgcgagctgggcaatgccagcccgttcgccaatctgctgcgtaacaaggtgatgatcggcgtgttcgcgctgatgttcgcacttcaggtgctggtggtgcaattcggcggcgcgatgttccgcaccgtgccgccgccgatcgacatgtggctgaagatcatcgcggtcggacaaatgcgcggctagagttctttggctcggtagatgcggatggctataagcatggagccaaaatatgcgagcagacacaacacggcgagaacaagcgccgtatgccaccagatcgtcaggaaatcggtaatattcagcaaaagccattgccagtcaacaggcaatcgggccagcagcgcaatgacggcatacaagccaaccaggaccacgccagaggccaccatcatcttgcggaaggtgaaccggtatgcacaggccagcagcaccgacccaagaatgatagccaaagcgaagatgaaagcacctgctgccaaggtaccgatccaccccatatctgctatatcgccaaagacaatgaagacgccgccgcatatcaccacgtccaaagcccagagcaggccaaccaccaacagaaaaaggtaccgacctacaacttgtgcagtgcgtgaaacaggaatcagccctcgcatggcactgtgccctgcagattcctcggatgacgcaggccccaatgcactcatacatgccatcgtcgatgccaaacctccgagtccgcccatcagaccactggcaacgtgttcatcgacgtgggtcgatatcatcaccagcgataccacgatagacagcaccgggaaaaccagcagaaataccatattcgccacgctgaacagacccgtcccgacacaatcgaatcgacattgctttactacggatttccagctcatcgtcaccattcccttgaagcaaatatgcgagaggcaattacatacgagactccatatgccacaaccgtcgttgccaataccgcaataaccagccacaatcgttgcgcgatgatggcattcgcggcatgggccaatcctttggtcaccgaaacaggcaaaatagatagcagtatggatccagccaatacaacgacataaatcaccatcatcgtgacttgaagaccgcctagtttggtccacagataacccgtgggcacgataagcgcgaccatcagcgcggtgcagaaacctcccaacggagccgcccacagattgcccgcgaatgaccaatccggattgaccagcacttgcaacccgtcaatcagaacaatcatcgctatcgacaatacggaaatcaccaatccaaccacatatcgcgcggccacctggctcttcctcgaagccggaataatgccacgaagtcgatatccgttctgtaagtcagcaaccgccatggtcagcacccacatggcgcaggtgaataccgtcatgatgacacccatgcgatagccgaagccatcaccgtaagcttcaccttgaaagatgacggagaacaacggtgccaacaacaacgagaacacagtccgttcgccgacgcacaggtaggccatatcgacgcgcaatgcagtggtcaatgcatgttgccgagaccgcgacaccctcagtattgcctccatggccgctcacctcccgctcaagtcacgattggaatcatgggcattggtcagtcgaatgatgtcatcaatggaagccgattcaacgacaagccccgaaaccaccgacgcaacagcatcaagcctgtctgaccggaccagcgcatcgaatccggtggcatacgtatgtgagcccagcaccacgtccgcaggcagttgtgccagttcgtctggaccgcccttaatcaggcggaacgattcctcaaactcgtctttcggaccggtgtagtagagacggccatcggtgatgtaggtaatgaagtcagcagcacgttcgaggtcggcagtgatatgggtgctgaacagtaccgaatgttcgccatcctcaatgtaggcatgcagtatatccatgagttcgtcgcgggcaagcacatcgagtccgctggtcggctcgtcgagaatcagcagcttggcgtcatggctcaatgcgatggcgagcatcagcttcatctgcatgccgcgggaaagatccttgatatgtttcttgccgttctgtgcgtcaccaaggccaaaagtatccagatacttgtgatagcatccaccgtcccatgatggatacagtggcgcgacaatacgttcaatgttcttgacttgccactgttcatgcatgtagctgaagtcgaacaccacgccgagttgttctttgacgggctcctcgttggcgatgttgtcgaggccgagcacgtgaatcgaaccggcgtcgcggtggatcatgttgaggatgagtttgatgagggtggatttgccggcgccgttcgggccgatcagtcccatgatgtagcccttgggcaggtcgaaggtcacgtcgtccagcgtgaagccggaatcatagtgtttggtgacgtcggtgacctgcaacgccatcgcgtcggattcggatatggcggtcatgtccatggtcctttcttgaggttattccttgcggtattcctcttcgagcatgcggtccaatgcgtccagcggaatgccggcggctttggcgccccggcttgcctcggccaggctttcgcgaatctgggttttgagctgacgttgcatcagttcgttgcccttgtccatcacgaaagtgcctttgccttgaatgttctgcaccacgccctcatcggccagttcgttgtacgccctggtgacggtgagtacggagatgcgcagctccttggcgagtttcctcaaggaaggcagggcctcgcccgccttcaactcgccactgagcaccgccgaacggatttgggttttgatttgctcgtagatgggttcaccggacacggatgagatgatcagtttcacctatgcccctttcgattgtggttgactagcaccccagctgtttagctgttatacaacacagtataactgttctgcttaactgtcaaggtgtgttgcataacagctaaacagtgaacaaacaccttgccaacatacagtgtcgaaacatgggccgcgcctacaatggcctcgggaaggggcacctatgccaaacaacgccgttacgccgacagccccgccagcgggggtgtaacttttttatcacagcacgcgcggggcgtcatggaagtcgaagagaacaccgtcggccaggtggcagatttcgggccagtcggccgcggaggaatcgtcgtgcatggcccagaccgtcataccgaccgatttggccgatttcatggcgaccagcaggtcctcgaacaccgtgcaatcggtaggtttgacgcccagacgtttagcggcaagcagatagacgtcgggctggtccttgccgacgtcgttcacatcgtcaacagagacgatgtcatcgaatagcccgaacatgcccacatgccgcagcgccggttcacgcaggtgcgggggcagcgaggtggcgac

SEQ ID NO: 1281 - DNA, 10013 bp, Unknown
  R157_18m  MAG No. k141_3643
atgttttccgtgcaacgcggctatcaagacggacctctggtcacttcatgccgatggcttgcatcaatacgtacgctccccgcacagcaatgtcattacgacgtgttgcggcatagcgcgcatggcttccggagtatcggcggcgtatgggtcggcgtccagcaacaccatatcggccgggtcgccgaatgcaaggcggtcacggccagtggcggtcgaggctgccagcgaggtgcgcacatcgaggcactgctcgggctggaacggctcgcggtcagagctttcggagccgaacacggcggcggaaatggccagccacgggtccagcggggccacgggcgcatccgagcccatgcgcagcgtggtaccggcgtcgtggagggccctgaacggataagggataccggccgggttggcccagaaacgggtgatgacgtcgcggtcatccatggcgtgctgcggctggatgctggccgcgagccccagctcggcgaaacgcgggatatcgacgggtttgagcatctgtgcgtgctcgatcgatccatgtgcgtgcgtggcggcgactgcgttgagcgcaatggtgttcgcttcgtcgccaatagcgtggcaggcgatgtcgaagccatgctcggtggctaggcgcatatagtcttcgatttgctgcggcgtgtagctcagcgtgccatacgtcggcggctcgatgcccgaatacggcgtggagcagtaggcggagcgggtgttgagcgatccgtccgagatgagcttcatggcgcccacatggccgagcccggcgctgcccggcagtgggttgccggtatgccaacccgcgtcaatggcggcttgcaaccgctcggggtatacaccagcgtccacgcgcaaaccgttaatgccggccgcgaaacgattggtccatgtatcgatgttttcggccatttcataatcgcggatgcccaccacgcccttgcttgcggcgtcctgttcggcctcgcgcagcagacggtcagtctcttcagcagcgcccggcgccttgtcgaaggcggtgtaggcgttgaaccattcgagttcgccgaccagaccggatccgtccacatgtacgccaagcctgcgggccgcggcagagttcacccatccacagtgcatgtccgcgctggagagggccaccggctgttcgccggtcacggcgtcaattgcggccagtgtgggctgctcgtcgtcggcccacagcgagtgacggaatcgcatgcccaccacgaaggcatctgggtcaagcgtgccggcggcgcggcgctcatccagatgacggcgcaacatgtccatcgcttcggcggcggaacgggcattgatgaggtccagtcggcccagcgtcttagcccattgcgtgaagtgcgtgtggcagtcccacaggccgggaataacccacaggccgtcggcgtcgatggtggtttcgtcagcaggtgcggaggccgacgttgggattgagacgctgccagaagcaatggcattcgtcgcgtatgccaacgatgtcgtatgcgccttagtctgcatcgtgccgtccgaagccgagaccgttccagcagggccgacagacgcaacaaccccatcgcgaagcaccacatccacgtggccctgagaccccggaacaccggcattgacaatacgcaccaagctactcatacccgccatcatgccacctttgcatgaacgccatggagattcgttcaagctgaatcgcgccgtcggcggcgattcccgctggctgcctgcaaacccctacgttccatgtaattgcgggatgcctgcaactgcgatgaacgcccatagtttatccaccgacttatccacatttatccaccgaaaaattggggcggtagacagggccggtagccggaccctacactgcgaggacaaagcgaacatcacgaaggggtgatcatcatgggtagctcaacggcattgaccgagctgacaatgcagaagtatcaacgaatgcagacgtgcgcagatgttcaacgacgaagcgcatggcgcccaccttatgccctgacaacagcgttggagcttttgtcaattgaagtaccccgcatatcaagcaaacacagaggccttgcaactacaaccattgttgcgattccacacgccaatgacaaacggcacattgtgggggtcaaagtggttgtatggcctttcccactagacacggtcataatcgagggacaattcacatgcacttcaccagcttgcacatgggccatgttctccgcgtatctcgaacttgaagaactcatcgttctcgctgattccatgatgcgacgagatcgaaggctctgcagaacaaccatcgacgccctttctctgtatctcgatgaggccgaggcccaggtgcgagccgacaaagagaatggcaccaattcgtatttgttccgcgggtataacaaatgccgtcgcgccctgcttttggcgcgcgcgggcacagattcctccatggaaacacgaactcgtttggttctcttgaaatacggtctggattgcccgcaggtgaattatccaatattcgtaggaaacaacaccagacccatatatctcgatcttgcataccctgaattcaagatatgcatcgaatacgaaggctctcatcatgccgggcaatggctgaatgacgcgagacgccgccagatgatcgaagacgctggctggaagtacattcaagtcaccaaattagatattggcaacgaagcgggagaagaggcccttgcccgaagagttgccgaaaggatacaggaggttacgggcaaaacggtccagctcacgatgcggcaaaccacccagcaaattagcgatgtccgaaagctacgccgtattccgctgtacaaacggctgaaattcgagcctctgctgccgattattccgacgacgcaggaataataagcccggtagagtcagtccgcaccgtccgcaccgcgctacggtattcaaaacccatttcaaggggctgatttggcctccgccggaggtctacttcggtttcaaggggctgatcatccgctagaccacgtgtatcaatgtccttacgccaacgccattccgccgttttggagccgcgtctactcaggcatcagccccttgaaacggcagtagacctctccagaacgtcaaatcagcccctcgaagtccgttttggcctcaatggttcctgccgaaccacaaaaaagccactcctctgccatacgaggcgaccgcacagcaggcacgtgtcatttgccgctgcggacctcggactccatggcttccatgggctcgtcgacgagcacggtgccggacggcagggtgccgggcagcggatcgtccatgtagtggtcgaactcgtagagcatacgctcgttcggtttggcggtcagcaacgaaaccaccacgatgaacagcagcgaaatgatgaacgccggcagcagctcatagatggcgaatacgccgtccaagggcttgacgaggttgtgccagatcagcacggccgccgtgccggacagcatgccggccacggcgccggccttgttggcgcgacgccagtatagcgagcacagcatcaacgggccgaatgaggcgccaagcccggcccacgcgtaagacaccacctggaagatcgacgagttctggtcgtatgccaccagaatgccgaacaggaacatgaccaccagcgtgaccctggccacgatcatgacctgcttgtcggtggccttgcggtgcagcagcccgcggaagatattctcgcccatggccgaagcgccgatgatcagatacgaggagctggagctcatcgaggccgcgaaaatgccggagaccaccacgccgcacatgaagctcggcagcagggtctgcgccagcacgatgaagatggtctccgcatcggtggaggtcagcagttcggtgggcatcatcgcacgtcccaccaagccgatgcacactgcgcaacccagcgaaatcacgcaccaggaggtggcgatgattcgggacttgcgcacttcttccacgctgcggatggacaggaagcgcaccagcacctgcggcataccgaagtaacccaggccccacgccagcatggagatgatggtgatgatgccgtagtcggagggcgcgccgaacacggccttgcccgcctcgacgagctgctggccggtggccgggtccagcttgggcgcggccacctgcgtgctggacaggtagccggggatggcacgcaggaattccacggtgttgtcgacgccgccagcgctggccacagtgccgatgaacaccaccacgagcgcgaagaacatgagcatgccctgaatgaagtcggtcatcaccacggacaagtagccgcccaccacggtgtagacgaacacgaccaccgcgccgatgatcatcatgacgtggtagtcgaaaccgaacaacgtggcgaacagcttgcccacggtcacgaagcagctgcccacgtacacgctgaagaacaccaggatgatcacggccgcgatggtggagatcacgcccttcttgtcatggaaacgcttggcgaagaagtcaggaatggtgatggcatcgccggccactaccgagtagcggcgcagtcgccgggccacaagcttccagttgagataggtgccaagcgccagtccgatggcggtccacatcgggtcggccgcaccagtgaagtaggccaggcccggcaggcccatcagcagccatccgctcatgtcggaggcttcggcgctcagggccgtgagccacggccccacgccgcgcccgcccgcgaagtactgtctggcggaggagttggacctcttggagtagacgaagccgatggacagcatggccgcaaaatagatgaccatggccagcagaatccagaaatcgttggccaactgcgacccctcctcaatcatgacgccaagcggctaccgccatggcagaactatgtgctgatatgcgattgacgccggagcggcgtcatacagaccgtcacagccgtgaatacggccgcaacgcacttcgcctgatggtagtggatacaagggctcaagcaccttccaccgcttccatactgagacgctgttttatccgagctcccctcacctgaggggagccaagatgacggtcagatgtcgtagcgccaggacttgtcggtcaccacgcgggccatcgccaagccgatcggcaggcagatgatcaccatgaacgcacggaacgcccagtccagcgcattcatggtctggaagctgccgaggtaccacatggcacgatacatatacagaccgggcaccatgatcacgatcgacggcacggtcaggcagatgcgcgggtagccgaggtgcggcggtagccagccacgtcgcacggatgaacgccacgccgatgccagaatgcccgccagaaacgcgccgatgaaggtagccatctcgggtgccacgttgaagtcctgcaattccagacgcagcgtgtccgtgatcgcaccgatcagggcggcggccaggcacatgcgctgcggcgaattgaacagcacggagaagccccacacgccgacgaacgccgccacgaaccgcagcaatccgttaacccacgggtcaagccccaatggctcaaagccttccgggtgcaggtgcaccatcacggccacggcccagcctgccagcgtggccatcaggatgatgcacagcacgtacgccacgcgctggatgcccgaggggaagtcgattttcgccatgtcgagtccgccggtgatgagcgggaaaccggggatcacgaacagcatggcgccgatgtaggccgtatcgtgcgagagcgcgactgggtcgaaaatgccgatgagtcgcaaggtgccggtgcaggcgagcgccgccgcggccacgcacacaaaggtgacgaagaactggttcagatggtatgcaaacagccggcgacgcatccactggccaaggcccgctcccacgaacgcaccgatcatgtcgtatgggccgccgccgagcaggaacacgaaggccgcgcaggccagggcggaggccagaccggagaaccacggcttgtacagcggcttgcgacgctcaatcagatcgagccgctcgtgcgcctgccgcacggtgataccgcccttggccttctcttcgtcggagcgctcgttgaagtgttcggcgtattccttgggcacgcgattcttgcacttcgtactgcttgcagcagggctttcggcggttgcgccgttcgccgccgcgccctcagcgcccgcctcggcattcgccgcgttcgccgattcaaccgactcattggagtcaccggtaaacacttcggcatcgtcgtaggccttctcttcggccgctttgtcttcgaccggagtgatttccgcgctgtccgccaaaagtcggtgggcttctccattgtcatcatccaaggacttggccacggaggtcacgagtaccttggttttcaacgcaagatccagcgtctcgtccacgctgccgttggccgcctcagcctcggccttggcacgttcgcgcaggcgcttggccagatcggccgaatactgcgaagcgtcacgttcgtccaaatgcttgaccacgccatcggacagttgcgaatcgacgtgatacatcgaccccttgccgagattcacggagaaccagtcggcgaaatgttccagcagccagatacgttcggtgttcacgccggtggtcggcaaatccacgacttcggtgatgcggttatgaccatccgtgcaggtggcctcgatatccgtcaggttcacgtcggcgcgtacgtgcacgcccagcgggtaggcgatgcggtgcatcatttcacgcacgcggaaggagccggtgccggctcccaggtccagcatgccgacccgtacaatcacgctggctttggcggcgataccggcgtccaccaccggtttttcccaatcgcgcgcaatatcttccatgtccagcggaatggagtgggtgtggaatttacgtacagccgttgcgcctttcgcttcgggcgcactttttttcttctgttcgctcacatccctcattactactccctgcctcccccgccagcaatcgtaaggtgctcaaatcttccgcgaatcggacagtgtctcatatgctgtccgatattcggtctctataggtggacaacttggcgcactatatggactccgtaacgcaaatagcgatttcgcggggatacactattgcccacacaacaaccacgttgaatatgggctgtgggctcgcaacgactggcctcaacaactgcggaggagccgcagacgaccggtagaccgagcaacctgttattcggcaaaggaggttatatggcaacacctgaagaacagatcactcccgctgacgccgccatcgtcactaccgggaccggccgaaagggcccggaggagcatgatcttcccgaaagcctgaagtacgacatggatctgtgtcttgagatcctgcgtaacgtactgggcgaatacaaccccgaactgctgtctacgttcgacaccgtgcgtcattacgcggtggaggccagcgccgagcatttcgccgagctgaaggatccgaaccccgaccaggatggcctgaaggaggccgtgaacgtcatcgacaacatgacgttgcacgacgcccagctgctggcccgcgcattcgccacgtatttccatctggcaaacctgtccgaggagaactaccgtgtttccgtgctccacgagcgcgagaacaacgtgtccgttgaccaggcggtcgacccgatcaacgagctcaccgtcgcctaccaccagctcatcaatgagactggcccggccaaggccaaggaactgctcaaccagctcgaattccaccccgtcttcacggcgcaccccactgaggcccgtcgtaaggccgtggaaggcaagatccgccgcgtttccgaattgcttgaggagtacaagcgcctcggcggctcggataagaaggaatgcctgcgccgtctctacaacgagatcgacgccctgttccgcacctctccgatcgcgctgaagaagccgaccccggttgaggaagcggacacgattctcgacatcttcgacaacacgctgttcaacaccatccccaaggtctaccgtcgcttcgacgactgggtcctgggcgataaggccggtctcgtcgagcccgcttgccccgcgttcttccacccgggcagctggatcggctccgaccgcgacggtaacccgaacgtcaccgccaaggtgagccgcgccgtggcccgcaagttctccgatcacgtaatcgccgcccttgaggaagccacccgcaccgtgggccgcaacctcacgatggaagccgagaccacgccgccgagcgccgagctcaagagcctctggagccaccagaaggaaatgagcgagcgtctgaccgacaaggccgccctgatctccaccaaggagatgcaccgcgcggtcatgctggtgatggccgatcgtctgcactacaccatcgagcgcgatgccgacctcatgtaccactcctgcgacgacttcctcgccgacctcaaggtggtccagcgttcgctggccgccgccggcgccaagcgttccgcttacggcccgctgcaggatctgatctggcagaccgagaccttcggcttccacatggtggagatggagttccgtcagcactccgtggtgcacgcccgcgcccttgcggatatccgcgagcacggcctgcacggcgagcgcggcgaactgcagccgatgacgcacgaggtgctcgacaccttccgcgccctcggtgccatccagaagcgcaacggcctcaaggccgcccgccgctacatcatctccttcaccaagagcgcccagaacatcaaggatgtctacgagctcaaccgcttggccttctcccacccggaggacgtgcccaccattgacgtgatcccgctgttcgagcagcttgaggatctgcagaactcggtggacgtgctcgaggaaatgatcaagatccccgaggttcaggctcgtctgaaggccaccggcaacaagctcgaggtcatgctcggctactccgactcctcgaaggacgccggcccgacctccgccacgctggccctgcactccgctcaggagcgcatcgccaaatgggctgagtcgcacgacatcgacctgaccctgttccatggccgcggcggtgccgtcggtcgtggtggcggccccgccaaccgcgcggtgctcgcccagccggtcggttccgtcaagtgccgcttcaagctcaccgagcagggcgaggtcatcttcgcccgttacggcaacccggtgctggccatccgccacgtcgaatccgtggctgcggcgaccttgctgcagtccgcgccgagcgtggagaagcgcaacaccgagatgaccgagaagtatgccgacatggccgctcagctcgacgaggccgcgcacaaccgcttcctcgacctgttgaacaccgacggctttgccccgtggttctcgatcgttacgccgctgaccgaaatcggcctgctgccgatcggctcccgcccggccaagcgtggcctcggcgccaagtcgctcgacgacctgcgcacgattccgtggatcttctcctgggctcaggcccgcatcaacctggccgcctggtacggtctcggcaccgcatgcgagaagttcggcgatctggagaccatgcgtcaggcttacgaggaatggccgctgttctccacgttcatcgacaacatcgagatgtccatcgccaagacggacgagcgcatcgccaggatgtaccttgccctcggcgaccgcgaggacctcaatgagaaggtgctcaacgagatggagctcacccgcaagtgggttctggccatcgtgggcgacaagtggccgttgcagcaccgccacgtgctcggccaggccatccgcatccgctccccatacgtggacgcactgtccgtcactcaggtgctggcgctcaagtcgctgcgcaagaaggtggacaaggaagagctctcgcaaagccagcaggcag

SEQ ID NO: 1282 - DNA, 26674 bp, Unknown
  R157_18m  MAG No. k141_3655
ggagtggacggcgtgccgccctggatgccggtgtccaccctgttggcggcgtcctgctgctccttctggaactgacggttgtaggaatcgacctgggaagcgatcagtacggtctgggccgcctgcttggcggattgggaatccagactgtcgatcatggaagacagttcgtcacgccttgtttcgccctcctggcgtagcttgtccaaagcgtcacgttcgctttgcgcggtttcggcggcggtctgtgcggaagcggccttctcatcggactgggtcttgagcacagcgatctgcttttcgatggccgccagacgttcgccacggttcttcgacgtgctcagtgaggtcgcggcggaggaagccgcattcgcctcgttgcgggacaacgcgtcccgggactgcatggagttgacgaagtcctgtgtgctggtggcacccgtcaccacgctcatcacgtcggaagcattcgagccgtgcatctcgtcacgggccagctgggccacggcggcgtgcgcgtcatcgtagtccttgccggtctgcttgatccgctcctcgagcgtctccttgtctttctgcgcggcggaaagacgtttggatgcggcgtcggcctcgtcctgagcggtggcggcatcctcgttggcctgcgtgaccttggcctgcgcggcgacaatcttgttgttggtcagatcgtccagctcaagtaccttattcgccaattcctggctggcaccggccaactgctgcttgagttcggcctcgcgctgtaccgacgcggcgtgctggttctgcgcagtaatcaggtcagaataggtgtctgcctgggcaggctgtgccgagctgaacgccagacctcccacacaggctgcggcggccaccaatgccgccagtgcgggcttgatcacacgtacattcgtcatatgtgaatagtcctttcgctcacttaagccaataccataacatgtgaacccgagaggctcgcacacgatatcatcacatttcttgcgggtaagccggtcgcgttacgccctcaaataacgccgcaacgagatggttgaagcgatgatggacagcagtatcgcgcccacaaccaggaacggcgatatcaccagtaccgtgaactgattcacataaggaatccaggtaatggatttcgccagccagccggtgatgaacacattcacaatggccgaaagcatcaggcacgagagcaccgagccgatcagcgaggcgatggcgccctccagaatgaacggcagacgaatcgtccagttcgaggcacccacgtacctcatgatttcggtttcggttcgtctggatgcggcggacatgcgaatggtggttccggtcagcaggatggcgaccaccaccatcacgccggcgagcacggccgtaaccgccgtggctcggttgagcacggcgaacaccgggtcgaagatctggcgctggtcggtgacgtcctccacgccctccttgccggagagcacttcggagaccacctgatatttggtcggatccttcagcttgagccagagggagtcctgcatatcgtccgcggtcagcgtacggccttggaattcgccattcgggtactgcttggtgaatgtgttgtcgtagaagtcctgcttgctgacgtagtcaatgttggagaccacgtcgttgagttcgtcgcgaatggttttctgcagtgccgtgatctcattggctgagggcgatttgccggaagcgcagttcgcggattggctggtgccgtcggggcatagccataccacgacctcgaccttgtcgtaccagtcgcccttggctttggtgatctgcgcctgagtaagcaccgaagcgccgatgaacaggaacgagatgaaggtgaccagcgtcagagacagcagcatcgacaggttacgggtgaggttggcccacgtttcggacagaatgaatcgtgctcgcatgatgatcccccttactccttagcgccctcagcgggttgatcgtcggatgtttggtctgcggcggactgctcgccggcggactgctcgttggccggcggtgcgggcggttccggcggtgcgggcggctccggcggggccggcggctcggcggcggatgacacggacgtatcggcaaccgcggcggtctcgccggactcgtccttgaacgggtcgaacgcctgggtgctttccagggcggcggcctgctcgtccagcggaatgcccttgccccaggtcagcgtgttttccagcggcgcaaacgtctcgccatagcggccggtgcggccggaatgcacggaattggccaaacgggcgatgccttcggacggctcgtcactgccctcgatggccttggtcgccgccgccagcacatggtgggcggtgtcggacttggcttcgacttcggcatccgggaagaacagggcggaatcgtaggagccatgagcctcgtcacgcacgatcttgccgttgtgcagttcgaccacgcgcttgcgcatcgagttgacgatctcttcgttatgcgtggccatgacgatggtggtgccggtgcggttgatggcgtccagcacttccatgatgcccagcgaagtggtcgggtcgaggttgccggtgggctcgtcggccagcagaatctgcgggtgattcacgtaggcgcgggcgatggccacacgctgctgctcgccaccggagagctcatgcggatagttcttttccttgccggtgagtcccacggtattcagcaccttgggcaccaacgatttgatggtggaccgccgcgtgccgatcacctcaagggcgaacgccacgttctcccatacggttttgttattgagcagcttgtaatcctggaacacgaagcccagcgaacggcggtactgcggcacttgacggttggtgatgcgccgcagatcgttgccggccacgcgaatctcgccgttggtggcctcttcctcgcgcaacagcaggctcaagagcgtggtcttgccggagccggacgcacccacaaggaacacgaaatcaccgcgttcgatatcgaggttgatgtcgtcaagcgccggtcgggtgcctttgggatagatcttggacacattgtccagtgagatcagtgccataatgctgtttactcctcggtttcggcggcgcggcgctgttcatggcgccagcggatgccggcctcgatgaacgcgttgatgtcgccgtcgaacacggcctgagtctggctggtttcgtagccggtgcgcaggtccttgaccatctggtaggggtgcagcacgtaggagcgcatctgatcgccccagctggccttgatgtcgccggcgagctccttcttcttcttggcctcctcctcgtggcgcagcacgagcagtcgggactggagcacggccatggcggaggcacggttctgaatctgcgaacgctcatcctgcatggtcaccacgatgccggtgggaaggtgggtgatgcgcacggccgagtacgtggtgttcacgccctggccgccggggccggaggaacagtaggtgtccacgcggatgtccgtatccggaatgtcgatatggtcggtggcctcgaccagcggcaccacttccacggcggcgaagctggtctggcggcggccctggttgtcgaacggggagatacgtaccagacggtgggtgccgccctccacggacagacggccgtaagcgtagggggcgtccacctggaaggtggcggacttgatgccggcctcttcggcgtaggaggtgtccatgaccttggccttgaagccgttacgctcgcagtagcgcaggtacatgcgcaacagcatctgtgcgaaatcggccgcgtcgacgccgccggcaccggagcggatggtcaccacggcggaacgttcgtcgtattcgccatcgagcagggtctgaatctccatctggtcgagatccttctgaatctcgccgatttcgctttgcgcctcgtccagagagtcctggtcgccctcctcgtggccgagttcaacgagcgtttccacatcgtcgatgcgctgggaggcggagttcagacgcttcagctgcgattccgcggcggacagccggctggtgatcttctgggcgttttccggatcatcccacaggcccggggccgcggcctgcgtttcgagatccttgatatcggccttgagccggtcgacgtccagcgccttggcgatggattcgtatttggcgcgggcttcgccgatcgcctgggtaaagtcaaattctgccatcgtggtttaccttactgttgattctttgagattctttgggaagtcacgtccttgttgacagccttcgcacattcctctggcgttggcgggcattgccgcgccacacacgcatccgcctgcaatccatgctgccagaaggttccgggcctgccttgccgatagccggccgggcgacctcacaaatccctcgcatcagacgtgttcaactgcgggcacgaatatgcgaaggcaacgtcaaagccccgcgtaaatcgccgggatgatcagggagccgagcatggccacagctatgacgacacacaccacacgcacgatggtgcggcggcggttctcacgctgctgtcggccgtcctgatagttactcacgagaccaatagtgtactcaccgcttacgaccgcaggacttgccgccgacgccagccctgccggcgggcccccacggccctttcctttgcgctttcagcgccgccagatggtgtttcatggccaccagcatgatgtgcgaatcctcaaggcccaagtggcgttcgttgtgggcggaatcaagcgcgccctgacgtttggcgtaggcgtcgagcgtgttgtctccgtaaggatgctcgttggtgggtaccgcgccggggtcccactgccggctcatcggcagggtatcgatgatggtgatgcgcccggcacggtagctttccgcgtatccggcgacgttcagcatgaaccagctatgttcgaaggtggcgttatgcgccacgtacggctgctgggtaagccgcgcgagcaggccggcctgggcttggggccattcgtcgaagagtcggtacccggcctcgctgctgcggccgcgtacatcgatgccggtgagtttggcgatgagggcgttgccgagcgccgcgttttccggcggcacgccaaaagcgagacgggactggccgtaggcgtcgccggcggcgtaatagccctgctcataggcgtatgtctcaggttcgccggccgggcgcggactggccatgttcatgaactcgaagccgacgtcgatgatgtagtcacgcgccggatcgatgccggtggtttcgatgtcgatgcccatcaccgcgtccacgtcgcggccgggcagataggcgtcgcgccagtcgggcttgggatggtggccggtagcgttgccagacgaggcggcaccacccggcgaagtcgcgccggagagattggcgcgggccattgccgcatcgcccgcacgcttctggaagcgctgggccttacgtcgttcggcgcgtgcgtcaagaatcgccgccgtacggtcttggatatcgtccaaggcgactgttgtggggaacttgacatcgctgttttcggcagcagtgtttccggcagatgcgtcaccggtttcaccgctcagattcagcatgccttggtcatcgttcgatgggcggctgccggagtacggcctgagcacggcaacggtggtcctcccccgccgttcgcgactgaccacccataggtgttgctgttcgcccagatgcaacagcgtgttgatgttgtcgttgagccgacgattggcgtaggcgagcgcgcgaggcagacgataggagccgatgaatcgatcgtaatcggtcatgaatgtgctgttgcattgggcgatgattgattccagatgctcgcgtgtggcgtaatcgatcttcaatgcgtcgtggatagcttgtggcgtcagttccggttggtccaacccgagctgaggctgtgctgcggtttcgccatattgctcaccatctgcagcaagcgccagcaatacgctgatgccatgcatcaggtccagcgaacgcacccagtcccagtcaatggtggtgccgtcggcgtctttgggcatggacgccgcccattggggaatgtctcccttggcggcgtccagccatgtgcggtcgatcatagtgcgaagccgagttcttcggcggcctcggtgggtaccgggtcgtcgcaccaataatcctcgaggttttcggtggtggtcagcgaacggatttcggcgcgatcgatatacagttcgccgctcaaatgatcggtctcgtgctggaagatgcgtgcgggccagccgtgcaacggctcgctgtggtgcttgccgtcttcatcatcccattcggcggtgatgtcgagccaacgcttgcgcacggcctggtatccgtcgaagctcaggcagccttcgtagaacgaggcggttttgtcgctggtgggtttgtagctcggattgatgatcacgtggaaggggaattccgcgatttcgcgcggatcatcctcgtcgtcgcgcacgtggtcttcgaccacggcgagcgcgagccccaagccgatctgggtggcggcgagccccacgccgggcgcctccagcatggtggtgtgcatcgtatcgatgagtttggcgagcgtacgcttggaaagctggccatggtaggccaccgtccgttggcgcaacaccggttcgccggcctgcacgatgggcaggagcttctccttgccgccggttttgataagttgttcgacatcacggttgagttcgaggtcgactttggcgttctttccaaacattgcttttccttagggaagggtgctacagcgcgagttcttcggcgacgatcttggcgaggcgggtgcagacttcgtcggcgtaggcctgggtggcggcttcggccatcacgcgtacgagcggttcggtgccggaggggcgcagcaacacacggccggtgtctcccagcagttcctcctcgcgggccacggcatcctggatgcgcttgttggtggcggcggctttcttgtccacgttcggcacgttgatgagggtctgcggcagctgcgggaagtcggcggcgagctccttcaggctcttgccggacttgacgacctcgttgcacagggtcagtgcggtcagggtgccgtcgccggtggtggcgaattcgcggttgatcacgtggccggactgctcgccgccaagcgagtaatcgcccttgagcatttcctcaagcacgtaacgatcgcccacggcggtttccacggtcttgatgcccatgtctttcagggcgagcttcagaccgaggttgctcatcacggtgaccacgagggtgtcgtggttgagcttgccttcgcgctgcttggcacgggccagaatgcccatgatctggtcgccgttgatcatgttgccgtcttcgtccacggcgaggcaacggtcggcgtcgccgtcgaaggccacgcccatcacggcatcggtggccttgaccatggcctgcagctgctcggggtgggtggaaccggcgttcttgttgatgttgtagccgtccggcgaggcgttgatcacgattacatccgcaccggcacggcgcagggcttcgggagccaccacggaagtggcgccgttggcgcagtcggccacgatcttcaggcccttgagcggcttgggctgggttttgtcatcgttcagcggagcgatggtggccaccagatgatcgatgtacaggttggtggcggtggtctggtcgtggctcacgcggcccacgccggcaccggtcgggcggtcccagtcctggccgagcacggcctcgatgtcgtcttccttctggtcgggcagcttgaagccgccgcgtgcgaagaacttgatgccgttgtcgggcatcgggttgtgggaggcggagatcacggcacccatttcgacgttgagcacggaggtcaggtaggccacgccaggagtggggatgatgccggcatcgatcacgtcgaagccgccggcggccatgcccgcggacagggcggaagccagaaaatcaccggacacacgggtgtcacggcccacgagcgcgcggcggcgtccctcaggctgatcgtcttgggtgccggcgtcgccgagcacacgcacggcggcatcgcccaaatccaacgccagacgtgcggtcaaatccctattggccagtcctcgaacaccatcggttccaaacatcttcggcatatgaagttccactccttgtatcgcgttacccgcaccatcgtagtcgttgtgctccaccctaggacccgactcggcaaaaaacgccacggaatctgctctaggaccagacaatggcattcccgatacccgcaatgtgtgagagaatacaagaatacagtagacctttgggagtttattgagaagaggaagcaccctatggcatcgtcgcatcgccacacgcccgccggaccgtccatgatgccggcaccgccgcgcatagcaccacacgttccggcgccaacgcccgtaccttcgattgcgatgggagtgccagccaatcagccctcgccttccgcatcatccccgcgcgtggccatcactgtggtgtatggcaaacgctccgcgaaactcaatgttccgtcgacacttccggtagctgaactgctgcctgatatcgccaagaaactaggtgtgttcgatccgactctggtgtatgccggctaccgactgacccgtgacgacgaaaccgccatcaataatcccgcttcgctggccgatcaggccatccgagacggtgaacgtctcaaactcgaggtcaacgccttgggcgatcaggatatcgtctacgacgatgtggttgaggcggtggccgattcggtggagcgttctcatcgaccgtggaccagtgccaataccacagtgaccacaatggtggtcagttgtgtgctactgggtgtcggagcgatttgtctggcattggccccactatccatcatcaatgctggcgtagcgggcattaccgcagccgctttactggcgattgccacggtactggcttcgcgccatatgcatcggcaggcactggcactgtcgctagtcgcctcgcttttggccggcgtgaccggatatcatctcatgggttcactgttcaatccctcgttctacgggttcccggccgttggtatcggtgctggtttactgctggccggcggcatttcatgtttgctgcttacagtgaacagactgtacgcgttgattcctgtcattatcggcgcagtactggtgattctcggcattgtgtgtgtaacgatgccgcactggtccactcgcgtatggatcgtggcagtggctctgctcggtctggctgccaatgcgctgccgtggctcagcctgtcttccgcacgattgtctgtggacagccccaccagcgaatcggagattttcgcgctgcccaagaacatcgatatcagcgaagtgcgtaataagtaccgtatcggctccacgctgctgttcgacctgcgcgctgccaccagcgcactgatcgtgttcggcacgcctctggctgtttccagtgcaagcccagcaggcgtggcacttaccttggttctgttcgcagccatgctgcttgattccaggcgcatctatgcacaatcggaaatgctgatcaccgttatcaccgcaggtgccggcatctgcctgtcttgtgccgcatgcacggtgtttcaccccacgtgggcttcggtggtggtgggcttgttctcactgggagcgttgctgtgcgtcatcggcacacagctgtctaagcacgattccatcgccatgacccgtctggctgacgcctcgaacgtaatctgtgtggtggccaccctgccgctcgcctacgtggcattgggattgtgaggaggggccatggcgaataagaaggacctgcaggacgcacaaaactattcgcgggccaggctcattactgccttcacttccggtatgccggatggcaaggagctgactcctaagaaaggcctgacgccggtgatggtcagtatcggcctgaccgccatcatggttctgatcagtgtgttctatggcatcatcagccctggcctgccttcagactggagcaataacaaactcattgtgggcaaagacaccgcatctcgattcatcagcgtcaacggtgtgctgcatccggtaatcaacaccaccagcgcacgtctgctcatcccctcagacgaataccgagttatcaccgtagacgacaacgaacttgaaggtattcccatcggctccagcgtaggcattgtgggcgcaccggatattctgcccaaccggtcgaggctcgtatcgaaattcctggtgagttgtcttgacaccgagcgcgcctcaaccaacaatctcatcaccaatgatgccgtgaccaccccggccaggggccatgtaccgcgaatcattgtcgcacacattgatcggcgtccacaggcaagccaggccattcgtcaccttcatgctgtcatgatttccgtggaaggccggggtgagcgctgcagaagcgcagacgatagccagtggggtctgttcgtccgtccgccatggacagtggccggccgaatacagcctcatgcctgtgggacggcacgcggatttggccggtttccgcgcggcgtcccgcaggaacgtgggatggtagagaaatcaatcgtttgacgttcgtggcgttccacactatcaaccgccagaaccgcgcaatcacgccaatccccgttacggaccataatcatcccccgggctctctgcgggacggcagacgaaaaaccgcgaaatccgcgcgtcgtcccgcacttcgcccggtccacgaacaggacaagcatcaccgatagaccgaacacacatctacagccgcgacaagaacccccaacagctagccgcccgccccggatatcgccgtccaatagtaaatcgagcccaaaacgcaaacccaaagcactgactcagataataaaactcggattttccaccacagacagcgagaaactctcccctataccaagtatcgtacgtgccaccttgctcgatagacgaacaatgagaagtatcggttaacgggcatgccgggcaggtcgatgggctctggcgcgggaacgaagacggcgtaccagcacgaatgggccggcaaacgtgatcgtatacaacacgacggcgaggaacacgctgagccatgcggtgaacatgcccaacggcatctcctctaccggagtggtctcggctatgcatgcaacgatctatcactccgatgttgtggtcagtatgcgcggcagttgttcgtcacggttgaggaaagaacgcgtttggcaacgaagtagcgtacgccggccttcctcagtgcgggtgtataccatggtgcaatgcgtcaggcagcggtccaactgccggcgcagtatttcggcgtcctgctggcggcgggcaaatatggacgggcatgggaagcttacaccgtacgtgcgcacgccccattccttgccgatgatgacatatcgcggattgttgatgggcgcgagtagctccttcataacgccggcgaacagcacctgctcgcgccgcgaaccaccaatcagcatggcacgcaacgccgtgaatctgcgacgtgtctggcggatcgaggaagtcactcacctctttgcctaccgcgttggtttctaggcgctcaggttccgcagtcgccaaatgccagacattggccaccttatcggggtctgcggccacgctgcggttggcggccatgctgtatgcttcactgcatcagtgtaaggcatgaatcaataggttttgagccccagatcgatggtgagaatgatgccggcgattacggcggcggcgcgcatgatgtttgcgggaatcttgcgggtgatgggcggggcgatgtacccgccgatgaagcagccgatgcacagcatgatggcggccggccaatcgaccgcgccttggatgatgaataccactgaggcgctgatgttcgcgcctgtgccgatcagggttttcaatgcattgatcttgtggaatgggccgattttggcggcatcaagcatggcgagagccagggtgccggcgcccgcgccgaagtagccggagtagatggcgactgccaccacgcccagccatacccaccaggaatcctggctcatgggctgcacgagttgttccggcgggcggtgaggtgcggtaggggtggttgcgcgcttggcggcatcagtggcatcggtggcttcagtggcttcgatgtgcttgagttgcgcggtggcatccgcggcggcctgcttggcctgcatgcggccgcgcggattgatggcgatgatcagcgagctcagcaaaatcagcactggtgcggcgaattcaaagacactcgggtcgagtttgagcaacagaaacgcaccgaccaccccgccgaacgcgccaatgaccacatacgtaatggagcgtaccgcttggcctttgagttctttgcgcgcgcccatcacgccaccgatgcccgtgccgaccacgccaacggtgttagaagcgtttgccaatacaggcggaatgccgaacgcgagcaaggccgggtatgagaccagtgacgatgcgcctaccgcatagcccacgaatcctgcgccgattccggccaacagaatcagtagtaatgaagttatggaaaagcccgcaatcattccccgtatccttgtcgctcatcgaccggcacattgccggccttgagcgagaatacgctgttgaggattggttgcgggttttatgttggaatgtggacgtagctcctcgcggaagcgattccctcagtcgcctgaggcgacaactcccctcgcacccgaggggagccagaaggaaatcagagcgcttcgttgtattcgcgaaccttgagggtgcggtgggaggatgccacgttttcgacgatcagacgcttcagggcgttgtcggcggcaatgtgctcgtccagccaggcgtcaccgagcttgaccagcgtggcgggatcggcgtaacccgggtacaggccgttgagcaaagcctcggccatgtgataggtcttgttggcccagacccagtccacagtctcgaagtacttggcggcgaacggctcggccagatcggggcgcggggtggcggagaagccacgggccacggcttcgagctgggagttggtcagctcgtcgttgtggagtgcctgatcccaagcccattccttggcttgcgtcgtggccatgaaggcgcgggcgccgtaggcgaactcgcggttttccgtggtctccttcttggcgagctgcgcgtccacgtcgtcgttggtcatctcgttgacggaggtgagcgcttggacgatggtccacgtgaagttgttgtcgatttcgaggccttcaagacgcacggtgccgtccagcagaccgtgtgcgttggcggcgaatgcggcatcgccctcctcgccatagcccaggtaggcggtggcgagctggaactgggtgtccgagccggcttcggcggcgttggccagggtccacagctcggcggccacgtggcgcagcacatcgtcgcggcgggctggcgccacgtagtggtgggcggtggtgctcatgcaggccagcgcgtaacggaaggtggtggattcggtttccgtggccagaagacgcagggtcatgtccacgaagcgttcggccgggaattcgccgtcacgggtcatatcccagaaggcgagccaggtcacggcgcgggccagggcatcgtcgaaacgatgcaggttggcttcggcgaatgcctgggattcggcgtcgaaacgaatcttggtgtaggtcaggtcatcgtcgttgaccagcacgaatgccgggcgcggcttgcctgccgcggcctcgacgatggtggtttcgccatccacgtcgagttcgaactgctcggtgcgcacgatcttgccggtttcggcgtcttcgttgtagaagccgacggccaggcgatgcggacgcagcaccgggtgttcggccggcgcgctctgggtgagcttcaattcggcgatggtgccgtccgcgtttacggtcaggtcggtggcgatcgtgttgatgccggattcctccagccacttggcgctccaggccttgagatcgcggccggaggtcttctccagttcgctcagcaggtcggccagggtggcgttggagtaggcgtgccggttcaggtagttgtggataccttcgaagaactgcgtgcggcccacatagaatgccagctgcttcagcacggaggcgcccttggcgtaggtgatgccgtcgaagttgacataggtgtcgttgaggtcgttgatcggggcgacgatcgggtgcgtggtgggcagctgatcctggcgcaacgcccagctcttctcgccggagcagaaggtggcccaggcgtcgtgccattcggtggcttcggcggtggcgagcgtggaggtgaattcggcgaaggactcgttgagccacaggtcgttccaccacttcatggtcacgtagtcgccgaaccacatgtgcgcgagctcgtgcagcacggtaaccacgcggcgctcggccagcgcgtcggtcaccttggattcgaacacgtaggagtcgcggatggtgaccatgccgatgttctccatggcgcccgcgttgtattcgggaacgtagatctggtcgaacttggcgtacgggtagggcacgccccaggtcatggcgtagaacgcgaagcccttcttggtgatgtcgaacaggtagtcgacgtccttcgcgaaggccttggccaacgactggcggcagtactgggccatcggcacgacgcggccgtcctcgttcaggtattcggtgtgccattcggcgtacgggccggcgcagatggcggtcaggtaggagctcatcaccggggtcggctcgaagttccacaggcgggtgctttcgttgggcttgtcgccgagggtgccgtcaagggtcgtgcgcgaatcgtcctcgatggtggcgaccggcatgttggaggtgacgatccagctggcgggagcgagcaccttgaagtcgaaggtggccttcaggtcaggctggtcgaacacggcgtagacgcggcgagcgtccggcacctcgaactgggagtacaggtagatgttgccgtcggacgggtcgaccgagcggtgcaggccctcgccagtgttggagtaacggcacttggcttcgacggtgacctcgttcttctccttgaggtcggtcagttcgatgcggttgtcttggaaggccacggccgggtccagggacttgccattgaggtcgatggaggtcacttcgtcggcgatcaggtcgaggaaggtcgacgaaccaggcttcgcgttgaagcagatgagcgacttggaaccgaagttcttcgcgccgaccgtcaggtcaaggtcgacgtgatagtgaatcggcgcttcaataacggccttacgctcttcggcttcaatacgagtgagattagaaccgggcatgacttcaattactccttacggtcgtccctggataatccggactacttggtttctacggtttcgacgtcctgggcgatgtcggccacgacgggcacgatcatcggcttgcggtgcagctggcgtgcaacccagctgccgagcgtgcggcgcatggtctgctgcagcttgtaggtgtcgcgcgtgccctgcatcatctggtcgttgagctgttcgacgatctggtgacggaccttgtcgaactcgctttcgtcctcggccacggcgttcaggtagatcttcgggccggtgacgacctcctggttgtcggtgtcgaccaccacgaacgcggagacgaagccctcggtgccgagaatgcggcgcttttccagctcctcgtcggtcagctcgccgacggaatcgccatcgacgtacacgtagccgcacggcacggagccgacgaccgcggccttgccgtggtagaggtcgaccacatcgccgtcttcggccaagaccacgttctgcgggtccacgccggtcttgacggcgatcaggccgttggccaccaggtgacggttctcgccgtggatcggcatggcacacttgggcttgacgatgttgtacatgtacagcagctcgccctcgttgcagtgaccagacacgtgcacggccgcgttgtcgcggttgacgaccttggcgccgagctgcacgagcttgttgatcaccttgtagacgccgtgctcgttgcccgggatcagggagctggcgaggatcacggtgtcgaattcgttgatgtggatgtcgcggtggttgccgtcggcgatgcggccgagtgcggccatcggttcgccttgggagccggtgcacatgaagacgagcttgtcgtcctgaatgtcgttggcctgcctcaggtccacgacggtgccttcggggatgtgcaggtagccgagatcggcggcgatggacatgttgcgcaccatcgaacggccgacgaacacgaccttgcggccgtacttgtgggcggcgtccaccacctgctgcacacggtgcacgtgggaggagaagctggcgacgatgatcttgcgggtggcctgggcgaacgcttggtcaagggccgggccgatggaggtctcgggcttgacgaagccgggcacctcggcgttggtggagtccatcatcagcaggtccacgcccttttcgccgatcttgccgaattcgacgaggtcggtgatgcggtggtcgagcggcagctggtcgagcttgatatcgcccgtgtcgatcagggagccggccggggtcttgacatagacggccagggcgtccgggatggagtgggtgacgttgacgaattcgaggtcgaaggggcccaccttgagcttctcacggccggagacctcgaccttggtggggttctggtggtgttccttgcacttggcgtccacgaaggcgagggtcagcttggagccgatcagcgggatgtccgggcgcagcttgagcaggtagggcacgccgccgatgtggtcctcgtggccgtgggtgagcaccagggcgtcgaccttgtcgagacggttcttgatgtagctgaaatcgggcaggatgagatccacgcccggctgctcctcctcggggaagagcacgccgcagtcgatgagcagcaggtgaccgttgtattcgatcacgttcatgttgcggccgatttcacccaagccgccgagcggcgtgatgcgcatggagcccttgcggtacttcggcggggcgatcagcacggcatcctgctgaggtgcggtggcctgccgggtggcgttgatcttacgggacggcgtacggctgttggatccgttggcgttgcggccgcgcgcggaaccgcgacggcgagaattcgtgttcttgcttgttttcttttgttcttgtgccataacctttttgggatttctgttgtggtgcctctgctctgtcatgcaggggcggcgggctggcaacccgtatgcagcgtttcgggcttacagcagtccggcagcgcgcatgccctcttcagccttgtcaagctgagtggcgtcgggaccgatgttcggcagacgcatggtggtggaggggataacacccttgaccttgagcgcagccttggccatgacggcctgatagccgtcgccattcaacgcgtggacaaggggggcgagctggttggcgaggcgacgggcggtggtgatatcgccgcgatcgaatgcctggacaagctgctgcatggggttggaggcgacgtgggcaatcaccgaaatgatgccgacggcaccgatggagaggaacggcaggaacaggccgtcatcgccggaataccaggcgaggccggtgcgctgctgcttctccactgcggctgcaagatcgccggtggcgtccttgacagccttgacgtgttcaagtccggccagtcggtcgtaggtttcgaccttgaccttcaagccggtacggccgggaacatcgtagacgatgatcggcttttcggcggattcgtcgacggccttgtagtggccgacgataccgtcctgcgaggggcgggaatagtaaggcatgacgacgagcaccgcgtcggcgcccgcttcctgagtctgttcgaccatacgcacggtgtgtgcggtgtcgttggagccggcgccggaaatcacctgaacgtcgacgacctccttgacggccctgaccagctcgaccttctcatccatatgggtgacgggcgattcaccggtggtgccattgaccaccagaccatccgcgccatcggcgacgaggtatttggcgagcttctgcgcggcggcgaaatcgacgctgccgtcggatttcatcggggtgaccatagccggcagaatgcggccgaaaggtgctggctcaagaaggtgcatgtcatgctcgctcatagtgttcaccgtacttcccattgtggactcttacattacgtaccttgattgttgctgaatgcgtggcattatgaccggaaccggtggcaatgccgtgatgcgcgtcccggcgcgcttccctgcctgaaatgcgggggcgactactggtcgactgcaggtcgattacagatcgaggaagtggtcgaggccgatggtcaggccggccggagcgtcgccgacgagcttgcgcacggcaagcaggacgccgggcatgaagctggtgcggtcgaagctgtcggcccgaatggtcagctgctcgccggcgttgccgaagagcacttcctcgtgggcgttgaggccgcgcagacgcacggcgtgcacgtggatgccgtcgaccacctggccgcgtgagccgccatcggtctcggtggcgtccggcacgggggcgagtcctgcggccttgcgtgcttcggcgatgccgtgggcggtgtgaatggcggtgccggagggggcgtccaccttggtggggtggtgcagttcgatgacttcggcggattcgaagtatttcgcggccttggtggcaaagtagtcggccagtacggcggagatcgcgaaattaggtgcgatgaagaccttctgggtttcgggcttcgggccgttggcgatggcggatttgacctgggtgagtttctcgtcggtccagccggtggtgccgaccaccacgtccacgccttggccgatcagggtcagcacgttgttcaggctgacggacggcacggtgaattcgacgaccacatcggtgttgtcggtggtgacctgggtcaggtcgtcgccggcatccaatgcgagcgccagctgcgtatcctcggccttgttcaccgcttcgaccacgtgcgagcccatgcggccctttgctccgaccaccgaaaccttgatcatgtcttcttccctgtctacccgtacctgcccggcaatgtacccgggacgttttccaatcggcaatcagcctatcaccgccaaaccctcacgccaatatcccgtccacagaatcaagctccctctgacgagccgaaccgtgaagtcgagctccctctgatgagccgaaccgtgaagaaaacgccggaggcgtttttaggtgagggcgaacgacagtgagcaataattcagttggctgaaagccatcatttaattgcgttcgagctggccgtgaagcggactgagggagagaccccggcgaagccgccaaccatccatcggtcgtagcccgatcccgtttcacccacgccgcttggccaaggcccatccggccaatgccaatggcacggacgccagcgtgaagatgaatggcagcatcatgcccacatgagggttggaggcgtcaagcacaataccggccacggacgagccgatcgatgtgccgaccgtgcctgcggtggttacccagctcagtccttcggtcagggattccgccggcaccagatccttgacgatgaggttgccggtggcgaacgtcggcgagacggtcaggccggagagaatttcgaagacgcccagcaggatgagattgtccattgacagccggaagaacacgtagccgacggtcagcagcgacaggaacctcaccatatgcgcccaatgggagcctttgagttggcgagagccgaacaccagcgcgccgatgcacgagccgaccgcgaacatcgccaattgcagaccgaggaagggctcaagtcccatggatttcatggtggcggtgatggacacgtcgaaggacgtgaagctcatattgaacacgatgaacacggcgagcaacggcagtacgccggtatagagcaatacgcttttgggcttggcaccactgcgtttgagctggcgcagggtcagctggtcggcatcttcgcttgcagcggggctgccgtcatcgtgcgcggccacggtgacctgttccacgatgaccggcggctgggtggatttcagcgagaagaatatggtgccgccgatgccgcatgccacggtgggcacgaacagttgggataccggatgcacggaggtggccagccaagccgccagaatcggccctagaataaagacgatctcgtcaatggcggcttccatggcgtaggccgtgttgagcagctgttcgccatcttccacaccgcgcaacgcataggaccagcgggttcggaccaatgcaccgaatgagaactgcgtcagacccatgatgatggccagggcgaacagcagcggaatcggcacgcgcaccaacgccgcgaaggcgaaggcgagcatggccacgatctgcacggcgagcgcaagccggcccacgcgggcttggccgaaacggtcgaaggcgcgggcgtagaacggggtgacgcagctcatggccagcacgtaggcggcgctcatggtgccggcgatggtccaattgtcgtagagatggttgagcgccagaacgatgccgagactcatcatggagatcggcaatcgtgccaccgcgccggacaggcagaacgccttggctccgggcagcatgaacaggcgctggtagggcgagtgggcagcggacgacttcgaaaccgcgcgagtcgtggacacaataactccttactggtgcgttgtccggcacgtgcgcccgcccacacgtgccatccgagggtagcggttcccgagcaacgtcacgcggtgcgtttcaaccgcggaccggtacgtggccagtcgtcttcatcgtcggagatgccttgcgatgcataaggtctctccaccggtgaaggccgtccgatgctgtacaggtcatgagcctttgggctcagtcgttgtcagattgttcgggaatgccggagctcaactcggtaaggatttcctgtttggttttcgcacgggcgtgaagctcgcgcaagccctcgtcgggctcactgacatagtagagagtggcatcgatactgtccaattccacaccttcgaccgctgccagcagcagtcggtacatgtcgagctgggcgagtttgcgggtgatgtcgtctggcttggtgggccgacgaccggttttccagtcgaccacggtaaagcgtgcggtggtgctggacgggtcaagtccaccgatgaataccgcatcgagtttgccattgaccaggcccacgcccggcacgtccacgacgatggcacgctccgtccacgccgggatgcgcttggcccacgatgattcggccagtctgcgctgccacgccaccagcttggactcggtggcattgtcgctgcttatggaagtggcggatacggcggatacggattgttgagccgtgggctgtgggacagcgggctgccgtgtggatggcttgcggcattgccgctcccgttcggccaaatcggccaacatggcttcccgggaaacgaatcccgcatcctgacctgtatgcggcatgcttggttcggcttcatatgccagtaccgcttcatccggcttaccggcattgatgaattgctcggcccacgcatggaactgcgtgccggcttcggccgccggagacgatattcgtggaatcggacggataatgctacgccagtagaggcgctcctcccgttcgctcatgccacctacgcgggcttgcaggctggtcacgttctggcgtccggcggccagaatgcgttgcgccttggctttgactgcctcatcaagcgactggccgctggcggcatcggccatcaaatcggcgtcgtccaccagcaattgcgcccgttgcagcagtgggccggcgtcttggtgctgctcaagtgacgaggaatctgcggcgatgacatcgatgccacgtgacaactgttcatgcaccgcgtcgctgagggtagccggccacggcaattcgacagcggcattcgtctgcgtaatcggcgtttgccatgactcccccaccacggcgtcaccgtatgccgcggcatgctctccgataaagaacccttcgggaggggcaatcgcttcgccttgcgccgagatcagcatggacttcccggcattggcggcttgcagccgttccacacagtcctgagccgatatcgcatgttcacgggcttggagcgcgtcatgcacttcaagccagaaattggatggctgagcggcgcgagagcctttgggcaccactgacgggtcccgcccggattcgcccgtataggcgcaataggtcatcagggcatcttctcgtgcacgggtaagcgccacatacatcaatcgacgttcgtcggcatgcagccggcgcccatattcctccgcctgcgtcaaataccagccggatgcatccacttcttccacgccatcgccgaattcgcgcatggagccgaacacttcatcatcgataagctccacatcatccaaagccgccaacgatgcgatggggtcggcttccacatcggcatcatgggggaatcgcggcaaaatgccggcatcggcgcgcataggcacgggtacggcggtggggttggtgagccaggagtcggcggtctcatgatattcgggtgcggtccagcgaccttgctcggtgcctcccgtatggtgttcgtccagcacgatcttgagatggtcgccctgattgctggggaatccgccggcggtaagccccactaccgcaacggcatcccattccaaccctttggactggtgtacggtcatcagttccacatccaccggagcgtcggggagactggcggcctcatcctccaccgaagccagatgatccacccatgtgatgaacccatgcaacgagggagtttgctcagcggcaatctcttgcgtgtacgtatccaccaaatccacaatcgcatccataggcatatgcgccaaagcgggattggcgcggtgctgcgaattatgcagcacaccggccaatacggtgtcgatgtcaagatccaacgcttctatgccggcgcgaatcacgtcgcccagtggccgcccgacggcatcatgcacctgacggagcatcaccgcggcccgggttatggcgttgcgcccgtgcgcgctcaaccgttcaagcagttttaccaggtcgccgcgtagcaatacgtctggcaggaataccgcattggccacctgatcgcggtactcacgcaccacagccgcccattcattcgctggtgtatccggttgggcaaggccggcctgcaccaatgattggaagcgttgttccgtgttctgttcttcagcaaaacgggccaacatggtcaaatccgctgcggacatggtgaatcgtggcgtggccagcaaacgcatcagtgatcccgtatcggtgtggtcggcggccacgtgcagcaacgccatcagatcgcggatttccggacgttccaacagcgcggaatagccgaccacgaatgtggtcaatccggcctgttccaatgccgcctgatattcgggcatatgtgatttggaccgaaacagcacggcgaccggcgctttctgttcgcccggcatctgttcctgttgttcggctgcggaacggtgccgtgtgatggccgtcttgcagaaacgcactacggcgtcgatctcctgcccggccgtggcgaagcccagtactcccaatgttccttcgggggcatcaggcatggggtcgagcgatgagacatcgacctcacgcatcaatgcgcttgagggacgcgacggattggagcgcaacggcagcgtgagattattggcggcttcgagtactatacggctgtttcgcctggtgacggacagcgggaatggcttgcatccggcagacaggtggaaatcttgctggaacatacggaatgcaccagggctggcaccacgccatgcgtaaatcgactggaacggatcacccaccgcgttgacggcggacctctgtgacgcatccacgtggaacagtgctgccagcagagcggcctgcgtggtggaggtgtcctgatattcgtcgagcagcacatggctgtacctgcggcgcgtgcgctctccgatggaggggaagcgctcgataagctgatatgcggcaatggtgaagtcggagaattcggccatattgcgttcccgcttggcttgggcataggcctccaccagctggagcagaatatcgcgtttgcgcgtggtctccagcagcgcaccgcaatgataggtgcaacgggcgtgcagatgttcggcacggtcatcgagcttggcttgccagctggcgtcggtatccttcttcagtcgtttgatcttggggattttcggctcgtcctcgggcatggtctcgtctacaacggcttgttgcaatcgattgatgaatgccgaatcccattgccgtactcgattgatcgcatcatcgaagctggtgcagccggcaccgatcatggcactgccaatggcatccgacaacgccagaacacggttcgccaaactggagaaggcgccaaaatcctcactgaacgccagatccatgtgactgtcgatgacttcggtggccagttgaagcgctccggctgcgctcaatggttgcgtgttctgatcgaatccgacaagcagtccatattggcgcacgatggtctggaagaaggcgtcatacgtgaaaatggccggcttgaggaatgcccgatcagacaccgtggcggtcgtagagcccgccatatcaccggccactgcggcggagacacgttccagcagttcgcctgcggccttgcgtgtgaaggtcaggccaaggatgcgttcaggtgccacacctcgattgataagcgcgatgatgcgttgggtcatcgtaaaggttttgccggaaccggcaccggcaaccaccagtacgtcagcattgactggcgcatcgatgatggcggcctgttccgcactgggagtgaacgtgctcatgtttgcctcgtttcgaaaatcgtgtcgatctggcctgcacaggcagggcagacgttcttcatacggcagaatccgatatgggtgtcttgcggatgggcctcgatgatggctgatctgctggccgccgcggcatagaatacgcgggcgatcatggtcagcgaccataatgtctgcgtaccggcgagcgcggcgaattgcgcccacgcttcggcactcacaccttcgggaggagtagccggatctatggcgggtatgtcgaagaaacggttggggtctttataccagtatcgtggcgtgaacggttcggcattcaacgaaccatcagtgaacagcggcggctggaaggcaccttccggagcatagcttctggctggtgccgtattctgcccgacatggaacagcgcgctttggctgatatgcggcattgcggcaagtgccttggcaccgcgcggcccgtcttcggggaatacgaggccaagctgatagcatacgagctgcaaatcattgaagatctgtttgaccgtgggcgttctgcctgttttgtagtcaatgaggcgaatgcattcgccgccgtctgcgagtacgcgggtttccatacggtcgatgcgcccggacagtctcacggtcagatgctcgtccatgccttccggccatcctccgaccagtgctcccatcagacggaccagcgtgttccgatcaatcgggtgcatgccgggcacggcattgtatgcgtcgagtatgtcacgcacatcgaatcgtgcggcaaactcccgttcgcattcggcaccggccaatacgccaatgctgaagttgctggagttcttgccaagatacgtttccggatcggcgtcgctgcgcacaaagtaatcggcgatgttgcgcagggcatccgccgcggactcgtccttacgggtggcctcatagcggttccgggtgtcggctatggcattcggatcaggacgtttgctctgatagatggcattaagccgtgccgtgacagcctcgatgcgacgttccgtgccggccgtggagtccaagcccagtgtggccaacgcctgggcattgtgggaaagatggtccagcccttcctcgctgccttgctgcgcaaccgcatggatgagggttccgaaactggtggccacggagctggggcgaggaccggcgaaccggttctccagcatccagcacaccgggcacgcccataggctgtcgaccgccgatggagacagggtgaccatgggtgcggcctgcgcatccgtcttgcccttccctgtttggataccgtcagactgtacaccgccagatgacgcgctgtcggatgaggcactgtcagatgaggcatcgccagatgatgtgccatccgattgggccggcgattccacgaacgcccagctctgcggatttgcggcgcgcacaccatgctctaacaggagtgtcaacgcaaccgcggcgtcctttgcggcagcctgctgcggttgagcagtggccagaaccgcgcgggcggcgctgaccaacccacgtgggtcggcgtccaatcc

SEQ ID NO: 1283 - DNA, 5189 bp, Unknown
  R157_18m  MAG No. k141_3815
atcacattagtgatgaacggctggttatcgatgctgatcaccgacacgtcagcgccgatgcgcactccgcgttcgcgtgcggcttcgtagatgaaagtggcgcgcacatcgttgaaacaaaagatgccgtccggcttgatttcgtcgaacacccgcgtcgcctcagcagcagcgttggtcgtctccaatacattgacgaccaaagcgtcatcgaatggaatgcccgcttccgcaagcgcacgtcggtaaccagtcagacgttgaccttgcgcgacgatggggattgcggaaccgtagtagacaatgcgtctgcatccagctttgatcagacggtcggtggcgtcataccccgccagttcatcatcggggtagaccgagggaactcgccccgctgcatcctcactgtccaccaccacggtcgggctgccttccaagacttcgggaatgtccactttgcggtggaacatcatggcgtataggaagccatccacgttgtatcggagcagggcggatatttcttggttctcgagttcagcgtcattattggtgttcgtggtaagcagtatgtatccgagcttgctcgcggcatcctgcgcaccttcgaataccttgctcgcgtacggggtcgtggcgatctcatcggtcacaaatcccaaggcgttggatttgttggtacgtagggtacgcgccacggaattgggcttgtaccccatgttctcggcagtcgcacggattttctgcgcaaccgccttgctgacgcgattgtgatccttgttgttcataaccaaagacacagtgcatacggaaacacccgcttccttagctatgtctttgatggataccaatcgtttggacctgttcactcgttgccttactgacgactgcgccattttatcacccccttttttgcgaacatgtcacgatgtctggtttcgggcgtggcccgtgctctgttccatgcggtcatgaatgtccattccaggcagacggccgaatgaataaataatccaggctgtgcagaacatcggcagcgacaagccgaacaccatgagaattccaggccattgcacccatacaagcacggtaagaatcagcagtccgacctgcagaaggctgcacaacgggcgtgccacaatcatcgccagtgttgtacgaacaatccagatgggactctcttcatagttcgcgcgcactacccaaaccaaggatgagaacactgccaaaactacgatgatgagcagcagcacgccggaaaccatgatgtcgaaatcgccgcgagcatgccagttcatcacgtagtagtcgacgatgaccacggcccagagaataatcaagggccaaccgaaaagattcgcgcgcttgacttcgcttttccagaagccgtggaacgtcttccaaacttccttggcccgcattgaacggtcctcagaaagcacccacgcacggaacgtagcctgcgcagccgcgaacgaggggagaaatcctagcacgacggctcccatcagagtgtgcgcgagtatggccacgttgaccacgaaaatcgcgactagcagacggcagaaccgctcgtaggccacagagaagcgggcaagcatagcgaatcctttctatcggctggcttttggattggttgtctctcgtcggattgcgtttgactcaacccttgaccgcgccgagcatcacacccttgttgaagtacttctgcaagaacggatagagcacaagcagaggcagggtagagacgatgatgatgccgaacttgatctgatcggcggcctgctgctgcgcagccgcgttgacattggttccagtaccctgcgccaccagcagcaactgctgcaacaccacctgcaatggctgcttcttgtcgtcggtgatgtagataaggcccgtcatgaagtcgttccagtggccgacaaagtagtacagaccaattacagccagaatcgcggagcttaacggcagcacaatcttgaagaagtagccaaaatagctcagcccgtcgatctgggccgcgtcgaagagctcttcggggatagatgtttcgaagaaggagcgagccacgatcacgttatacacggaaaccgcgccaggcaggatgaacacccacatgctgttgttgatgccgaggctcttgtacagcaggtagttcggaatcaggccgccggcgatgaacatggtcacggtgaacaggaacatgatcacgcgtcgcggcttgaactcgcgacgggatagcgcgaaggcgcagggaatggtcactgccatgttgaccgcggtgccgaccaccgaatagatgatggtgttgagatagccctgccagatgcgctggttggcgaacaccttagcatagccaacgaaggtcacacccttgggtagcagcagcacttcaccgccggccacggcgttcggatttgaaaatgatgcgatgaccacgaaccacagcgggtagagcaccgccacaatggtcaggagcagcagcacattgatgatgcccgacactgccaggtcacccggcttctgcttctggcgcacgtgcttgttccagggaatgtcgttcttgttctgggtaacagcctcaattgttgcagacatgataaaacccttctagaaaatgctcgtatcggaaacgcgcttggcgattgcattcgcggtgatcaggaagatgaagttgaccaaggtgttgaacaggccgattgccgtcgaatacgagtattggccgttgataataccgattttgtaggtgtatgtggcgatgacttcggtggccggcatgttcagcgagttctgcatcagatagatcttgtcgaagcccacgttgagcacggagcccatgttcatgatgagcaggatcgcacatgtcggcatgatcgcaggaatatcgacgtagcgaatcaactgtagacggcctgcaccgtcgatcttcgccgcctcgtacagcgatgtgttcacaccggcgagcgcagccaggtagatgatggagttccaaccaacatgctgccagacttcggaaatccaatagaccgcggtgatggcgctggtggagcccatcagtgattcatcaccgaagaagcgaccgagaatgccggtaccaggagtcaggaagatgttgagcatggagacgatgaccaccacggagatgaagtggggcatgtaggtgatcgtttgtacgaaacccttgattttcttagaacctatctgattgatcagcagggccagaataatcggaaagatgaagcccatgaccagtgtccaaagggaaatgcggatggtgttggtcatgatctcgccaaacagcgggttgtggaagaattccaggaagtatttgaaaccgacgaatttgccgccggtcaggcctttggtcggatcgaactcgcggaaggcgagctggatgccccacatcggcacgtaggagaacagtcccacgaagaacaatgccggagcggaaagaatccacaactgccagtagcgacgtaaatggtcggcgatgcgatcgagcagacctggtttcttgcggtcgggagccgcttccatcgccacggtccgtgcagcaacgccttgcgatgtttgtgcactcatgttggtctccaatttaggatgattgctagggaacaaaaatgcggggtccggcggcagtcacgggagagaaacgaacccgtgcgatggaccccgcggtattacttggctacttggtgtacttgtcgtaccacttctgccaaatcttgatgttggcgtcgaggccgagggtcggttcggacacctttttcacgtaggcatcccattccttgtcgatgccgcccttctggacccacttcgcgatctggttgttcgcgtagttggagatggcggtgttgttgttttgcagggtgttggagtcctcggtatccgggcgcacgtaaatcggtacgacatccttgacgccgtcgacgcggttgcgcgcctcacgaatggccaaatcggacgcagtgacctggtcggcgttggtgtcgttgaccatcttcacgtcgtcgcgaatccagccaccgaagcggtcctgcagggcgacggcgcgggtatcaggatattcggcgtaggctttagccttgtcgatggtgtactggtggtcgccgtcatcggagacgatatctggaatagagccgaagaatccagccacggaaagcttctcgccatacatggcgtcgatcaccttgtagatggcgtcctggttggctgcgttcgggtggacggtcaggccggaaccggagtaggcccagcggcaggcgtcctgggaataatcccacttgacctgggagtcgggcgtggaggcgtccttcttcagcggcggcagggtgacgtactggtcgccaagcgcgttgccgtattcggcgtagttggaccaaccgaaggagacgccggtcagcgcggtcttgccgtcactgacggtctgcgaagtgtattgcgaggcgtcgcgggtgagcacatccttcgggataaggcccttggccatgagtccgtgcaggtaggagacgacgtccttgagcgcgtcggaggtgtaatagctcttaaccttgccgttgtccacataatagccctgttcggaagcgccgccgcccatgaaggaggtgaccacgccttcggagttcatcagcgccagagggctccacaggccgaagccgaggctgcggatattcatcggcacctcatcagccttgccgttgccgttcggatcctgggtcttgaatgcatcgagcacgttctcgagctcgtcccaagtggtcggcatctggagtcccagcttgtccagccaagtcttgttgatgaacatgtgagtgccggaaacctcgtaacccttgccgcggtcggagggcagcatggcgatcttggtgccatcggtaacgtacttcgcggcacccggctgggccttgaggaacttcttgacgttcggcatcttgtccagatgcggcttgagatcctcgaaataggtgctgtacttggccgcatccaccatgctaaacaagctcaagccaatgtccgggaattcaccggcggccatcttggcgctcttctgctggccccacgcgttgtcggagacttcctgccacttgatggtgcagtcgcaggcggcttccagatccttggtgtactgggtgtcctgcatcggatggtcggtcacgttgcgacgaaccagaatattgacgattggcttgccgttc

SEQ ID NO: 1284 - DNA, 25199 bp, Unknown
  R157_18m  MAG No. k141_4194
agtcgctggtcaccggcccccggcaggcccgggtaatgaacggacttgaccagcggatgcgcgagcaggtaccgcgcgatggcattcgcattctcctgctgccggtccatgcgcagggccaatgtctggatgccgcggcgcaccgaatcgcattcaatgggcgccagtacccctccaagacggttctgggcgaagtacacgcgattggccaaatcctcaccggagacgaccacgagaccggcgttgacgtcggagtgaccggccaggtacttggtggcggagtggattaccacatccgcgccaagggaaagcggctgctgcaggtacggggtcacgaacgtgttgtccacgatggacagcgcaccgtaacggcgggctgttgcggagatggcgcgtacgtcgttgaccttgagcagcggattggtcagggtttcaaagtagacggcttgcgcaggcgcgatgccgttcgcgcggtcgcccttgacggcggcctccaacgctgcaatgtcctgggtattgactgactcgaccacgacgccccaacgggtaaagaactcattgagctgcgaatacgacccaccgtaaatgttgtcccctacaataatacggtcgccgggcttgaaaatgctgagcacggcatgaatcgccgccaagccggaggcgaacgcaaaaccgcgcgttccctgctcaagctgggcgatctgctgttccaggaagtcacgtgtgggattgccgctgcgcgcatagtcgtaacggggcatcgcgtcgaccctctcaaaggcatatgtcgtcgaattgtaaatcggcgggttcacagctccggtgttattatcgtcaaccggcagtccgtggacgagctgagtattgaatctggtcattgcgcacccccttacgtgtcgcgtcatccgtgcgcgggactcccccgcgccacatctatgactgtaatgcagaacgccggaccgaaggccggcgttgctatatgcgttggttatgagaagctatagcgacacgataatcagcaagcgactgcgtagtaccatggtcaccattttgccggactccgagacggcgtacggcaatcgccgcgcatcggcattctgcgcaggtacgtgggataacgcgatgccaaaataacccgaattcgcacggagccggattcctcgccaggtaaatatttcacaggaacggaacatatcgagacagccaatatgaagacgagtccacgctcatcgccccggaacggcatcaacaagacgctgggcacactcggaatgcggtgcggatagcacccggtggacattcccaaattccacgacgcgaccatgttccatcacagccacacaatgagcgctttgcgccactaccgcaagatcatgggtgacgaacacatacgtcaatcccagctccgcctgcaattcgtcgagtaaatcgagaatttggctttgcacagatacgtccaatgcggatactggttcgtctagcatgatgatttgcggattaagggccaaggctcgagctatggccacacgctgacattgacctcccgataattcacgtggttttgcgtcaagcagacgctgaggcaattcgacccgatccagcaattccgccacacgcagcttgcgctccttcctgcttcctttgccgaaaatagccaacggctcggcaatggattgaacgatggatcgacgcgggtccaaagaatcaaaaggattctgctgcaccagctgcatttgtcgcctcgctcgacgcatttccgcttgcgacacagacgacagatcttttccattaatcagcacatgccctttcgtgggacgagtcagctgcaacgccatccgaagcaaagtcgtcttgccggaaccggattcaccgacaatcgccagcgtcttatgtcggtgagcgcacaaactcacatcatgcaatgcccaaaacgcttcctcctttttgctcctattcacggggaaccgcttgctcaccgatacccactgcaccgcacaatccaacccaacctgatcatcggcggcaaccgcaatctcccgttctttggagaaggcgaaggccggtgccacttcgatcaaactcttcgtataatcctctcgtggggaggtcaatacctgattcgtatccccttgttcgacgattttgccatcgtgcatcaccacaatccaggaggcacggtccgaggccacagccaaatcatgcgtgaccataatcagggcaataccacgttcacgcacgagagccgacagcttatccaacaccgttttctgcactgtgacatcaagagcgctggtcggttcatccgcgatgatcagatccgggtctcccacaagcgcctgtgcgataagtacacgctgcttaagacctccagacaattcaaatgggtattgacgatatctcatatgggggtcgtcaaacccgacctccttgagcaaagaaagcgcacgccgtttcgcctgctcgtgtgatacgcccacattgagccgcaccaactgcatgatctggtcgcctatacgcattgtcggatccaagttggtattgggatcttgcgggatataactgatgcgacggcggcgcacctccacccactgcctgtaatcggtttgctgatattcatgcccaaatagcctgattgtccccgtttgatacgcagaagccggcagaatcccaagcaaactctgaaccatagtggatttacccgaaccggattcaccgacaatcgccacgctccgtcctgcatcgatacgcagatcgacaccacgcagtgccggaatctcacgatctcgccggagatacgtcacactcaggtcacgaacctctaccagtggatgtatgtcctcattgggggttcgtacagatgaaccactgtcgatacgctccgtcatcctcgttgcctctcttcaataatctgcgcaatcaccgtcatggaaagtgcgcacagcaccactaccaggcccgggagcagtgacagccaaggagccgtgagcagatagtcccgtcctgcattgatcagcgagccccattccgctgcggggggttgagcaccgaatcccaagaaactcaatgtcgccaccgacatgatcacaccgccgaagttcagtatggccagcactccgaccgggcctgacgaattcggcaaaacatgacttaccataatcctgaacgaactcgctccattgacgcgtgcggcatcaatgaaggcgcgctcccttactctcagtacctgcgaccgagttgtacgcacaaaactcggagtcaatcccacgccaatggccaacgccactggaatcgtaccgaatcctatggcggtgataatggtgatagccagcaacaagtaagggatggataggagcacatccaccgtcctcatcagaatggcatccacccatccgcctgcatatccggcgataaccccgatgatcaatccccccaccaccgcgatgaccaatgcaagcagactggccacgatcgtctctcgacctccgtagagtactcgcgtatatacatcacgtcccaactgatcagtgccaaaccaatgcagcgccgacggggcaagcaacttctcagaaggagatgtcgccgttggatcgtgatgggtgaacgcagcaggaaacagcgacgcaaggatgacgaacaacaaataaatcccggccatgcatcccgcggcgcgcctacgcataacatcaccgaccatagctaggttcctcatgatctgcctccccaagtttgcgcaatacgaggatccagaagtggatatatcagatccacgatcaaattgatcacgacgaaagcagcggcagccagtatcaccactccctgcaccactggaatatcctgttgcgtcacggcctgctgaatcaacatgccaagcccttgacgagaaaaaaccgtttcggccacaatcgctccggtcaccgtatctcctacggcgatgcccaaaatggtcaacgacggcaaggacgcgttctttgccacatggcgcacaatgacactgccgcgttccataccatgagccaaagccgtatgcacataaggttcagccatcacttcgtcaaatccgttcatcaacaaccgccccaaagtggcagccggagcaacggacatcgtgatggtggggagaatagcgctttgccatccttcaatgccgcgagccggcaaccatcccaatgtgaaacagaacacctgcatcaacagcaatcccagccagaacgacggaatggacatgccgacggacggtaccgccgacaataccctgcgcaccacgccattacgggtgaccgcggcaagaaacgccaatccgaacgccagcacggcagccagaacaatggccaacaaaccaatgaccaacgtgcttgcaattcgatcgatgatcaatgaggtcacaggaacaccataagtgtacgaactgcccaaatcgccgtgcagtgccttgaacaacatggcgaaatacgcatggatgggacccttgtccaacccatacaaatgttccagttgagagatctcctcaccactcaacgaactgatatccgtgcctttcgccttgaccattaacgccactggatctgagggcagcatattaagaatgcagtacgtcagcgtgtaggccgcccatagtacgaggatggcctgcgcaatacgaccgagcacataccgcaatgcggtgatgcggttaccgatcatgtcgaaatctcacctctcccgttatcatttagcgatccaagcgccgctgaagtcgccaaatgcctctgcagtaaatcggataccctgcactcgggaagacgccgcgtaatcctgtagacgctcgtatacaggaataagaatgtagttgccgctgaggaactgctgcacctgacggtatgtttccctgcgtttcacggggtcaagctcataggtccctcgatcgaacaattgggtcagctgtgcatgctgttcctcggtagcgatgttcctggtctcatccttccaagatgagtagcgaagatccaaaactcgattcaacgccgataaatcgttacgcgtgaacgtgtcaccgaggaaatcgtagtccccggatatcatgcgggcgttttcctcagccgcggtagtaacgtcaattcgataatctatgccgattttcttaagctgatcttgaatgagttcatgtccttcgttcttggtgaaggtcagcaaatgcagcgtcagtcgcttgccatctttgtaccgatatccatcatccttcaatttccatccggactcatccagcaactcaccggctttcttgggatcgtaagtggtattggcgggagttttcagcattcccgtcgtggtcgaatccaaaaaaccgctaacgaccggataatcgtctcgcaacagtgtggcggcataagtcgcgcgatcgatgcccaaggtcaccgccttgcgtacattgatgtcattcaatggcctgccgtaacgaatattcgggaaaaggttatacgccgtaccaggtagcgatcgactttccacacgaccaccagcttgttcgatctgagctttgtcgttctgcgtcaaagcatgatcggagtcaggccataacacgtcgacggaaccactggacaaactccctacacggacagaattctcgccggaataactgaattcaatgccatcaagatacgcatcacctttctgagactggaatggcgaggaccacgtatgccctttacgccgaatcaactgcgcggccgttttcggattgaacttcttcagcacgaatgcaccggttccagatagtgccgctgtgcaacgctcttcaggaggaagttccagtgatttcggagagatgacggcaagattcgttgtggaaagtccttgtaggaaagacgcattaggcgcggaaaacacaaagttcacggtatcgtcgtcgactttttgcacctcttcaagattctgcgtatacaattggccatacgttccgggaatttctttggccgtttgcagatctgtggtgaaattcttcaccacggcatccgcattaaacggctccccgtccgaaaacgtgatgccatgcttgaggtcgacggtcaacgtcttaccatcctcgctctgccgccaacctgaagccagccaaggtttgatctctccggtcttcggatcctgatcggtaagcgactcggcgaattgacgcacaatcgtgcgagtgcccgtccaatacgcttggaacggatcgatgcatccgaccggatccggtacttgaatgaccttgagcgttccgccctgctgtggcgcatccgcattcaccgcgccttgatgagaagtgttgccgcaagccgccatgccggtcagcagtcccgccgacaagcaagcgaccagtactttattcacgatggcattcatgatttttctcccgtttttcgcactgctgtttcagattgccgaaatccttgaatccggcaccgccctgcatcgtgccggtaatgttttcgggaaagggtcctcaagatggcgattcacctgcagatgacccgcattccattgatacatctgcaataacgtggccacgatgccaccaactccgtcgaaatacccgatcggcctagtgatgttctccgggcgaacacgctcccacgcctcaggccagtcggaagccccatcatccaaccgttcctcaccgccaagtacaacggccgcggatctctcggcaagatcacgccaacgttcattaccatcatgcaaatacagtccgataaagaactggatcaggcccgcatggccacagcacaagcacaggttgttccacagccctgcggactgggtttccggagcgcccaatgactccatgccatcgacaagttccacaacctgatcggcgtaatgcgtgtcaccggtgatgtcatacaacaggctgaataaccgcgctgtaccaccagggccgctgcatacattgaggcacagtatcgtcggctgcccctcccccacacgctgtggaatgagatatccctgggtctgacgaacggcgacatgctccacatatgccgcggcatccttggcgccctgcagatactgatcatcttctaggaattgatagagccgggccagaaccaggccggagccagcagatccataggtgaaattgggatagctgtaatccaaatgaccttcgaacccatggtacagcaaaccaccatccacagttcgatggcctcgagcaaggtattcccgcgccgcagatacgatcactcgtcttacatcgtcaccgccaaatgccaggtaagcctcgatgagaaacaggatgacaccaccgtcaaacgcaatacccgtattggtccaatgcactcctccatgttctccgggttttgctgcatccaaatagtagtggacaatatcctcgacggtccgacgatatgattcctctccaaattcacgatataaatccagcaacaccacaccgacgcctgcagcaccgaactgatatccgcagttatacaactccaccagatcatcggtcaaccacggttgtgcagcagtcagcacttctttccaatggcgggtcagataccgtgcggattcactggcgatatcggcgaaacgatcttcaccggtcgccctataaagctgcgcatacaaggaagacaatcccgcgacgccgctataccatgacagccccacggattggccacgaccgggatcagtccagtacaaaccatcttcggagtgtcgctggtagcgtgcgatatatcgttccccccgaagtgcgctatccaaatattctttaggatttcgtaccacacgcagcgcataccggctacccgaatgaaaagcgaaccgatcatcatcgtcgtgcgtcatttcagctccttgcaatttacaataggcttgcttcaccgtgccccccacggatcatcgcttgcaccagcaaacggatattgttcattcaacagaacatcatcagccgccacaccatcactcttatatgaatgttttatagaacgctccaatgctggccaaaggaaccatttattggggatactgaataagcccttataaaaccttccgatagcatcgccgcaaccgacaagaaggaacatccgtacgattcatcgaaacacaacatcacaatgcaaggaacagcagccatgaacaccgtgccacagccattgctcgacttcattatccaaacaaggcaacatctgcatcgcaatcccgaactttcatttcaggagtatgccactacgaattatcttgccgatatactgcacgcgcacaacatacgtgtaatcgacacatcaatggatacgggaattatcgcaattatcgaaggatcgtcgtcaggaccgcatatcgcgttgcgcgcggatatcgatggactgcccgtcaacgaagatccctctcatgatgtcatctcccgaacagatggcgtcatgcatgcctgcggccacgacttgcatatgtccagcctgcttggcgcctcattgctgctgtcggagctgtccgacacattttccggatccatcacccttgtgttccagcctgcggaagagcaaggtaccggcgcgaaccaagtgatgcagacccatgtcctcgatgacgtcagcaccatcatcggatatcataacgatccccgatacgcgcccggaatcatcgcgataagcgaccagcccatgatggccgcagccggaagcttcgacatcaccctgaccggagaaggcacccacggcgcttaccctgagaacggtcgaagccccatcgaagccgcggcaactcttgtcacagcacttcagaccattgtcagccgaaacatttcaccacttgatgcgacagtcgtttccatcacccaagttcatgccggcaacacctataacgtcattcccgaatccgcgaccatcgccggaaccgttcgaacactcaatcaaaaaacaagccagctggttgaacggcgtatgcgctctctggccgaatccatcgccaccggatttggcttgacctcacgactaagatggtcattccccggagctccgctcgtcagcgatgcatctttagtggatctggcaaaacgcagtgtcccgcattatgcgaatctcatcaacccgacaccctccatgggcggcgaggacttcctattgtatttgcgcaacatgccgggactgtttgcattcatcggttcaaatgggcgtcctaatgccgcaagctggcatagcccccaataccttggattcgatgacatgttgagcactgccgtgctctattatgtcaacacggcattggatgtgctcaaacactgagcacagcacgtccacgcccctacagataagcgcccatgacgcaagtgtcatcatcttcacgtcatgggcgcccattcacgaaagtcagatctcaccgccttcgaccacgatctcgtcgggattgacttcgttgccgtagaccggctccagagtctcctgataatccttgtggaagaagtcgtccttgccgagtttgacgatctcatcgttcacgaagtccagcagttccttgttgcccttctgcaccgccggggcgatggtgtcgtcgtcgccgagccgagtgatgccgaccttgaatcccttgttggccttggcccaggcgagcacctcggtgttgtcggtagagaaggcgtcgccgcggccgtccaacagcgcgttgtaggcatcggcgtactggtcgtacttctgcagcttgacgttcggcgcgttcttctcgaaccaggtttcggccgtggtacctttggcgatgatcagggtcttgccgtccagctggccgacgtcggtgatcggcgcgttctgcggggagaccacgccgagcgccaccttcatgtacggcttggcgaagtcgaccttctccttgcgttcctcggtgacggtgaagttggcgagcaccagatcgaccttgttggaggtgagcacatccacacgggcggccggatcgaccgacgtgtattccggtttcacacccagatccttggccagttgttcggcgaagtagacgtcatagccctggtacttgccgtccttgtccacgtagccgaatggtgccttgtcggagaagacggcaatcttgatcttgccgttcttcttgatctcgtcgaggctgcgggccttggcgttggcgctggagctggtgcctgtgtcagaggacttcgcttcgctcggggtgcctgcggacggaccgcatgcggccatggatgccgccattaccaatgccgcacctgcggcaatcagtgctttgaatgatctcccaaccttgatactcattgagttctccttctcttgttgttattgatatttcttctcaagtacgtcgatatggcacaatcgaatcactcgaattcgaaggtgtgcaggaactgctgcgcacgttcggtttgcgggtgttcgaagaatgcctgcgcatcatacgattcctcgacgatgtgcccgccatccagcaagatgatgtggtcggcgatggctcgcgcgaactgcatctcgtgggtgacgataagcatcgtctgcccggacttggccagttcgagcaccacgtcgagcacttcacgcaccatttcggggtcgagagccgccgtgatctcatcgagcagcagtacttccggatgcagaaccagcgcacggcaaatggccacacgctggcgctgaccgccggacaattcgtgcggccaggagtccttgcgatcggcaagtcccacacggccaagcaaccggattgcttcagcctccacctcggccttgtctctcttctgcacgagcaccggcgccatggtgatgttgccgagcaccgttttgttcgggaacaaatcgtagctttggaacaccatgccgatacgagtgcgcagttcactggaccggtcggatcgtccggctcgttccgtgccgggttttccggtatcgatcacctgatcgttgatggaaatcgtgccgccctgaatcggttccagaccggcgatggtgcgcagcagcgtcgacttgcccgagccggaaggacccagcaccacgagcaccgaaccatgctccaccttgaaggagatgtcgtccagcaccggcttgtcggcattcgcatactgtttgatcagatgatccacctcgaaacccttgcaggtcgtttcgggttcagtcattcgaccacctcttttccagtcggcgggccacaatggacagcggccagcacacgatgaagtacataaagaaaatcacgccataaatccacaaggttccggtcgggaattggaatcggttcgcgtcgataatctgctggccgaccttgatgacctcgaccacaccgagcagcacggccaacgatgttgttttgacgatacgtgtcgccaagttcacggatgccggcagcatacggcgaactgcctgcggcagaatcacccgggagaaagcctgccacgggctcaaccccagtacgtagctcgattcgtactgcactttgggaatcgactgcaatgcgccacgcaccagatcgcccagctcggcgcctccccacaggatgaacaccagcacgcaggcaccggtggcatcgagattccaatcgaaccatcgagcaaaaccgtagtaggcaaggaacagcaacgccagctgaggcataatgcggatgaagtcgaggtagatgcgcatcgcggcccggatcacggggttcttcagcgtcatcagccagcccaccaacaggccgaccgggatggacgcgcctacggatacgccggctatccacacggtgacccataggccttgcaacagacgtgggaatacgcccggctggagcagtatttcagcgccgtccataatcgaatctcctctccagccatgtgccaaagatggaaatcggcagcagaatcaccagatacgccacaatcagcatgaacagcgactcataggtgctgtagtacatgccgatcagatctttggccatatacatcacgtcggcgagcgcaatggcggagacgacgctcgattccttgaacaggaagatcacattggccactacgcctggaatggcggtggacaccgcctgcggcagaatgactcgggtgatggtttgcgtggaggtcagcccccagtacgtatgcggtttcgcgctgcacgttgggcaccgcttccaatccgccgcgcatcgcctcggccatgtaggaaccacccaggaatccgaggccgactatcgcgcaggtttcggcggaccatactacgccgagtttgggcaggccgaagtacagaaagtacagctgtaccagcaatggcgtattgcggctgagttcgatatagattcttacgatttgccgggcgaccgggatacgcgcgatttccacgccagcgcagaccagacccaccgcgacggcaagcagtatgccaaacacggatatgaataaggtcatcaatgtgccattgacgaagaaaggcgcgtaacgctgcacgaacgaccaatcgaatgtcatcgggcgcgctccttcctttgcttctcgtttcttctcctgcgcataaacggtcttagccgcccatgtacgatttcgggggccgaacatacctgccacggcccccttgccgtgtcatcgtagagtatcagaacacgtggcatggccgctgcgctatatgcattacttatgggacgttactcgatgggcgaacatcagggcaatattgtcgcctaaacggtggatacactgggagccatgaagattgccaaggccttgacccgtttgaccggtcctgaaaccaccccggtgttcgtgctgttgcacggctggggttccaatgaatacgatttgcccgatctgctgaactattgcggtgccggttcggctgattatgccagtttgcaggcacccatcgcctatggcatgggatatacatggttcggtgcgtgggcgcatgaaggtgtgccggagggcgaatcattggacaagcaggcggctgaggccgcccaagccattgatgcatgggttgcggagcatattcccgccactcggccggtggttgccatgggattctcgcagggcggcctcttggccgcgcatctgctgcgtttcaatccgaagcgatatgccgcagccgtctcctgctctggatggctggcaccggggtccgttgcgggcgatgccgaattggcttcgttgaagccgcccgtgttctacgggcatggtgctgcggacgacatcttcccgaaagccgatgtgacggcgatgggtgagttctggcgcgagcacggcacgttgaccgaacaagtgtatccgggcatggcccattcgatcaatatgccggaaatgcgcgatattcaacggttcttggaggccaacggattcattcggtcgcagatttggtagtcaccacctcacatgacgtagtctacgtgggcgaattcggggactttgtaccatttgacggggtagccggcaccgtgggcgcagaagaccgagtcgggggtgttgtccagatcggcttcgggatcgtaggcggcggctgcgatgacctgttcggcgtcatggcatggcttgtagccgccgaaggtggcggagaaacggccatggccgtgcgtgtactggttcacgtccatcgcatagtcgcgcatttcggacaccggcgcctcgccttcgatcacggcgtattcgtcatcggtgaccggggattcgaagctgccggccatgcgctggatgtcgctcatggcacggccgatcatgtctgcgggcacttcgagccggaaccggtaccacggttccagcagtcggcagttgccctcccctgtggtgtccggccggctctcgaccggcgtctcgggccggccactgactcctgccctggcttccatcagcccttggcgaatcgcccggtacgtggcttgacggaagtcgccgccttcggtgtgcttcagatgcgcgcggccggccaccaaagtcatcttgatatcggtgagcggtgcgccaacgagcacaccgagatgctcacgctcggtcaggtgggtcagaatcagccgttgccaattgcggtccaaatcattttcggacagggccgaggccacagtgactccgctgcccggctcccctggttccagcaggatatgtgcttcggcataatgacggagcggctcgaaatgacctgcgccttcgatcggcgcagtgatggtctcacggtacaggatggagccggggccaaaggacacatccagaccgaaccggtcgtgcagggtctgctggatgatttccagctggaccgcgcccatcaattgcacatgaatctcggccatccgttccacccacaccacatgcaacaacgggtcttcgtcttccagctcacgcaatgcggtgatgaccttgtgcaaggtcagatcatcgaactggggacgggccggcgagctattgtccgccgcggtctggccggcggtgtcgttctcctcattgcggccggttcccgacttggcggcatcatgctcggcatcgtcccgattcacgctgtcatggccggctcccccacgtttggccgctcccgaggtgccggccgtatcggattccgctccgacgggcaacaccgtgtaggtcaacacgggttgcaacgacggcgattcggcgtccggttccgttcccagcccttcgccggggaaggtccgcgtcagtccggtcaccgcgcataccgagccggccggcacttcggtgaccgtctcgaatttggcgccattgtagatgcgcacctgatcgactttctcggaccacgccatgtcatcatcctcctgcgctggcgacggtgtcgacgccgcggcgcacgaggatgaggagacgatctccttggctttgagcgcaccgccggtgacgcgcagccacgtcatacggttgtgctgaccgtcgtgggcgattttgaacacgcgtgcggcgaaggcggccggccattcacgttcgcgggtgaacgtctccagcccgtccaggaactccttgaccccttcgagtttcaatgccgagccgaaatatacggggaacagctcgcgtacggcgatcatcgatcgcaatctgcccacggacagcgcgccatgttccaaatagtcgttcatcgcctcctcgtccagggtggcgatgtcttcggcgaacgcgtccaacggtagcgcgctgccctcagtggactgttccattgccggcaacggatatatcgcatcgctcagacgcctgcgcaactgagccaacacggcctcgcgggcaaatccggcggcgtcgcacttgttgacgaagatgaacgtcggcacaccgtatctggccagcagacgccatagtgtctcggtatggccttgcacgccatccgtgccggagaccacaagaatcgcgtagtcaagcacacgcagcacacgttcggtttcggctgcgaagtccacgtgccccggcgtatccagcaaggtcaggcacaggtcgccgtgttctaccaatgcctggtgcgcgaaaatcgtgatgcctcgcgccttctccaaggaattggtgtccagaaacgcatcgccgtgatccactcgccccaatttgcggatctcaccggtacggtagagcagcgcctcggacagcgtggtcttgcccgcgtccacatgcgccacgatgcctgccactatctgtttcatcagctgtgctcccttcccgatgcgccgcatgttgccggccgcctaaccaatatatccgagaaaatccgggagggaaaaattttaccgtcagaccgggctgccggtacaataagtcaccgaacaccgactgatatgaggagcctccgtgaccacttccggcattaccgttttcggccaaccatcccagcccaatcatggtgccggcgggcgaatcgccatggacgatgccctctttcccaccgattatgtggcgctggatctggagaccaccggcttttacccgaacagttgcgccatcacggaaatcggtgccgtgcgcgtgcgggaggggcatatcgtcgatcaattccagcagctggtgaatcccttgcggccgattccgcgtcagatcaccacgctgaccggcatcaccgatgcgatggtggccgacctcgatccgattgacgaggtgcttccccgattcatcgcatggctcgctaccccggctgccggtcccaccgttgagccgattgtcggtcataacgtcagcttcgatctgcgattcctggattataacacccggcatatcgccggctgcggctttgcctgcgcggattatgacacgatgcagatcagccgcgccctgttccccgcgcagcggcatcaccgtctggctgacctgatcgtgcgcttcggcatcgcggacaatgaggaacaccgcgcattaagcgatgccatccagacccagcagtgcttcgaatggatgcggcattatgtcaccgagcatcacgaatccgaagcaatccgttggaagcaggcgccggccagaaacagcaccgaaattctccaccagcagctagtggtaaagcggtagttacagcccgtattattcgcacatagaggaaaactattagtcgctgggctagagaccttatagtggacggattcctctcgcatatcggagaaatgcgggataccacacggttagcggccaatttggggccggcgtcccgcaaccgtgcgggacgccacgcacgtcaaacgatgcacacggctggcatcccacaccccattccacagaaccattggaattctgccaatcccacaaaccggtgacgacaccgtacatcaggttctgtgggacgccagaggaaaaacacccgaaatccgctggcatcccacaccatgtcacaccgcacctgcagcatcgcaccacaccacatcacgccgacacctattcgtgccccccatttgcataattcgacgtttttggaagatggcgcacacatgcatgtgcccccatttgcatatcaaacggttgacgcacaaatggggacacacaaccacaactcagaatcctcggaattccgccaatcctgagatttcatcccccaacacggcaatcgccgcctctgccaccattttcgcatcaaacgattgacgcaacaatggtggcgcatgaccctttgtatcggtatgaatcagtccctgccgtcaggctctccccctattgtgagggccgactggcagggactgaacacgcataatcacatgagcacgccatgccaagcatggacatctcagtacgaacagaacctattcgcacacgttacagcccgtattctttggcgatgacggaccagaggtcggcggcggcctgatcgacggtttcgttgacgatggtgacgtcgaattcgctttcggcggcgagctccactttggcggtttccaagcgtcgggcctgctgttcggcggtttcggtgccgcggccgatcagacggcgcttgagctcttcgaagctcggcggcgcgatgaacacgtacaccacttccaagtcgagttcggcggcgcgctgcttgacgcggcgagcaccctgcaaatcgatttccagaatcgttggcatgccggcagccagatgctcctcaacaggcttgagcaatgtaccgtagtgggccatgccgtgcaccacggcggtttccaggaactcccccgccgcttcgcgggtcaggaactcgtcttcggtgaggaaccagtagttgacgccatcaacctcgccggggcgcggggcacgcgtggtggcggagacggacacccacacttcggggtggtcggcgcgcagcttggcttccacggtgcccttacctactgcggtagggccagtcaggacgattagacggccggcatgggtgttttcagtcatgggttcctccggagatgatgtggtgtgcagcgattatgaatccaatgtggtaacggctcaccggcgagatgaccggtaactgttacagccccgacgaacagggaagaatatgaatcgtgatgcgacgtatgcaatgagatagatacgtacgcatgccgcgacatctgattccgttctgattactggttttctgcgccttcggcagtggcttccatcagcgactgacgtacgtcaagcgcaatcgactcggtagcttggctcagtgcggcgatatccggcccatgcgaggcgataaagcgggacacggtaaccagcacgttgccgcgcgtaccgcggaacacggttttcagatccttggcctcggcaccctgccaaccgtaaccgggggaaagaatcggaccggtgaacttggaggggtccacgccggaatcctgcatccattggccgatggtggcaccgatgatcagacccaccgagcccatgccttcgatatccacgttatgcttctgcgcggtggaggcgatgccgtaggccacggtacgtcccttgtaatcgccgctctggcgcaacgcggtctgcagactcatgccttccggattggaagtcagggaggcgatgaacacgccgcgtccgttttccaacgcttcggtaatcaagccgttcaacgagcgcgcgccatagtacggcagcagcgtgatggcgtcggccagcaacggtgcaccgggcttgaaataggcgtccgcgatggcggaaatcgtggtggacaggccgccgtgcaggcagtccacgatggtgatgacgcccatttgtcgtgccgcgtagagcacgcgctcgagcgcttcgaaacctttggctccgtagcgctcgaacatcgacgtctggaatttgactgctgcggcgcgcccgttggcggcctgcagcatacgcatggagaagagttcggcgccttcggcgtcgacgttgtatccccagtcggtgaggagcttgcgatgtgggtcaatgcccacacacagcggtccgtatttggccattgaattgctcagtcgcagaccgaaatccgaacgttgtgcctgcaattcctcactgctgggtgtagtcatcagaactcccgtcgctccaattcgaacagctgcttcgaatgctcctgaatgctcatgatctgataatcattatgcttcacggcctcgatagccagcagtgcggcctggaactcggtgatggtggtaaactgcggcagatcggcggcaatggcggcagcacggatggagtagccgtcggaacgggagccgcgcgagttcggcgtgttgaggatcatgtcgatcttgccttcctcaatgagctgaaccacgttcttgcccacggagccggcggcgtgatgcacctcgaccggggcttccggatcggtgtccacgcgggtgctgatcttgtccacgatgttcgactcgatgccgtaacggcgaagcacggaggcggtgccctcggtggcccagagcttgaatccaagctcttcgaggcgcacggcgagcagcggcagctgacgcttgtcggtgtcgttcacggaaatgaacacgttgccgtgggtcggcaggccaccatcgtaggcggcgagctggctcttggcgaaggcgtgcgggaagtcgcggtcgaagcccatgacctcgccggtggagcgcatctcaggtccgagcaggatgtcgacggtcttgcccaccggggtgcggaagcgcttgaacggcagcacggattccttgaccgcgacctgctggccggggtggatgtcgccgccgtcgcccttgggcagcagcagaccgttggcgcgctggtcggcgatggtctcgccggccatgatgcgggcggcggccttggccagcgccacgccggtggccttggaggcgaacggcacggtacgggaggcacgcgggttggcttcgatcacatacagcgtgttggccatgaaggcgtactgcacgttgatcaggccctgcacgtggcagcccttggcgatggcgtaggtgccttcacgcaggcggcggatctggtcgtcggacagggtggacgggggcagggtgcaggcggcgtcaccggagtggacgccggcctcctcgacgtgctccataatgccgccgatgtacagttcctcgccgtcgaacagtgcgtcgacgtcgatttcgatggcgtcctgcaggaacttgtcgatgagcagcggggagggcaggcggccggagaccacggtatcggccttggcctcggcaagcgcgcggtccacgtacttggtgagctgcttgtcgtcgtagacgatttccatgccgcggccgccaagcacgtagctcgggcgcacgagcaccgggtatccgatgcggtgggcagcgtccatggcctcttcgaggctcagggcggtgccgtaacgcggggcgttcatctccgccttcttgagcacctcgccgaacagctcacggttctcggccagatcgatggattccggggtggtgccgagaatcggcacgccggcggccttcagacgcgcggccagggacagcggggtctggccgccgagctggacgatgacgcccttgaccgggcccatcttcttctcggcctcgtagatctcgagcacgtcctcaaaggtgagcggctcgaagtagaggcggtcggacatgtcgtaatcggtggacacggtctccgggttgcagttgaccatgatggtgtcatagtccttgccgagctcctgcacggcgtgcacgcacgtgtagtcgaactcgatgccttggccgatgcgattcgggccggagccgaggatgatcacggcctcgcgctcgcgcgggcgcagctcggtttcgtcggcgtagcagctgtagtagtacggcgtggcggcgtcgaactcggcggcgcaggtgtcgacggtcttgtagaccgggcgcaggccgtaggtccagcgcagctcgcggatggtgttctcgccttcatcgcccaagccacgcaggtgggccacctgcacgtcggacagaccggcgagcttggccttcttgagcagcttcggggtcagggtctcggcctcgcgcaccgtcatggcggtctcgttgatgaggaagatctgcttcaggaaccacgggtcgatcttggtggccgcgaacacctgctccagcgtggcgccgccccagatggcgcgcatgagctgcaggtaacggtgttcggtcggggtgtggatggcctcaagcagttcggccacttcctcggcggacggcttctcgccatcccagttgaagcccatgtggcgcttgtcgatggaacgcatggccttgccgagggactcctggaagttgccggccagggccatggcttcgcccacggacttcatggaggtggtcagggtggggtcggcgcccgggaacttctcgaaggcgaagcgcggcaccttggtgaccacatagtcgatggtcggctcgaatgaggccggcgtggactgggtgatgtcgttgcgaatctcgtcgagcgtgtagccgagggccagcttggtggcgatcttggcgatcgggaagccggtggccttggaggccagtgcggaggaacgggagacgcgcgggttcatctcgatgacgatgatgcggccggtcttcggatgaacggcgaactggatgttgcagccgccggtgtccacgcccacgccgcggatgatggcgatgccgatgtcacgcagcttctggtattcgcggtcggtcagggtgaagcagggggccacggtgatggagtcaccggtgtgcacgccgaccgggtcgacgttctcgatcgggcagacgaccacgacgttgtcgttgcggtcgcgcatgagctcgagctcgaattccttccagccctcgatgccctcttcgatcaggacttcgtcggtgggcgagtaatggatgccggcgccggcgatgcggtgcagctcctcctcgttgtgggcgatgccggagcccaggccgcccatggtgaagctcgggcgcacaaccagcgggtagccgaacttctcggcgatcttgtcgacttcctcgatgctgtgggcgatgtcggagcgggcggattcggcgccggcctcgtcaacgaccttcttgaacagttcacggtcctcgccacggtcgatggcttccagggaggcaccgatcagttcgacgttgtacttcttcaggacgccggcctcgcccagcgccatggcggcgttgagtgcggtctggccgcccagggtgggcagaagcgcgtcggggcgttccttggcgatgatctgctcgaggatcggagtggcgatcggctcgatgtaggtggcgtcggccatctccgggtcggtcatgatggtggccgggttggagttgacgaggatgacgcggatgccttcctcacgaaggacgcggcatgcctgggtgcccgagtaatcgaactccgcagcctgaccgatcacgatcgggccggagccgatgaccatcacggatttgatgtcggtgcgcttcggcatatcacttaccttccttggagttgttcttcataagttcgcagaaacggtcgaacaggtaggccgcatcgtgcgggcctgctgcggcctccgggtggtactgcacggagaatgcggggatgtccacgcactgcaggccttcgaccacgtcgtcgttcagatcgatgtgggagacgagcaccttgccgtacttgccgttctcaaacggcgcgtcgacctgcttgccgatcggggcatcgaccgcgaagccgtggttgtgggcggtgacctcgaccttgccggtggtcagatccttgaccggctggttgatgccgcggtggccgaacttgagcttgtaggtgccgaagccgagcgcgcggccgagcagctggttgccaaagcagatgccgaagaacgggtagccggcgtcaagcacctggcgcagcagctcgatttcggggccggcctgttccgggtcgccaggaccgttggagaagaagacgccgtccgggttcaggttctcgatttcggcgaaggtgatggtggagggcaccacgtgcacgcggcagccgcgctcggccatgcggtgcggggtcatgcccttgatgccgaggtccacggcggccacggtgtacagcggctccttgccttcgtactcgccgcacggctcgatggtgtaggtctccttggtggacacctcgtcgtacaggctcaggccctgcatctgcggtgtgttcttgacgtcttcgagcagctgctcaatggtcttgagcgcgccggtggcctggtcggtcagggcgtcgccggagaagatgccggcgcgcatcacgcctgcggaacgcaggtgacgcaccagcttgcgggtgtcgatgtggctcaagccgacgatgccgttcttggcgaggtcgtcatcaaggctgccttcggcacgccagttgctcacgttcggagagggatcacgcacgatgtatccggcaacccagatgcgggaggactcagggtcttcgctgttgacgccggtatcgccgatgtgcgggaacgtctgcacaacgatctggcgatcgtagctcggatcggtgagcgtctcctggtatccggtcataccggtggcgaagacgatctcaccggtcgtctcgccgagggcgccgtatggcgcccccacatatacctgtccatcttccaaaacgaggactgcatcgtccttgtcatacatcggaattgcgatggtcccggactcgttctggctcaccaaaacccccttatgtttttcgggtattcgtaccaaggttaacggccagcgcagactcacacgccgttgggcgcaaagtctcaccccgctggcggggctgtcggcaaggtgccgacttgagaatgtacggcggcacaagtgtccgcccatgaaaaagcctcccgaatggggaggctgaacgacaaatgactaatcgaccgtcggctgaatctcagcggacggggcagcgggctcgtcggatgcaccggacgaatcgggcgaatcggaaacatcgccctcatcggtcggctcggatgcggcggcatcggaatcggacgattcctcatcggcctcttctgccgcggactccggtgccggtgctgcgttcttggcggtgcacactgcagacagcaggccatggatgaaagcgggcgaatcgtcatcgcacagggtcttggccaatgccagagcctcgtcgatggcgaccttgtccggcacatcatcgttgaacagaatctcccaagcggcgatacgcagaatgttgcgatcgaccacgcccatacggcggaccttccaacccgtggagtgttcgtccagggtcatgtcgatctgacgacggtgctcggccacgcccttgacgatttcaatggcatagtcgggaagcggggtctgggcaccgggatgtgcgatgcgctcgtcaagcagggcgagaatatcctgacttttttcgtcggcttcgtacagggtgttcagagcccttttgcgcgcggtggaacgtgccatactgctgctgtcctagtcctttatacggtcggtcgtctgttgaggatgcggagatcagttgttctcgcggccggtgtaggaaccatcctcggtgttgatcttgacgcggtcgccctcattgatgaacagcgggacctgaatctcggctccggtctcaacggtggccggcttggtgccggcgttggagcggttgccctgcaggcccggctcggtgtgggtgatggtcaggaccacggagcccggcaggtcaacgctcagcggagtgccgtcgtggaaggagaccaggcagtcggtgccttcgagcatgaacttggccttgtcgcccacgagggtcttcggaaccatgatctggtcgtaggtggtcatgtccatgaacacgaagttgtcgccgtcctcgtaggagtactggagggtgcggttgtcgacggtctcgaattccatcttcatgcctgcgttgaaggtcttgtcgacgatcttgccggagagcacgttcttgatggtggtgcgtacgaaagcggggcccttgcccggcttgacgtgctggaacttcatgacggtccacagctgtccgtcgaggttcaggacggatccgttcttgatgtcgttagtagtctgtgccacgttattcacctatttcaaattcaaactagcttaggcaaagcccaaaaattgccttggctattatgccacaccgggtatacaggaagtgaacgctggggtttcccacgtgaacccctgactagactggatgaatatgcgacccttcttcgaagccatgtccgtgtcctgcgtcgtccccgcgcaaacgccggcggacgacgaacgcacggtgttcgacaacctgtccttcggcatggagcgcggcgacatcatcgacctggtgggcccatccggctccggcaaatcgagtctgctgaccgcatgcgcccgactcaacccgcacgcgcacggcacgttcgtcctcgacggcgtgggcagtgacgaattcagcgcgcagcaatggcggc

SEQ ID NO: 1285 - DNA, 15851 bp, Unknown
  R157_18m  MAG No. k141_4260
ccggcaccaacatcgccggcctcatcgccgtcatcctcgtcctcgcgctcctcggcaccggtgcaaccgccgcgatccgcctcacccgcgccaacggccgccacaccgggcacgagaacgacgcgaatgatgatggcgctgactgcgacagcagtcccgacaaggacagttccgagccggacttcgcccaactcatcaccaccatcaaccccaaggagccgcccacgaactgatgtgccgttttctgagaccgccgagtagaacctttgtttagcgtcctactcggctgatttcagacaatctcccgcgtcctgtgtattttcatttcgcttaggcacaaggcctcggattcgacgaataaggcggctcgggtgccgctgtcgatacgagccatatcacaatctgccatatggatacaattgagaaccaatatataagcgcaattgaaacatgattgaaggcaaggaatgggtaaagccatagagccgggagacattgcaagtatggggagcatgttgacggtttcgcagtttgcccggttgcatgatgtcaacacgcggacgttgcattattatgacgaggttggtttgttctcgcccaggagccgtggcgggaacggctaccggtattacgatgcctcccagagtctggagttcgaatacatccgtatgctgcgggacctaggcttcggcgtggaggagatcaaggactatgtctcccattccggggaacggcgtttcgttgcggtgcttacacgactgagggccgaggtgcgcgagagaaaagagcgtctggaacggctcgaaaaagttctggatcggaaggccggatatctggcggattgcgaatcggtgtcccaggatcgcgtcgaggtcgttcacaggccggagacgcaggtgctgacgatgacctcggtgcatgacggtgaagacaccttggagttcatgcagatggtcaaacgacggtggggtctcgaccgcctgcgttccggcatcggcagtttcatcgccgtcagaaatgttaggtcaggacggttcgaccggtatgacggtgtgttcgtcgccgatggcggcacaggccatgcggcggagccgggacgagcacagacggatgaccggtccgccatgactttgccttccggggaatatctctgcggctaccaccggggcgtctggtccggtcttcccgacctgtatcgctcgatgctgcgatatgcggatgggcatggcctggagcttggcgactatgcatacgagcgtggtttgaacgagttcgccatctcctcgccacaggactatgtcacgcgaatactcatccccctccgaagctgacgtcgcttccatcgaacgttccccgcgcgacacgcccgaaagacacgcgcacttgaccttacactcactgtaaggtggacgcttcttcttgcatggatttccgaaagacggcaatccggaaaggagcaatcatgggcgcgtgcagtagtttcacgtgttcttcgaccgacggcaggcattttctgggaaggacctacgatgagtacggcaccatcgatgcaaacagggtcgcggtcatcccgcgcggccattcggtggcgctgacgttcaccggtgacgaacggcaggccacggattacgccgtcgtgggcatggacgtcgccatgttccccacgccgctgctcacggacggcgtcaacgagcacggcctcatgggcgcgatgctgtacttcccgcattattgcaagttcaacaccaggcgcgcggactatgacgtcaacgccggcctgctgctgccgttcgtgctgggcaaggctgcgaacctcgacgaggtggagaagctgctgaagcatgtcaatgtcattgacgagccctccaccggaatgacgctgccccaccactacatcttctccgatccaagtggggaggccattgtcgccgagcctctcgaaggcgggctgaaggtctaccgccacacgatgggcgtgctgacgaactcccccgatcacaactggcacctgaccaatctcaacaactacctgggcacatccaaccgggccaagccggcccagctggtcaacggccatgagatcagcgagatgggcgagggcagcggctggttcggactgccgggcgactacagtcccgcttcaaggttcgtgcggctatccttcgcgaaggactgcatgcccgagccggccgacgagaccgacgcggtcaccaagatgctcaacaccttcgccacggtcgacgtgcccatgggcatcatgtacgacccggacgaagcggccccgcattacgagcagacgcaatgcaccatcatcatgtgcgcggaaagcaaacgctactacttcacctcggcgaccaattcaagggtatgcgtcgtcgatctcgacgaagaaatatcggagggaacgaccgagctcaaactcatcaagccgcccctgcaacaggacatcctgcaactgaaataatcaaaccccactattcgtcaaaggaaaagtcatgctaaaaagaaaagccatcaaccttcttgcgattctaaccgcattggcgatgtgcctatgcgtaatgattccaacggaggcaagcgccgcccctgtcgactattcatccattccgtccagcgaactgcccgcatcccttggaggaaatcttcacggcaggaagacggaatcgatcgatatcgaaggcaagggcacgcttcaggcaacggccgattacgacaacggcacattccaaatcatcgacttcgatggaacggtgcaggaaatcccccttcagcaagcagtcgagcaaatggcgaggcagttggaggggatgagcgaggagcaactgcaagaaatggccaatcttgcagacacgccgcaactctcacgctcttcgaacagcaccctatgcaaagtcgccaccgatgcggctaagctgatccagagcggcgctatcagcgcagctttgaaactcatcggtaagcaccccatcctaggtgcggtgattaagctgggaaattccgcattctttgcatggatcaagagccattgctgagagccttcattgaagcggtcttccccgagactgtttcaatccttatatgtgtgctgttgaatgctgaaatgtgccagcattcaacagcacgccaactgatacaggccaatttagacgacgcatatcttagagctgaagtatcgagcattacctccatatttggataaggtgacaatgagcgaaatgagcaaggcagacttgcagattgacattgactggcattctctgaagcccttcaaagctcctggccggttgttcgcgtcacgggcggatgcggcgatcagagaggcgttccctgatttcactgcaatctggagggcccgcgcctcttcctcattggattggaaggatggcgtgtgggttgtggcatctaaccttgcaggagacatgcttggtgcactaatagacgcgatcgacggtcttagactcggcggatggattccccggacctattatctgctggaacgtaatgccactatgaaacttgccgttgtcgcgcgccgttccgtgcgtttgtgcgacaagctcaccggtcccgacctcgcggaggaatacaccgatggaaacaacacatatgccaagctctaccgagttcgataatccgtccatttgtaagtgcaacacttcgttcagactgcaactttaactgttcgtcagtgagcagctcgtccgcgacgacatcttgatgagacaatcccgaaccgggctccacccaattcgtcacatcaatcccaaggagtcggccgtgggtcaattccggctatcggtatggccggattgggcacccgttgcgcttcgtccagctgatagccgacggacaggtccgcaagttgtcttgcgggctttctaatacccgccaaacattcctactgtcagttttgtcagaaaaatgataggatgggaatgtttcatggaacaaggttgaaggagatcacaatgggtgcagtgctggaacgcccgcacgccaagggcaccacggttgagatgggcagtcgcgcgctggtcggtgccgacggcggggtgaccgagctggacatggaggcttacgaggccgcgttgaacgcggcgatgggcgtcatgggccgccatcgcatggtcaccacggggcaggccgccaagctgcttgattgttcgccccgcacggtggcgcgcatcctggactcgggacgcctgcccttcactcgcaacggggataccggccggcgtttggtggatgtggttgatgtgatggactaccagcgtcaggaacgcgaacgcatgcgttcctcgttggtggccatgcgccgcgccgcgcaggagatcgcgatggacgacgccgagctggccgaatacgtcgcccagttcgactgaaaggcatgctatggccaagcccgtcgccctgctggacgccaacgtgttcccgcccatgtggctgctcgacatcctcctgaccctggacgagcacaacgtcatcgacgcggtgtggtccgaacgcatcctcgatgaggtatgccacacgctggtcgaacgacaacggcgcgatccggccaaaacgcggcgattcctcgacaccatgcgaaccttaaaccccacgcattgcgtctacggctgggaaccgcgcgaatccacgctcgatctgcccgacccggacgaccggcacgtgctcgccgccgcgctggtcgccgacgccgactacatcgtcacctacaacctcaaggacttcccggcttcgcagctcgccccatacgccgtcaaggccattcaccccgacgaattcctctgcgccatgctcgaccatgatcgaaatggcgtgctcgccgtcatggaagaggtcgtctccagcaaggacaatccgccacgcaccatgagcgaagagctcaaccacctcaaggcattacgactgaatgcgttcacaagtcacttgcgggaaactcaggccagccgcaaatgattcaacgccactaaacaaaaaggactcttcgaatggcggttatctggcaaagcatccttctagggcgtgagtcgttgtccaattggatgacggtatcgaacggctatagcccaaagtgggaggaatcggaagagttcggttccgaagcggtggacgatgtaaaggatttcgcattccccaaaggcacgcacccggttttcctagtcagcgatgacgctattgtcggcgtttgcctgatgacttttctcagaagaatcgggaagctgaaacatcaatacagatttacggatttccatatcttcgcccatcccattgaagtgcaggaagtcgtcgattcatcagaccatcacgtaagcaagtgggtaagagaaaacctttcgcaagaaagaacggtaagcccgggcagcgcaaaacaaatattgaatgttttaagcgagaaggatcaagatttctccaaaattcaagaacagctggaagaaaaatccagaaaagcaacgcccgcacgtctttcccaaaatgagattgaatcgcaggatgcgacggaactcgcatgcaggtttgctggcgtggacgaatcctgggaaaaggaatcgaatcccagcatggcgttcatgcagcccttgccgggaggaagcgaggcttccgccatccgtcacgattggcgtgcattcaatgactggatagaggaaaacgcgcctacgctggatatgacggcctatcgagacccattagaccccaatcaccacatctgtatttggtatgcggacaaggagaatgcggaacgcataacaggaaccgatctaatctattgccagcatgacggcaataattggacggatcttgtgatgatccaatacaagcgtctcgacgaagaagaacgctatcgcattgacagccaagcgcttaaagaaatccgcagaatggaggaactggaggaatcgttaacttccgagcctgattctgaataccgattcaacgacagccccttcttcttcaagttcgtcgataccaatcgacgaccgccacagaataatcagctcgttccggggcactatgttccccttggcatagtgaaaagatacatcggctccgaagcctataaaaagcgcggaggaaagaccttgcataaaggttctttcgcccatctgaccaatgacacgatgatcactctgatgacagaccattggatcggtaccaccaagatgggatcccggtcattgctgtcattgatttcgcaatctcgccggaaaggccggacaccagtcattgccgccaacatgctctcagccacacatcaataacaaagccatgtaaaacgcatccaaattacttccacaccatcaatcccctgttgtccgccgctgattccacgggactgcacgaggatggccgtatgcgtgggcatggcggcgggccgtgccgttcctgtgcggaggagtgcggctgtggatttgatgaaccaggtgctggagttgttcgtgaagttcgcgacgattggcggtggcttgtggctggtgtggggcgcggtgacattcggtggtggtttgaaggatcacaacgggccgcagacgcagtcgggcctgtggcagatcgtgggcggcggcatgattatcgcggcggcgcagatcttcagcgccgtggcgttgggctgagccggtttgaggcatcggggatcccggcatggaggatttcatcgttgcgatgctcaacatgatcgggggcggtggcgccggttcgatagccactggcatgctgtcgcaggggccggagacgtggaatccggcgctttaccagttggccgtgaacgtgcatgacgtggcggtcaagccgttgacctcggtggttctggcggtggtgttcaccttggagctggcgcgtaattccacgcgcatcgagtccgaccgcgagttgggcgtgaagatcgtggctggcacgttgttcaaggtctcgctggtgttcctggcggttcagaacgcgggattgttcctgcgtgcgttcgattcggccacccagttcctcatgcagggcgcttcctcgcaactgtcgttcgatgcgtccggcgccggcggccagttgggtgacctgatgcgggagcaggtcgaggatgccggcatgatggggcaggcggccttgtttttcctgctggcgattccgtggctggtctcgcagctcgcggcggtggtgttcaccgtggtgctgtacatcaggttcatcgaattgtatgcgctgaccgcgttccagtcgttgccgttcgccttgccggtgcatgaggacaccaggccggtgggcgtgggttatttcaaggcctatgcgcgcacgtcgctcaacgcggtgtgcgtgttcgtgtgtctggtgttctatcagcgcatcgtgatcgacgcggtgcgtctgcccgagggcgatgggtcggggatggtgtcgtgggtgacgggcaatttcggcaatctgctgatggcgggcattctgttgtttttcgtgatcgcggtctcccaacgcgtcagccgggcaatcgcgggcggcgagtgagcgtggcggggattctaaggaggagctatggcgttgcagatgcgcgtgtatgcggagatcgccagcgtggaggcgaaggtcatgtggggcatgggatggcggcagttggtcgcctcggcgctcatgcttgttctgggaggcggcgaggtcgccgtgttcttcctgctgctggagcagcccgatctgggctcgtacttgttgttcgtggtgtgtctgccgccggcgttgtggggctggtggcgtcccaagggcctgaagccggaacgctatctgggttacatgatccgccagcgcttcggcaggaacatccacacactggagaatctggagccggccaggtggccggcgaaaccgtcgttgagggaacgcgccctccgcaggggcgcgggaaggagcgggcgtggccgttgagagcaaggaacgcgagtatggcaggcgtatgaaaaggaaaggcggcgggtccgccaaggtcgcgcggtcgagcagggagttggtcgcctatgattcgatgctgcccggtggcgtcgcctatctggggcaggaccgttggagcgtgacgctgcgcatcagcgacatcagttatcagatcgcctcgcaggacgtgcagatggatgtggtggagcgttggggacggttcctcaactcggtgggcgagggcatgggcatccaggtcacggtgatgacccggacattggacccggaatcggcaggccaagggctggcgatgggcgtcaagggcgatggcctggatgcgttgcgagaggatttcgaccgtcatgtgcgccgcaagctgtcgggccagtcgagcggcaccgtgtgcgacaagtacctgacgctgacccttgcggagcaggacggccagcgggccgtggccacgctcaaccgagcggccttgcgggccatcgcgcaattgcgttccgtgggcggctgccgaggctccaaactcaaccgcgcggaacggctcaaggtgctgcaccgggtgctgcgccccggcgtgcgtttcacattcgacgaggatgcgttctcccggtcgcgcggcctgtgcacgaaggactgcgtggctccgtatgccatcgacacgggcgaccggcgtcgggtcaagctgtgctcgggcacgcgcgaggtgtggcatcaatgcctgatggtgcgcgatttccccgagtggctttccgaccagctggtcgcctccctgacggacatcaaggcagacatcatcgtgagcgtgcatctgcggccccatgcgaaggccgaggggttgcggctggtgaaccgcaagatcgcggagatggacatgcaggccatcgacgagagacgcaggaaccgccgccagcatctgcccgaggacctactgccgcacgatctggaggaaagcatggggcaggccagcgaattgcgccgtgacctggagcataacggcgaccggctcatggacacgctcatggtcatcgacgtagccgccgacactcccgaacggttggcgcaggtcgtgcgcgaggtggaggccacggtggacggccagtcatgcgtggccgaatccctgacctacatgcaggtcgagggattgaacgcggcgctgcccctgggcaatcccttgccgccgatgagacggaccctgaccacgtccagcgcctcgatactcgttcctttcaccagccaggagctgtgccagccgggtggtgtgttccacggcgtcaacgccaggagcggcaacccgctggtcatcgaccgcaccctgggcatgaacggtaacgggttcatcctgggcaccacgggaagcggcaagagccaggccgccaagaacgagatcacgcagacgttcctgctgcgcgagcaggacgatctgatcgtcatcaaccccgagcatgagttcacgcccctgtgcgacaggctcggcggccagcgcatcgagatcggcgaacgctcctccaatcacatcaacgcgctcgacatcgagtactcggacgattctgagggcgatcccattcggggcaaaagcgcgagcgtgctgaacatggtcgaggcgctgatcggcggcgctgacggcatcgacaaggcccagcgcagcctgatcgaccgcgcggtcacgcaactctaccgcgagcaccatgagaagcccgacaggcccgcgccgaccctggtcgatctgacggaacgcttggacgggctgggagagccggaggccgtggatgcggcacgcacgttggagatctatgccaccggcagtctggatgccttcgcgcatcccacgaacgtggacacctcgaaccggctgctggtctacgatgtgtcgggtctgggcgcggaattgaagaccttcggtctgatggtcgtgctcgatcaggtgtggaaccgcgtcgtgcgcaaccgcgccttggggcggcgcacgtggctgtgggtcgatgagttccacctgctgttctccaacccatatgcggccgagacgttcctgcgcatctacaagcgggcgcgcaaatggggcctgtcacccaccggcatcacccagaacatcgaggaactgttgaccaatccggccgcccggctcatgctcgccaacagcgacttcctgctgttgatgaaccagaatcccaccgatgccgacgccctgtgcgatctgctgaaactctcggacgagcagcgtggcttcttcaccggtgtccagcccggacagggcatggccaagtccggcaccgcgttcatccccttcgacggacgactcgacaccggcagcctgctctaccagctgtacaccaccaaattcgaggaccagcatccatgaacaagccccagcccatcggacgggcaagccaaaccgcgcagccctccggcccagcgccccgaaagctgcgggccggccgacccatcgggcttaagggcgaggacgtcccgccgttctccggcaatgccgctcctgccccgaagatcgagggtcagccgtccaagccggcgttggccagaccaagccggtccgatgggccaagccggatagcgctgcgccatctggcgagagcaacggaggagacctccgctttgctgcaagcgcaaatctcaagcgacgacaccgataaggctgatggcgaagccctcggccattctcccgcttccgttgcctcccgagtcatatcgccgcgaggcaagagccggcggcccggcaaagtccgcgtagctcgtcgtggcaacatgcgtggaggccgttccatcctgactcaaagcgcactccggaaacgcacgggccctgttctagccagagacggccgagcacggcgaacagtccgttccggcgccggttcctcgatgcgagcgacgcaatgggtcgttcggactatggcccgttccatgatggcggccaaggcggcggtcatggccacggtgtcggcggccgccggtctgccgttgctggtcgtcggcgcgatcgtcatgctcatgatcagtctgttgatgtggcttatcccgaccgtggccgtgggcggacaatccacctgccagtccagcgtcgccgaggtgcccgaacaggccaagccctgggtcgaacgggccgcccagtccagtggattgggcgctgatttcatcgccgctctcatgcgccgcgagtccgggttcaatcccgaggcgtatgccgatgacagcaacggaggcacctggggcctgttgcagctcaaccgcagcgtgtggcgtggcgtgcatcccgaaggcgcggaccagaccccgccccaaggcatcaccgatccaaacatccacgcccaatacggcggcatatatctcaagaaccggctcgaaggcgtcagacagctcaaggccagccaccccgacgcgcaattcgcccggctatccgatctggaggccttggtcatcgcgcacaacgcgggcgaaggcaacctaatgaaatatcccgacatcccgaacgtcaccaaggaatatctggacgaagtgcggcccgccatcaacgccggcggctcatgctcggccacggccggagccaccatcggcgcccttagcccgcccttggtcgtcgatggcaccagcatcgacatcgacgccagcggcgtgcccgtggcctcgatcaactcatacagcgtgggccaatgcacctggtgggccgccacccgacggcaacagatcggcaaaccggcggacccctacatgggccacggctacatgtgggcggccagcgccgagcgacacgggtaccccatcggcggcaccatccaactgggcgacgtgatgagtttcgagcgaggagtgctgggagccagcggcgaatacgggcacgtcgccatcgtcgaggaaatccacgaggacggctccatcctcatcagcgaatccggcggtggccaacgccgcgcctggacacgcctgctgacacgcgagcaagccgagaaccccggcatcacctacatccactagccgcagcccttaccgagaaaggagcggagagcatgccacgcatcaacccacggctcgatccccacgagctcgcagacctcatggccgcccccgagcactgggacttactcgaccaagttccccggcatccggccgcatggccggatctcgccacatgggccaaactcgcgctcaacgacccctcgacagccggagcaccacccgagccaccgacaggcacaccccgcaaacgaagactccgcgccatccagccgatcctatgggaggaaaaggaacccgaaacggacgaatcggataaatcgggcaattccgctgcctctgattccttggcaatcgcggaatccgagtcccctgaccagagcacagcatcttcttccgtctccgacatgtcggaggcagaagaagtattcaccggcgattcgacggcggacgaaaccgaggagccacccatcagggtgcgtcggcgcatcccgtgggcacgtatcctagccctgaccgccgtcatcatcctggccggtgtcctggcatcggtgaccatcatcgtggggcaacgtcatgtccatgcgcaggcactcgcatcatgcaatcaagcaatccaacaatcaaacaagctatacggtcaatggaacgcagccctagacgctgccaagccattgctggcattgggtgacaccgacgtgaccgatcccgaggcactggtctccctacgcaagatggccgaacatcacgtgacgaacgaaattcctcactgcgcagcggacctctccacggtacatctcgaagagagcgcccacactgcggacgcgcgcaacaagcaaacgaagacagccctcgacgaactctcgaaggcggccaccgccgtcgaacaatcgcaacaggaacgtagactcaccgatgccgagacgaagctctccgacgccatcacccaagccgaagacctctaccaacgcgccgaggccaacaccgacgttagcgctaacgagacgcgcgtatcgctcggatcccaactcgacgccgcccgcaacaccctgcacaccaccaccgacatcactaccctgaacaaagcagcaggcgacctcaatgccctcacccagcggctctccgacgccatcaaacaagcagaagaaacgccatccgcgccagccgagccttccgggacatccaaatcacagtccgcgcccatccagcggcagccatcaaccaacaccactcactcggcgccagcatctcccgtcatccctcagcccacacctcaaccgtctccctcggctccatcatgggatgtgcccggtgtcgatgcgtcctcaacttttcctgacactttatgagggaagatgacgttgatgtcatctgaaacttacacgggcacctaaaaatagggtgttttttgacgtttttcatcaattgatgtaagttttggcacgccaaaacttacatcaatcaaaatccacggcttttctgatgacggatagtggtactggagctgtgttttcgataaggtcaatatcgagcgtttgtatgagtgccctcgcgcgttctccttcatggtaggcgcaggcgggatcggatcgccggaacagttgcttgattttgactttacccttgcgccccttgggcatcggagtattgttgtccaacccgaggaatgcaagcacaccttgaaaatcgcacagcatgacatcttcaatgtcggcttggacagccaaatctgcgatggattcggcatcgctttcgattgactgccgcaatctcagccagtctccttcatggaatttggtgatgtccgaattgtaggcgtccgtgtcatagcacagaaacactgaccagccgatattgctgtattccttcacgcacgcacggtgaaaccatgttgccgaattggtcatttggctcacggagccaacgttgttaatgagaaccagaatcgacctgttctccgcgcaaatggtgtacttgttctcctgcgatttttcgtctttggtgattgtcatgcctcgctcagagcacagtttcttcaggtattcctcgtagaaaacccgctcagtggcgccttcaacgataaacgcgatgcctttctcatatgagtaatcgttcatatcaatcctcaagaagagtgccaagagcgcgcagtccatcgtcatcggacgacatcagctcgaacagatattcgccgaagccaagccccctgttgtatgcagaatcgaggacatccttagttttggacttcttcactcgtttgaacgtcgctactccgtccttactaggaacgccaaggtagattttctctggcttgagatactgaatcaggaacggggagtgacttgtcaacagcaacgaggtactgccgatgttctcgttaagaacctcaagaagctcacgcatcatgcgtgggtggatgctggtctcgatttcctcgataccgatgcagccagcagagttcgcgccggcgatgatggtattggcaacaagccatatgatgcgctttgtgcctgtggacatatgtgagatgtcgacaggttggttaagattagcgcttttaaccataagacgatacaaatcatctcgaatgtggaacggtatgttctcttccgggatgtcatctttcttcaacgcttggctcagacgctcgtggtcttcgggccgtagttcgtaggaattcaccgagatgtgctcgaactcggggaacagcgtatatatagcggattggaaaatatcataatgctcgggatcgctttgtttgagcctatacagcgctcttggcaaatccacatcattgaacatggcggttgaatcatccatcgtttcgccgaactccaacggcgtcgagtggaatcgattctccgtctcaagcgaatcgcaaattgcataggtgatatcgaagatggatcggatggcaggattgatttctatgtcttccacggcagtgaggacatcaatggcgagttgcgagtcatccaaagagatggagcggaacgaccgggtatcgtgtcccttcttgtattgtcctcgatttcgtcgtaggtagttagtccatgttccagagcgctttgcattgatttccaaagtctcgccggtgattttgcacccggagccgtcatctttgggccaagagaacgaaaagccatagcgcacaaaacgatattccccaagcgaggggtcgtcgaattcaatggaaaaacggaagtcatcgttggacagggaaggcgatagcggaatgcagttcgttgaccgcatcaagttgtttctgcgcttgttgccagactcaataaactggaaagcaaaacgaatcgcatccagaagattcgacttaccataattattcggtgagacgagagcggtaattccacctaactctatggtcgtgtacgcgaggttacggaaacctcctacgctgacgctcagcagttccatcagccctccttgcattcagacattctgacatccaatactacccggaaggccggaggcgaagccttctaaggcgattagacaggctctctacgtctatgtcctagtccgtcagtttgtggctgaggaagggtggtaggcctcgtagcaggtagatgcattggctggtgtcgaggcggccgagttcgtcgggggtgaggagttggcgggcgttcttgcggatgctgcggctccagaagccgttcatgcctttggtttcgctggtttcgatgacgtcgatggtttggtcgccgagccggtcgctgatggttttggtggtggaggcttcgttgccgccgaggaagagccagctgtcgcagttgccggcgatggtttcccagtcgtctttgtataggcttttgccttgggagacggtttgcaggatgatcgagcagctgatgccgcgcgagcggatggtggcgacgagtctcacgaagttcgggattttgccgatgttggcgaactcgtcgagcaggcagtgcacatcgcggccgagccggccaccatccgcg

SEQ ID NO: 1286 - DNA, 4491 bp, Unknown
  R157_18m  MAG No. k141_4593
ttatgtcccttgtaggagttgccttgccagttctgagaaatataagtggcataggtgccctcattcgtggcgcggttgaacgcatcggtccagcctggagcggcctccatgaccccatcctgaaggcacttttgcaggaattcaatgaactccgtggtagtgccagaagtcatgctcaagctgatgtcatcgacagaattgaccttccatgggcgcgcaccagccgaacgcagcaaatccgtaaagcaggagatatcgttattgatgaggacgcccatgtacttgctgggatcttccttgtgaagtttgacgccttcttcatagaattcctgccaagtggttggcaccttgagattatgctcgtcgagaatgtccttacgcacatacatggccaaaggagtggcgtcagtcggcacgccccacaggccaccagcataatgcacctggctccaagcggtctttgcataaagcttgctccacgccttttcgatatcatcgttggcgaaattcagcagagctccagaaatagcgtactgttcgaatcggtcagcactcatctgcacgacatccggaacatctttattggcagcaacgacattctggaacttggtgaaatggtcgcttgccgcgccggtgttggtgaatttaattttgatgtgcgggtacttcttctggaaagcttcaatcggtcctgccatctgcttcccggagaatccccatacgttcagctcgatttttttggaagtatcggtgagagcgttgttaatgtcttctacagtgactgcagttttagtgtccttggcaccagtacttgagccacaagccgcaacgctggctaccatagtaagcgccgccagcgcactgacgattttggtcatcttcttcatgattactcctttgtgtgtcatgaattactgtcttattgttgttcttcaaatggatgtggatgccgcacggtcattagagcaacgaatgggtgatcgccaataaccgtgcggcgaggattcactgcttgactgcaccagccgaaaggccagactgccagtacttctgcaggaacatgaatgcgatgatcaacggggcaactgcaatgaggcagccggtgacaatgtagttgttcggaatctgaccgtccgcggtgccttcggcacccatcttcaaccacatgttcaaaccgaccgtcatcgggtagtcgttggtgtccgagagcatgatcagcggcaggaagtagttgttccagacaccgaccagcgtgaacagcagtacggtgacgaatcctggagacaatagcgggaaggcaaccttccagaagatggtccaagaatttgcgccatcgagcttagccgcttcaaggagagaagtaggcaccgatgtctgcgcataaataatcatcaggtacaggccgaacggcgtggccagctgtggaataatcactgcccatggggtaccaaccagaccaatcttcgagtacatgaggaacagcgggacagagatgaccgtggccggaatggacatgaatgccaaggtgatcgccaacagactattacgtccggggaaccgcattgtggcaatggcgtagcctgcaagtgtggcgatgatagtggcaccaaatccggcgacaactgcatacatcaccgtgttaagcaaccaccgtgcgtatgtaccatgctgatatgcaagagtttcctgaacattctgccagaacacattcttgtcatcgaaccacagaccaaaggagctaaacatgccctcgttggtctttgtcgcagagaagaacacccacagcaacggcacgagacagtagatgaccatcaggcccatgataatgtgcagcagccagttaagcacacgctgcttgccggtcagctttggagctgcctcacgctgctgcatacgcttatagcgttggctcgccttgagcgccagcttggcgtctctgcgctgcagcgacttggaacgtggttttgcgattgcttcactcatcacttgttctcccacttattgccaatgaccttcacgactgcgacaagacccataacgatgacaccaatcaccaaggagaccgctgcagcatagttgaggttctggccgttgaacgcaaggttatatgcgtagagattcggcgtgtagttactggtgatcacattcggcgcggaattcatcaagatgctcggttcgttgaacaactgaagcgtgccgatcaccgagaagagcacggtcatcataatggatcccttaatctgcggaatctttaccgaccatgcgatacgcagctcggatgcgccatcgatacgagcggattcgtacagctcgttcggaataccgatcagtgcagaataataaatcagcatgttgtagccaagagaacaccaagtgcagatgtttgcgatggcgaacagcatgagcttttcagaaagcatgttcggcgcagtggccccgatcatagacgcaatctggccgacaaggccatacttgtcgccgtagatatatccccacatcagtgctgcgatgacgcctgggacggcataaggcaggaacagcaggattcgcggcactgcgatatggcggattctctgggaatccagaatgagcgccgccacaagggaaaggatcaaattgagaggaatctgaatcgccgcataaatcagcactcttctgaaaccgctccacagcgcttcatccttaaatgcagctatgaagttgtcgaagcctgcgaatgtggtgccgccaagaagggactgcttgaagaagctgagataaagcgcgtagaacatcgggatgatcatgccgaacaggaagaccaccacgtatggaagacaatacaatatgcctatgtactcgcgcttcggcttgcgcatcccggaagtatccggtttcgccgttgcatttgtcatagtttttctctttcttcttaacccgtctgaatgagcctgccaacaacatcgttgccattgccgtttcatccatcggtacgttcaatatacaaggttctgcgaaaaagagcaaataaaacttcgttgcgcgtggcgaaattttctttatcttgtttttccaccttaaaaagggctttattgcaacgatatatgcatatcatgcccatcaagaaaacagcgggcaatcgatattcgcgacacccatttccgctatataggtagcaacacgccgataaaaaaatctattctaaagtaacgaaaatttcgctattctataggtaacgtttttgcagcgtcgcgtacgaaaagagaagggtcatgaccacgatcaaaacaacaaacagaccgaaggtctccgatatcgcccaagcggcgggagtatcccccgccaccgtgtccaaggtcatcaacggccgtgatggagtctccgacgagacccgcgatagggtggaactgctcctcgaagaagccgggttccgcaaaaaacttcccacaaccaaaaccatgcggtcaatcgaactggttgtcaacgaaatgaccaacaacggatccgtggagatggtcaaggagacaacttcatacgccagagattttggcatcggcatcaccgtaagctgcgccggaccagatttcaaagaatacgcaacgagaaacgagaccagcaactgtctccgtagcgccatcgaacgcaacccactaggcgtcatacttctcttatcaaatatctcatcggccgaggaatcgctactgcaaacaaggaacatcccatatgtaattgtcgatccggtcggacaggtctccgctgacgcattgggggtaggcattgataactggaccggaggaatgcttgccacgcaatatctcatatcattggggcaccgacgaatcgccgtcatcaccggccctaccaattcacaatcctcgcaagcgcgacttagcggatacatggcggcgctgcagaaaaacggcatcagcgcggatccgcatctcatcaaggttggcgactacgtgtccgacaaagcatacaaggcggcatgcgatctcctggaaatgagggagcaggaccgaccgaccgccatcttcgcgttcaacgatctcggcgcgatcaacgtctatcgcgccgcccgacagcacagcatcagtctgcccgaacagttatcgatcatcggtttcgacgatgtctatcctgcggcaagcatgtgtccatccctgacgaccatcagacagcccttcgacctcatcgccagacaatgcatcgatttgattctcgaagcgcgggagggaaaggtggaacagaattacttcattcttcccacgcagctcgtcgaacgcgaaagctgcgtatcgccgccactgctgtaacatgcagcggcactcagaatcagcttccacgaagcacccatgcatatgcaatccgtctctgtcacaagcatttacttctgtttaccagatgaaaatacaaaagaagcgacgaaaccggcgagactccgcaccagagggatgcttacaatgaagccacaacggaacaaacggctccacacgaagcatgaaccaacaa

SEQ ID NO: 1287 - DNA, 56752 bp, Unknown
  R157_18m  MAG No. k141_4738
cccagcgtcggcggccaaggcacgtcgaacggcgactatggcaacgcctatgccgccggccagtgcacgtactgggcgtatgaacgtcgcaggcagatgggcatcggcacgccgtcctatctgggcaatggcggcttctggtggcgcagcgcccccgcgtacggcctgcgcgtggaccacacgccgcaggtcggcgccgcactctccttcctgcccggccaggatggcgccgacggcacctacggccatgtcgccgtggtggaggccgtatacggcgacggcaccttccagatctccgagatgaactggggtggtccgtggaacatgcactaccgcaccttgaccaatttgggtcagtactggttcgtccactgaccggttggttcggccgatatatgcggttgaagggttcctcttgaagaggaacccttttcgtattcgaggccggtccgtgatatcgtcggatgttgcgttgctacccacgagttgctacccacgagttgctactcacgagttattgcccacgaaaggaggagacatgcccaaggaaaccggtgagaaactcatcgtccagaacaagaaggcccggcatgactatgccatcgaagacaagtacgaggcagggctggccctgaccggcaccgaggtcaagtcgttgcgcgaaggccgcgcatcgctgtccgaggcgttcatctccatcgaccgccgtggcgagatgtggctggagggcgcgaacatccccgaatacctgaacggcacatggaacaaccatgcgcccaagcgcaagcgcaagctgctgctgcaccgactgcagatcaccaagctcgcccgcggcatcgaagccaagggatacacgattgtgccgctgagcctgtacttcaaggacggtcgcgtcaaggcggagatcgcactggcccgaggcaagaaggaattcgacaaacgccaggccctgcgcgaagagcaggacaagcgcgaagccctacgcgccatgcgctacgccaacatgcgccactagtcccgcctcttggctcccctccggaggggagccaagggtaggatgtccgcgttgtgggtcatttcgcccacgattaacgcttccgtagcattgcactcctacgctctggaaccatctgggaaacatacccgcccagctgactatccggagagaggaaatccaatgtctctaagcaagggaatacaatccgctgcggccgccgccctgagcgcggccatgctgatcgccgtggcggcctgtggcacgactgacggtaccgacaccgcatccaagagcggcgattcatccaaggactcgtccagcacttcgattcaaggcttcgacaccagcagcatccagaaggacgacgagattgccgcactgctgcccgattccgtggccggcgacggcacgctgaccgtcggcgccgatacttcctatgccccggccgagttcctggccgaggacggcaagaccccggtcggctttgatgtcgacctgtccaaggcgctggccgcagtgttcggactgaaggaaaacaccgtctcctccacgttcgattcgattatcccgtccgtcggctccaagtacgacatcggcatctcctccttcaccgtgaccaaggaacgcatggaggctgtggacttcgtgacctacttcaaggccggttccacgttcgtggtgcagaagggcaacccgaacaaggtcgactcctcgaacctgtgcggcgtgaaggtggctgtgcagaccggtaccacccaggaagaggaagtcaacaaggataacgagcagtgcaaggcggacggtaaggatgccatcgacatccagtcctccaagctgcagaccgatgtgactaccgccgtggcttccggtaaggctgatatcttctacgccgatacgccggttgccggctacgccatcaagcagaccggtgatacgctcgaggccctcggcgaggacgttggtgtgacccctgaggccgtggccgtcaagaagggcgattccaagaccgccgaggccgtacagaaggccatccagaagctgatggatgatggcacgtacaagaagatcctcgacacgtggggcgtctcttccggcgccgtcgacaaggccgagatcaacccgtccgtcgagtagtttcggttactatgaagactcccgttgccctgcggcgggagtctttttgtatatgtatgcactgtagtgtataaatatgcttaaccgttgatcgttgccgttgaagcggcgtaagagagaagaagaaacgattatgcagtccaccaaactgaagtccattatggccattgcactgagctcggccatgctgttcgccaccgccgcttgcggcacctccgacaaggccgatgccggtacggattccaccaagggctccgatgccgccaccatcaccagctacgatgtcagctccgtggagaaggatgacaccatcgccgcactgctgcctgaatccgtgaccaaggacggcaagctcaccatcggcaccaacccctcctacgccccggccgaattcctcgacgccgacggcaagacccagatcggctacgacatggatctcgcccgcgccatgggcaacatcttcggtctcgagaccgaaatcgtctcctccaacttcgatacgatcattccggccatcggctccaagtacgatctgggcatcgccgccttcaccatcaccaaggagcgcatggaatccgtcgacttcgtctcctacttcaccgcaggcatgggctatgcagtggccacaggcaaccccaagaacgtcgatgagaacgacctgtgcggtctgaacgttgccgtcgagaccggcaccgtcgaggaagaggccatcaacaagaccgccaagcagtgcaaggcggacggcaagaaagacatcaccatccagtcctccaagcagcagaccgacgccaccaccgctgtggtgaccggcaaggccgacgtcttcttcgccgattccccggttgtcggctacgccatcgcccagaccgatggtcagctggaacagctcggcaaggacttcgatgaagtgccgaacgccatcgccatcaagaagggcgattcccagaccgccgaagccgtgcagaaggccatgcaaaagctcatggacgacggcacctacactaagattctccagcactggggcgtcgaatccggcgcactggacaaggccgaaatcaacccggccgtcgaatagtcgacaagctgtcgcgaaaattcgaatggggcgcactgtttgtaacacagtcgccccattcgtgcactaaggttcaacgctagttgcaacttgcagttcaggctgcctaacacatccaaggaaccagattatggcgaagaaagaagtcgacggtgagggactgaacatccccaaccgcatcaaggcgttgccggtcaagcgccccggcccgattgtggccgcagtgatcgtggtactgctcgccgcgatgctcattcaaggcttgattaccaatccgcgactggattggcccaccgtctggaagtacctgttcgacgagaacgtgcttgaaggcattcgctataccttggagcttaccgtgatctccatggtcgtggcgatcatcctgtcggtgattctcgccatcatgcgcaaatccatcaatccggtgctgcgcggcgtcagctggttcttcatctggttcttccgcggcacgcctgtgtacacgcagctcattttctggggtctgttcgccgtgctgattcccaagatcagcctcggcattccgttcacctcggtggagttctggagcatcgactccaacgtggtggtcaccgcattcaacgccgcatggattggtctggccctgaacgaggccgcctacctgtccgaaatcgtgcgtgccggccttgaagccgtggaccccggccagaccgaggcggccaaggcgctgggcatgaaccgcacgctcatcatgcgccgcatcgtgctgccgcaggccatgcgcatcatcatcccgcccaccggcaacgagaccatcggcatgctgaagaccacctcgctggtcaccgccgtgccgttcaccctcgagttgcagtttgccaccaacgccatcgccaaccgtatctacaagccgattccgctgcttctcgtggcctgcttctggtacctgctgatcacctccattctgatggttgtgcagtcccgccttgaggcgcacttcggcaagggcttcgatgcccgaccggtgggcaccaagggcaagcagacgccattgccgggtaagaccgacggtgaaccgaaggatgacgtggacaagctcaaccagaccacatttgtcggattgaatgcataaggcgggagcgcgattatgactacgaatgacatcaccagtgttgccccggtcgtgcgcaaggcggctgacggttccgtgattcctgccgtcgaggccgtgcaggtgcacaaggcgtttgggccgctgcatgtgctcaagggcatcgatctaaccgttatgcccggtactgtgaccgtgattctggggccctccggttccggcaagtccacgttcctgcgtctgatcaaccagctggaaaccctgaccggcggttccatcgaggtggacggcgaactcatcggctacaagcacgtgaccaaaaacggccaggacatgctgcagaccctggacgataaggagatcgccgcacagcgctctcgcctcggcatggtgttccagcgcttcaacctgttcccacacatgaccgcgctggagaacgtgatggaagccccgatccacgtgcagcaccagtccaagaaagccgcccgtgacctggccgtggccgagcttcagcgcgtcggtctgggcgatcgcatggactattacccctcccagctgtcgggtggtcagcagcagcgcgtggccattgcccgtgctctggccatgaagccggagatcatgctcttcgatgagccgacctccgcccttgaccccgaactggtgggcgaagtgctcaacgtcatgcgttccttggccaaggaaggcatgaccatggtgtgcgtgacccacgaaatcggcttcgcccgcgaagtcgccgaccagatcgtgttcatggacggcggcgtagtcgtagaaaagggcggccccgacatcatcgaccaccccaccgagcctaggtttaaggacttcctacagcatgtgctgtaggaaggctgttatattgcctcagcactgtcgtgcttcggcgtcgcctacggggagcccactgggctccccgctttacggctccgcctacagcacgtgctgtaggaaggctcgttgttgcagctccaaaagcgtacgctgatgaactcagcgtacgcttttcacgaaggggcatgttccaatcctgcaaaggcggcgggttggattcgctttgcgcaataatcgtccgctaggctggtgagccatgtgtggaatcgttggatacgcgggaaatattgaaacggcatgcggcaagcctttggaggtctgcctgcaaggcctggaacgtctggaataccgaggctatgactcggccggtgtggcgctgaccgcgcccggcatggataaggtggtcgtgcgcaagaaggccggccgtttgaagaacctggtcgaagacatcgagcgcaagccgatgccgctcgccacggtgggcatcggccacacgcgctgggccaccaatggcgagccgagtgacgtgaatgcccacccgcacaccagtatggacggcaaggtggccatcatccataacggcatcatcgaaaacgcctctcagctgcgtttcgacctgcaagccgaaggctaccgattcgcctccgccaccgacactgaggtggccgctaagctgctcggcaagatcgtggacaagattatcgcggacgaaggcaagccagacttgttcaaggctgtgcgccgtatggcccgcatgcttgaaggcgcgttcaccattctggccaccgactgccgccagccggacatcgtggtcggagcccgccatgattcgccactggtcgtgggccttggcgagggggagaacttcctcggttccgacgtcgccgcattcgtggcctacaccaagcgcgccatggaagtcgaccaggatcaggccgtatgcgtgtccgccgacaaggtcatcgtcgccgatttcaacggcaacgtggtcgaaaacccgaagacctacaccgtggattgggatgcttcggccgccgaaaagggcggctgggattcctttatggacaaggagatccacgaagaccctgccgcagtgcagcgcaccctgcttggccgcttcgacacgaatggcgacatcacccttgatgaagtgcgtatcgacgaacacgacttcaaggccatcgacaaaatcatcgtcgtggcctgtggcaccgccagctacgccggccaggtagccaaatacgccatcgaacactgggtgcgtatccccgtggaaatcgaactcgcgcacgaattccgttaccgtgacccgattctgaccccgcgtacgctcgtggtggccatttctcagtccggcgaaaccatggatacgctgatggccctgcgccacgcgcgcgaacaggggtccaaggtgctggccatctgcaacacgcagggtgcctccattccgcgcgaatccgacgccgtgctctacacacacgccggcccggaagttgccgtggcatccaccaaggcgttcgtggcgcagattaccgccgcctacctgctgggcctgtatctggcgcaggtcaagggcgcgatgttccgcgatgagattcatcagatgctcgactccctgaaagacatgccgcgcaagatccagtgggtgctcgacacccagcccaagaccatccaggcggccgccgagcgcatggtgaacgccaactccttcttgttcctcggccgccacgtgggctacccggtggcgcttgagggcgcgttgaagctcaaggaaatcgcctacacgttcaccgagggcttcgcggccggcgagctcaagcatggaccgatcgcgctggtggacgagggtgagcccgtggtgttcatcgtgccgccgcagcgcggccgcaatgtgttgcacgccaaggtgatctctggtatcgaggaggtcaaggctcgtggcgcgtacatcatcgccgtggccgagcagggcgacccggatgtggaacggtacgctgacgtggtgttctggcgccccgcctgcccaacgctgatgagcccgctggttgacgtggtgccgctgcagctgttcgccatggacatggcaaagctcaagggctacgacgtcgacaagccccgcaacctcgccaagtccgtgaccgttgagtaagccacatcggtatgtgattgacgagcctcatattccgtttgagatggacgtgctgtatgaggacgagcggatcatcgtggtggacaagccgcattttctggccaccatgccacgcggcatgtggtatcggcagaccgcgctgatccgattgcgtgagcggctgggggagccggacatcacgccagcgcaccgattggaccgcatgaccgccggcgtattggtgttcgtgcgggattcggcctgccgcggcgcgtatcagatgctgttccagaaccggcaggccgtcaagatctatgaatgcctggcaccctgccggccgatcagcggcccgcgattcggcacgatcatgcaggtcgaaccgccacgcccgttcccattgctgcgccgatcgcacatcaccaaggaacacggcacgatggccgcattcgaggaaccgggtttggccaacgccgaaaccctcatcgagcgcggcgacctctgtttccctcccgctggcgggaggtggcgcgaagcgccggagggtggtccccatccgggaaatcaccccatctgccgctacacactccacccgcgcaccggcaaaacccaccaattgcgcgtccacatgaattcgctcggcctgcccatcgtgggcgacgacttctacccgcgcatccagacacgcccctacgacgatttcagccagccgctgcaattagtggcgcgtgtgctacgattcaccgatccaataacaggcgagaagcgcgaattcgtttcccgtgtgccgcttaggatctgatttcttaggggggggatggcgagaccaatccccacccgtccgaatcactgtccctttcgactggccatccagctcattgcatcgtcgtacaccatcatgatgcgcttgcgatagctatcgatgaattcctgcgcaccaatgctcgcgataacgtcgtgagcgggttgcacggtgctgtcgaatgcctccggcagcctatccaccaaggtgtggaatcgtaaaatcacggattcctcatctaatcccatccgctgtgcgaatcgttccagatgtttgcggcgtaattgaagaagatctcggcgtccgccgatgttcatcgccaaagtggcatttatgatctgcttgccatgccccaaataagggaacaccgaagcaaggtcatagagcggggcaagccgcacggacgcgccatcgagcaatagcgagtagttcttggcgtggctgtctgttgccccgacgagataactggcgaggatgccgtcggtgaaggctcggatattgctttcggcctgaccgggcagaccgtgcttgcgcaacatttccgcatatgcattggacgttgggccgttgtgttcctcgtatttcagcgatgagggaatgcccagcgcttgggtaaagtcttcttggtgcagggccgtcaccgtaccattggcggacactatacggtcataccgctcgctgatgatggctgggaccccatcaaagatgtgaaaagaggtgtgggccacgggtattcccatcgcctccacaatgcgcatggtgatgtgttcgttgaatgcttggtgtggaagggtcggtatgccgggcttgatgatatgagtcgtccgcgcgattccagtggtggagaaccatgatccattgcggttcctcagtgcgatcttgccctgctgtcccgcgaccgaccaatgctcgtctacgcttgcggactggatgcctgtgggggcggctgcgcgtagtcgattcgcgatctgcgaatcgctgattggaataagcgaatcgtcatctatgggcaagtgcgggtcggcggacagccgtaatgcgccggtggcatcgaatccgatggcttgcaacagatcaaatgcgcttgtcgatcgggcatgatgcaatcgcatggcttcatctcgggcctgaggggattccgggaccagggcctcaaggaaattacgcgggatgtcgcctgaatattcggctgcggtaatgggcatggaaagcgatattggtgtgggtgattgcgaccaacgataggaatcgtgatattggaaaataatgctgccatcgtttgttcttcgaaactggccgatgggtgtttcgccgagaaatgcattgagagtgttttcgctcatggtgtcaccattcatagagttcggcgggctgcggggttttgcggacatccagcgacaagccaagctcagtcagagcgctgagaatggtggagaatccgggattggggactcgggcgtgttcaaattcgatcagccagcgacgtgacacgcccagccgttgggccatgtcggtctgactgatgccctggcgttgcctttcatccttgataagccgcgcgtattcggcgatatccatgacaatcatgtgcaaaatatatcacagtatagtaaagtgtgcaatattctgcacatagttggaaatgtgcagaatattgcacaaccgagtcgattggtcggtgcggaattgcctatggatcactggcaggtggatcactggcaggtgaatcactgacaggtaccagtggatgccagcacatgccgctcgtcagctgatgtcgcgcacggaaccgcgttcgatcagttccggcgggattacggttttgacgccgaccggtatcttctcgccttcgcattgacggcggaccatggagaaggcggtggcgccaatgtcgtcaaagcgcagcttcatggtcgtcaggttcaagcgcggaaccatatctgccagcgaatcatcgacgcccacgatgctgacatcctcgggcacgcgcttgcccgctgactgcaacccgagcattgcgccgtatgccatttggtcgttggcggcgtagatggccgtgcagtcggggtcgtgggccaacgccacgccggcctggtagcctgaatccgcgcaccaatcgccgatgtacatgctcggtacgcgtgctcccatttgttccagcgcttctcgccaaccgcgggcgcggctttcggcggcgcgcgaggtggacggtccggcaatgtggtagacggtcttgtgccccttgctcatcaggtaatcgacgatagcggtcgagcagccatactggtcggcgtcaacggtggggcagtggtcggcggcggattcgcagatgagcacgactggaagttctcgcggaggcttgtatccgacgaaatcggagatgcgttcctccagcactacgatgacaccatccaccggctgacgctgcatgcgatcgatggcggcggaaagcgtgcgttccgcaccgtggcgcatggtctggatggtgactgaataatcgtcatcggccgcgttggccacaatagaatcaaggatgcgggcgttgccgaacgcggtggtgttgaacatcaccacgccgatatcctggaagcggccgtgctttagggctcgggccgcataattcggacgatacccaaggcgtttcattgcagcttcgacacgctggcgtgtttcgggtttcaccgcatcgctgccattcgccacgcgggacactgtctgtggcgaaacgccggcggctttcgctatgtcttgcatggacacctgtgttggcctcgacatttcaccctcgcttgactcattaatgtcggtgtttcgtttacaacgcttatcttagggacgcttacggtaacgataacatcgttgtcttcgtgaccattgtagcagagtgactgagaaacccttaattcaacacggtactcaacacgattggacaatgttgcaaatggtgttatgatgataacgcaaacattttggtcaaccttcgaaggagaggggttgggaatggcttcagccgatatcgcagctgcgcccgtgcattcgggcaaggctcgtgtgaataagcacaaggccgattggcgtggatggaaattcatgtggccttttgcggtggtgttcgtgttcgtgttcatcgtgccgatcgtgtacgccgtttatatttcgttcttcaagaagcagatgatcggcggcaccaagttcgtcggcttcgagaactacgcgcgcctgttgggtgatggccagttctggagcagtgttggtcgtgtggccctgttcacgtgcgtgcaggtgccgatcatgctgtgcctgtcggctttgatggccctggcgttggattcgatgaagctgcatggcacgaggttcttccgtatctcgacgttcctgccctacgcggtgccggcggtggtgtcgacgttgatctggggtttcgtgtatggcgcgaagtacggcctggtgggttcgttgaacgatttcctgggcacggacatcgacgtgctcgcccccagcgtgttgttggccagtatcgggaacatcgtgacgacggcgttgttcacgatcgtggcgacgtggaacaactacttcctgccgttgatcatgctcaaggacgcggactggtacccgcgctgaccatcggcctgaaccagtggaaggaccaggcctcgaccgcgggcggccaggcgatccagaacctggtgatcacgggctccctgatcacgatcatccccctggtgatcgcgttcctgtgcctgcagaagtactggcagtccggactcgccgcaggcgccgtcaaggagtgatggagtcggctccgccgacgcggtgtcttcaccgcctcgcggcggggtccctccctccgtcccggctccgccgagacaaccttcctcatcagagggaggtaatagtgccaagcccccctctgacgagctgagccgttaggcaaacagccctgtgggctgtttattcccgcggacgcagattatcgataaaattcaataaaggagctgaatcatcatggaacgtaaagagttcaagtggccgcagccgcttgcgggcaacaagccccgcatctggtacggcggcgattacaaccccgaccaatggcctgaggaagtgtgggacgaagatgtagccctcatgcagcaggccggcgtcaacctcgtctccgtagccatcttctcctgggccaagcttgagcccgaagaaggcgtgtacgacttcgattggctcgaccgcgtcatcgacaagcttggtaaggccggcatcgccgtcgatctcgcctccggcaccgcatccccgccgatgtggatgacccaggcccacccggagatcctctgggtcgactaccgcggcgacgtctgccagcccggtgcccgccagcactggcgcgccaccagcccggtcttccttgactacgcgctcagcttgtgccgcaagatggccgagcactacaaggacaacccctatgtggtctcttggcatgtgagcaacgagtacggctgccacaaccgcttcgactattccgaagacgccgagcgcgccttccagaagtggtgcgagaagaagtacggcaccatcgacgccgtcaacgacgcttggggcaccgcattctgggcgcagcgcatgaacaatttttccgagatcatcccgccgcgcttcatcggcgacggcaacttcatgaacccgggcaagctgcttgactggaagcgcttcagctccgacgccctgctcgacttttacaaggccgagcgcgacgccctgctcgagatcgcccccaagccgcagaccaccaacttcatggtctccgccggcggtgccggcatcgattacgacaagtggggttacgacgtggacttcgtgtccaacgatcactacttcacgcctggcgaagctcacttcgacgagctggcttactcggcctccctatgtgacggcatcgcccgcaagaatccgtggttcctcatggagcactccagctccgccgtcaattggcgcccgatcaactatcgcgtcgagcccggcgaattggtgcgcgactccctggcccacttggccatgggctccgacgccatctgctacttccagtggcgccagtccaaggccggtgccgagaagtggcactcttcgatggttcctcacgcgggccccgactcccagatcttccgcgatgtgtgcgagctgggtgccgacctcaacaagcttgctgacgagggcctgctgagcaccaagctggtcaagtccaaggtcgccgtcgtcttcgattacgagtcccagtgggctacggaacacaccgccacgcctactcaggaggtacgccattggaccgagccgctcgcgtggttccgcgcgctggcggacaacggtctgaccgcagacgtggtgccggttcgcggcccttgggacgagtacgaagccgtcgtgctgccgagcctgaccatcctgtccgaagagaccacgcgccgcgtgcgcgagtatgtggcgaacggcggcaagctgttcgtgacctactacaccggtctggtggacgacaaggatcacgtctggctgggtggctaccccggttccatccgtgacgtggtgggtgtgcgcgttgaggaattcgccccgatgggcaacgacttccccggtgccatggaccaccttgacttggacaacggaaccgtggcgcacgatttcgccgacgtgatcacctccgtggccgataccgctcacgtggtcgcctccttcaaggcggataagtggaccggtttcgacggcgctcccgccatcaccgtcaacgacttcggcgacggcaaggccgcatacgtcggtgcccgtctcggccgtgagggtttggccaagagcctgcccgtgctgctggaggaactcggcatcgagacttcggctgaggacgatcgcggtgaagtgctgcgcgtcgagcgtgcggacgaaactggcgagaaccacttcgtgttcctgttcaaccgcacccacgatgttgcggtcgtggacgtggaaggcgaaccgctggtcgcctcgctggcccaggtcaacgagtccgagcacacggccgccatccagcccaacggcgtactcgtcgtcaagctgtaaaaccgcgcatagcgcctaattatccaacggctcccttgctgctcatcgtagcaggggagtcgttttcgtatctccagcaaagtcgggtagggtggtcaccgtgcgaggcaaaaacagagtgacgatggcggacgtggcccatgaggccggtgtttcggtagcctcggtgtctaattttctgaacaaacagccatatatgagcgaggcgatggccgcgcgtattgcggaagccatcgaccggctcggatacaaagtcaactcgtcggccagaaacctgcgttccgggcgcacctggttgctcaagctggtcattcccgatctgcggcaggtgtatttctccgaactcgccgaggatattctggccgaggcccggcaacatggctatggcgtcatcgtggaatccaccaccaacaatcgtgcccgcaagctggaaagcatcgcatcgatgggcacgcacagcgcggatgggctcatcttaagccctctgatgatgacggttgacgatatcgcagctttggagggcgattacccgctcgtactgttgggtgaacgtttgttcggcgtcaacgcgccgcacgtggtgattcgcaatcgcgaaggggccgccggcgcgaccccgttcgatacacaaagccccgtgacgaatcccgtcacggggcttttaccgttttaagccccgcctagtacactcgtcaccatgcgagtgatcggacagcgaatcaaaagaatggcaaccatagcagtgactgccatcctttccgtatccctggcctcgtgcgggcaggccacggacgacaaccgtacggagatcagcgtatggagctgggaaccgagcatgggggaggtcatccgccgtttcgaaaaagccaatccggacatccgcgtgaaatggaccaatatctccggctacggcaatcttaataccgccattcaagacggttacggcacgccggacgtggctcaaatcgaatactatgcactgttgcagtacgcggtctccggccaattgcttgatctgaccgacaaaatcggctcggattattccaacttctttaccctcggcacatggtcgtccgtgcagctcgccggccgtacctatggactgcccatggattcgggcccgatgggcttcttctacaacgaagacgtgttccgccaagccggcgtggacgccaccaagatcaagacttgggatgactattacgaggccgccgaaaagctcaaggagatcggcgcgtatatcgccgccgactcgggcgacggcagtttctatgacgcgatggtctggctcgccggtggtcagccgttccacacgtcggccgacggcaaaaccgtgaccatcgatttggatgaggatgccggcacccaacggttcaccgaattctggcagaaaatgatcgatgaggggcttgttgacactacctccgccacatggtcggatcggtggaaaagcagagtgggcaccggcaccatcgcctccgtgttctctggggcttggatgccgtcgttgctgctgtccaatgtgccgggcgcggccggtctgtggcgcgtggctcccatgcccacctatggtgggcagcctgccaacgccgaaaatggcggctcggcgctgaccgtgttgcaactgacccgtaagccggatgcggcctatcgtttcgtggactttgtggcgcatgacgcccaaggcattagcgcgcgtgtagacggcggtgccttcccggccgattacgccaccctgaattccgctgattttctggataaaaccacgattaccaatgaccgtggcattgaaatcccgtatttcggcgggcagaagttcaaccgggtactgtcggaggccgccgaggatgtgtcggtcggataccagtatctgccattcgaagtgtatgcgcgcagtgacttcaaatcgacggtgggccaggcatacgagtggtccggcagtttccacgcctatcagcagcgacaggaagccattgagatgggcatgaaggacgaggaaggcaacccgctcgaaccattggagaagcccggcaagaaagtcagtctctccgacggcctggcccaatggcagaaagacctccgagaatacggcctcaatcagggctttacgattaagtagggttttgagtaggtttttcggggagggacggaatcgactgcgctatgcgcggccgattcctgcacaccgcgttacttcacattgcgcgagtagatgtatgccatgcctttgaagatcaggtctgaatcgtagacgtcgatcatgtcggtgtcgttcttgaaaatgcggctgagccctcccgtggctaccacttggaacggctcatcgatttccttgcggaactgctgaatcgtgcgctcaatgccaccgaggaacgtgtaatacagtccggcctgcatagcagtgcgcgtattggtggccagaatcgactgcggttgcgtgatctccacttccggcagctgggcggtctgcccccacaacgcctcggccccggtgcggatgcccgtggtgatgaagccggagcgaatcgtgccggaaccgtccacatagttgaacgtggtggcggtgccgaagtcggccaccagcaccgggccgccataggtgtggtaggcgccggcgcagtcggcgatgcagtcagagcccaaggttttggggtcgtcgagacgaatgttcatgccggtcttgacgccagggcccaccaccatcggttccaatccgaggaatttgatcagcgaggcgcggaaggaatacatcaccttcggcaccaccgagcagacgatcacatcgtccacatcgtcggccgtgtaatcgctcaaagccaggaactgcgtgatcatcagaccgtattcgtctgaggtgtgcgtcgccttggtggtgatgcggtaggagccgacgatgcggtcgccctccagaaaaccgatcacgatattcgtattgccgatatcgaccgccatcagcatgggtcaggcctccttgttctcgtcatcgacattgctcgcgccgccggaacgcaacgctgcgagccgcagcaacagtcgttgcgcaagcacggttttgtccatcttgtcccaatgctcgatcttcggggtgccggcatcctccgctccggacgtgagcacggtgacaacgttggtgtcggtgccgaacccggcaccggcgtcgcgcagattgttggccaccagcatgtcgcaatgcttggacgtcagcttcttctccgcattacgaatcagatgctcggtctccatcgcgaatccgcacaggatctgcgagccgtcgtcgcgcttgcgttcgccggcccacgccagaatatccgggttggaaaccagctccacggtgatgctgctgcggccggccttcttgattttctccggcgcaatctcggccacgcggaaatcgcccacggcggcggccataatcgtgatatccgccgccgggaaggcgtcggccaccgcatcgaacatatcctgcgcggtcgtgacgcgcaccacatccaccgcatcgggcgcggtcaaggcgactggaccggagaccaacgttacgtcggcaccaaattcggctgcggccgaggcaatcgcataccccatcttgccggtggaatggttcgtcagatagcggaccgggtctagcggctcctgcgttggcccggcagtgaccagcacgcgcagccccttgagcggggaagatgagggagcctggtcatcctgcgcatccgccagcagccgagcggccacttcctcgatgcgcgccggctcttccatacggcctcgtcccacgtcgccgcaagccagattgccttcctccggctccacaatctgccagcccaattcggcgcaggttttcagattgcgctgcgtggccggattgttgtacatatgcacgttcatcgccgggcataggatcttcggcccctcataggccagaatggtggacgtcagcgtatcgttcgccaatccacaggcgatgcgggcgatgacgtcggcgctcgccggggccaccaccagcagattggcccaggccgcatcggccacatgattgatggtcgttggcacggtcggattggccgtcacgtcgccgtgcgcggccggataagcggggaacatcgtggtacgggtgggctgatgggtcagtgaggtgaatgtcaggggagtgacgaaaccttcggccgctgtggtttcgataacccgcacctcgtggccggccttggtccaatcggatgccagatgacaggccttgaatgcggcgatgctgccggtgacgcccagaagaatatgtgccatagctgcctcccggccttatgccaaggccgcacgtgtgcccacgccagcgcttcccgcgtcgttgcccgacgatgcgccgcgtgttgtggtcgccgcggaccctccgtcggcgccgcaatccagtatagccattgcctccggcgtgtccggggatatagtagaacgtggtgatcgacccgaatgggcggtcaaccacgcaagataacaacgaaaccatattcgggcgtaagcatgcccgaatgcatcagggagtatccatgtcccagaacaatggtgtgcacggcgagtccggcgcaaccgaagacaggaacatcgacggcgcgaatcaagctgccagcaccgacgcgagcctgaacgcgcgcgcgaaatcatcaaacaggaacaacggcggcccgaaatggtggctgtggacgctgatcgcggtcgtcgtggccgcggcgctcatcgtgggcgtcaccgtcttcggcgggaaaggcaagggcaaggacgcgaacgcctccgtctcggccagccgatccgacaccgtggccgtcggcctcaaactcgccccggtcaatcttgacatccgccaccagtcaggttcggcccttgagcagatcctcatcggcaacgtgtacgagggtctcgtctcgcgcggctcggacaacaaggtccaccccggtctggccaagagctgggagatctccaaggatggcctgacctacacgttccacctcaacgagaagatgaacttctccaacggcgacaagctcgacgccgaggatgtggcgtggtccatcaacgagctcaaggcccagaagtactacgactacgagcaggtcaagagcctggacaaggccgaggccgtggacgccaacacggtcaggctcaccctctccgcgcccaactcgaacatgctgtggtacctcaccagccgtcccggcctggtctacgacaaggacgccacctgggatcagaagaacggcgcgttgggctcgggtccgtacaccgtggtctccttcgacccgaacgacaagatcgcgctcaaggcgaaccccaagtattggggcaccgagcacaaggcgaggaccgagaacgtgatcgtccggttcctgccggacgagaacgccagcatcaacgccctcaagagcggcgacgtgcaggtgctttcgcccatctccgccacccttgccgatccgttccgcaaggatccgaactatgtggtcaagtccggtgacggttccgacaagttcgtgctcgccttcaacatggccaacgacaagctctccgacaagcgcgtccgccaggccatccgatacgccatcgaccataagcagatcatcgcctcgcgcggcggcgtggacgcccccctcggcggtccgatccccaaggtcgatcccggttacgaggatctgagcggcctgtacccgcatgacgtggccaaggccaagaagctcatggagcaggccggatactccgagtcgaagccgctggacctgaccctcacctacgccaacgtgtacggcaccgagctcggcgaccagctcaagagccagctcaagcccatcggcatcgacctgaagatcaactacgtggagttctccacttggctgcaggacgtgcacgccaacggcaactacgatctttcgctcgtggaccatgccgaaagccacgacttctacggatggaccacgccgagctactacttccactacgacaacaaggacgtgcaggccctgtacgccaaggcgctggaggccacctccgatgacgaggcctcgaagtatctggccaaggccgcgaagatcgtctccgaggacgcgccggccgactggctgttcagctggaaggtcaccatcgcctacgccaagggcgtggacggcttcccgcagaacctgagccagaccgtgctgcccctctggcggatcacctacaccaagtagtcccggaacccatcggtcgggcgcggcgcgggagtgattccgtggcgcgcccgaccgtggacggcccatccggccggtgacgccacgggcggtggcgagggaatcgataagggaggcgttatgcggttcttgatgcaacgcttgctgctgttcgcggcggcgctgttcggcatttcggtgctggtgttcgcgatgctgcgcatcctgccgggcgacgtggcggtcgtgatggccggcatgaacgcatcgccggcgcgtgtggcggccctgcgcgccgaattcggccttgaccggccgtatgtcgtgcagtatctcgactgggccggagggctgctgcacggtgacctcggcgtgtcggcgctgaccgggcgggcggtgacctcccaggtcggccaacgtgcgacgatcacgttcccgctgatcgtgatgagtctggccatcgcgctcaccctcggcttgtccatgggcgccgccgccgtgatctcccggtcgccggccgtgcgcggtttcctgcgcgtgctgtccatcgtgggcggcgccgtgccggccctgtggagcggcctgctgctcatcctcctgttcgcacggggcgtgggccttgtcggtctgctgccctcgcaggggttccccgccgctgggtggggcgctcccgggcgggcggtctcgtccctgatcctgccggcgcttgccaccggattcgtgtccggtgcgggcatcatgcgttacacgcgctccattctggaaggcatcgccgatgagggaggtccgattgatatggccatgtcctgcggcatgacccgcacccaggcgttggtgcgcgtgggattgcggttggcggctccgcaactcgtctcggtggtgggactggcgttcgcctcgatgatcaccggcgtgatggtggtggagaacctgttcgccctgcccggtctgggcgccctgttggtgggcgatgtcggcaaccgcgatctggtggccgtgcaaagcgagttgttcctgctcgccgcgttcttcctgctgatcggcctggcggtggatctgctgcacgcgctgcttgacccgcgtctggccgccggaaaggaggaatgatggttgatcgcaatggtcgatggcgtcgttcgggcgtggttctgggcaccatctggtcccgtggcaccggccgctactcgctgatcgtgctggggttgtggatggtcgtcgccctggtgtcgttgttctggaccccgcagtcgctgctggccaccgacggctaccacgtgtgggacaagccgtcgtccgcgcattggctgggcaccgacggcaccggcgcggacgtgctgagctggctgatggccggatcgcgtacgaaccttgccatcgccctgctgaccgttgtctgctcggctgccatcggcatcctactggtcgggctgatggtcgcccgttcttcggcgctcgcttcggcgtcggtcgccgtggtcgacgcgctgatctccatccccaccgtgctcatcgccctgctgctcgccgtgccgttcggcgcatccgcggccgtggtgatcggcgcgtgctccatcggctacgggctgcatctggcgcgcgtcgcccgtccggccgccctgctcgccgcccgctcgggatacgtgcagtcggcccgggcgaacggtgccagcgggttcggcgtactggtcagacacatcgtgccgaacatcacgccggtgctgatggtgcaatcgtcgatgtcggcgggcacctcggtgctggccgaggcgggcctgacctatctgggcgtgggcgtcggcgcgggggtgccgagctggggccattcgctggccacctcggtcaaactcatcaacgtgtttccgttgacggtggtgtggcccggtctgatcgtcaccctggtggtggtcgcgctgaacctgttcggcgacgcgttgcgcgacgccaccgacccggtggctaatcccgcgttgcggcagatgactgtgcccggtgcggttgtgccggtggctaggggagccggtgacactgcggcgcagtccgcagtggcagcgccgaaggagacggatgatgagcgttgaaattcacgggctgaatattgctatcggcggcaaaccgattgtcacggatgtcgatctgtccatcgcggacggcgaacgggtcggcctgatcggttcctccggctccggcaaatcgatgatcgccaagtcattgctcggcctgttgccgcgcgaggccgtgctgtccggcaccatcacgatgggagaaaccgccatcctgtccggagaaaccgccgagtcgcggcatgggcaggaagatgactcaggatctgacgaagaacgcggcgcggcagataggcaccatgttgccggtgaacgcagggttgccacctcgggccacgattccgctgcgtacgccgacgagcatacgcttgccgatctgcgcggccggtatgtgggtacggtattccagaatccggcccatgcgctgaacccggtgatgaccgtggcgcagcagattgcgttgccgttgagactgcactacgatctgaccaaggccgaacgtgctgagcgagtgaataccatgctggacaaggtcggactggaccgtgacgtggccggcacatacccgcacgaactgtccggcggccaacagcagcgcgtgggcatcgccacggcgctgatcacctcaccgcgattcatcatcgcggacgaacccaccaccgcgctcgactccatcacgcaacgtcagatcgtggacctgctgacctcgttggtggacgacgccggcgcatccatgctgttcatcacccatgatttctccgtactcgcgcgtgccaccacccgctgctacgtgctggacgccggccgcatcgtcgaatccggacccaccgccgacctgcttgctgcaccgaccacgccgcaagcccaacgcttggtcgccgccgcccaaaccctcaccctccacacccccaaggaggattcgcatgagtaacagcagtgtgccactcctctccgcccactccatcaccaaatccttcggaccgcgcaccgcacgccaccaagtcctcttcgacgtctccgccgacgtccacgccggcgaatgtctggccgtgatcggcggctccggatccggcaaatccacgctgacccgcattatgctgggcttggaatccgcggactccggcagcgtggaatacgagagccaatccattgtcggcggccgaaaatcgccgggattcgcgaccctgcgccgcgaatcgggactggtgttccaggacccgttctcatcactcgacccgcgttggcaagtcgccaaatcggtggctgaaccgctgagtctgcagcgacgtgatctgaacaacaccgatatcgacgagcgggtggtcgcggctctgaccatggcgggtcttgaaccggcggacttcctgaaccggtacccaatcgacctgtctggtggccaggcgcagcgtgtggtcatcgcccgcgccatcatcaacgagcccaaggtaatcctcgccgacgaaccaatgagcgccatcgacgtggccgcgcgcatccagatcctcgacaccttcgccgctatccgtgaggcccggccgagcaccgccatcatcatggtctcccacgatctcggcgtggtgcagcacatcgccaaccgcatcctcgtgcttcacgacgggcgcgtcgaagagacgggtcccaccgccgaagtgctcggcaacccccaatccgattacacccgtcagctcatcgaggcagcctcgttatagatctttttggctcccctccctgaggggagctgtcgaatgcagtgaggctgaggggagttacgggtgccgtcgtactcccctcagtccgccggcgacacgcgcttgtcgcgggttgtgctatggtgtgaggcatgcagattatctcatgttgttgtcgctaaccgacgcccctgggcgagcggtcagtgacgcataacttgagatggagcattcgaatcgcggcgaatctgccgcatacttttcatgtatccgatggcacaagcgtaatcgtgtaatgcgcgagccgtggttaacatgaaaaaccggttcacttttcggattcaccgtacagtgagcgggaatactcgattttcaaaccaaagccacagtccattcgtctgggaacgtcggttcacgaacgcaacgcagcaaaacccccacaaccccagcaacgaaggacttcacatgaccatccacaacagcctcgcagaactcatcggcaacaccccgctcgtcaagctcaaccacatcccgcaggcggccggcgtcaaagccaccatcgccgtcaaagtcgaatacttcaaccccggcggctcctccaaggaccgcatcgccgagcgcatcatcgacgccgccgaacagtccggccagctgaagcccggcggcgtgatcgtcgagcccacctcgggcaacaccggcgtcggcctggccctggtcgcccagcagcgcggctaccgcacgattttcaccctgccggacaaggtttccgaatccaagcgcgcggtgctgcgcgcctacggtgccgaagtcatcgtcacaccgaccgacgccggcccggacgacccgcgctcctactaccaggtcgccgaacgactggccaacacgattcccggcggcttccgcccgaaccagtacgacaacccgaacggcccgctgagccactactacaccaccggccccgagatctgggaggctacggaccacaaggtcacgcacttcgtggccggcattggcaccggcggcaccatctccggcaccggcaagtacctcaaggaagcctccaacggcgcggtcaaggtcatcggctccgacccggaaggctccatctactccgcttcctcacgcgacgaagtccaccagtacgacatcgagggcgtgggggaggacttctaccccaaggctttcgaccggaacatcaccgacgacatcgtgcgcgtatccgacgccgaagcctttgaaatgacccgccgtctggccggcgaggaggcattgctggtcggcggctcgtccggcatggccgtggccagcgccatcaagtacgcgcttgccaatgatttggacgagaaccagattgtggtggtgctcgcccctgattccggccgcagttatctggagaagatcttcaatgacgactggatgcgtgccaacggctacggcgacatcgtggaacgcaccagcaagccctccctcgccgagcagtaccttaacggaactccctctgatgagggagctgcggatggactccataactagctatcaaaagaatcaataccaacatccgcactaactaaccgcacctgttttaccttcgaatacggaacaatcccgaaaggaacccaatatcatgtccgctgaatacaacgccaagttcgccaacaccgacatcgccactcgcgccatccacgccggccagaagcccgacccgaccaccggtgcggtcgtcacgccgatcttcgccacctccactttcaagcaggatggcgtgttgggcctcaggggaggccacgactactctcgctccatcaaccccactcgcaccagcttcgacgagcagctcgccgccgtggaaggcggcaagtacgcgctgagcttctcctcgggcttggccgccatcgacgtgctgctgcgctccaccatcaagcccggcgacaacatcctgctcggcaacgatgtgtacggtggcacctaccgcctgctctccaaggtgttcgtgccgtggggtgtgggcctcgacgtggtggacatcaccgatctgaaagccgtggaaaccgcattggcctccaagcactaccagtatgtgtgggtcgagaccccgtccaacccgctgctcaacatcaccgacatcgcggccaccgccgaagttgcccacaagtacggcaccaaggtcgcggtcgacaacaccttcgcctcgcccgcccttcagcacccgctggccgatggcgccgatgtggtggtctactccaccaccaagtacatcggcggccactccgacgtggtcggcggtgccgtggtggtcaacgacgaggagacccgtgagaaggtcgccttcctgcagaacgccgccggcgcagtgccctccccgttcgactcctggctggacatccgcggcctgaagaccctggatctgcgcgtcaagcgccacagtgccaacgccctgaaggtggccgaatggctcgaatcccagccctctgatgtgattgagcgcgtctggtacccgggcctcgagtcccacccgggtcatgaaatcgccgcccgccagatgcacggcggcttcggcggcatcgtctccgtgcagctcgcggccggtgccgaggcggccaagcacttcgtggaccacacgcagatcttcacactggccgaatcgctcggcggtgtggaaagcctcatcgaggtgcccgccgccatgacccacgcctccgtggccggcaccaccctgcaggtgcccgccaatctggtgcgtatttcggtcggtatcgagaacgccgacgaccttatcgccgatctcaagcaggcgttggatcgtatctgaccgtactgacggtactggtgacaccgtattgacggtgccaccacgcttatcggcggactcgctatcgattggtacctacaaaaaatccccggcccacaagggtcggggattttccgttatcgattaaacatggattgaatcagctggcgttgccgccctgccatccggtggcatccgcaccagccgggcgcaacgcctgaccggaagtcggtgtggtgccatcaacgaccacacgagtgccgatggtggcgaagtcgtacatccacttggcgtcggccacctgcatgttgatgcagccgtgcgagcctgggataccctgctgcacatagatggggtgctcgccccacatgtatgcaggaacaccgtgcagggcctcgccgccgttatagtaggaaatccacggcgtgcctggctggttgtagccttcgccaaccatggtctgcgattcgtacttgagatacacgtagaacgtgccggtatcggacagcatggaaccatcggcggtgggcttgccagaagcgatgttgaacttcttgaccaccgtggtgccctgatatgcagtggcagtctggttcgtcagatcaacatgaacccacttatcgccatttgccgtatcgaagttatgaggcacctcgacctgcttgacatcatatgggctgtctttcacagccacagtggaatcagtggactggttctgctcgatggcggtagccagacgttcgggggcgtccccggcaccagtcacttcaataccatccacaccgagtgtcttatcggcaccaatttccacgccgccttcgtctttcggcgtgatgtagacctcgcgtgtcaccttgggaacagtcagttccttggttacgctgtcactggtgacgtacttggtgatggcatcgcggtcgactaccaggctcatggtgccacccgccttattcaccgtgggcttgaggaatgaggcaatggtatcggccgggatggtgacgctcttgttcacgccgttgtccacggtcagtttgaggccaagcttggcattggcgtcaaactgtgtttgctgtgcgctcgcgtcatcaatcggattctttgcagtctgtagcttgaccggcaccgtcgcattttcgcccggggtcgcgacggcctccttgactgcagcattgacaacattgatatccggacccttgccatcctgacctgcggtgtaatcgaactgcttggtgctcttgttgtagacaacggtggcaatctgcgctcggtcgacctcatcgaccaggccggcggtgacgaattgttcggcagtctctttgtccctggtggcggtcagagcgatatgcggctgatcgaaaatattgagcttggccacgtcgccggtcttcgcgttcaacagcgcatctacggttttatccgtgtcgacggtgacgccaaggtccttcagcgaggctttgacgctgttgccttcggcggtgaacgtcactgtggtgttattcagctgctgcttcacagtattcgcaagttcttcgcgggtctggcccatgacagagacattgcccaaatgaacaccgggcgcagccttgtcttggaagtaccaacgtccgacgaagaaataggctattaatgcggcaagcaacactgcaaatatggttatgatggcaatccgtgcggccttgccatgtgatttagcggtggtagatgccataacatgttcacccacataggctgtattgtcggcatggttattggtgccattgtcgctttgctgtggcgtggcggtacctgtggccgcggctgcgaacagcccatcggcggccacaggctgcagcaccgccgtctcctgatcgtcaggcgaggagaaggaaaatgtatcgttggccataaaatgccccgtcttagttctctcaaagcggcatatcgtgtgatatgccgggaataacgtttcttgacgcataataatacggaagggctacgtacatcgttacgaggtattccgttatacgatgaaatccatccgcggtcggcctacactggtcgtttatgacagcacatcaggcggcgctggaggcgctcacacgatacttcggctatgactcgtttaggcccggacagcaaggaattgtcgaggctttgcttgccggacacgatgtcttgggcgtgatgcccaccggcgcaggcaagtccgtgtgctaccagattcccgccgcgctcagcccgggtgtgactctggtcgtatctcccttgatttccctgatgcgcgaccaggtcgatgcgctgaacgacctcggtctgccggccgcgttcatcaacaccactcaaactcccgacgagcaggcgatggtgttcgcccaagccgccgccgggcagatcaaactgctgtacgtggccccggaacgcttggaaaccgggcgattccgcgactttgccgcccgtacgccgatctcgctgatcgccgtggacgaagcccactgcgtctcccagtggggtcaggacttccgctcgtcgtacttaggtatcggcgatttcatcgccgggctgccgcagcgtccaccggtgggtgcgttcaccgccaccgccaccgaacgggtgcgccgggacatcgtgggactgctgggattgcggaatccggccgtcaccgttaccggattcgaccggccgaacctgtattttgatgtggtcaaactggagaccaaatacagggccgcatgggtggcgcggtatgtggccgaccatccggacgaatccggcatcgtctactgcgccacccgcaagaccaccgaagcgctcgccgacacgctgaaccagatggggcatccggccgtcgcctaccatggcggcatgtcgccggacgcgcgtgaggtggcccagcgcgacttcatcaccgacaaggtgccggtggtcgtggccaccaacgccttcggcatgggcatcgataagtccaacgtgcgttacgtcatccaccacaatctacccgaatccattgaagcctactatcaggaggccggccgcgcgggccgtgacggcgagcccagccgatgcacgctgctgtggaatgagtcagacatcgtcacccggcgtcggttgctggataacgattatgagaacgagcgattgactcccgaagagcaggagatcgttcgccagtccaagcgccggctgctggacggtatggtcggctactgccgcaccaccgactgcctgcaccggtatatgacccggtatttcggtcaggaattgtcgccgaatgctggttccgcggcgggtgaagacattgcggcggactcttcgcagtccggcagatgcggtgcctgctcgaactgcgaaagcacgttcgagaccatcgacgtgacccgcgtggcgcaggcgatcagccgttgcgtgcatgacgtggggcagcgcgtcggttccggcaagatcgtcaagatcctgcgcggttcgcgggcacaggatctggcatggctgaacccggagcggatgcccaccttcggcatgctcaaggacgtgaacgaggctcgcgtgcgcgacgtgttgagccagatggccacggacgggtacctgtcaatcgccgaagggcgtatgccaatcgtcatgttcggtgcgcgggcggccgaaaccgccgctcccgacttccactatgagatcaaacgggtggaacgcaagtcggcggcggccggttccggtcggagcgggggagtggctgatactgccgattccgccaatgttcccggcgatgcgctgggctcgtatatcccggacgatgacgaggaatcgctgttccagaagctacgcgaactgcgacgcaccatcgcccaggaaatcggcaagccgccgtacatcgtgttctccgacaagaccttgcgcgacatggcccgcatcaagccggttaccaacgcgcaatttctggcggtcaacggcgtcggtcaacacaagctcgacctctacggccagcgcttcatgcaaaccatcgcctcgttcaatgccgggagtgcgtcataacaatctcctatagcgaaccgcggagtatttgcgggcgttcttgggctggcgcgactacgatgactgttcgatacttcatgaccgaacactcagcaagtagaaaggcaacagcatggcagaagacaaggccgaaaagcccgtcgtcgaatcattccagcttgatcacaccaaggtcaaggcgccgtacgtgcgttacatcgacaccgaaacgggccctcacggcgacgtgatctccaattacgatctgcgcctgacccagccgaacgagcaggccatccccaccggcggcctgcacaccatcgaacacaccatcgccgtgctgctgcgtgaacgcattcccggctacatcgactgctcgccgttcggctgccgcaccggcttccacctgctgacctggggcacccactccaccgaggatgtggccaaggcgttgaaggaatcgttggagttcatcgcatacaaggccacatgggatgacgtgcccgccaccaccgagaagagctgcggcaactatcgcgaccacagcctgttcgccgccaaggaatgggccaagcagatccttgaggaaggcatcagctccgacccgttcgagcgcaaggtcgtctgattcgtctgattcgattcaattctgattcggctcccgctggcgggagccgggggcgaagccgactgagggtggctgtcctcaactcggctggactgtccggctcctgcggacggaagccattgtttattagtgtccgtcatgcaacgcggaggggatttcttgtgcctacggcatggtaggttggccgtcagttaatcgccggtcaccgtgccggcaacccggcatgtcggagaggtgagaagtgactcagtcgaacgctgcaaacaaggcgacaggccgccgtttccgccacgccaccatgcgcgatctgccgcagatgcataaaatctacgcacgcgcacgcgcgttgatggccgccaacggcaaccccacccagtggggcaacgaatttccgcgtgaatcggtgattgaagacgacatcgccaaccagcgtacgatgctgctggtcgacacctgcaatggccacgaacgcattctggcccagttcgccctgtgcccgggcaaggatccgacctacgccaaaatcgacggcgcctggctggacaacgacacctatgtgaccatccaccgcatcgccgcatccggtctggtgcgccacgcggcccgcgactgcatcaggtgggccctgaagcactacggcaacgtgcgcgccgacacccaccccaataacaaggccatgcagcacgtgctcgaaagctccggcttcgcccgttgcggcctgatccagctgctcgaccggccggtcgacaccaccagaatcgcctatcagcgccacgagtggtgagtgtggctgtcgccagcgtgttcggttccgcggtggagcaggtcaggtaaggtccacgtcgtcgcgcacgtacggtccgtcggccgcccgttcaaactcgtgcatatcgcaaaaaccgtacgctgaaagtaactcagcgtacggttttcacgaaagcagccatcgactatcggtcagccgatagacctcagtcctcagtcgcagcgaccttggtgtcagccccggccttctgctcaaggccgagcttggagcgcttgcggctgtagccgaagtacacgatcaggcccagaccgaaccagatggcgaaacgcacccaggtctcccagttgagaccggcgatgagcacgaagcagaatacgatggccagaatcggggtgaccggcacgcccggcgcgcggaagccgcggggcgcattcggctgggtcttgcgcatccatagaataccggccgacacgatgatgaacgcggacagcgtaccgatgttcaccagctcgaacagcacgttgatgttgatgaagccgccggcgaacgcggtcagcagaccgaagaaccaggtgcccttgaacggggtgcggtacttctcgtgcacgtggccgaagaacttcgggaacaggccgtcacggctcatggcgtagcagatacgggactggccgtacagctgtacgagcatcaccgtggtcatgccgatgagggcgcctaggttcacaatcaccgcgagccagttcatgccggtctccagaatcacgccggccactggggcgtcgatgtacttggcgaactccttgtagggcaccacgccggtcatgatcatggtcatgacgatgtagagcacggtggaaacggccagggacagcaggatgccgcgcggcagtgtcttgttcgggttgatggtctcctcggcggaagaggacacggcgtcgaatccgatgaagctgaagaacacgatggatgcggccggcacaatgccgtacggctgggtggagccgggctggaaagtgtagatgccgtacggggagaacggctgccagttggacggcttgacataccacacggcgcacacgatgaacagcacgatgatggcgagcttgatgagcaccatcacgtcattggtgcgcttggtctggttgatgccgatcgagagcacccacgtgatgatcagcacgatgacgaaaccgggcaggttgaagtaggtggtgacgtccgggttggtgccgtaggcggcggtcagctcgaccggcagatgcagtccgaagccttccaacaacttgttgaagtatcccgaccagccggcggacacggtggccgcctgcagagcatactccagaatcagatcccagccgatcacgaaggcgatgagctcgccgaacgccagataggcataggagtaggccgagccggacaccggtgccatggcggcgaactcggcgtagcacaggccggcgaaaccgcagcagacggcggccagcaggaacgatacggacagggccgggccggcggtgagcgcgcccttgccggtgagcacgaagataccggtgccgatgatcgcgccgataccgagcatcgtcagatcgaaggtgcgcatcgtgcgcttcaggggagtggattcggcgacaagctgatccacgcttttcttacgaaacagatccatgttcttctctcatgaaacttaagatatggggctagaccggacggatttccgggatcccggcacgcctcaacgccgggaatcaaaggcggcttccgagaaaccgcatatcggtcattagtgtacgactgccgggcgaaaacaaacgattgtgaccacacgtcacattcctgcgcaacaataggtgcctatgagcatgaacgcagcacccgaaatcgcattctcgtccgagcagggcaaggccaactatgcggccgcccgccgccaataccccgcacaggccatcgtgaacctcaaaaccatgcgcgacaacatggcccacctggtctccgtggtcggcggcccgaactccggcacggcggtgatgggcgtggtcaaggccgacgcatacggccacggactgctgcccgccgcactggccgcgctcgccggcggcgcgacatggctcggcaccgcgcaatcgcatgaagcactgctgctgcgcaaactcggcatcggccccgaccgttgccgcattctgacttgggtctacaacggcaccgaagtgccattcgatgagctgatcgctgccgatatcgacgtatcggtcggctccctgcccggcatcgatgccgtggccgccgccgcacgcaagctcggcaagcccgcccgcgtacacgtcaaggtcgattccggcttcggtcgcaacggtttcacgccggccggattcgacgccgcgctcgccaaactcgtgccgctcgccaaagagggcgtgttgcatattgtgggtcagtggagccatctcgccgtggccgattcgcccgatgtgcccgaattcgtcgcctccaccgaccagcagatcgcaacgttcaaggacttcacgcgccgcatggaacaggccggcattccgccggagatccgtcacctggccaacacggcggccactttggaccgcccggagattcacttcgaacttacccgccccggcatcggcctgtacggctacgagcccgatcccgcgatgggcaccccgcgcgactggcatctgaccccggccatgcgcctgcaggcgcagctcggcacggtcaaggatgtggaggccggccatggcatctcttatggccgcacctacctgaccccggacaacacctcgaccgctattgtgccgctgggctacgccgatggcatccaccgctccgcttccggtttcgatatggaaggtgccaagcacgtggagaagccgggcggcccggtgcgcatcatgaccactgaaggtccgaagctctaccgcgtgtgcggccgcgtgtgcatggaccagttcatcgtggacctgcacggatccgccgccgaactcggcgttcacgagggcgacacggtcgaactgttcggcccgggccgcggcgaggattacgttgagcctaccgccgacgattgggcccgcgccgccgacaccatcagctacgagatcttcacctgcctgcgcaaccgcatcccgcgcctttacgagcatgccgccgaagtactgcccgccgccgacctcgccaagctcgaccccgccacgctgctataaggtgcattaccgccatacggtggcaccccgtaatcccttcttcccgaatatgtaccactgacatgtgctgagcgtcacatattcgggaaatcggccccaatctcccgaatatgtgccgttgagttgacgtcagtggcacatattcgggaagtcgggattactgcggccgatatgtgtgcctatgcttggaatatggaaatgacgttggatggggaacaggtgctgagcgatgagggctacaacgccttcgacgaggagcgatgggcacccgagccgcccaaatccaagtcgcgcacggctttcgaacgcgatcgcgcgcgactgattcattcgtccgctttgcggcgtttgggcgcgaaaagccagattctgattgccggtaccgacgatttcgcccgcacccgactgacgcatacgctggaagtcgcccagatcggtcgccaaatcggcgcattgctcggctgcgatccggacgtggtcgactgcgcctgtctggcccacgaccttggtcacccgccgttcgggcacaacggggagcgtgcgctcgccgacatcgccagcaatatcggcggcttcgagggcaacgcacagaccatgcgtatcctgacccggctcgaacccaagatctttcacccggacgggcgttcggccggtgtgaacctgacccgtgcggccttggatgcggccgtcaaatacccgtggaccttggccgaagccgaccaacaccccaagggggagcggtcgaagaagttctgcgtctacccggatgacgaaccggtgttccgctggctcaaaatcggcgctccccaggccaccaagcccatggaatgccagatcatggacctttcggatgatgtcgcctactccgtgcatgatgtcgaggattccatcgccaccggcgcgttcgatccgattgtgctcgccgatccgaagatgctggaccacatcatcgagcagacgcgcgcatggtatggggcgaagtgggatgccgacaagctgctggccgcgttcatgcgattgcgccgagagcatttgttccctgcacatttcaatggttcgcgcgaatcgttggcacagctcaagaacatcacatccgatttgatcggtcgcttctgctggtcggtggaaaccgccacgcgcgacacgtatgggcccgggccgttgacccggtattccgcgaacatcgtgattcccgaggacacgaattacgagatcgtggcgttgaagggcatcgccgtgtacttcgtcatggcgcctcgcgagcgcgagccattccatcaggaggagctcaagatcgtatcggatttggtcgatgtgcttatggccgattcgccgctcccatccgacgctttggaaagccagttcctggccgattggaatgaatccaccaatgacaacgagcgcctgcgcgtcgccatcgatcaggtcgcaagcctgaccgacaactccgctctggccctgcactccatcttgtgctgagggcgtgttggacgggtgcttccctcagtctcgctgcgcgagccagctcccctcgggtgaggggagctgtcgctgtaggcgactgaagggagtttcgcggaagaaatgataaccgacggtaaaaatttaccgtgtctcaggtgaggcggtactctagagacttatggtcggaatgattaagaaagaggatgtcgagaaggtgcgcgccgccgcggacctgtatgacattgtatctgcgaccgtaacgcttaagccctccggcaccggcaccttcgtgggcctgtgcccgttccacgacgagaaaaccggcagcttcaacgtgcgcccctcacttggcgtgtggcactgcttcggctgcggcttgggtggcgacgtattcaaatacgtcgaacaatccgaaaacatcgacttccgcgaagccgtggaactgctcgccgacaagtaccatatcgagctgcactacgagaacagcggcaacggcccgaaccgcgagaacaccggctccaagcgcacccgactgctggaagcctgcgaggaagcccaacgcttcttcgtctcccagatcctgaccaaggaagcactgcccgcccgcaagctgctcggaggccgcaacttctcccaagccgactgcgaacgtttcggttgcggctacgcgccccaaggttgggataatcttgtgcgccacttggcctccaaggggtttacgcagaaggaaatcctcgacgcgggcttggcccgccaaggccagcgcggcatctatgactatttccgcggccgcgtgacgtggcctatccgcgattcgaccggccgcacgctcggcttcggcgcgcgcaaactatacgaagacgatcagatcgccgccaaatacatcaacacgccggacacgcagctctaccgcaaaacccaggtgctttacggcatcgatttggcgaaatccgccatcgtcaagaagcgacaggtggtgatcgtcgaaggctatacggacgtgatggccatgcacttggccggcattgacaccgccatcgccacgtgcggtacggcgttcggcgccgagcacgccaagattgtgcgccgcctgatcgccgacgattcgctgggcgcggtccagctggtcgggccgttgaaggtcaaggaccagccgttgagctcgcgcatcgtgttcacgttcgatggtgacgccgccggccagaaagccgcgctgcatgccttcggccttgattcggccttcctctcccaaaccttcgtggccgtggccgacgacaatctcgacccgtgcgacctgcgcatcgagcgaggcaacgaagcagtgcgctcgctgatcgcccgcgccaaaccgttgtatgacttcgtgatcgacgccgccatcagccggttcgacctgacctacacgcccggccaagtgggtgcgatgaaagccgtggccccgctggtggcgcagattcgcgaccgctccctatgggacgcttacgcgcgcaagtccgcgggccgtatcggcgtggatcttgaggtgatgcgccgcgaggtgatgaacgcgcgccggcagatgcatgtacgcgatgaggacgcctacgcgcccaaacgtcgattcgagcgtgacgagccgcgtgtggaacccggcaccaacccatacgccaatccggccacgcgcaaggcgttggagcgccgtgacgccgccgaacaggcatatttcaagatcgacgacgccgtattcatcgccgaacagcagttcatggccgtgctgattcaggtgccgcgcgccatcgaccgcaccatgttcgggcagctgaccatcgaccatttcatgacttcggtgttccgcaccctgttccaggcgatcgcggccgccggcgggctgccatccgacgataccccgcaggggctgtggatgcacaacctcaccaaggccggcgggccgatgctgaatcaggtgatcaacgagctggccgtcatgccgttgccactgcctggcgacgacaccggtagcggtgcgcagccggtgcaggccaacgtgtcgggaggaggtgttggcgtgaatggcggtgccgccgcagtacagctgcgtcctgccacgccggaggagcagcgctacgccactgagcttctcacccgattgttggacatgggcttcatgcgccagatcggtttggccaaacgccgcatggcccagctgcccgacggcgaagagaagataaccctcctcggccagatcacccgcatggaaaccgcccgtaaagacctccaagcccaaatctacggcaacaccgtcggctaatacctcccactgattgcgcgcatcttcgaatacgtgccggatgcataaggccatacaaccggttgccggattggatgggtgcagaagttgcggattggccccatccaaattggactggtttgggtggggccaatccaatccgttcaataatgaagcgcgataccaagcagcgtcgaacgaagggaaactcatgacgcagaatcgtgcggaactcaaccgtaatctggcccagatgctcaagggtggcgtgatcatggacgtcaccacgcccgaacaggcgaaaatcgcgcaggatgccggcgcgtgcgcggtgatggcgctggagcgcatccccgctgacattcgtgccgccggcggcgtctcccgtatgagcgatccggccatgatcaagggcattcaggaagctgtctcgattccggtcatggccaaggtgcgcatcggccacatcgccgaggcccgcattctgcaggccatcgacatcgactacatcgacgaatccgaagtgctttccccggccgacgacgtgtaccacatcgacaagaaccagttcgacgtgccgttcgtgtgcggcgcgaagaacctgggcgaggcgctgcgccgcatcgccgagggtgctgccatgattcgtaccaagggcgagcccggcaccggcgacgtgattcaggccgtgcgccacatgcgcaccatgaacaagcagatccgcgagctcgtggccttgcgcgacgacgaggtctacgaggccgccaagcagctggccgtgccctacgacctggccaagtacgtgcacgacaacggccgtctgcccgtcgtgaacttcgccgccggtggcgtggccaccccggccgacgccgccctgatgatggagctcggtgccgaaggcgtgttcgtgggctccggcatcttcaagtccggcgacccggccaagcgcgccgccgccatcgtcaaggccaccgccaactggcaggacgccgatctgctcgccaagctgtccgaaaacctcggcgaagccatggtcggcatcaacgaggacgagattcagaccatcatggccgctcgcggcgagtgagtgcattaccttggctcccctctttgaggggagccaagaaagggtgacgctcccgccagcgggagtcaaggcccaaggagacaacatggttgtagctgttgaatatatttccaaagaagagtccgcggacgtcgaaaacgtcaagcacggcgtgaccggcatcctggccgtacaaggcgcattcgccgaacatgcggcggtgctggacaagctcggtgcgccgtggaaactgctgcgcgcggccgaggatttcgatgaatccatcgaccgcgtgattctgcctggcggcgaatccactacacagggcaagctcctgcattcgaccggactgttcgagccgatcgccgcccacatcaaggcaggcaaaccggtattcggcacttgcgccggcatgattctgctggctaaaaagctcgacaatgacgacaacgtctactttggcgcgctcgacgccgtcgtacgccgcaacgcctatggtcgtcagctcggtagtttccaggccaccgccgattttggtgcagcggatgatccgcagcgtatcacggacttcccactggtatttatccgcggaccgtacgtggtgtcggtcggccctgaggccacggtcgaaaccgaagtcgatggccacgtggtgggcttgcgtcaaggcaatatcctggccaccgccttccacccggaactcacggacgatacccgcatccacgagctcttcctgtcgctgtagtcgattcgtctgccgctagactggtatccgactgacgaatcaaggagacgatctgccatgcagcttgagctgaatcgacgcagcaaggtgccgatgtaccggcagctggccgccgggctgcgtgaacagatcgtctccggcgcgatggccgagggctaccgcctgcctcccgaacgcgagctgtcctcgcgtctcgaagtcaatcgcaccacggtgttgcaggcgtatcagcagctcaaggacgaaggtcttatcgcctccaaagtcggcaaaggcacgttcgtgctgccggctgcctccgcaagccgaacaccgcacacgtcaaacagtgacttcgggaatgcaataacgcgaacaacacgatcgtcggcagaaatgggaacatcgcaagcctcctcttccggcgacgtagaacgtgctacctccactggtttcttgacgacggaccagggcagcagctctgcggcggtccatacgattcgtgaaagccgctcggttcagggcccggagccaaccgtcgtgcgtccgccatggtcggtgttgttctctgattattccaaccggtttacctaccatgacatcgcctcggccgagcgggcgcagcgcggcgacaccattattgacttcgccaccggttcgccgaacccggcggatatcccggacgatctgctgcgcaaggtgagcatcgaggcgttcgaatcgcgggaattcgacggccaaccggaatcacctatcgagggattcgaagagttgcgtgcgctgcttgccgaacatatgcgcgcacgaggcgtacaatgcggcgtccgcaacgtgatggtgctctccggctccgagcagggcatcgacctcatcgtgcgcgcgttcatcaaccccggcgactgcgtgctggtcgaacaatccacgttcttcccggcattgcagaccttccgctcggcggatgcgcgcatcatcggcgttccagtggacgagcacggtatgcgtacagacctgttggacggctattgcgcgcgattccggcccaagctcatttacaccgtcccgacgttccaaaaccccaccggtaccacgctgccgcccgaacgacgcagcgaactcatcgacgtggcgcggcgctatcagtgtctgatcgtggaagacgatgcttacggcgatttgtggtacggcgggggatcatccgacgcacatcgccccataccgcttaagggcatggagaatgcgggatacgtgatgtatttgtcgacgttctcgaaaaccgtcacttcgggcctgcgcacgggatgggttgtggccgacccgcatgtgattaaccggctggcggctctgcggcgcatggtcgaccagcatacgagcacgtcatcgcagcgcatctgcctggaactgcttaaagaaggccgcgtcgccgaacatttgcgcggtttgatcaaggcttaccgcattcgacgagatgcggcaatcgcagcattggagcggtatgcgccggatgaagtgtattggaccgtgcctgcaggcggctactatatttgggtttccttaccggacggcgtgcgctctctggatgtattggaatcctgccgttcccaaggcgtcacgttcatgccgggcagcgtgttcgacgttgacgaaatggatgattcccatattcgtctcaactttgtgcgcccggatgctgctgacattgataccggcattcgaatcattggcgagacgatagcacagatgtagccaagtgactggctcattgcggttgtcgagttttttgatggctgcatacccacatcgatgggtgcattcgacgaataaataagcgaggaagccatcatcagttcgctgtggcatgcgcatagcgttgtcgggcgaacggggcagaccacgtggtcgttgcgtgacctggccgatcgagccggcatcgcattgcccctggcgtagtggcgaggtggcgcagtaacgagtcacgccatcgcgagccgatgatgcgaaatgcggaaccggtcgcggccatcaacggctatcatacatgcggaagcaacgatacgttggcgtcagcacatccatctgactccagaaagggacacgatatgaccacatcctccgtttcgccggtgaccactgaactagcgggcagcgaaaccggcatcacgcttatcattcacgccggagcgggcagtcgtggcaagcgcagcacgcctgaacgcatcgcccaggtcgaacttgatctgcagcgcgccctcgatgccggataccagttgttggaatccggagcgccggcgcatgaggctgtggtcgccgccatccacgtcatggaagacgctcccgaattcaacgccggccgtggtgccgccctgaccagcgatggcatcgcccagatggacgcctgcctgatgaccggcgatggcgaggtcggtgcggtcaccggcgtaagcaccgtgaagaacccgatcgatgcggcgcgcgccgtcaaagagcagaccaagcatgtgctgttcgcggacccgaccgatgccgagatcgccgattggggcgtcgcgaccgaaagcaacgagtacttcatcaccgaacagcgtcgtcagtccttggccgaggctcagtccggtggcgatgagtgggagaagcatggcaccatcggcgccgtggcgcgcgatgccgaaggcaatatcgccgccggcacgtccactggcggcatcaccaaccagatgcacggtcgtgtgggcgattcgccgctgcccggttgcggcacgttcgccaaccagtccacggtggcggtgtcctgcaccggcatcggcgaggcattcatcaaggtggtcgccgcccatcaggtgtcggatcgtgtgcgtttcgccggcgagaacgtcgaggatgccgcgacggccactttggacgaagtcgccgcgcatcatggcgatggtggcatgatcgttctgccggcggtcggccgtggcgtggtcgcctacaacagcgagatgatgaacttcggataccgtagcgcgcaaggcggtaaggtgcagggctgattgcccccctgtattgcggcatatatcataatggccggtgtgctgcggattcttggtaaggaatccgcagcacaccggccattcatgtatgcggcaagtgccgccgatcagtgcggcagtgcgcgctacttggtgatcgtgttgtacgtgggcatgttcgtgtaatcgaactgcacgttcttcacgttctgtgcagacacggcggcgaaacgtttgaccgggaatactggggtaatacgcaacttcatcgctcctcttcctcgaatgaaactatgttccattggtatgagccagccacgtacggtattcgtgtctggcctgccacacaatgatgcagccgtatatacgggcacagcattgcgcggcagttcattgtatggaaggcatgcaaactcaatgtttccttgtccaaataaaaaaacgagcgcggctgatgtgcggcaccggtccaaaaactcatgtccgccagcgcaacgcgactacgtaccttatgccggtctgcgcgtagaatagaacggctgcgatattgggttattcacggaggaatggatgcgacgctggctgatcaatgtagccaaaaatgagacgattctcatcgtcgccgcaatactcgccctgatttcgtgtttcattgtgccgccggacgccgattacaaaagctacattcacgccagcaccatcagccagctcatctgcctgatgattgtggtgtgcggattccagcgtatcggcgtgttccgcatcatcggttcgcgattgctggagaaggtcaacaccatgcgcggactggtcattacgcttgtcgctttgacgttcttttccgcgatgttcatcaccaatgacgttgcgctggtcacgtttgtgccgttcgcggtggccgtgctcatcatggctgggcaagaggataagaccatcctcgtagtcacgctgatgaccattggcgcgaacgtgggcagtatgctcaccccgatcggcaacgcgcacaacctgtatctcaaagccctgaccggcatgccgaccatggaattcctcggcatcatggcaccgtattccggcacggcggccgtgttgctggtcatcgtgatttccgtggtgtttggcggcaaaccggtcggcgacctgggcgacctcgaaaccggcgtgctggctcccgaacgcaacaaacaccagcccgacgagattcgtatcaccggctacggcgccggttatggcggctggcgcaccatcgtctactcgctgctgttcatcgtctgcctactggccgtctccgacgtgattcccctgtgggcgatgtgcgtgatcgtggtcgtcgtgttcctgttcaccgatcggcgcgtattcaaatacgtggattggggactgccgctcaccttctgcatgttcttcatcttcatcggcaacatgaagcgcgtgcccgaattctacgaactggcgcgctcgctggtcggcggccatccgctggaggtggcggtcggctccagccaggtcatcagcaatgtgcccaccacgattctgctttccggcttctgcgaccaatggcgcgatctgatcattggcaccaatttgggcggcatgggtacgctcatcgcctcgatggcctcgcttatttcttacaagaacgtcgtgcgccaatacccgcacaagaaaggccggtatctggccgtctactccgccgtcaacgttctgtttttggccgtattgctgaccttgagctggatcatcgagccgagtctctgagcccagccatctccaccccgctgacgggggctgtcggcgaagccgactggggtggtctaccgcgcgtatacggtgggggagccggtcagtcggctcatggccgactgcgggatgtcgtggatgcggccgatggtggcatccagcgtggatacgccggatacgccgtctgtgttggctgtggtggatgcagaggtgatgctggatacgccgactgcggacgatgatacggccgcaaccatcggctgacgataggcgttggagttgcgggccagccgggcgagcgcagggcgctgcctgcggaacagattgataaacataccgcatactccttcatcgttggccggcggtcttctggccgccgtggtttccatcctgccctcccgtgcttgtattcgctatgggggatagcccctattattccctgaatctgcacgattccccctcatccttgagggtgattctaacggcaaaggaatcggcctaatggccgatgtcaatcagcgcgaagccaccagcgtgacgctgtacggcttgatcttcatcgccagcaatgaagacggcgacggcaatgtgtaagcccgacgttccggcacaatcgcccccgaagcctcgccgcggtatccgatagtggttttcgccgtcggactggcgcttaacgtcgtcacctccaaacgcaccggtcgcgatggcgaggcgcccagcccggccagtccgcgcgcgatttccaacgtcacatccaccggggaatcggaggtattgacgattttgatgtaacggcaggcgtcatccccgtcatgcccggtggcactgacatacagatgtttggcggggcgtgacgcggtctgctcgatggacacggcatatgtcgtgtcgcccagatgcgtggaaaacagccgctccacctcataattcaccgtggggttcacatgcgccggattgagttcgataagattctgcgcccaccccttagccgggatatgcgcgagcagcggtgcataggaggtcatgcgcaccacgtcggaattgcgctcgcaaccggtcaggaacgcggcctcgccgagtgccgacttccacgtgttcgcgccctgttcggtctgcggttggccggcaaaatagccgttggctgaatattcgccgaaatagacgccggcgccgcaacgcgggtaagcgtcgaatcgtgacgcttggtatgcaaaccattcgggggagtggtaagaatgttcgtcgacgataatcgcgtcaccggtggcggaatcatgtgccccggaatcggttgcggccaacgctcgcgcatggtcccagctgcgtttcatcgtcggctggaaggggaacagtccggcgctcatcacacacagcatatccgggtatcgttcgtgaatggcctcgctgatcatgtcaaacttggccacgtagtcagccccgaagttttcgttgcccacgccgatcatgtccaggctgaacggttctggatggcccatatcgcgccggaccgcggcccacgagctggactccggatcgccattcgcgaattcgatgaggtccaggtagtcctgaatcacattgttgcggaaagtggccgaattgatatccatgtggcgcggatcgcggccgggcgactggcatgcgatgccggcgaacagagtgggcagcggcttggccttgaggtcctcgcacaggcagaaatactcgtagaagccgatctgatagctctgcgaatagctggaaccatccggcatcttgaacgaccacatcgaatactgttggcgtcgcgcggccagggagccgacggtatccttccagcgatattcattgccgggcgtcacaccttcgacgatgcagccgccggggaatcgcagaaacgctggatgcaacgcctgaatggtttccaccagatcgcggcgcagcttgccgtaacgccatttcgggtcgcccgcgccccaatagtccgcatccatgaactgcaccagatccagatcgaacgtggtgcgttcgccggcgtcaatggtgatacgcagcttgccgtaatcggtgttcaggccggttacgtcggcgttgaaccggtaccagccgtcacggccgatggcgatggcaccatccgacgaatccggactgatcgaaacgccggaatcctgcgcattggcaccatcgtcctgcctcagaccggtctcttccgtatcgtcaagcggatctgcgtccacgatatacgacaatcgagtggtgctggtgagcggcagaccgtacctatcgaccacgccgacggacagcttcgcccgcccatgaaccggacgtaccgcgagactgacggaataggtgtggtcggcgacgatggagaacgcgggctcgcccccgttgtcgccgcctccgttatagccgaggttttccagatatgcagggccggtttcggaaggaacatcggacgtgatgcgagcgtatcggctatgtgcgtgaattggcggggcggggcagtcggtggtcacccgctggccgtgaatcccgcgtatctcactgccgaggctggcggcggaacagttgatgaaatcccagaaacgcagggaatcggcctgtgtacgccatcgttcggcgccggccatacgccacgtgtgatggtcgagatagacgccgtcaaaactgtagttgttcaccatgttggcgttcagcccgccatccgcaccatggttgatgtcctcgaagaacacgccgtacagccgcccgcttgtgtgatgggtggggcttcccacgctaatccgcaccatggttttgattgtagagggaatggagcggaaaggtaaacggaagagttcgctcaccgttcatgttgcggtcaatccaagtcgactgttcgccggtatacagccggtaccctcgaaacaggaatggaaaatacggacgactaggagcgcggctgtgcaatcctcggtgggaatacgtgagcgcatcgaccacgtgtatccgtcgctgcgtccggcggagcgcgccgtggcccagtatattcgggatcatatcgaggaggcggccgacctgaccgtcggccagatggccgacatcgcccacgtcagccagccgacggtgattcgtttcgcccgcaagctcggtttcggcggttaccgtgaactgcggtacgtgttgcgccatccggccgccgagcacaaagtgaccttcaatccgttggctggattcgatctgaatccgtgggatggcgaagatgagattcccggcaaagcggcctatggcgcgaaggcgctgatcgatgagctgcacagtgcgttggaccccaaggcctatcgcaaggcggtcgccctactcgccgaatcggagttcatcgatattttcggcgtggagaactcgttgacaccggcgatggatctgttcaccaagctcggctacctgggactgacatgccgtctcaataccgacgcttacctgcagcagatcggtgccgggcacctgccccacggcgctgtggccgtcgccttctcccattcgggcagttcggcggatacggtcaaagcgttgcgattggcgaaatcgcatggcgcgaaaaccatcgccataaccaatgccatcggcgcgccgctggccagctgggccgacgtgacgttgctgacgggtcgtgactcgcacacgatctatggcaatgcgattttctcgcgcgtggccgataccgcgctcgtggacatgctgtacatgggcgtgattctgtccgactacggccggttctccaccgcgctcgacgaatccggtcgcatgattcgcgatcgcgtattcgagaactgagctgctgctttatcgcgccttgggctgtattgctctggtcgttgccgctttgttgccgctctggtcgttaccgtcctgaggcatgtgccagcgaatacgtagtggacttggcgtgcgtatgacgttcgatcttgccgctcaactccagctggtccaagagctgcgtcatctgatccttgttcaggccaagcgctttctgcatggttttacggctgagcttcacgccgcggaacgcgaggaaattgagcgtgaactgctccaacgtttgaggcgacggttccagcgtcgctgtatcgagcgggcgggtactgacctggtcgtcaccgtccgggcgctcgccgaatccgctgccgagaatcagcgtctgcaatggcgcgcagccgatgatgcgtgcgccggccaaagcatctgcggcgttatccgtcatgcgctgaatcgtggggaatgaatacattttggcgcgctgcgcttcgtcagtggtgctgggcgcggcggaagcatcggtatcggtccgatgcaaggatgcggcctcggccgagaccgggatgggcagcaccatcgccaccgaagtggggcctacgcgcagttgcggactgaccgcgctctgcgcgtaggcgtccataatgcgttgaataccggtaccgcagttctcgcagagacccagatcggcgaacaattcagccaaacgcggggtgcgtggctggcatacgccgttgagcagatcgttgatttccaaaccatcggtcaggccgccgagcgagacgatttccaggcgggaatcgaagatattgatcagtgtggggccggagtacgtgtaatcgcgatgttccagtgcgttgaccaatgcttcgcgcagggctatggccgggtgttggccggattcgttgatgccgttcagcagggcgctggcttggtcgagctggcgcagcaccgagccggtgaatgtgtgacgttcgcgaatggcgtttttgccattgccctcgaaaatggtggccttgataacgaacgggcattggtcggacagcagggtggcaagcgacgattcggtggtgctggtcaaagtgttgttggcgccggtgttgatgatgctgccggcgggggcattgccggcatcggcagagacggatgcagccatgttggtcacaaccgggctttcccaatccctgccttcactggcaaaacgaccctgtgcgtatgtgaaagtgagctcaccactatcgcctgcgacggtctggcccgatgcggcgtgatctacgttgctctccgttgtccccatatcgccgatggtaccggtgcaagccgacgttacgccgaggtgttttacacccctacggctagacttacacgagtttggccccgtagctcagctggatagagcatgtgacttctaatctcaaggtcgacggttcgagcccgtccggggtcacgatgcaataaacccttggtccctcatcgtctgtgggggccaggggcttttgagtattatgccggtctgggtccgtctggagcctgaactgtcgaccttgagattagaagtcacatgctcatcatcaccatccgggaacacccttaaggggtgcggctcctgcataacggctatactctgacttgagatgtgctggataataaccagctatcgcgcgtccgccaatggcgacgaacgaaggaagaagggcccgtgccgcgagcaatcatcgaggtaagaaacctacgcaaggaataccccgtcgaggatgagacggtggtggcgcttgaccgtgtcaatctcagtattccgcaaggccagatctgctgcattttcggcgaatccggctccggcaaatccacgctgctcaaccagttggccggcatggaaaaaccgacgcacggcggcgtgagaatcggcggcgtacccgtcagcaaactcgacgagcgtgagctggcggccttccgccagaagcatctcggcttcgtattccagtcgtacaacctgctacccaatctgaccgcgctcgaaaacgtggcaatgccgctgatgttccgcggcgtgcccaaggaacagcgcgaacgtgcggcgcgtggcgtactcaaacgagtcgggctcggccatcgtctcagccattacccgcgccagatgtcgggcggccaacagcagcgcgtcggcatcgcccgggcgtttgtgaccaagcccgaggtggtgttcgccgatgagccgaccggcaaccttgactccaaaaccaaaaccgaggtcatgacgatgatctgcgcattcgcccatgacttcaaccagaccatcgtgctggtcacacacgatccgcagatggcctcatacgccgaccgcattgtcaccttgctcgatggccgcatcaccagcgatcggctcaacaccgacctttcccgcccaactgttccgtccacgccgtccgccccaaccacaccaactacaccgtccacgccgtccgcccatagaacccaaggaactgaccgatgaagcacctctcccaccacaccatcgccatcatcgtcgcgttgctttccacgctgtcactggcacttgccgtcatctcccttccgcatcaggcgtacgcggtcgacggcacagacggcacaagcggcacgaacagtacgtctcagggaagcgacggcgattccgcgccgatcgccggaccggtgcccaacatcatcatcaccaacttcgcgtatggaggtgattccgtggccgccggatccaaattcaatctcgacttcaccttccagaacaaggggcaggtggcggtgacgaacatggtcgtcaccgtggacggcggcgagagcttcgccatcgcgggaggcacgaacacgttctacgtcgacgcgctgtgggccggttacgccatgacgcaaagcgtgccgatgcaggcgctcgcctccgcgaaaagcggtgcccagtccgtgaccgtgaacttccgatacgagtatgtggacgccagcgcccgctcctcaagccagtctgacgtcaagatttccgtgccgatcagtcagcctgaccggttcgaaatcagtgatcccgtagtgcccgaccaggtgatcgccggccaggaaaacacggtcacgatggaatatgtgaacaagggcaaaggcgatatcgccaacgtcgaggccacgatggagggcgaaggtttcgatgccacgatgaaaacccagtacgtgggcaatgtggcttccggcgccaccggcacgattggttacgccttcacaccgcacgcgtcaggcgagctgaagaccacgctcaaagtcacgtacgaggattccgacggacagaccaagaccaaggaattcccgctcaccatacccgtaaccgatatgcagccgatggatgattctggcatggccgatccgaacatggaccagaacgccaatcagggattgccggtgctggtgtatgtggtcatcgtcgtgatcgccgtggtcattatcgtggtgattgtgctgctcgtgcgtcgcaggcgcaagcagaaggccaagaagaacgatattgatgaggactgggatgattggtccgaaggcaaggatgataagaccgataccggcgtgacggatggtgctgcggcagacaccgctcctatcacaccagtcaccccagcctcatcagtcgcaccagccggctcatcccacaaggcctgaaaggcccgaccatgcgattcggcgacatactgcggctctgcagacaaaacctatggcggcgtaaatcccgtacgattctgaccgtgctgggcgttatcgtcggctgctgctcgattgtgctcatggtctctttgggccaaggcattaacgagcagaacgagaagatgctcaaatcgatgggcgatctgtccatcgtcaccgtgtacaccaacggttatgccggtccgatggacgatggcggctcgtccaagatgggcgataccaagctcgacgacaaggccgtggaatccttccgcgcgatgagcggcgtatccggcgtgacgccgatgatgaacttcccttataacgtgacggccagagcaggcgcgggcggccgttacatctatgattacgtgcagatcatgggcatcgacatgacccagctcgaccagatgggctacaagctcgtcggtggcgagaaaccggtcaaaaaagaccaggtgcttgccggcgaatggttcgcctatggtttcatggacaccctgaagaacggcgaacaacgcaccagcacacgtggcggtcagtattcctcatgcacgtttaaccaggccaccggccagtgcgagaaagatcaggacgaagatccgttcttcgacccgctcaccacgcaaattagtctgaccaccggcaccaattatcagggcgaccagtacagcatgaacatgtacggcggcggtggcggcggcacaggcggcgcgggcggcggtggcggcgcgggcggcgcaagcggcagcgccgcgggtcagtcggaaaacgtcaccctcgatgtgcgggcttccggcattgtggcgggcgactacaacaagggctatgccacctccgacggtctggtcatggatttgcaggcgttgaaggaactggccgccaaagtcgatccagccgccgccaaaaaagccaccgcctatgatcaagtgctggtcaaggccgccgacctcaagtccgtgcccgaagtcgaatcacagatcaaagcgttgggctacgagacctcctcctatgaagacatgcgtaagtcgttggaagaacagtcgcgcgcgattcagctgattctgggcggtatcggtgcggtttcgctgttggttgcggccatcggcatcgccaacacaatggttatgtccgtaaccgagcgcacgcgcgagatcggcattatgaaggcgcttggctgctacgttcgtgacattcgcgtcatgtttcttgcggaggccggcgcgatcggattcttcggcggattgatcggctgcgtgctgagcggactgatatcgctgggcatcaacgttgtcggcgcgttgtatgcgggcggcatgagcggcggcatgtctggcggtatggtcagcggtgccggcgggggctccggcgacggtaccggtggcggaacatctatctggaccatactctggcaggcgatagttggtggcgagaatgtgacccgttattcggtgattccgtggtggctgttcctgttcgccgtgctgttttccacgctgatcggcttgctgttcggcttcggcccggccaataaagccgttaaaatcccggccctagacgccatcaaaaacaacgagtgatcgcctctgtcacctgctccaccgttagtccataacgttcgttcagttcgcccagcgacacgcggtcggtaaattccttggctgcgccgaagttcagcacacgaggattacggctgccgtccgagacatgatgattcgcatagtatgcggtcactttctcgccccagccgccttcaagctgcccgtcttcaagggtgatgacctgctggtggccatcacgcaacgactccagtacgtctgaatccagcgacgtgcactggcgcgggtcgataaccgttgccgtgatgccataatcgtcagacaatgcggcggccgtctgctccgccaacggatacgcattgcccagtccgatgatcgcgacttgcgagcccgtctgattgacccgccaatccagcatgtgacgcgcaccggcatgctgagccgttacgctaacggtcccgcggactgttgcggcagatatgcccccgctggcggagctggcggaggctggcagcgaagctgactgggggcggtcagcaatctgcccacccgtcaccggcagcagcgtcgcatctcgttccgccgccagaatcgcctcgcccggcacccgaatcaccgccggaccagcaggggcgtccgccgaaccggccggcgcggtagcccatgccaaatcagccagatagtcgcgagccgaagtcggcaccagcatcgtaacccctggaatattggagaacatcgtcacgtcatatgcgccggaatgcgtattgtccgaaccggacaagccgcccagaaaatcaagtaccgtgactcgcgaacggttcaggctcatctcctggaagaactggtcgtacgcgcgctggaagaaggacgccgtggtggccaccaccggcgtgccacccgcccgtgcgatgccggcagcgtacgccacggcatgcgattcggtgatgcccgtgtccacgtaatgcgaacccgcgcgttcgcggaattcgtgggtgatgccgttggagcccggcgtggcgggggagatgaccacgagtcctggctcggtggcgaaacgcggttcgagcgcggccatcgccattttgccgtaatgcttgcgcggatcgtccggcttgccgattgcggcatccggattctgccaatgcgaggcctcgcactggccttcatgcggttcgtgatcggacaggttgcagtgatccgaatgccacggctcgctgtggttcacgttatcggtggggtgcacgccggtgggggagtcgagtgagaccggtaaggtcgaggcgttttgttgattggcgtgagtctcctcactgtcatatcccgcgcccttcagcgtgtggatatggaccaccaccggatggtcgatattgcgcacttcctcgaaagccgcgaccagagcggaaacatcgttgccggccgccacataccgataatccaagccaaacgcgttgaacagattcggctgggcggtgccgccggacgcgcgcaggcgggcgagcggaccgtacatgccaccgaaatcgccggcaatcgacatctcattgtcgttgaacacgatgatgagattgccgccctgctcagccgcgttgttcagtccttcaaacgccacgcccgaactcagcgaaccgtcgccgatcacggcgatcacattgccgatgccgctgttcgggccttccatatcgcgggttttcgccaaaccgcaagccagtgaaatcgaggtaccggtgtggccgagcacgaactggtcgtgtttgctttcatccggattggtgaagccagtcacctcgctgaaacggtccgggtccagataggcgtcggcgcggcccgtgagcatcttatgcacgtagctttggtgggatacatcgaacacgatgcggtcacgcggcgaatcgaatacgcgatgcagggccaccgtggcctccaccatgcccagattggagccgatatgaccgccgtgttggtggccatatgccagcagcgtggcgcgaatctcacggcagagttcggcgagctcg

SEQ ID NO: 1288 - DNA, 11769 bp, Unknown
  R157_18m  MAG No. k141_4873
ggagggttccggaaacggtccgactgcaggatgcaccgggccgtgcgacacatgtcaacttgcgtattcacgccaaactcaattgagcaagccgattctcgtaaatggccagaagcggaacaacgccacaccttggatatcgtcgtatggcactagcccattgttgccgtcgtcaagatggtatcgagaatctctggaattggagcgattatcaccaagcacgaacacgttgccgtcagtaacggttacggaaaaaggactgtcgcttggattcacgccggacttaagataagcgctttcatcaatgggtttgccgttgaccgtgatgggctccccggatcccttgcaggcgacggtatcgccgggcagaccgatgacacgtttgattaggtaacgattgctgtcgattatcgacatcagattggtgggaagctgctccccctccatccagtctgcgggatctttgaacacgatgatgtcgccacggtgcagtgcaaagagtctcggagtcaatcgcgaggcaaatacgcggtcgccgatttgcaacgtgtcttccatgctacgggatggaatcacatagacgttgaacacgaaggtgcgtcccagcaacacgaccagcatcaccgcgatcaccgtcagcagatagccgcgaatttcactccaaacggagggctttcgcgcatgtctcctcgactgtccacgcgcttttttgctatgacgccccaccatcatatcctttccgaccggtaacgcaacaccatagtcctcaaaccatgccgttacctacgcccatgtttgagctcagctgtcacaccagcggttcgcgcacgtctagttcacaggcgatgccggtttccttgcgggcccattcggccgcctgcagtgcggcgatgttccataatgcgcacggcactccgccaaggtccggatgcgatgcccagaatgtgaggtcatcagcgtatgcggtgatgaccgattcttccgtgactggcatgatcgtgtggtacagacggtccgcaagcgtggccacgaattcgttggccgcggcgaacgtgtcgataagatgctgttcggcggtcaccggcgggccgaccagctcccaggattcgacgtccgtggcgctccaatgcgcggcttcgccgtccacatcgcgttgcaaagagacgaacagcctggcgaactcatccgaagtcagtcccgtaacccggcgtcgggttgacaattcaatcggagtcatcagataccgttcctttcgcttcgttcattccgttgtctcgctggtttgatttgctgccaaccggtacaaagcctatctcgcacacctcacgatagcccaaaccaccggcatggccatgattgccagccctacgaccagtgaccatgaggagccggcgattccggtcagattggtcatggcggcggagacgtcatacatgccatgagccacgatcagcggtgtaatcatgcccatacggcggtacagcagcacggcgagcactgcaatcagcacgcggtggcgtgccgccggcacaatggccctatcgagcatcgccacatgattcgtgcggtccacaatcgaggcagcatcggtttccattcggttcatgcggccagactatcgcccgttcttgccgattgcctgtaagcaggttcggatagactggcgcgagaacaatgcgagaaagaggcaagaatgacccggaaacggtcacaacagcacgacgcacaacgcaaaccgtcctggcgcgtacgctggaagaccatgagccgagccgtagacatggaaatccgcgaacacaaaagctcattcgcggtctatgtggtgctgcgcatgctggtgctcgccatggcaatactccagttctttaacggcgactacgaaaatgtgttcctgtgcatcctgacgttgctgttgctgttggcgccggcgttcatccaggtgcagttccgcatcgagctgccttcggtgctggaagtcatcgtgctggtgttcgtgttctcgtccgagattcttggcgagatcagttcgttctatgagatcttcccgttctgggacacggtgttgcacacgatgaacggcttcctcgccgcggcgatcggcttctcgctggtcgacctgctcaaccggtccgaccgggtgaagttcgagctttcgcccctgtatctggcgatcgtctccttctgcttctccatgaccatcggcgtgatctgggagttcttcgaattcggcatggaccagttgttcggattcgacatgcagaaagacgccatcgtgcattccatcagctcggtgatgctcgaccccacgcacaccaaccatgcgattcgcatcaacgacatcacccaggtcacggtcaatggccaagacttgggcctcggcggctacctcgacatcggtctgatcgacacgatggaggatcttatcgtcaacttcatcggcgcggtcgtgttctccgtgttcggcttcctgtacgtgaagaaccgcggcaagaaaaactccatcatcagtcggttcgtgccgcgccgcaagtccgccgaccgcgattatctgcgactggtgatcgatggcgggagcgcggctgatgccaaggccaaagccggcggtgccaacgctgacgatagtgctaacgccagtgcggccggcaccgattcagctgatgcagccggagccaaagccggcaatgccgacgccgctccgaccgtcaccgccaagccctgagtacgctctacagcactttcgaagcgtcgaaacggtagtgcccggtgaccgtcatgtgcttcttgaaggcgaagtagtcgttttcgcgctgccgctgcgccatgttgtgaatcacgtacggtgcacgccccgcgatcggccggcggatagccgccctgatagtagccggaatcgtaagccggatggttttcggcgtccttgcgcgcacccgccacgatatccgcgtaatcgtccacaccattgtcattgaaatcgaccgaactggcgactctcgaatacttgcggtccgcctcgccgtgtgattcgatgattcatgaacgtattcgggtcacactgtgatcgtccgacccgccgctcgcgcctcccaatccgcccggtgcttgaacttgtggggctttggcggtatcgcgaccgcagcatcgccatgctcatctccagccatcagctcaacgaattgcaggagttgtgcgggcgattcctgttcatcaaaggcggccggcttgcggacgaattcgccggcgaacagaagcggatcacggttatcgagcttggccggccgctcggtgtcgcgaaacgtgcggcggtcgcggctttggatccggccgccgtcattcatactgattctgccggccgtgaacctgttcaactccgatttcatgaaagtcagcggaaagaccggttcggtgagtgtgctggatttcctcgctggcgagttcgtcgtacagaacatgctgatgctgccgatggtggtcatggcctatctggtggctggtgccatctatacgcccgtggcctccggccgcatgttcctgtacaaggatctggaccgcgccacgatcatcaatgcgaaaatccttgccctgtttggtatctacgccgtgtacgtggcattgcagacggtggtgacggtcgctctctacatcctgtacatcgcgcgcttcgactacgcttccggcacactgctgccggccgcaggtgcggacatcgcttcggatgtggcctccatcgccggcatcctgtgcgccggtgtggtgactatactggtggtggccgcccttgccacccggttctcgaccggcagtacgagagcgcggaccacaccgtgcacctcgatgtgaaggtggacgaggacacggtgtggcttaacagacagcaattggcattgctgtttggccgcgatatcaaaacaatcggcaagcatgtcggcaatgcattgagggaagagctcaatggattttcagttgtcgcagaatttgcgacaactgcatctgacggtaagacataccaagtcgagcattacaacttggatatgatcctgtcggtcggataccgcgtcaaatccaaggaaggcgtctattcccggcgatgggccaactcagttctgaagcagcatctcgttgatggttatatcatcaatcgcaagcggcttgacgcacttcacgccgtcgtcaaggtgctatcgaggtccaccgaaccggaaattgctggcaccgcagagatcttggaacgatatttgccgagtcttgtgctgcttaacgactatgacacaggcaatgtccctatacccaagggcgacgagtcccagtgggtcttgacctatgaggacgcgatgctgttcatccggtcgatgccgttctacacgcaatccgatctgttcgggagggaacgcaacggttcgttccaaggaatcgtcgcaggactctaccagacgttcggaggcgaagaactgtaccgttccacccagaagaaagccgcgaacctgctgtatcaagttgtcaaggatcacccgttctccgacggcaataaacgttgtgccgccgcactgttcgtgtatttcctgaacggcaacagtatagcgacgatgactcccctgcttgtggagggtaacgccttggcggcgatgacgctgatgattgcgctgtccgcacctgcggggaaggacacgatgatcgccttggtcgagaacttccttatacggcatgaatcgcaggagatcaattgagagaccgtcaatgaagggtgcacatcaatcacgttctagcattgcgcgactatctgtacgagtcgtctgaacgatctgctgggagtgctcttcgcggaaaaccaacagcagaccggaggccgcatccactatgtgttgttcaacccttgggccgtgcgcagcaatgaggcattgaacagtttcgattcgccactgatgaagctgctggcgcgtgccatttacgccattgtgggcgtcagcgtcgaagaggcgattgcccccatcacccacttgatcgacaacccgccgcacaccgcgctgtcagcgttcatcaagaccaaacccgtcgatctcactatgaacaccttcgacaggggcaaggcggtccggttggacgatatcaccaaaagctgctgaatcgctagctgtcatagcacaaggccttagacagaacacccagaaatcgaacgggtagatggatcgcgtctccccttgacttccggcaagcgcacgccaatcatggggcgtatgggtattgcaatcaaacgtatatatgaagagccgactgcgtcggacgggtatcgggtgctggtggatcgcctgtggcctcgcggcatgacgaaagagcgtgcggcgttggacctgtggctgaaggacgtcgccccttctcccctcctgcgcaaatggttcggccatgaccccgccaaattcgcggaattccgcatgcgttacatcgccgagctcgacgccaatgccgccgtggacaatctgcgccacatctgcgcggagcatcccgacgtgaccctgctctatgccgccaaggacccgcacatcaatcacgccctcgtactgcgcgattatcttaactgaatattgactcaggacgaccgtcgtttcagtccatctgctagattctcgccgattttcgtatctttgaatcgaagtgcacagtcgtcactccttggattgccaagtaaagggatgcctccaaaccaaatcaatccgtcatcgattatggcaaaatcggaacacgattcgacggtccggacaatgcacccaatagcacgcagccgattaatattccgttctattcgtgttctggttgccaccgcagcagtcgccggcaaacggacataaacttcgatgagcgctttcctgtcggccagtcggagcaattcatcgtcaattgcgctgagtccctgttgtgatacatattcagccgagataatcagggaacgtgcgcaaccggcaatatccttgcggagtatctctgcataattcgtggctgtaacgatgctgccttcgaataatccgtcagaccgggtgtcgagcaacgcatccgcagcatcttcgccctgcgtcgcggccgtcatgcaagcgcgcaacgcttccgcctttgcactgagcatgtccattttgtcagtatggtcaggatttaccgaatatccttgatttgcgtatgccttcagccgttttcgatacatgacagcggataaaggcacggtcacgtcgatgtaatcatagacacgaacctcggtcttgccatcattctcgcgatgaagtcgccctacatattgcgagagagtaccctcaaacgagaccggagcggcaagcagaagcgtgtcgaaacgcttctggtcgaatccttctccgatacagctgcccgtagccactacagtcaggctctcattattcggcaccaaggatagatcatgcatttttttggttattcgctgtttgcggtggggcgggcatgggttagtgtttcgggttcgatttcctgtcagaaaaaataatcgagtgcgggattacggccggtaaggctcctgctgtggatgcggatgcgcgccggtcttacggtggtgctttcccaaaacgcggattgtacgaggtgtgggacggcacgcggattcggccgttttccgcccgccgtcccacagcgctcgctatgaacggttgtggataatcatggagccgcagcgagaatcggcgttattccgcggtttcgacagtcgtcggtgtgggacgctacggacgttaaacggttgactcgtctgccatcccgcgttcttgagggacggcgcggacgacaaacgattgacttgcctgccgtcccacagatattgggaggcgcgcggctgcctgctgcccataacgggtgtcggtcaccccaccgatcgcccccctgcttgaaatacgcgactcgactttctgcaggcatcatggcggcatggcgacggcggacagtcgaaaagatccccatgatgcctcaacagccatcacccacgcacatcacagccatcaaccgcaaatatcaagaggctgaaaatctatgagacaagcaaccccggaaagccccagaccctacaaatggctttattgcaagggtatatgccggttcaaactccactgatagaactaatagaacaaatagaacagccgacttaggcacggcgcggtaaatggcgcaaaccggccgcgatagtagtagcgtggtgcataccagtacaaccatgcgaggagaacagccatgatcaatgaggaatacaaggccatgcttggcggcaagtccgtgattcgcgagctgagcgagtatgccacgagccgcggtgccgaaatcggctaccagaacgtgttcgattacagcctgggcaatccctcggtgccggctccgaaatccttcaccgacgccatggtcgacctctacgaaaacggcgatccggtggccatccacggctactccccctcgctcggcatcccgtccgtcaaggatgcgatcgccgaaaacctcaacgaacgtttcggcatggcatacaccggcaaccatatcttcccgaccacgggcgcggcgggcgcgctgtcccacgcgatgcgcgcggtgaccaagccgggcgacgagatcatcaccttcgccccctacttccccgaataccagccgtacgtcaagggcaccggcgccaagctgaccatcgtgccggccgacaccgagaacttccagatcaacttcgaggcgttcgaggccgcgctcaacccgaacgtgcaggccgtgctcatcaacaccccgaacaacccgtccggcgcggtgtattcggcggacacgctcaagcgtctggccgcgatcctgaccgccaagcaggccgagtacggccacgacatcttcctgatcagcgacgaaccttaccgcgaaatcgtgttcgacggagccacccagccctacccggccagcttctatgcgaactcgctgacctgctactcgtggtcgaagtcgctgagcctgccgggcgaacgcatcggctacgtcgcggtgaaccccgcagccaccgacgccgacctgctcgtgccgatgatgggccaaatctcgcgcggcaccggccacaactgcccgccgagctcgatccagctgggcgtggccaaggtcatcgaccagaccgccgacctcaacgtctacgagacgaacatgaacctgctctacgatgcgctcaccggcatcggcttcgacgtggtgcgccccggcggcacgttctacatcttccccaaggcgttggaggacgacgccgtggcgttctgcatgaaggccaaggaatacgacctgatcctcgtgccgtccgacagcttcggcgtgcccggatacttccgcatggcctactgcatcgacaccgagaaagtcaagcgttcgatcctcgtgctcgaaaagttcgcccacgaggtgtacggcctgtaaacacgggccgcaagtaacaaacacaagaaaggggttgccatggaatacaccgaagacgccgatcatcgcgaactgctgctgcacagcgcctatgactccgatacggtccgggccatggagcgacccctgctggacaaaggcgtgccgctgatgcgcatggccgcccaggccgcggcccacatggcggccggcatgctggacgacgaggatctggcgctggaggacacgtcgatcgtgctgctggccggggccggagacaatggtggcgatggtctgttcgcggccgccgcgctggcccaggagggcgcgaacgtcactgccatcgccgtgggccggtcgctgcatgaggccggattcgccgcgctcgtgcgcgccggcggcaaggtgctggtgcttgacccggcagccgatattcccggttgcgcgtccgggttttccgccggtgaggccggcgagcgactgcagaccgccatcgccgtggccaggaaatcgcatctgatcatcgacgcgatgaccggcatcggcattcaaggctcgctacgcggcattcccgccgcgctcgcctccgcccttggtctcgacggcgagtctcccgatgagcccgccctgccgaaccatgagtcgtcaggcgattttccgctggtacttgctgtggatacgccatccggcgtcggtgtgaacgatggttctctgcccggcccgtacattccggccacggtcacggtcacgttcggcgcgatgaagccgtgcgcggtgctgccgcccgccacgttcgcctgcggccgtatcgagttgttcgatttcggattcgatatcgacgacaaggatccggacgtcgaggtggtggataattcgttcgcgtccgacgcggtccgtctcccccggttcgaggattccaaatactcccggggcgtggttggtctggtgaccggctcgcagcgctaccccggtgccgccgtgctcaccaccagcgccgccgcccgcgcgaacaccggcatggtccggtatctgggcccggagcgcgcgcagaacatggtgctcaccgcactgccggaagccgtgatcggcaagggacatgtgcagtcctgggtcgtggggtccggcgtgcccgaggctagcgtcgagggcgccgacggcgatatgcagcgggacaccatcgccgcattgctcaagcattacgcgctcggcagcgaggatgagaacaaggacgcctacgacatgccgccaatcgtggtggatgccggcgcactcgacctgctgccggagcgtgtgcccggccaggtggtgatcacgccacatgccggcgagatggcgaaactgctcaaccggttcgaaaccaccgccagcaccgcggagcatgccgattcgcacgagccgtacaccgccgacgacgtgcggctgaacccgttggccagcgcgaagcgcgcccacgagctcaccggtgccaccgtattgctgaagggcgcggtgaccatcgtggtggatgaggaccatgtctatgcgtcgggcagtgcgccggcctggctgggcaccgccggcgcgggcgacgtactggccggtctgaccggcgccctactcgcccagcaggatgacgtggccaccacgggcgagaccgtggcctcggccgcctacctgcatggcctggcggcggcgatcgcctccgaatccgagcagcagggctggcaggagccggaactgatcggccgcgagcatcgccagcgcttcatgacgctcggccacccaatcgtggccggcgacgtgatccacgccatccccgaagccatcgccgacgtcatcgcataaccttgttgacctccctctgacgagggaggtgtctcggcaaagccgagacggagggagagaaacataagcctcaaactccacataccccgacctatacacaaaccccgtacactaaatcgcagaccccacccaacgacccaaacacacaaggaaccatcatggccaactcccccatcaccgacgtgattttcgacttctgcggcgtgctgctggactggaacacccgcgcatgccttgaaggccgattccccgatgaaatcgtggaacgcatctgcgccgacgacgacccctgcggcttcttccactacgaggaccgcatggacgccggcgaggatttcgcggacatctacccggatgtggtacgcgaacaaggccaggaactcgccgacatcttcaagttctacatcggccactacgcggacgcgctgccccgcacgctgccgggcatggtcgaactgctggcggatttgaaggcccacggctacggcgtatggggtctgaccaactggtcgcatgagaccttccacctggccttcgagaagtacccgcgcctcgaacagctgctgcagggcaccgtggtctccggcgtggagaagatgcacaagccgaacgccgacatctacgagctggtcctgacccgcttcggtctcacggccgagcgctgcgtgttcttcgacgacaccgccaagaacatcgtcggcgccaacgaggtcggcatccacagcatcctcttcgagaacgcgtcgcaggcgcgcgaatcgctcgccgaactcggcgtacgcctgtaagtcgccaaatattgcgtcgcggcagttgaagtctatggacccgtccttgacgacggtgaccggccgttgggcgaccggcatgtcgcactgttcggtgagcacttcaacgacgcggcacgcggcaccatgcgcagaatcatcatgaaggcgttctggatgttcatcacgtcggcgccgagcctggtcatcaggctcggcgtggagaagcggtcgatgctggagaaggagaaggtctggatggcatcgtactggtcctgcctcaggttaccaatgtggcgcatatcccgttacacagcgtccgcgatatgcgaggcgtctcatattgtgtcgccatagtggattgatgaggttataaacccgtgtggcgaccatccctagcgatataaatagactttatgacactgctgcagctgaaatacatcgtcaagatcgtcgagtgcggctcgatgaacgaggcctcccatgccctgtacgtctcccagccggccctgagctcgtcggtcaaggaactggagaacgagctgggcatcgagatcttcacccgctcctcgcagggcatcgccctgaccgtggatggcgcggaattcctgacctacgcccgccaggtgctcgatcaggccgacctgctcgaagagcgttacaagcatgccaagccgcgcaagcagctgtgccaggtctccacccagcactacatgttcgccgtcgaggcgttcgtggagatgatcaactccatcaagtccgacgaatacgagttcac

SEQ ID NO: 1289 - DNA, 2884 bp, Unknown
  R157_18m  MAG No. k141_5143
cgccatggtcggcgccctgatcatgggcgtgctcaaccagggcctgtccatcatgggcgtggacgccgcctgggtcaagaccatcaagggcctcgtcgtcatcgccgccgtcgcctacgacctactctccaagaaaaagaaaggctgagcgtggtgcatcaatcgtgatcatgcctactgcttgtaatttcggctagacatggtcatcaaatgagggggatctcatgggattcacttcctcttccaggggtgtcatgattgcagtcacgataccccattactaaatattaaatggtctttcgctgtttggtgtgggtgaggccggtcgtgtggtgataccggtcggctagtttggtggtatggataccacttcgttgttcaccgccgccttgtagttgcccggcccgtggagtgtgtcgggcgtggagttccgcgacggggaggacggcaaacgcgaactgcatgtcgcgatcagcttcgagtctggctcgcgcttccactgccccgaggccgggtgccgtgaggaggcatgcccggtgcatgacgtgcgggagcgcgtgtggcgtcacctgaacttcttccagtacaaggcgttcatccacgtgggagtgccgcgcgtggcgtgccccgcgcatggcgtcagggcagtgccggtgccgtgggcgaggccgggcagcggcgtccgcgctcctgttcgaggccatggtcgtggaactggcgaaatgccagccggtcgcggacgtcgccgaacaggtcggcgagcacgacacccgcctgtggcggttcatcacgcactacgtgcgggaggcgcgcctgtacgaggaccacgcgggcgtggaggcgatcggcatcgacgagaccagccgacggggacacaactgcatcaccgtggtcgccgatttggtggaacgcaacgtgatcaacgtgacgccggataaggacgcgcataccatcgaacggttcgcaagggatttcatggaccacaacggcgaccccaaccgcgtgcgcccggtgacgtgcgacatgagcctgggattcgccagggcatccgccaatggcttcccgacgccgccaaggtcatcgacaagttccatgtgatcgagcacgccaacgaggccgtcgacaaggccgggaaggccgggggccgggagaacggcctgttgaaaaggacgaagtacctgtggctcaaaaacgaggcgaacctgaccgaactccagcttcagaccaagcgcggcctgcaacggcaacggctcaagaccgcgcgcgcctaccggatgcgcgagaccctccaggacatctacgacaccagcgccaaccgggtcgaggccgaggacggtctcaaacacctgtgctcatggatgatgaggtcacgcctggaacccatgaaaaccctcgcccgccagttccaccgccactgggacgacattctcgcctacttcgaccaccggcacaccaacgcgatccccgaaggcctcaacagcatcatccagcacgtcaagacccgggcccggggctcccgcaacatggagtacttctccacgatgatctacctgacctgcggcaaactcgacctgcgaaccgtcaccacctgaccggtccccacccacaccaaacagcgaagggccaattactgaatgtgcaagaatcggtgtcttcacgtatagtcgggtgctatggagaggtcctacataacaatcagcgacgtggcaaaatgcgcgggagtctctgtctccaccgtttctcaggtgattaacggtaagggacgtatctctgagcccacgcggaagaagattgaagcggccattaaagagcttgattatattcctagttcgatggcccgtacaatgcgttcatcgcgttcgtatacggtaggttttctggtttcggatattcgtaatgagttttttgcgaatttggctcatgcagtgcagagcacattatttgcatctggatattcgacattaattggatcattttcaaatgatttgcaacagcaagacatgttactgcgtcgattgttggctgagcatatcgatggagctattatcgtgccgcaaggtcctgatagtgaggcactggaatctcttctacatcatgggctgccagtgatttttgttgatcgtcctgcggccggagtgcagggggttcctctcattgcttcgaatccggagcaaggattgctggaagcgttaattgatattcgtgatcatggacataaaaaagtcggatttgttagcggaccgtctgccatttccccggtatttattgagcgtgagcgtgtctttcgacgttttgcctcagcattgttcggagagagcaatttatattttgccaattatgatccatacgggtcgagagatgtggtgtgtgaagaaattagtaggttgtattcacaaggggtgagtgcgttatttttcgctaattctcctttgaccttagcaggcatgggggcgatgcatactctgcatctgaatgttggtatagatatttccatcgtctcattcgacgatgtggaagtattcgaattgattactcctcggatatcttcgatttctcagcaggtagaacaaatgggagtgaacagcgcgcgaaagattctagagatgattgaaaacgggtcttctgacgataatcttaatcatatcgataccatgtatatcgctagagagtccgtagccgatgcgccaatacccgtctcttgataaaaaaagcggcgcaacattcccgggaaagtagcgctaataggtagtgcccgaaaagttgcgcactttggatcgtggccgtccatggcgcgatagtcagttcgcttccacgaggttgtcaccgagccgggacatgtcgagatagcggcgggtcgaccattcgttcgcggtgacgtgacgga

SEQ ID NO: 1290 - DNA, 23526 bp, Unknown
  R157_18m  MAG No. k141_5312
cggcactgggcggcacgttgtggcaggatttgccaagccagcatccgagcgatatcgaacaccatatgaatccgccgtacgatgcgttcgggcacagcgtttccttggtgtccggcactcccctggcttcattgttcgcggggcagactgagattgcagtaaacagctaccatcatcaggcggttcgtgatgtggcccccggtctcgaagtcatggccgttgcgcccgacggcgtgatcgaggccctgtaccggccggcaagccacttcctgtgggccgtgcagtggcatcccgagtttctctacaaggtagatccatgctcgcaggcgatttttgatgcgtttgtggggagttgccgataacagcaaaaggggctgctccggttttccggaacagccctttttcagcggtagcagtcagcagactgatttagtcatcggtgctggcttgccagcgctgattggcgcgtgcggagaccgccgtccgaaggcgaggggcgtacgaaggtacgtcgaacctgaggaaaggcggtatacgctccgccaatcagtgctggttgttgagacggtggtacatctcggacagctccagttccttctcgaactggcgagcggtggtgttctcgtcgatgacggcgagctcaacaccggcgatgcgggcgaagtcttcccaagcctcacgaccgacggaggtggtcatgcaggtgtggtgagaaccaccggcggtgatccagcactcaacagcggtcttcaggctcggcttcggctcccagacggcgcgggcgcacggaagctccttgagggagccctgcggctcaacgacgtcgacgacgtccatgagcaggcggaagcgttcgcgaacgtcggacatggagaccacgacggcgtccttggtgggcttgccggagaagaccaggcggaccgggtcggccttgccgccgatgcccagcgggtggatctccagcttcggcttggcgatggtgccgatggacggggaaacctcgagcatgtgggagcccatgtcgagctcgtcgccctcggtgaagttgtaggagtagtcctccatgagggaggcgccaccctcaaggccgtagcccatgacggcgccgatgcgcacgaggacggcggtcttccagtcgccttcagcggaaaagccccagccgtactcggacgggaagcgctgtggaccaacgcccggcagctgtggcagagcgccgaggtcctcgaaattgtcgacgccggcggtacagccgttggcgcgcatcatgttgaccatcgcggcctcttccttggcggcgatgaacagggagtcgtacttggcgtccagcagagccgggtcgacgtcgtacttggccttgtagtcctcgatgatctccttgacctggtcgtccttgacggcgtcgtacgcagcgacgagctcgttgacggcccaagtgttgatggaggcgccgaacacgcgctcggcctcggtcttgtcgccctcggtgacggcgacgttacgcatgttgtcgccccagcgcatgaccttcatgttgttggaggcatcccagccggcgcaggcgcgggcccaggtgccgaccttctcgacgacctcaggatcggtgtagtggccgacgacaaccttgcgcttgatgccgaggcgggagacgatgtaaccgaactcacggtcgccgtgggcggcctggttcaggttcatgaagtccatgtcgatggtctcccacgggatttccttgtggtgctgggtggccagctgcagcagcggcttggtcagcacttcgaggccgcgaatccacatcttggccggggagaaggtgtggcaccaggtgatgacgccgatgacgttcgggttggcggaagcctcgaccatgaactccttgacaccgtcggaggacttcagggtgggcttgaggacgatcttggccggaatcttgccggtgttgttcaggtagtcgaccatttcagcggagtgaatggcgacctggcgcagggcttcctcgccgtacaggtcctgcgaaccaacgccgaaccagatttccttgccctcgaaggggttttccataaccatagggttacttcctttacttctttgtttatgggggtttgtttaagtttcattcgccgaccgaggctcccctcagagaggggagccaagacaccaccgtgctggcggagtcagcgctgatttgatgtgtgtgcccgcaaggcgcggaaggcgaaggcgtacgaaggtacgtcgagccttccgcaacgcggcggacactccatcaaatcagtgctggccgtagacgttctggtagcggtcgttgagcttatcgatgtcggcctggtcgatctcgatgatgtcaccgagctgacgggcggcccacatggtgtgagcgacttcctcggtcatggcagcggccttgacggcgccttcagcatccttgccgatggtgaaggggccatggttctgcatgaggacggccggggacttcgggtacttcttgagggtctcgacgacacccttgccgatcgcctccgagccgatcagacggaacgggccgaccggcaccgggccgccgaactcgtcgcccatcatcgtcaggccgcacgggatgttctgaccagtggcagcccaagcggtggcgtaggtggaatgggtgtgcacgacaccgtagacgtcgggcatgttgcggtagatgtaggcgtgggaagcggtgtccgaggacggggcttcggcaccgtcgaccacgttgccgtcaaggtcgcacacgaccatggaggacggggtcaggtactcgtagcgcaggccggagggcttgatgacgaacaggtcggcggtgtgcagacgctgggaaacgttgcccgcggtccacacgaccaggttccacttgatcagctgctggtgcaggttggagacgacctcacgaacctgcttgacctcggcgcgaacctcggggccgtaatcagccaaagttgccattattggttttcctttccactgtgatggatggacgttttttcaaaatctcaaggacctctctcaatagagggaggtcagaaaggcttacttatcttcgaggttgatggtttcgatggcagcgtgctcgatgggcaggcccttggtgaagcgggcgaagaagtcctcgaaaccaaccacatcggaagccaccggcttctcagtggtggactgggcgtccttgaacacgaaaccatcaaggaagtcagcgaggttgctgtgatcctcgttggtgttccacaggtagttggcgagcacggccataccccaggcaccaccttcggcggcggtggacatgaccttgatcggggtgttgaaggcagcggcgagaatcttctgagccaccttcggagtggtgaagatgccgccgtggcccacgagagagtcgacctgcacgtgctcctgcttggtcatcacgtccatgccgatcttgaccggggagaacgcggagaacagctgggcgcgcatgaagttgccgagggtcatgttggcttcggggctgcgggcgaacagcgggcggccttcaggcagaccggccaggaattcgccggaacggaacggatagttcagcaggccgccgcagttggcgtccacgtcgtcggcgatggccgcgcggaacaaggtgccgtacagcataccggcatcaaccgactggccgatggccttggcgaactggccgaacaggccgacccaagcgttgaggtcggaggtgaagttgttggcgtggctcataccggccagatcgccggccggggtggtgaccaagtcaacctcagggtggagggccttgagcttgtgctccagaaccaccatggcgaagatggaggtgccggcggagacgttaccagtgcgtacgcgcacggagttggtggctaccatgccagtaccggcgtcgccctcaggcggggcgagcacgatgccgggattcagggcaccggacggatcgagcagcttggcgccttcctcggtcagctcgccagccggagtgccggccacgagcggctcaggaagcaggttctccagcttccacggctgggctgcgacctcaggcagagcgtcgaacttctcgatgaatgcggtttcgtaagtgtgagtggtcgggtcaatcgggaacatgccggaggcatcgcccacaccgaggaccttctcaccggtgagcttccagtgcacgtaaccggcgagtgtggtgaagtaagccacctcggagacgtgctcttccttgttgagcacggcctggtacaggtgagcgatggaccaacgctcggggatgttgtactggaacagctcggagagcttcttgtgagcttcggaggtgttggtgttctgccaggtgcggaacggcaccagcagttcgccggcctcgtcgaatgcgaggtaaccgtgcatcatggcggagaagccgatgcggccgacgtgcgtgagcttctcgccataggcggtctcgacgtcgttggccatggaggcgtaagcggactgcaaaccgccccagatctcctcggtggtgtagctccacagaccatcctccaagtgggaggcccagctgtagtcgccggaggcgatggtctggaagttgtcgtcgatgaggacggccttgatgcgggtggagccgaattcgatgcccagcgtggtcttgccagcgcgaatcttctcggcgatgtgggcggcctgctcggccgcgttgtcggttgctgccatatctttcctttgccttggagcgccggcgttgttatccccttccttggggaggatgttagcgctcacaatttcaaaaaacattgtaccgataacctgcattcgacacaacttataccgagtcacgcatcataacggtttgataacagcgccaatttaccgccgaggagccggccccaaggaccgccgagcacgcacctcggcgggaatcagccccacgccgtgctgggtggtcaggaaggtcggctcgccgccctcccccagcaaacgcagcgtctcgcgcatggcggccacgccgagcccctcgaaatcgggatgcacggtggtcagcggtgggtacatgttatccacgccagacatgtcgtcgaatccgaccacgctgatgtcttgcggaatccgaagcccatgctcatgcaacgcgcgcatgacgccgacggcctgattgtcgttcgcggcgacgaccgcggtgggcaacgccgtgcctcgacgcccatactcatcaatgagatgattcatgtgcgcatatgcctcagaggcatcccacgtatggcagcgcacgatctgtgaatcgatggatcgggaggcggcgagcttgcgccacgcatccagtcgggtgtgggcgtcgcgccattcgttgggaccggcaaaatacagagccgatttgtgcccgtattcgcccagcaaggccaccactttggccattgcaccccactggtcgataccgaccagtgcagtgcgacgcttgttttcggtggagataaggcccaatccctcacgcacggtcatttggccgtgggtggcggtgacgatgacgcgcggctgagtgactcgcgcacggcaggcggcggcgaacatcacgtcggtcggggtcaggaagatgaaagcgtcgacgttctgctcgttgaaggtgtcgcacaggttgtcgaattcggactgcatgcacaaggcctcgtggaccatcatcacgctcatgaacagaccgtgttcgcgggccatggattcgatggatgagatggaggaaatcgggccgaagaatttgaggcctccggcgatcagccctatggtgcgcgaacggcgggaagccagtgcgcgcgcggagttggaggggcggtagccgagttggtcaatggcggcctggactcgcgcacgggtggcgtcggaaacgtccggcgagtcattgatcacacgggagacggtttggtggctgactccggcgagcttggccacttcgaacatggacggacgtttgcttggcttgcggctggtcaccatgctacctaacctccccgctggcggccggcacccgtgcacggccaggcttgtaccttaatcaatactgactttagcgcgtccacaacagttttgcgttagcgctcacactgtcgtgtcgcacgcggctcaggtcaggtgccatgagacacgatggagcggagtcggcccgtgttcggcgatggcggcacggtgtgcggcggaaccatagcccttgttatgagcccattcgtaggcggcgtaacgtgggttgctttgcgcgaggtcgaccatcagccggtctcgggtcactttggcgatgaccgccgcggtggcgacggtggcgcaatgctggtcgcctttgactttggtcgttatatcggctggaatcggcacgtccggcgcgtcgaacgtgttgagcgccttggtgatgtaatcgctcggcccgtcgagaattccggcgactttgggcagggcgcgaacgctttccccacaatttccaatggattcccctacggagtctcccggacgaccttccacaatctcccccgcagccttttttgccgtcaatccccctccaagccgtaagccaagttcgcgttcgacttggctgagcgcgcgcagggcggccacgccgagcgcataggtgatgccccattcgtcgatctcggtgttgctggcctggcctacggcgtaggccgcgcaccagtcgcgcagttcgtcgaaaatcgcctcgcgcctatgttcggtgagcatcttggagtcggccacgccgtccggtacgccgaggtaggtccgcccggacagttcggcggaatcatcgccgtcaagcggcgccaaatcacaggcccagatggcggcgcacccgaccatcaccgggccggcgagcgcgccgcggccgacttcatcgaatccagtaataaggtcatagccctgggccgcaaggctgcgttccaagtcaagtgtcggggtaatcatgcgcggctcccatcgtctcacaatggttaggattcagacggtccaggttcaaatggttcaggattcagacggcccggaactcaatcagttcaaagactcacacggttcaaaaaagactcaggaattcgagccggaagcgtcagacacgtccttgaagacttcgtggtggtcatcaatcgcaccaagccggtcaagcggccagtatttcgcgattccgactccgaccacatcggagatgggaaccaagccgcgatcgccgtcatcctgatgatagcgggagtcggcggaattggcgcgattgtcgcccatgacgaacacgtggccttcggtcacggtcaccgagaacgggaaagcgctcgggtccacgccggggcgaatgtaggaggtctcattgatggccacgccgttgatggtcaccggctggcccgcgcccttgcattcgaccacgtcaccgggcaggccgatcagtcgcttgatgaggtacccgccaccgggagcgctgctctgctcctcgttcaaccagttgttgggatctttgaataccacgacgtcgccgcgctgcagatcgaagatcttgggggtgagcttgctggtcaccacgcgatcgccgggcaccatggtgtccatcatcgagcgcgaaggaatctcgtaaaagccgacggcgaaaatgcgaatcagcagcacgataagcacgggaacgccgcaccacaggaaaaagtcgcgtagggtgaagtggtcatcatccatcgatgatgctgccgcggcattcgcgccagcggaagaagcggcgtacgccgggcgcgccggtgccgggggaaccggggacggggcgatgccgtggtcggcgacttggaacgtacgggaatcgcgggcatcggcctcgtcatcatacgaggtctgattgctctccggattgtcggaaatcgggaattcgccgttatcctgatcgtcctgcataccatctcctcgcgattcatgctgccggatatgaggggtgccggcgcccgtccatcatacgtggaaaatacggaaacagcccgaaaccgaaacggttccgggctgaatttcacggtttattcgcgcacctgcatcatcaggcccacgattgcacccgcgaatcgactcacttagcggagttgtcgcggcgctcggcaatacgagcggccttaccgcgcagagcgcgcaggtagtacagcttggcgcggcgcacacggcccttacgcacgagcttgatggagtcgatggacggggagtgcaccgggaagcgacgctccacaccagtgccgaagctgatcttgcggaccacgaaggtctcacgcacgccagcgcccttacgagcgatcaccacgccggtgaaggtctggatacgggagttgttgccttcctggatcttcacgttcacgtcgacggtgtcgccgggacggaaggccgggatttcctcagccggcttcatgtgcttggcgtcaaaagcctcaacagcgttaaccattgttttccttcagtgctgccgcatatcagccacagatctggggccatccacgcgattgcgcatcacgtgcgttggcctgttctcgttatccctcgggtttgcccttgggaagcctgccgatccgccgaaagtcaggccttgcggccgttcggactggacccatggagacgtgggcttatgcggcggcccacttctcgacacagcaatcgtcaattgtacggattattgcggacagaacggctgtcggatggcattccaacaccaaggcactgcgacgtagttgacagacctgcaggcgggctttatcttgggagcgtcggtaggcgaggctaccgcagggatatgggttgctgccgctaacagtggagacactgcacgcaggtcagcagttcttgtcggatcaaggcatgaactaacgcaattccaccgccctgcgatgctgaagcttgaacgatggctcgaatcggcggattcgaatactttccgcccctcctgctggtcgcatggataccgacgatggtattgatctggcgtttcagcgcacggcttgaaggaggtgagagtccgatggacggtgattattccagtagttccgccgccggcaacagtcatagttgcggtggtgatgaccatgttttcttatattccgttatccggaagtcgggctctcgcctgtagtgttccttggctccccggataacccttgcataattcgtctttcctatgcatagggaggtcttttcatgaccatgttttcattcaatcgcgtcggtgcgcgtccaaatgcgtcggcccgcaacccttccaccgccgcgtccgaccgccaaccattcgccgtgcgcctggcctccgacgtactggtcgcggccggtattctggcgctgttcggtctgatcgcttggattctgccggcgatcggcgaaccgatcggcccgaaaggagtgccatcacaagtcagtacgaatctcgccgacctgccgtattacgcgctgcgctcggtgttccgcatgctcgtggcactgttcttctcactggtgttcacgttcatctacggcacggcggccgcgcgctgccgccgcctgagccgcgtgctgattcctctgttggatattctgcagtcggtaccgattctgggctttctttcggccaccatcaccatctggatggtgctgttccccggctcgatgctgggcgtggaggccgcgtcgattttcgcaatcttcaccagtcaggcctggaacatggcgttctcgttcacccggtccctgaccagcgaaccaactgaactcgacgaggcggcccgctcactacagctcacacgctggcaacgattctggacactggacgtgccgaacgcgatgattccgctgctgtggaactgcatgatgagcgtgggcggcggatggttcttcctgaccgcctccgagatgatctcggtgaacaatcgcacctatgcgttgcccggcatcggcagcttcgtggcacaggcagcggccgaggagaatctcgcggccatctgctgggccatcgtgacgatggtgctggtggtgctgcttatcgacgtactgctgtggaagccgttgaccgcgtgggcggagaagttccgcattacgcaaagcgagtcggcggtgcgcaagaccagtgtggtgctgaccatcattcgtcagtcacatatcgatgagatggtggcctggctgttcaggcctgtcggcgacctgttcgacacgctggcccgcccgttgggtcggaccggtggacgttgggcggcggacgtgaagtccgcacgcagccgcgcgcttgacgtggtattcacagtgctggtgttggcagcgtgtgcgttcggactggtgcagcttatgctggtgattcatcgcgatgcgggattcggcgagctcgggcaggcgttcgtgttgggcatggtgacgttcctgcgcgtggcgctgcttacgctcgtctgctcggtgatttgggtgccgattggcgcgatgatcggcatgaatccgcgcgtttcgcggtttatgcagccgattgtgcaggtgctggccagcttcccctcgaacttcacgttcccgttcgtcacgctctggttcgtggcatgcagcgtggatatcaactggggcagtattctgctgatggcgttgggcacgcaatggtacatcctgttcaatgtgatcgccggggccagccagattcccgacgatctgcgtgagatgacgcgcagcttccagctggggcgctggcagcggtggcgcgatttgattttgccggcggtattcggctcgtgggtcacgggcggcattacggcggccggtggggcgtggaatgcctcgattgtctcggaaatcgtaagttatggacggcatacgctgaccgcctccggcttgggcgcgtatatcgccgaggccaccgaaagcggcaacaccgtgaggaccatcatcggtgtggccgtgatgagcgtgttcgtggtggccgtcaaccgcctgttctggaacccgctgcagcgcatggccgagcgccgtttcgcactgaactaaagacttaaggagaataatatgactgttgcaatggaaaccattcgttcgctgcgggcggtgaccccgcagaacaccatcatcgaagcccagcacgtcggccagcgcttcacggccgacaacggcaccgaactcactgtgttcgacaacatctcgttcaacctgtacgagggcgagatcgtggccattctgggccgttcgggtgccggcaagtccacattcctgcgtgcgctggccggactggtcaagccgaccagcggcacggtcaagtatcgcggcgaggccctgaccggtccgaatcccggcatcgcactcgtgttccagaccttcgcgctgatgccgtggctcaccgtgcaagacaatgtggaactcggtctgaaggcgcgcggcgtaccacgtgcggaacgcaccaaactggctctggatgccatcgacatgatcggcctggacggcttcgaatcggcgtatccgaaggaactgtctggcggcatgaggcagcgcgtgggcattgcacgcgccttggtgctgcggccggacgcgctgttcatggatgagccgttctccgccctggacgtgctgaccgccgaaaacctgcgtcaggaagtgctcaagctgtggtcgagcgaacagcgcagcatcaagtcggtgcttatggtcacgcataacatcgaggaagccgtggagatggccgaccgagtggtggtgttgggctcgcacccgggccatctgattgccgatgtgcgggttgatctgcagcgtccgcgcgaccgtcacagtgtcgaattcgaggcgatggtggaccgactgtacgcgattttgaccggacaggcctcgcagcctacgcaacaagccgaggctctatcgccatcggcatcgctcacgaacgcacccgtcacggacgcatctgtcacggacgcatcagaccttcagcccgccaagaccatcgagaaaatcaaggagcatccgctgcccaacgccacgccgggcgggcttgccggtctgctggatgtggttgccgagcatcctcacggcatcgacttggcagatttggcctcggctctttcgttcgaggtggacgacctgttcccgctggtggatgccggtacgatgctgcgcgtcatcgtggtacgcgacggccatgtgcagatcaccgaagcgggcgacgcctggcataaggcggacattctgcgggccaagcaggtgttcgcctcactggcgatggaacacgcgccgctggtgcgcaacattgagcatgcactgcggaagtctgcggaaggcaagctccgcggcgagctcatgctggacctgctgcgcgcccgttactccaacgacgaggcgcatcagcagttcgccatcgccgtggagtggggccgttacggcgagctcttcgattacgatgccgatgacgatctgctgagcctggatgaggcgaataagggcgaataagcgaatcagccacgtgagttggctagatagtgcctttatgcctgcaaacagatgccgaagcggaatatgaccatgttcgactcatctgactgacagcaatccgtatatgcaaagtgcccggcatccgaagatgtcgggcactagtcgtgagagagactccctcagtcagctacactgacacctcctctcacccgagggggcaccagaggaacgaatcagaactcgcgacgtgggcagtcgccagactgcccaccagacagcacagccgcggtcgcgcgaatcacgaattctgaccgagcaaagcgaatcagaattcgcgatttgcgcggtagaacttgatcaggctctgggtggaggcgtcctgggcggcgagggcgtcgtcgtcctgggagatggccggggtgatctgcttggcaagctgcttgccgagctcgacgccccactggtcgtaggagtcgaggccccacacggtgccttcgacgaaggtgatgtgctcgtacagggcgatcagctcgccgaccgcgaacggggtcagggccacaccgaagatggaggtggtcggacggttgccggtgaacacgcgggccgggacgatctcctccggggtgccttcggcgcgcacttcgtcggcggtcttaccgaacgccagggccttggtctgggcgaagtagttgcccaggaacagctcgtgcacgtcctggtcgccgtccttggtcgggttcggggtgttgacgaacgcgatgaagtcggccgggatgagctgggtgccctggtgaatcagctggtagaaggcgtgctggccgttggtgcccggctcgccccagaagatctcgccggtctcggaggtgacgggggtgccgtcccaacgcacggacttgccgttggattccatggtcagctgctgcaggtaggccgggaagcggtgcaggtactggtcgtacggtagcacggcgtgggaggcgaccttgaagaagttgcggtaccagacgttcagcataccgagcagcaccacgacgttcttctcgaacggggtgttggcgaagtattcgtcgatctcgtggaagccgtgcaggaactcctcgaagcgggccgggccgaagacgacggccagagaggtgccgacggcggagtcgacggagtaacggccgccgacccagttccagaagccgaacgcgttgttcgggtcgatgccgaattcggcgaccttctccaggttggtggagacggcgacgaagtgcttcttgatggcttcggcgttcttctcgtcggagccgtcgatggcgcccttggccttgagctcttcgagcagccaggtgcgggcttcacgggcgttggtcagggtctccagggtggtgaaggtcttggagacgatgatgaacagggtggtctccgggtcgaggcccttggtcttctcggccaggtcgttcgggtcgatgttggagatgtagcgggcggagatgccggcgtcagcgtacggcttgagggcctcgtacaccatgacggggcccaggtcggagccaccgatgccgatgttgaccacggtctcgatcttcttgccggtcacaccggtccactcgccggaacggaccttgtcggcgaaggcgtagatgcggtcgagcacctcgcgcacgtccttgacggtgtcctgaccgtcgacgatgtacttgccctcgtcttcgaccgggcggcgcagcgcggtgtgcagcacggcgcggtcttcggtgttgttgatgtgcacgccggtgtacatagccttggtgcgctcatcgagcttgacggccttggcaaggtcggcgaacagctggagggtttccggcttgatcaggttcttggacagatcgaagtgcaggtcgccggcgtcgaaggacagcttgtcgacacgctcggcgtcttcagcgaaccacttcttgaggctcacgccttcggcctgaagctcgtcatagtgcttctgcagggcagcccactcaggggtctgggtggcgtcaacgggcggattgatggccataggattccattcctttcatcagtgactggagcgccttcgctcacggctcggatgcgctccgtatcaccaaacagaatactcacaaattcggacatgaacagaacaaaaatcagtcagcgatgtcggattgccatcgtttgcattatcgaacagttcgtggcgcggcacaaccgtcatcttcaaccgagcggtcacgacacaactgccaagccgccgattggacttttcgcggagatgtcttatacttaatttcttgtgcgcggctggcgaaatgccttccgcgaaccaagccactttagctcagtcggtagagcggctcactcgtaatgagcaggtcgtcagttcgattctgacaagtggctcggatgccctaggctggctggtctgtaatggctgtccggcctagggttttgtatatcttccacacctgtggaaacgcggatatgcacgcgcgagtggcggaattggtagacgcgcaggatttaggttcctgtgtctttgacgtgtgggttcaagtcccatctcgcgcaccggcttgagcctcctggaaacattggatcgccaacgattccgggaggctcttcgtatatgcgtgaggcaattgcaagcccttgcggacgcctctacatatggcaatgccaaggcggcaaatataatggtcacagcattgtgggtctgagcctgtgcgccgtgagcctgtgtgagccaaggagagaagtgtatgtccgccattcttacgccggttggcctattgctgatcattctcgccggctatctgttcaagcggttcggcctgttcgggcagaaggattatcgcgtgttgcaaaccgcggaattcaacatcgtgctacccggtgccatcgtatactcgttcgccaccaatccgcatgacatctcgctgctgcttatttcggtattcgcattcctgtttgcttttatcccgatcgtgttcatctttctggccacccgcaagcgcaatgtgaccgaccgcgccttcctgatgctcaatggcgccggcttcaatctcggttgtttctctttcccggtcgtccagtcattctggggtgcgggcgcggtggtgccggctgcgatgttcgatatcggcaactgcgtgatggtggccgccggcaccaatgtgctcacccagcaactgctgcatattcagcccggcaaaacacttgccgaacaacacgccggttcggttcccaccttgccgtacgaaaagcccaaggatcgcgacgccaaacggcttgcccgccgcgcattgctgcgcaccatcggcaagagcttcttcggctcggtgccgttcgacacgtatctgctcatgatcgcgttgaccgtcgccaacgtgaagattcccgattggatcgcctctataacccagccgttgagcggtgccaacgcgctggtgtcgatgctgatggtgggcatgctcatggatttgccccagtccaagcatgatgtgaaggaagtcatggccgtcatcgcttggcgtataccgttcagtgtcgccttcgcgttgatctcgtggttcctgctgccattctcggcttcgattcgcgccgtgatggtgatctgcgcgttggctccaatcgccattttctccacgctgttcaccgacaaagtactcggcaacgccaaactggccggcttctcgctggcaatcaccgcgatgatttcactggtgatgatggcatttgctcacgtgctgatgggcgtgtgagcaaatgcgcgagtaggcacacgacgggcgcacggcgggcacacggtcaggcgagacgcagcccacataggttcgtcccccggccgccagctgctaccggtgcagcagcttgtgcgccagattgctcacgccgaagcggaacttgtccaccggcaacgtgaatttgcctaccatctgctcgacgtagccgttgaagccctgcttgaattccagcacgccgcggccctcgtcgttcggatcgtcgaacacgccggaaatgccgtagaagttgtagcggctcacaccctgttccacacacaggtgcagcatcgcttcgtactgaatcagcgctgaggcgtagaacggcttgtactcctccaacgaaccggaatactgatagaccacctcattggggtgactgacgaacattgaagccgctgccggcagcacatcgcccttcttggcatatccctccacctcagccagacgcttgtcggcggccgcgagattgcgcgattcctcccccagctgacgttcgatgcgcgtggtcggacgttcatcgtatttcgtctgcagctgtgcgaccttggtctgcaaggcctcgcgcttggcggtcatatccgccacatattcggcgatgtggatttccgcgagcatgaaatgcgcatccgcgccatacgcctgcttgaactggcggaaatagtccgcgccgcgcgtcgcgaacccgcggcgttcaccggtccgccgttcgatatcggcgaacacgtcgaactcgtcggggccgatttcgcgaacgtgcacgcccatcgactgcgcccgcttgacgctccattgagcgcgtttgccgaatgatgccagcagttccttgccgttggtgatgccggtgagatccttgacgtacatccactggcagaccacgtcataaccggtatggaatccgccatgcgtccagccggcatcggtgaatccggtcagcagtgcatcgttcggctcgccgtcgggctgcccgtccgaggaatacagacggtaggcgacgttaggccagcatgccacggaaacagcatggtggcgacgggccgattcacgaatcgcctcggttatggcccgcagcagagccggatcatcgctaatgctgatggggccgaaatatacggagccatctgcaccgaaacgaccattgaggtacagaatcacgcagccggctaccagattgccggatgcgtcgcacacgccaacgcattcggcttcatgcccacgaatcttggcaagacggacctgcccggaccattgctgaaagctgccctggcttgtggcttcggaaagccggtcgaactcttcgggcgtaatcacgccaaacgtatacgtcgtatctgttcgattcgcagtcgcgctcatctcgtcgtcacctgtgccttatttctgtgtccgtgctcgccactgtttgtcagcgatgcagcagcttgtgtgcggcttcggatacaccgaagcgcagtccgtccaccggcagcgtgaacttgcccggaagctcttccacgaatccgccgaagcgagtcttgaactgccagacgccgtaggaaggatcgttggcgtcgaaaatgccggaaatgccgtagaagttgaagcgctccacgccacgggcgatgcagtcaagcatcgcctcgaagtggattagggaagacgggtagtaatccatgaaacgatcgtcctcgccgctggacaggcagacgacctcgttcggatgccagaagtagacaccggcttccaccggaatgaccgggccgtccgaggcgatgatgccattgacttcgccgatggtcttttccagcgccgtgatcttcttgtctgcggtggcgatgcgcttttccagcgttgccgggtcggaggcacccttcttggccgtgccttccggccgctgttgcgcgcgctggagcaggcgttcgaggttgcgcttgtctttggaggccgcattcagcttggattgcagggtgtccagatattcgtcgaaatgggtttcgaccaccttgaactcgatcaggtcgccgaaggtatcgaacagacgctcatagtaggccagatcgcggctcttgaagccttgacgtgcggcgctcatatcgcacagcttgacgaaagtgctcagttcgccgcgttccagccggcgcacgcgcagaccggaatcctgggcgatgcggatgttcttacggcggtacttggagaacgaggccagcagttccttctcattatgaatgccgtcaagccccttgacgaagttccagcggttcaccacggattcgtagcccacggtgaagccgccatgtttccaaccgaagcgggccatgttgtccatcatcgtggtgtccgggtcgctggtcggcttgccgtccagatcatgcagacggtagactgcggccggccagcaggatacgctgatggcgtgatgggccttggccgaacgacgcagggcttcggtcatcgcctcaaccacctgtggattgtcataatcgcacagcggtccgcaccagaccgagccttccaaaccgaaacgggactgcgtgtacaccacgtagcaggcggcaatcagcttgtcaccgcgcttgacacccacatagtccaccggaccgttgaacgcacccatggcggccatctgcgaggtctgctggaaactaccttgcacttgagctgcggagaacgcatccagctcggcaggagtgatcttggtaggggtgagcgaggcgacgcctgcatcggattgcgtcataatcgaaccttcttacttgtcgttactctgatcgttactctgggctctggaacggcctgtgtgctgcgtccgtttaccgcgacagcagcttgtgcgcaaattgcttcatggcataggcgaccggtttgaccggcagtacgaactcgcccggaagttcctcgacatatccgttgaagccctgcttgaactccagtacaccacgcccctcgtcatcgggatcatcaaagacgccgtcgatgccgtagaagttgtagcgagacagcccgtgttccacgcagaaatgcagcatcgcgtcatgctgaatcagcgcggaggcgtagaagggcttgtactgctcgacgctaccggagaacaggtagatgacctcgcgcggatgctccacgaatagtgatgccgcagccggcagcacatccccgtctttggcgaactcggccgcctcgttcaggcgcttttcggctgccgccagattgcgggtctcctcccccagctgacgttcggttttggtggtggggtgttcggcgtttttggcggtcaatgccgccaccttggccgaaagtgcttcacgcttggccgtcatgtccgctacatattcgtcgatgtggatctcggcaaccataaaatgcgccttgttgccaaacgcttccttgaaacggtggaaatatgcttcgccacggtattcgaagctacgacgttcggcggtttgctgctcgattcgtgcgaatacccccaactcgtcgtccgacagctcacgcacatgcacacccatcgattgggcacgcttcacgctccactgggtgcgcttgtcataggacttcagcagacttttctcatcggtaatgccggtcagatccttgaggtagcgccaacgtggaaccgccgtgtagcccacggtgaaaccgccatgagtgaagccgatcgcctcgagccgttctatcagcttattgtcgggagcgccgttctggtcatccggcaaagaagctccattggtgtcgcgaagccgatacggggattcaggggtgatttccagctgtgaagcaccctttgccttggcatggcgtttcagcgcatccatgaagaaggtcaatgcttcggtgtcgtgatagtcgcacatcgggccatcatggatggccgcaaatgtagagaatcgagagcggtgagtttcgaacagcgccgccgcgacgatcttctcgccctccttgagggccagatattcgacgtcgatcccctgcgcggcgcgaaggcgtcccatcgccgaggtctgttggaaattgccttgtggatgcctggcggagaaatcatcgaactcttcgtctgtcaacttcaccagcacaaaatcacgcatgcttccctctgcctccgagtcaatcaggctcaccatgctagcataacgcgcacacgacgaatggggtccgagcagatgaggtgtgcacatcgttcgcactattgcctccacaatggctcaaagaacaatggcccgaagatgctgaacgtccggcttgcgttgaatcaaacgcagtgctatattctctacttggctcttggagccacgccaccttagctcagtggtagagcatccccctcgttcgtgggaaggtcggtagttcgattctatcgggtggctcttgttcatcaagaaggccgacgcactaagcgccggccttctttcgtatcgcccttgctaggtcataggcgcttgctagacacttgcccgattcgggaggggctgagttgctgagccgcgactcaactgtggcttagtcgcggctcagtgcagttagacagcctagacgacttagtgcagcagcgcctcgatagcggggaccaaggctttcagcgccttgcctcggtgggaaatcgcattcttctcggccggagtcatttcggcgctggtcagcggctcgccttcatggtcaggctcagtgctgacgcgaccggcaggctggtcgtccgggacgaacagcggatcgtaaccgaaaccgtgttcgccacgagcctcgcggatgatacgacctggcatgtcgccgagttccactgtctccgacttgatggcgtaccgggcatgcaccggggcagggctcccatctgcagccgtggtgtaaacggtgatgccgtcggcagccactccaccggtcacgtcggcactggcctcggtgtccgggaccaccagcgcggcggcgcagcggaagcgcgcggtacgcttgtcatccggaatatcttcgatttgggcgagcagcagcgcattattggccttgtcgtggccgtgagcacccgcccagcgagcagacagaatgcccggagcgttacccatcacatcgacgatgagacctgaatcatccgctacagcgggcagaccggtacggatggccacggcgcgggccttgagcagcgcgttctcctggaaggtgacgccggtttccaccgggtccggcaggtgaaggctaccagcggacaccagttcgatgttttcggcatccgcgccaagatcctcttcgagaatgcggcggatttccacaagcttgccttcgttatgggttgcgacgacgatttgcatgggttctcctttaagaaggctccccttgtcaggggagctggacattgcagaccgtacggcttccagccgacaacctcccctaaaggaaggggagctggcttagtctagggacaaagcggcacgctgggcggcttgcagttccttgttgcccttttcggccaagtcaagcagggtgccgagttcggcacggttgaacggacggtgttctgcggtgccctgaatctcgatgaaggtgccggaaccggtcatggccacgttcatgtcggtcatggcctgactgtcttcaatgtatggcaggtcaagcatcggggtgccgttgatcacgcccaccgatacggcggacacatagtccttaagcacgcggctggcggacttgatatggcggtgcttctccgcccaattgactgcgtcgaccaaagccacgtacgcaccggttacggaagccgtgcgagtgccgccatcggcctgaagcacatcgcagtcaagctgaatctgattttcgccgagcgccttcatatcgatgacgccacgcaggcagcggccaatcagtcggctgatttcgtgggtacggccaccgattttgccacgtacggattcacggtcggtgcgttcggcggtggcacgcggcagcatcgagtattcggcggtgacccagccgaggccggagtccttgcgccaacgcggcacaccaggggtaaaagtggcggtgcacatcacgcgcgtgttaccgcattcgatgagcacggagccttcgggggcgtcggtgaagtggcgggtgatgcgcacggggcgcagctcgtcgaccttgcggccgtcggcacgaattatttggtgattgccaagcatgtctttgatttcaaccatgcgccccagcatacgccatccgctctatgcctggatagcaactcgtcaaccagcatcaaaccccagcgcaatgtcattccctgcttacatatccattccatgacacttggctgcacgccactattttcttatgcaccactcgcttacagagtcaatgcctgcgtacctgatgaggattgggaaagatcgtccgctggaataagaatgccatattccatgaaatcttggttgaattgcttgcgctgcatagcgttgagttcgtaatcgattaacggcaaatatgtatagtccatgtcatgcaacggctcttcatatcgatgaagcacgtgcataattgccgcgctcggcagtggggaccaccatccatccaagccataccggtacggaggaaccaatgtcaagcgtctgttccttgggttgatatcccaacgcagaaaacggtataaaccagcgagaaacgcaatccagcacgcatcgttcacccgtgcaaccgctcggacgaacgatatacgttgatgttgaacattccgagcatgaatcagattgacgcagagcatcttcaacgtagaccaggtcgctccgctttctattgcatcgaaatcaggaggcctacgcagttgcgccaacaacatgtgcaattcgtcttccggaatcgtttgcgagggggccacggcttctaggtgaagaccaaaaccagcccgctcaagtccctcggccaaaacatcaaacaacatacctctttgcccacgcaatacgcgaccaattgcagaccgatccaaaccagtacgctgtgcaagctcataggcattccaaccagtctgcgacatcacttcattcagcacagccgcacacgaattaacagggcaaccagataccacaccgtgatgcacgacatcgcactgttctaacgctcgatgctctacagcgcgccgctctgatacgtcatcgttgcccgccgcgttctcatcattgagagtttcactcatcgaagtcaccttgcctcggccgatttcccggtcatttcatcaaaccgcaatcatcatatcccacaatcccatgacgatacgattcgtcatatcccacaattcagagacggtatgattcgtatcgcatcagttcacacgattcttcaacgattgctccgcaaacgattgctctgcacgcatcacggcattctatcggcacactattcctcccaatcagcccaacgcaacatcacacgcaacatcacacgcaacacccctcacgcaacacccctcacgcaacac

SEQ ID NO: 1291 - DNA, 4886 bp, Unknown
  R157_18m  MAG No. k141_6012
cgcgcaacgccaacgacgcatcgacaagccactgtatggcactctcaaaatccttgccacgtccaccagctcgcaccacgccgtatacgaacttcttgttctctttcgccaactgggaaggaattgaatcccatacctgattgagacgaagcgtggtgacggcgggactatcacgcatatcaatatgtttggagaaattgtcacgataatcggagaccagactattctgcaatttacgaaccgccgtgaagtcaggattcggcagagtactggcgaacgcttcaacgatctccggcatgcctcctgtatacatgaaataccgcagccaagtcatgaccctgtcatgcattacgttaattagcggaaaatccttgggctcaagcatttcggccaaggcatactgtttgcacgcatacaggaattcaacaaaagacataggatacagcttgagtctactgaccttgccaaccgggaatgaaaacccaggatgcatggcgatgcccagcgccgatccagtggccaagacgtcatactccggggcgacttcattgaacatcttcagcgaagtcatcgccctcggcacctcctgtacctcatcgaaaatgacgagcgtatcctcgggagtgatcttagttccggactcgatcgacagtgcgggaatcagccgttccacactcagatccgcatcaaacaacatacgcatgttggcattgtcgaaaaatgcgacacaacagcaatacgtaaggtacttgacaatctttgatggagtcgtatactcatatctgtcaggtacttgacataattactgaagaggatgaaaaagacacacgaccagcgacgcttcgctcgcttccttattaaaggagaccggcatgaacatcacacatgacatgagcaacgacctcaccgaatacgacccggaatcccgtcaagtagacggaccgaaccccatcgaaaaccgcatcagctcctccgcggcccgtgttcccgacatcatcagctgcacttccggcatcaccgtccaaggccgccaactccactcgttcgcgttcaccacggacgcggccatcatccgcaacaccaatgccgacgccattctcgccgtatatccgttcaccggcgaaccagtcatcacccaggccctactcaccgtggcccaggccccgctgttcgtcggcgtgggcggtggcaccaccaccggcccgcgcgtcatccaactcgccatgatggccgagatgcagggtgcggcgggcgtagtgctcaacgcgccggcgccaccctccacggtgtacgacgtggcgcgcatcacgaacatcccggtcatcgccacggtcctgacctgcgatgacgaattggacgagaaaatcgaggccggcgcctccatcatcaacgtggcggccggccgcaggacacctgacgtggtccagcagatcaggcagcgtcacccctccatcccgctgctcgccagcggcggttcgaccgacgagtccatggccgaaaccatcgtggccggcgcgaacgcgctgacctggaccccgccgaacgcgcaggagatgcagcgctcgatgatgatgcgctatcgcggcgaatccaccggcgacaacatgcagcactgacgtaaggattccgaacatgagcagtaccagcaacaacgccgccgtaaccggaaacgacgcggtcgacaacgtaatggccacgagtcaatcggcggagaacggcacaagccacaacaccgccgacggcgatatcaagaacgatgttctcagcagtttcatcagcattggccgcatcatggcgtatcgcgcgatacacagacggctcgtctcccccggcgccaaatcgccgcgcggcgaacatgctttcgacccgcgccgcggccaaggccgcgtcttggccacgctcagggaatccgaccagaccagccagaaggacttggccgcgatgttcggcatgagccgccaggccatggccgaactgttgaagaaactggaggccagcggtcacatcagccgccgtccatccaggcgggacagccgcgtcatgatggtcagcctcaccaaccagggccgcaaggccgccgatctgctgggcaaagcgcccgaccagacctcctccatgctggactgtctcaatgaaaccgagctacaaaccctacacggctacctgcagcgcatcatcgacacctcctccgacgacctaccggcctcgaccgccgaggatgtcaaaaagtgtgagctgcttatcgaacacctcaagcgcaggcgaatgccggccgaccgcgcatagtttgcgaacagcccgcacgacttgtggccgcataagcatgcggccgcacaacagtccagccgcacagtcatccagccgcccctacaaacacgcccgattcaccatttgcacgacatcttgcaccaaaccctactttgaaatgcggtattttgcgccaaaaccccattttgaaatgcggcattctgcacatacaaggcagaaaatgctactcccataagggattcggaaaggaactgccatgcttgagcgcaagatctcggacgatctgttggaatggaagctgatcggcaccggcaaagcactgctgctgaccggtgcctgccaaatcggcaagagctacgcggtacgcgagttcgccaaacacgaatacgctcattaccttgaaatcaacctgtacgagaacaagcaggcggcccgcgcgctcgcatcggcgaatgacgcgcaggagttcatcagccgacttaccttgttctcaccttcaacgctcactcccggcggtacattgattttcatcgacgaggtgcaagaggcaccggatgtaatgaccacgtcaagtttgatgtaccggcgtcgcaattcgacgatttgacgtttcaccacatgtcgctgattgcgaaaaacagcaagtcgtgattcgagcgtggcatcaccttgcttagtcatatcaacaaaatccttgatctctgcgagactcatgcccgtggatttcagacattcaatgagatcaagcaattcaagatcgccgtcatcgaagcatctccgtccgaaaccagttcaagcgataccgggcaaaagaccttggccgtcatagtagcgcaatgtatgttcggacagcccagtctttcgcgacacctgaccgatggaatatcccatgccaactcctttccctgcagtcgagccagtgtgagtccagccatattcacggatgtcctatgcggaacggacactcttcgactgcctgaaccttgcagcccaaacatgcatcaatcagcacaaatcacagacagtgggccatatacaacggcagcttgatgcgttctccatccacttcgagttggcggggatgcagaacgtattccttgcccaatcgttgggcataccttttgcggaatttgtcgagcgaagatacgccgtatcgtttcgtggatttcacttcaatcgggctgatgcgaggcttcatcgcggcattatcgtattcccgaacgatgaggaagtctatttccatggttttcgtggcatccgccctatccgagcgcgagaagaaatacagtttgcgcccattcgcccggaattgctgagccaccgcattctccaccagcatcccttcgttgagcgaaagcttatcgaacagaatatcccggtacacatcatccggcgttgtctctcgatcggcaaacgcctgcgacaccagcaaaccggtatccgccatatagcatttgaatgaatcgttatcttcgtacaatcccagccccaccaaagggtcagtcgaattacggcacaggttcaccaagcgggcgtcttccaaccagaagaacgccgaatcgtattcacgagatcgagcccccttatcgaccgatgccagagtgaatcgtttctcatgcttggacagctgccctggaatctgagcgaaaatgccccgcacgcggccggcatcgccattggcgaacttgccgatatcatcactgtacagctgcaggatgccacgcttgatcaaatccacctcgccaaaatcgcgctgctcgacataatcggcaaccgcctgcggcataccgcccaccagcagatattcgtgccacagcctcatcgctcgtttgtgcagcgcatcgggcaacgggaccagacgctcgaacgatttgcgaatcgtttcagcaagcagctcctcccccatggcccagcagaactcctcaaaatcgagtggccccatgtccattttccgttcctcggaggggatgacgatattcgccacattcctcttgatggagatcagcgaaccagtttccacatagtcataccggccatccgcaaccagatatttgatgagctccctcaccgccggataccgctgcacctcgtcgaaaataatcaacgattcacgctcgtacagtcgcttgcggtaatacgcagacaacagcatgaaaaatgtgtcaaagtcatcacgctggttttcgaagatgtcgcgaacgtcgcgcggcaaacgcgcgaaatcgatgagaatatatgacttgtactgaatgcggccgaattcctcgacaatggtgcttttgcccacacggcgagcgccttcgatgagaagagcctcacgcccacccgctttttgtttccatgcgatcagcttatccagcatcttgcgcttcaacatgagcaatcacctcattacacgaaaacaacagtataggcatatgctattctacacgaaaacagaagtatagagatggccgattctacacgaaaacaacggtatggaaacatgcaccgaaccggctcacccccaatctctcccccatcacaccggcggcctgttcgattgtgcggttttgtgcgaatggctcacacggttcttagtgagaaccgttctctgcgcacctgaccctagaaccgga

SEQ ID NO: 1292 - DNA, 10576 bp, Unknown
  R157_18m  MAG No. k141_6219
gaaggggtcgcgcatcccgatgcgcgtgccgatcgccgacaggcccaaatgcgtggactcgcgccgcgagttcggccattatgagtccgacacggtcgtcggcgcctccccgtcgaggcggtgcatcgacacgcaggtcgaacgcaggagccgcaggctgttcgccaggttcgtccccgacaagagcgcgctggccacggcgcgcgccgaatacgactggcccggcgtcgccatcgcagcctagatgccgaggtcgtccttgtgcttgttcatgtcctcgacgaccttcttcaaggtgtcgtagtccttgatgtcggcgtcggactggatgactgcgtagtccttcttggcgtattcgttgacgatcttcttgttgtagatgataccgtaccactcgaccgcatacggcatggtgtaggcgtcgtcgccgaccttatgcgagttggtcttgccttcgtcgttgagcagcttgtacacgtcagtgtcctgcaacggttcgagatacctctggtacttggcgaactcgtcgtagccagcgatgatgaacatggtcggagcttcggacttggccagttcggaggtcagcgtggactcatagctgccggaggacgcgatctggatgtcgacctgcacgccggtctgattggtgtagtcctgcgcaagctgctgcagctgatcgaccacctcaggcttgccgttcaagaaataaacatgacccttattcggatcagccgcagtgcttccgcaggcggcgaggctgaacatggtgacggccgcaacgcccgcggcgaggattctcttcatgttcatggtgctcatcggcgttatgctccttccgcatataccgaacatctgtgtccggcgatctgttcttctcaaagggggccgctgaactatgctcagcgactcgttaccgtaagcgttgatgacaacgacatcacgcgatgcaattatgtacataatcggcgtgttgtcgggggattacttgatatttcaagcgttttctcacaccctctgattgcagctctggtgaatacgttgccaaggtactgtgcatgaatcggcaaacaggcgattccccgtgggccacgcccgttacaatgacgtgtatccatccgcccgcccctcaaggagatgaatcatgggctttatgtctccggattccgcattcatgcgcggactgagcaataccgtagatgccatctggatcaacctgctcatgatcatcaccagcattccactgatcaccatcggcgcggcgctcacggctggacacgatgccgcgcggcgcgtggcaatcgcggaaggtcacgtcaccgcgaactatttcaaggcattccgcgcgaatttcctcaaggctacgggactatggattattttcggcgccacgggagctggtctcgtgtattcatgggtggtgttgcagatcacgccgctgctcatccccaaaatcggtctgaccttggtgtggatcatcggattcgaatgggtgtgggcgttgcaggcgcgcttcgagaactcctttggcggagtactggcgaacgcgttcatcttcggcgtctcgcgcattggtgccacattggtattggtcacgatcgacgctatcttcctcggcctgctcgtcgcctcatgggtctacatgccgcagggcctgttcctgctgatagtcctgggctacggatcggtgctcatgctgcatgtgccaattctcgagcgcgtattcgccgcatgcgtcgccctgtccggcacgtccgacgcatccgccccgtccgacacgtccagcaccacgtccccgcaaaggcaatagcacatgggcaaagtcacactgcaggacgtcgccaaggcagctggagtctccaccgccaccgcatcatgggcgatcaacgacaacaagaacgtacgtattcccgaaaacacgcgccgcaaagtccgcaacgtcgccgaacgtctcggataccattccaacgcgtttgcccgaagtcttgcgcgcggcaaatccgatctaatcggtttcatcagcgacggtgtcgccacatctccattcgccggacgagtcattcaaggcgcgcaggacgaagcatggcgcaacggcaaaatcctgttggtggtcgacaccgacggcaatgcgaccattgagcgaaaggccttttcgttcatgcttgagcatcaggttgagggaatcatctattcaagctgggtgcatcgctccattacgccacctgacgagctggaacgcactatgtccgtattggtgaactgctttgacgaatcgggtcgattccccgctgtggtccccaatgaagtgcagggcggacagtccgctaccgagttgttgctgcaggcggggcatcgtcatgttgcattcgtgaacgagccaaccgcatcgcctgcgtcggtcggccgcctcgaagggtatcgtcaggcacttgccgcacacggattggcatacgaccccgcaatggtcgttgacgcaacagccgaccaggaaggcggttacggagcggccgacgcagtgctgaagaccggcgccacggcagtgttctgtcataacgaccgcactgccatgggtttgtacgacgcgcttcgcgagcgaggcttgcgtgtgcccgacgatttgtcgattgtcggattcgataaccaggaggtcatttccgcacacctgcatcctgcactcacgacggtcggactgccgcaatatgaccttggtgtattaggcgtacgctcgttgctgacgctgaataagacgcccgacgccgactacgacagcagcgaaaccgatcgcatcgaagatagcaaaacgcaccgcttcgagccattgctggtgggctgtccttcagtgatgcgcgattctatccgcgcctatcgcgggtagtcggcagcgcgagacacacgccattcctagaggtgtgcgtcatggcttgacaggtatagtttgaatgtttatcatattgcttaatcgcttaaatgcttaagcgattaaatcaaatcaggacaatacaataaagcatgtttctaatgcgcggagctgcgcagtagaaatagccaggataccgttcgccgcgaaactgcacacaagtccggtagcccgaccacagagcaattggcgagcggtcgtcaaccgaccatataggagtgataatcatgccaaagctgtactaccaattccctggcacgtggttcggcgattgcatgccgttcggcaagggcaacgagttctttctgtatcaccagcgagacaatcgcaatccggaaccattcggcgaaccgttcggctgggatctggccacaacctctgatttcgtgcattacaaggattgcggtgtagccgtgccgcgcggcagggacgacgagcaggatcagttcatattcgcgggatcggtgtttgaaggggaagggcaataccatatcttctacaccgggtacaaccgcgattacccccagcgggacaagtcggcgcaggtgctgatgcacgcagtcagcgatgatttgtaccactggacgaaaacccagaacgccatcaccttcactccgcaagaaggctacgatccagacgattggcgcgacccgtgggtcattcgcgacgacgaacatgaccagtatctgctaatcctcggagcccgtaagatcggcccgaaaacgcagcagaccggccgcacggtgaagttcacgtctaaagacctcaagaactggacgttcgaaggtgacttctgggctccgaacctatacacgatgcatgagatgcctgatctgttcaagatgggcgagtggtggtatcacatcgttacggaatacagcgatcggcacaagatggtgtatcgcatggccaagagtctagaaggcccgtggatcgcacccgatgatgacgcgtttgacggcagcgcctattatgccggacggaccttcgaactaggtggacggcgaatcctcttcggctgggttgccaccaaggaagactgcgatgacgtaaagaacttcgaatgggctggcaccttcgtccctcacgaggtctaccagcgtaccgacggcacacttggcgtgcgcattcccgacacggtctgggatgcgttcaacgaacgcgagcaaatcgtgacgaatgcggtaatcgacggtactgacgctcgccgtaacgccgtgctggccgagggctgcggagacctgtattcgtttgaagcggacgtcatgttcagcgagggaacgcgatccttcggtctccgcgtctaccgcgatgaggcaagcgagcgtggctatcagttcatcttcccgattggtgagcatcgctacgtattcgaaggcagcccgaacttcccgtggttcaactgtatgaatatcgggctagagcggccaatcgaactggttgccgggcgtgaatatcacattcagctcatcgtggacgacaccatcgccactctgtacgtcaatggcgtcgcactcaacgcgcgtatgtaccagcacccaggcgacgcattaagcatgttcgtcaccgacggcacgctcaccgtcacgaatgcgaccatcagtcgtggactcaaggaggtgtgagccacagtcaccaccgtatgtttgcgaaccgatacgttcgcctgtgattcatccgtacaccatatgaacgccgccgggcgcaaccggcggcgggcctccaacctacgcgcggccagcgggcacgacttgtgcaatgacgatgtccgctcccccgccctgtattgcaacaacaacgaagttatggcattccataggggggaaaccatgaagaagattatcaaagcaacggccgcaatggcagcggcaggtctgtctctgggattgatcgccgggtgcggttccggcgactccaatgcagataagggtcatgtctacttcctgagcatgaaagtagagcaggctgatcagattcgtgagcttgcagataatttcaccgcagagaccggcatcgaagtagatgtcgccacagcatcgtctgacacatacgaacagacgctgaagagcgagctcgccaaatccgaagcgccaaccgtgttcgatgtggacaacaacgacttcctcaattggaccgattactacgcagacatgtccgatacgaacatgtacaaggacctcaccaagcaggactacgccatgaagaatggcgatgaaattggcgctgtgccttacgtgatggagcggtacggcatcatctacaacaaggccttgctgcagaagtattttgatgccaactggtcaagcgtgaaggacgttgagacgatcaacaacttcgatacgctgaggaccgtggctgacgagattcaggcgcataaagatgacctcggtatcaagggcgcgtttacgtcagcgggcttcgatacgagttcgatcaagcggttcggcgatcagctcgcccacgtgccggtgtattacgagtatcgcgatcaaggtgtgacgcaacttccggccacaatctccgacacatacattccgaatttcaagaagatcttcgacctgtatatcactgattcgaccacgccggccagccagctttcgagcgccaccatggatgacgccaattcggaattcgcgcttggcgaggccgtgttcctgcagaacggcacgtggggttactcgcagatcaaggatcagaacgtacctgacgaggacatgggcgtgctgccgatttatattggcactgaaggcgaggagaaggccggcctgacagtcagcttcctgtacgttgcgatgaacaaggacgctcccgaaaaggatcagcaggcgacccgtcagttcttggactacatcctgcaaaacgatgatgcacgcaagttggtcaccgacgagatgggattcgagacaccgttcaagtcatatgcagaaaacggatacaagaccacgaatccaattcatcgcgccaacgacgcctacgcagtcaagggcaattacgatatcgtgatctatcctttgccgagcacacaatgggtgatgagtctcggcaatgcgatgctcgagtacgcacagggcaccggcgactgggatacggtcgcgtctgccttcgtggatggttgggcgtcggaatacaagaccacgcactgattcgaagcgaccggcattgaagtggtaatcgggatttagcgtcctgattatcactcgggaatacgccgcttagcatgctggtgtgctcgtgagcacgttgcttacgagcacaccagcatattccgtatgggggtatgggttaccgccgctgcgcaccgtgacttgcaagtcctctcagtgacggaaattctagaggaaaatggctacgtcgagaatttacgtcactgagagcccgccagcgcacgaaattctcgcgcaatgggattattccgagaatttgcgtcgctaagaacccagagcatccgattattgcggttctttgcgctcagcagccaccagcgcaataggcagctagcgttctgcgtcagcagttcgttgacaaattcgctacccctcagccccgcttcgcgggccggctctcctgacaaggagagccggaaacgatatcaacgaactactggcgcaggacgcgccggtatccgaacagaacgtcagagcccgcgcagcagcggctcggcgatggcctggatcacggattcgggcatgtgggaatcgtcgaactcgtggccgggatagctgctcttggtgctttccagcgtatgcagcgcattgagcgcacgagcgccgtcagccttgatgagccggtaggcacgttccttggccagatagtcgatctgtgcgttgtacagcacagtgaacgcatcctcaatcgccggatcgtcggcgtaccgcagtccgttcgtcgcgtgaatcgacacggcctgcgtgaccggcgcatccgcaaccgtgacggacaggctcagcgcctcggtgtcgtacgacacatccggcacgacctcagcgccaccaaccgtcacaatcaactcgtcaacggcgaccggtgccacaccggtgaacgtcaccgtccacgtgcgctgctgcggcaccgccgccacattgccggccaccggggcaatctcgaacgcgttcaccgcaccatcggcctcccagcggaagtccatatgcgtcaccgcgagcgcggaatccgacggctgcgcctggttggtgccatcgtcctccttgaggtcgaacgcgccgttcgcgcccgggaacacggcaacctccagatagcgcggattatccacggagttgaggctgccgttgagctcctcgtccagcggctgcaacggcacgatgccgccggccttcgcgaagaccggaatgccatcgagcccacgccacgcctcgaacttgcggccttcggcagagcccgcctcgtaccgccgtccggtgaagaagtcgaaccatgtaccctgcggcagccacacgtcggttttcgccagctgcgcgttgcggtcggacggcgtcacgatcggcgcgacgatcagctcggtgccgaagcggaactcatgctccaccccgtacgcggtgacattttccggcgactgccagtacatcggctcgaccagcggacggccctcggcggcggcacgccagttcatcgtatacagatacggcagcagttcgtggcgcagacgcagcgcgtcatccatcgagcattccgtctcgggacggaagttccacggttccttgccgttaaacggcgaatcggtcgaatgcagacggttgatcgggctgaacgcgccaagctgataccagcgggcctccagctcctcgtcgcggtagccgaacatgtggccgccgatatcatgactccaccagccgtagccgatgttcgacgcagtagccgtgaagtacggctggaacttcagcgacttccacgtcacgactgtgtcgccggagaacccgaccggataacggtgcgagcccgggccggcatatcgcgagaacgtgagcggccagcgcccgtcacgggcggagtcgagataatgcatgtggttcagcatccacagcgggtcaagacccttctggcgggtcacgccgccctgctgccagtccagccaccagaaatcggtgcccagggcttcgagcccatggtgcaggtcgaagtacgcttccatgaatcgcggactggtcagatcgaactcgaccggctcgccgcccgccgggtcaatgcccatgtgttcggcgactttggcatagccgtcttcaaatgctcgaacgccgtcgcgcgggtggacgttgagcgtcgtgcgcagtccatgctcgtgcagaatgcgctggaatcgctcggggtcggggaagaattcacggttccacgtgtagccggtccatccggatccatacttcgggtcgacattgtcgaccagatgccagtccatgtcgatgacggccgtggtgaacggcaggccttcctgctcgaagcgatcgacaagctccagatactcggcttccgtgtactggtggtagcggctccaccagttgccgagcgcgaagcgcggcagtagcggcgtcgggccggtgagcttgtagaagtcctgcacggcttcgatgtaccgatggccgtatccgaagacatacagatccttgccggggtgctcgcgcggaatgacccacatgccgaatgggttggcctcgcccttgacggtggcggcttcggcgccttcgacgatcacgtttgatgcggaatcgtcgagcacggcccagccgtcgcgggagatcacgccgagccccagttcgatctcaccgtcgaccgcgtccagcgtacgcgcggtgccgcgcaggttgccgtcctgggcttcgccgtagtgccacgtattcatctgggaattcgccacgcctttgacgacgatgctcagaccttccttactgaacggctgcatgtcgtaggtgaggcgcagcgccggcgtatcgatgatgagcagcccgtcgcgctcggtcttcgtgaacttcggcgggtttgaagtgccgtccgcacggttcgcgccatccgcaccgttcgcgtcatccgacaaccaatcgcgattgacgatcatttgggtggcgtggtcttcgaacttgccgttgtcctgccattcgaggcggacgagcgattcggtgatgatgccgatgcgccaacggtcgccttggatgaccgcggccgggttcatgcccggatgggtggccagctgtggaaaggtggacattggtgtgctcctttgctcgtgttattttccacgttgttgttagtgtatccatgaaccatcgccgccgtgcgggcctcagacatcgcgatacgctccgtcatggtccttttcatgcggatatactgttaccgacggcgacacgcatcgggggcattcatgcggcgatggccgtggtgtcgcgcagcatcagctgcggggccacggtttcaaatcgcggttcggacaggggtccttccatcgcggcaagcgctttgcgcgcggcaatggctcctaggtcattcgggcgttgccgcaatgtggtcaggcccattttggcgctgaaggggatatcgtcgaagccaattactgacaggtcacgcggcacgcgcagcccatattgcggcaaccggtacagcaccggaatcgccatttcgtcggtctggaagcagactgcggtgggcgtgggcgacatggtggtcagctgggcgagcgccgcgccggtcgtatcctcatggccggagcagcgaatctgctcaagcgtgacgtcaggatgggccgcagcggcatcgataaggccttgcagtcggttttccgcactgaagcgcagttgactggtgtcatccggcgcgccgtacacgtaggcgatgttgcgatggccgagcgaaatcaggtgttcgaaagccgtatgcatgcccagcttgtcgtcaatgcacaccgcgccgtcaagtccgatggtggacggggtgttgatgccgatgagcggcacgttcacgtctttcagacgactgacctcatccgggtcgatgtcgaacgagcagacgatgaccgcgtccacattgcgacgaaccggcagttcagtgaagaaatcatgccgttcccgcgcgttcgacaggccgtatacggagatgtcgtatccggccgggccgaatacggaattgagcccgcggaagacattggcattgaaccagacggcaatggtatcggcatgcaggagtgcgatgcggaacgattgtccggatttcaacgcggccgccgaccgggagacctggaagtcgagtttgcgtgcggcggcgaggactcggtcacgtgtcttcggcagcacaagattcggcttggcgaaggttcgtgacaccgttgacacggatacgccagcctctttcgctaccgcttgaatgctcgcttttgccatggcaacctcgctcatcaacagtggataacaatcccgctcaaaagacaacgttatcatacctaagcgagcaacatgcacgccacgctgtctatttagaagtgcaacgcccctgttcgtcggctaattctagcagttcgtcggtgaatgccccgggccgaacccgggttctagatagaagcgcaacacccgctctatggttggaagtgttcaggttctaactggagaaggtgttgcgcccatgaggaaagtgtattcccacttgtcggcacaggaacgcatccggatc

SEQ ID NO: 1293 - DNA, 32771 bp, Unknown
  R157_18m  MAG No. k141_6283
cgaccctcagcagctcgagttgctgagggtcgctcgtattggccgcgcacagggcctgaagggcgaagtcaccgtgcgcctgtacaccgatgatcccgagtggcgcttcgagccggactccgtgctctacagccaggatggcgagaccgagtacatcgtcgagggctcgcgcacgttcaaggatcgttggattctcaagcttgagggcgtcgacgaccgcaatgccgccgaggccctaaacggtgtcgaactctacggcgaggtcgacgacgcagaagatatgctcgaagccgacgaatggtatcccaaggatcttattggccttgaggcccgtctagtcgagggcaacggtctgggactgcccgccggccaagtggtcggcaaagtggtggatgtggtcgactcccccgctcagtcactgctcaagattcgtttgaccgagccggtggtaaccggccagaattccaagggcgaggatgtggtcgagaagaccgcgttggtgccgttcgtggaggccttggtccccgacatcgatctggaggagcaatacctcacgctcgatccgcccggcggtctgattcccgggctgtaaacagtctttcaaaccaataccgagttccacactcaatttattccatcgcaaagggcggtctttctgagattagtctcagaaagaccgccctttgattgctccttaacgtttataccgcgtaagatggctgagcctcacagataaccaaataggatgccgaagcgatcaagacccgtaccgatcggctggtatccgttgcgctagaactactgcgactgcaataaactataaaaaatgtgtgatgcttacacatttatgatatgataaatgtgtaagcgtcacacatttatcataggatattcgtcatgaagctccagcgaaaagcactgaaaacgctcaagcagtggaagaccacacctgaccataagcctctcctgatccgtggcgcacggcagacaggcaagacatggcttgtcaacgagttcgcgaatggacaatacgacaacatcgtctcggttgatttcatgcagcggccatccctatccgggatattcgagcaggatcttgacccgcaacgaataatccgtcagctcgaactcgccgccaatcaacggatactccccggcagaacactgctcttctttgacgagatacaggaaagtccgctcgcgttgacctctctcaaatacttcaccgagcaggcacctgactatgacatcatcgccaccggctcctacatgggaatatccaagcacggcaaaacctcttttcctgtaggaaaagtcaccatgatgaacctacatccgctctccttcgccgagtatctggacagcatcggacaagacatgatcgccgacaccatacgtgaaggccggttcgaggacattccacaagctctcgaacctcagatgaatgacctactcaaaacatatatgtgggtcggcggcatgccagcagcattaagcgctcacctggataacgggattccgcaggatgtgcgaactgtccaacaagatattctcaacgcctacgatcttgatttttccaagcatgccgcatatatgctgggcgagcgtatccggcttgtatggaacacactgccatcacaactcgccaaggagaaccgcaaattcgtttacggtgttgtcaggcaaggagcccgcgcccgcgaatatgaggaagcgctcacttggctgacggactacgggatcattaccaaagtcccccgcctcgatgctctgcatattcctctgcccggatatgagagtcttaacacgttcaagatctatctggaagacacgggcatactgggcgcactgtccggtctcgacgtgaatactctggtgaacaagtcgaagctcttttccgaattcaagggcgcgttcgtagaacaatacgtatgtcagcagctggtagctcaaggaatcagaccccgctattgggctaacccaaatcctcaaggaaatgcggaaatagatttcgtaatggaacagggagacgaggtttttcccatcgaagtgaagtcctcttccaatattcgtgcgagaagtctctcgtatgtctgcaacagatacgggctccacggtatccgtataggagaaataggctataggaagcaatcttggctgacgaacatcccactttggtgcgtggatgggctgggcgaatatctcaaacgtcagatcgaaaagagcagggaaaatccagcgaccatctgattctttttctgttttttcgggtatgtgaaataggtggttgagttttggtgattctcatacatcaattcggacgaggatgccatcgcatatctcaatggcgcactcgaagaggatgatcccgcatttgtgcaagatgcgttcggtgtggtcgcacgcgcacgaggcatgaccaatgtggcccgaaaatccggcctcggccgcgaatccttatataaggcgcttcgcccgaattcgcagccctcgttcaacaccatcatgcgagtcgcagacgcacttgacgcagaaccctattccctgccgaagcgtaatcgttcacccgcgcgcggcggcggtgacgcgggtcatgaaacggtcgaggaattccggcacgttgacgcccaatgcgacttgggtgtgtttgtcggggtcctggagccgtgaacgatcgccgatggtacggcctcggaacgggccctcgagatcgacttgcaagttgaacccgaaggtcgtgaccagcgatgggtcgagcgcggcggccacggccagcgggtcgtgcagtccacatccgcgaatctccggctggttcttcaggtagaagtcgatgtagtagtcggtcatggtgacgaggaagtcgccggccggcgtccccagagacgcccattcatgggctttctcacgggtgagcgcggtctggtgggtcacgtcgaggccgatcatggtggtgcgtgcgccacacttgaacagatagtctgctgactctgggtcttgggagatgttcgcttcggcggccgggcttacattgccgggcagcgtcaacgcaccgcccatcaacgtcacgttcacgccggaatccttcaggtccggagcgttgcggaatacggtggccatggtggtcatcgcgcccgtaggtacgatggtcaggtccgggccgtattcgcgcgcggcggcgatgatgaaatcgaccgccgagcctggtgcttccggagcgcgcggggagtcggggatgattgcgccgccgatgccgttgggatggtggaccgccaccgagccgggagttggtgcccacgaagcgtccgtttgccagccgtccgcgccgccgttctgccagcgcgcgtaggcctgggtccgctcgtctggtgtggtgccacgcattttcggcaatgttgccggggcgatgggatggtcgactccgggatagaccggaacgtcgtcacggccgaacaagtgcaccaccgccagcgcgttgcgcgcggccagcggcaccgcgacattgccgtaggtggccgtgataccgatcagatcgatctcgtcggcactgcctagggcatatgcgatggcgagcgcgtcatcgatgccggtatcgaggtcgaggatgagttttttgcgcacaattatctccttgcgggactacccgggactactccagcgactacccctcagtctcgctacgcgagacagctcccctgacaaggggagctgagaaagttcagccgagcttggcgagttcttccggggtgagttcgagctggtcggccttgagggagtcaaggatggtctcggggtggtgggcgccgggaatcacgaacatgtggtcgcccttggcgagctcccatgccagcacgacctgctggtagctcacgccgtgggccgccgcgacctcgcggaacgggtcgaacttggtctcatcataggggtgacggtagccgccgagcgggctccagcacacgaaggccagaccgaccttggcgcagtagtcgagcgtgtcctgggtctccaggtgaatcggcgagtactggttctgcacggccacgagcttgtcgcccagaatgccgcgcgcaatgtcgatttgctcgatggaggcgttggagataccggcctcctgcgccacgccctcgtccaccagctgcttgatggcttcgacggactcgttgtacggcaccttcgggtccgggcggtggaagtacagcaggtcgatggtgtccacgccgagcgccagtgcgctctccttgccgcgccgaatcaggttctccgggcgaccgtccacatcccacgtggggcggccgtcggtgaagttgcggaagtggcccaccttggtggccaccagcacctcgtccttcggccccttccaggtctcaagggcctcgcgcaccagcttttcaccggtctgctcctcgccgccggagcagtagtaggcccaagcggtgtcgatgtggcggcagccggcgtccagcgaggcatgcagggtttcgatgccgacctcatggccgcggttgttttcgatggtcagcggcatttcgccgtggccgatggcggtggtggagaacggtccgaggttacggaacaatgccatggtgattcccttcgtgaaacttatggaaactcgatatccacaatcaagcctaagcatcccgttggatttcacactctcggcctgcccgcacaatcaatctatgaaatttccgcaacttcacggaatagaaaacgcaacttactcatacccagttcagcgaaaacgaggagccggaaccccatggattccggctgttccgctgatagatcagtggcctcgtctgagactcattcccagcaataccagtgcggcaatgatgatggccgtcgaccaccactgtccaacttgattggccagggcgatcaacaggccggtcatcagaccttcccggtattgccggtcttgtctcggacggttgtcatggtcgttgcctaccatgagaacctcctcttgaattttgagacgtcattatgccggttgacacaacgacaccgcgccaaagtggcacgctagtagaccttggtttggtcagtccagtgtactggtgagcttcggtggaggctggtatgctgtgttgtagcagaaaggtcacgctagcttcgaggcaatcttctcggcggcgccacagactttcgccccgttggacctgactgttgaggtctcctcacctcgattttgagagaaaggcccgatgtcttatgacaccgggccttttactttcaaagctatagggactttcagaagcacatcgcttaccgcccaccgaacgaaccgccgccggaaccgccgctgctaccgccaaagccgcctgagccaccggatggcgaggccgcattgattgtcgcggtgatatccgcaaatccgtacgacaattgcgtgccgaggtcagagaacccagccgcgaacgacgtgcccccgaacgctggcaccgctccggccaatccgctgtcagccacggaatccgcgaacgccgagccattgtagaaacgcaacccataccagtcgtacggacgataattccaatagaacaccgtgtcggaggcattggcatcaagccattccggatcggatacttgcggataggccatggccagctcccgcatcacccggtcggatatgccaaatgcggcagcgtagaccatataccaatcccacagcgtcgaatccgcgactccacggtacttgaagttcgagaagccttgcatatatcgtttgagacccaagcattgcccggccatctgctgaccatgatcggtcagcacgtaggaattccccatcaggaagcagaatatgccgaccgtcatcaggggaatgccgatgagggccccggccaccagatatccggccaaaccgttgatgaatatgctggcgccaccgatcagcacggtgattgccccgggaatgagccatccgttctcggttttcggcgcgatatccgccgccgcgaattcggtcttgcacgcattggtgaacttttcgagttccttgtagccgtctttccaatccttgcaggcgtctttgatgtcatccatgtcaaatgccgtacgacctacgcgctcggaaatcacggtgagcagatagagcaatgcccgctcagaagcactgagatcgggctggtgtgcatcggacacgctagatgcggcagatccagatccgccagatccagatccatcaaatacggattcgacgaatactgattcatcaaatccctcagatacgccgtaatcggactgccacagcatcacaatcgtgctattggtacgcgcattattgcgcttgtatggatcggacccgattcgctgactgagctccaccggagaaacttgtttcagatccacgccgatatacaggtccgccgaaccggggaacacagcaatgactttcttcacggccagagaaagcaaggtcgcgacgagttggcgctcgggaatgtcgggtttgtcgccggaagtcacgatatcgatgagtttggccgccgatgcggggctcagctcggggcgatcgcgccaatattcgatggagccacggtaacgtgaacgtccggaggagcgtaaggctgcaacaacaccaataatcccgaatatcaggccggccgatatggtggtcatccagttgttcaggcgccttgtggcgcgttggcgttccagattgcgccagaaccgttcgtcgtcggcttcgtcttccttcaactcctgcagatgatcgtcggtctcgacacgagccatatctcccgccttggccgcgtcgaaagcggccaccacgtctaggtactcgccgcttttcacatcatttacggtgaaggtgaagctgccatccttggttcggccggtttccgaggtttgttcagtgtgcagccaagtccacgagttgctcgcggtcacacctttggggaaatgcaccgtgccggtgaccgtaccaatcgacacctgattgttctcaccgaatggctcccattggaaggtcgccacgtccttccacttggtggccacgtcatgcatggtgaagctcaccgtgaacttgatgctgttggtttttacggtggtgggaatattccagccgatctccacggtttggtcttgccatcgtcatccttgcgtttgcgcaacttgatatcgatatgctccgtgctttaagatcgccgtcggcggtggcggtcacatcgtaatcaagcgtgcggtagctcaggtcggcaccatctgtgccgagaatcaaggcaccggcacagagtgcggcaagaatcagcgcaccgacaaggcttaagcccagggcacgaacaatgcgtttcgacataggcatgcgctaccgcccgccgaacgagccgccacctgagccaccgaacgagccgccgaaaccggagccgccgcccgaaccgaagctggagaaatcgccaccggaatcggcggatggtgctgccgcgctgatggtcgagctgatgtccgccagaccggagttcagctgcgagccgaggtcggagaatccgccggcaaacgacgtgcctccgtaagccggagctgggccgccaacgcctaggtccatctgcccggcagcatcgtggtcgaatggaccattatgacggtggctgtaccagccatacgggcggtagttccagtagaacaacgagttggaggcgttggcatccagccaagccgggtcgttgacctgaggatatgctttggccagttcacgcatcacgcgatcggaaatgccaaacgcggcggcgtagaccatataccaatcccacaaggccaaatcggcggtaccccggtcggtgaagttggagaagtcttccatataacgcttaaggcccagagtccggccggcgatatcctgcccttgatcagtgagcacggtcatcgcgccggccatcgagcagaacagtccgaccaggaatatcggcagcccgataagaccagccaccgggtatccgataaagctgttgaccagcagcgaaccaaatcccagcacggcggccaatacgccgggtaggatccattgccagcccacagagcgcgtggcacccagccgctggtattccatgctgcatgcaccggtgaatttgccgagctcaatatagccgtcttgccagttctggcaggtcgccttcatctggttcaggtcgaataccgggctgcccacgcgctgagaaatgacgatgagcaggttcagcagcgcatcttccgattcgctcaatcccaactgttgcgcgttgggtgcctcatcaatggcgagcggcagaatcacgatggtgctggtgatgcctgccgcatactgcttgccttggtcggcggcaatcatttggctcaagcccaccggcgtggcctggctcatgtcgatgccgcgatacatgtccgacggccccggataaatggcgatggccttcttgacggcgagcgacagcatggtggcggtcagctggcggtcttcatcggattggcgcgtcgacggatcgaccacgcgaatcagacgggctgcggaagccggactgatgccgggctggtcgcgccagtattcgacgctgccactgtattgcgcacgccggttgctggagatcacagcccagataccccacgcgcacaacgcgatgccgagcacgatgctgacaatccagaacacgagacgagctctggcagcgaatcgttgcttgtcgagccagcgctgctgttgcttatattcgtcctgtttcaggtccttgagatgattgccggttcccttgcgggcgatgcccttggctttggcggcatcgaacgccgcgaccacatcgaggtagtcgccattgtggatgttgtaggccgtgaacgtgtagctgccgtcgctgttgcgcttggtttccgaggtgcgctcggtgtgcagccatgtccatgaggttttgccggtgatgccgttggggaaatggacggtgccggtgaccgtgccgataggcacttggttcttcttgccgaacggctcccattggaaggaggccacgtctttccatttggtggccacatcgtgcatggtgaagcttacatcgaacttcatgctgtcggcctcggtggtgaccggaatattccagccgatctccacggttgtgtcatcttcggtggcggaggcgctgggcttgaggccatcggtaccgggcgtgtatgcctttggatggtcgctgccatcgctcacatcggcgacataccaatggttggcgtagtcgctgttccattccttgtcggaagagacgtcactgggcagcttgggctcgctctgttgtgcgtagtcgatgccgtcggtgacgttgcgcacgctgatatcgctgatatcagtcaaggtgccggagttcagcgtgtattgctggaacagctgcttccacggcttggtgttgtcgtcactgtcggtacgctcacgcatcttgacgtcgatatgctgcgtgaccttcaaatcaccgttcgcggtggcggtcacgtcatagtccagcgtgcggtagctgaggtcggccgaatcgccgaacgcggaagtcccgattatcgccaaggtgataactgccaacaccaccgtggcaacaatgctgatgattccggcgcgaatgaatcgtatccgcatatcttccctctcttaagacaatacgggcccggccggcggcttaccggacgggcctgaagcgggtcagaactggacctgtggcacctgacgggaagcgtcatcggcctcgaagtattgcgcctgctcaaagtggaacagaccggcgatgatgttcgtcggcacggtttcgatggcggtgttgagcttcaggaccacgtcgttgtagaactgacgggcgtaggcgatcttgttctccagttccttgagctggttctgcagatccatgaagttctggttggcttgcagctgcggatatgcctcagccgtggcttgcaggttgaacagggcgcgggacagctggttttcggcggcggcgcgctgagcagtggtcgtgctcgggttgctggccgcagccactacgccggcgcgggcggcggtcacctgagtgaagacttcagactcgtgggatgcgtaccccttgacggtattcaccaggttcgggatgaggtcggcgcgctgcttcaactgcacgtcgatttgcgcccaaccgttcttcacacggttcttcagcgtcaccaggttgttataggcgctgacgccccaaccaatcaagacaacgataataacgacaacgacaatgccgacgatcagaccagtactcacctatgctcctttgctggaccttgctgtgaccattcttccacactcgcaccgtaaacagaagattcatcacagagtattcatcgtgcggacttgtcttgtaccgctttacccgccgttctcccgtcgatcgaccgaagcgggaagtcgccgcccagtccgacaaagtattccagctcgctccgttgcgagaacgataatactcggcaatactcgcgttgaatatgcgaaagcccgccttgcggcgggctttgccgtttctcctacgcacaaatcattacgccgcgcgcaggaaacgatcagccgaagcgaccggagatgtagcgctcggcttcttcgttttgcgggttgttgaacatcgtgatggtgtccgcgaagtactcgaggtgaccgggctggcccactgccttcaggttgaagaaggcggtgtagtcggcgatacgggcggcctgctgcatgttgtgggtcacgatcacgatggtgtagtcgctcttgagctcgttgatcagatcctcgacagccaaggtcgaaatcgggtccaaggcggagcagggctcatccatgagcagcacctgcgggtggacggccacggcgcgggcgatgcacagacgctgctgctgaccaccggacaagccgatgccggggttgtcgagacggtccttgacctcttcccagaggttggcaccgcgcagagcccactcgaccagatcgtcggcgtcggacttggccaggtggtggttgttcaggcgcacgccggccagcacgttctcacggatggacatggtcgggaacgggttcgggcgctggaagaccatgccgacgtcgcggcgcacggccaccggatccacgtccttgtcgtacaggttcttgccttcgagcagcacctcgccctcgacgtgagcaccggggatgatctcgtgcatacggtccaaggtgcgcagcacggtggacttgccgcagccggacgggccgatgaaggcggtgaccttgttcggctcgatgttgatgttcacatcttccacggccagaaagtcgccgtaatagatgttctcgtggttgacgtcaatacgttgtcccatgatgtttccttatatttccttgtgttcttaaggcttaggcttagcgactggcttagcgctcggtcttgacggcgaagaccttcgccacgattcggccaatgaggttcagcagcagcacgatgacgatcagcacgagagccgcagcccacgcacgttccatcggaatcgtggtcacgcaggtggcgtcggcgttgggcgggcagttcgcgctgagtttcgagtactcctggtagacgaacaccggcagggtggtcatctggccggagaacaggttcacgttggtgctggagatgtagccggcggtcatcagcaacggtgcggtctcaccaatcacgcgggcgatggccagaatggcaccggagacgatgcccggcagagcggtgcgcagcacgatcttggtaatcgtgcgctgcttggtaacgcccagagccaaggaggcctcacgcaaatcgttcggcacgatcttcagcatttcctcgctggacttgaccacggtgggcagcatcagcagggagagagccacggagccttcgaaaccgttgatggtaccggggcccagcagaatcgtgaacatcgagaaggcgaacaggccggccacgatggacgggatgccgctcatcacgtcgacgagcagggagatcgtggtggcgagcttgccgcggttcgagtattcgaccaggtacacggcgcacatcaaaccgatcggaatggagataaccatagcgccagcggtgatttcgagagtaccgatgatggcgtgcagcacaccgccgtaaccaccggacggggtctggctaccaccgaccacaccggtcatgttgtagctcaggaagttcaggttcaggcgcttgatgccgttgacgatagtggtccacagcagggagatcagcgggatgcaggcgatcacaaacgccaccgcgatcagggcccacatgaagcggtccatgatattacggcgctggatggcggaacgggtcgggcggaaacgatcgaagtcgatttcgggcgtgccgtccatcggagtcttttcagtgttctcagcagcagtcatcacgcagtcgctttctcggtaagcttacgggcgatgaagttgaccacgaacgtgatcaggaacagaatcagaccggttccaatcagcgtggagacgcccagatcgttggcttcagggtactgtgcggcaatattcgcggcgatggtctggttctgcgaggcctgcagcagcttgatggagtagttgaggcccggggacaggatcatcaacacggccatcgtctcaccaagcgcgcggccaagagccagcatggaggcggacacaataccggacttgccgaaaggcagcacggccagacgaatcatctcccacttggtggcgccgagcgccagcgcggcctcttcgtgcaggcgcggggtctgcatgaagatatcgcgggacatggaggtgataatcggcaaaatcataacggcgagcaccacagccacggtggcgacggtgcgcgacgggttggcggccgggccctcgaacagtggaatgaagcccaggtggttggcaacccagttccagaacgggtagatggccggcaccagaatcaggccgccccacaaaccgtagataacggacgggatggcagccagcagatcgaccacatagctcagcgcggtggcgagcttcttaggtgcatagtgcgaaatgaacagcgcaatgccgatggacacgaagaaggcaatcagcagtgccagcaaagacacgagcacagtaccgaacaacagcgggagcacgtagccccagaagctgctggccttgccgccggtaaagctggacacggtgtcgctgttggcggcctgatcgccaccgatgagtggccaggcgcggaaaaacaggaacaggaacacagcggcaagtacaaccaggatcaggatgccgcaggcgtatgccacaccgcgaaacaccttgtcggcggtcttgcctccaactggctgcacagccgttttgtcttgcgaactcacggattctccttatatagggtggttatcaagtattcaagtggtgcggttttcgtctgtgactttgccaaaccgttcgggtcctgacccgctttaagccgcagccgtatggtttacgactgcggcttaaagttggcggcgactgctcttactactacagtctatcgttcagttgtcaggtccagtccacacgacccttgcgggccgacgtcatcacttggtcttgatggcctcgatggacttggtgatcttagacttcagggaggagggcagcggagcggtgccggcggcatcctgagcggccttctggccctcgtcggaggtcacgtaggtcagccaagccttggcgaactcagcctgcttggtgtccttgtaggccgggcagacgatgtcgtaggagaccaagacgatcgggtaggcaccctcggcctcggtggcgtggttgatcttgatgacgatgcggttgtcgcccttaacggtgtcgtcctgcttggagtcctcgatgaccttggagccggcctcggcggaaatctcgttgtacttgtcgccgaccttgacggccacggtgcccaggtcgccgacctgggagaagtcagcgtagccgatggtgccgtcggcctgcttgacggtggagatcacgccggaagtgcccttggcgccctggccaacctcgttcggccagttctcggagaggtcgtaggtccagttgtcaggggtgacgtccttgaagtaggagacgaagttctgggtggtgccggacttatcggagcggtgcacgacggtgatggcggtgtcgggcagcttcaggtccttgttctgatcggcgatggccggatcgttccacttggtgatcttgccgtcgaagatcttggcgatggtggcagcgtccatgttgatgtgcttgccggcatcggaaacgcctttgaggttgaagaccacggcgatcggggagatgtagaccgggacatcgaaggcggtgccttcagtgcacacggacttggactgctcaacttcgtcatcggcaagggccttatcggagccggcccaagcggtggcaccggtcaggaaggtctgcacgccagcgccggaaccggacgggttgtaggcgatcttggcttcagggttggtgccctggaagccggcgatccaggcttcaacggcggcctgctgagaggaggcgccggcgcccgagaagttgccggagaccggggtggacttggaagtggaatcggaggaggagctgttgtcggtcgtggtggcggtgttatcgccgcaggcggccacggaagcgagcatcacaatgccggacagagcggcaatggagcgaatgaggatgttcttctgcatgattattacttaatccctctatcaactattcgcgggcggctcagcgctgcccggtcaattcatgacaactacaagcgtattggtggtttcaagggcccaaaaccgaaatcagtaaacagaagatgaacacttggatgtttgtgggctacgttgaggctacgtagtttttggagtggactcgcctgcggcgagcccacaatccacaacaaaaaaggcggcccgaaggccgccttccatttactccgcgggagtatcgatcttgtatccgagaccgcgcacggtagtcagatacttggggtgcgccggatcttcctcgatcttggagcgcacgcgcttgacatgcacgtcgagcgtcttggtgtcgcccacataatccgaaccccagatgcggtcgatcagctggtgacgcgtcatcacacggcccttgttctgcatcaggtattcgagcagttcgaattccttgagcgggaagaacacggtttcgccgcgtacggtgacctgatgctggcctacctgcatggcgatatcgccgcacaccagcggaatatcgtcatccacagtgccggaagcctgggccgtggcctgattgcgacgcatcacggcacggatgcgggccagcagctcacggaaagagtacggcttggtcacataatcgtccgcaccaatctcaaggccaacgaccttatcgatttcggcgctcttggcggtgagcataataatcggcacacggctctgctcacgaatgcgacggcacagtgcagtgccgtcaatgcccggcagcatcaaatcaagcagcaccaaatcgatgccgcccttggtgaacagttccagaccttcctcgccagtggcggcggcggacacgtcatacccctcgcgtgtgagctggtataccagcggctcgcgataggattcctcgtcttcgacgataagaatgcgtgccatagtagcctttcttgggtatgttcccgtgcgcataggcgcaaagttttccgatactatcgtaaccatttgttctccgttagcctgctgtttcctgaaagtacgtaattgcgtaattgtgctacgcacggtgtgcgcacctcgcccactgtgtgattgtgcggcaatggaatggcaccatatcgggcaccaaccaaggccctacgcttgtgtcgactcgtccggccgggcctcgtcgtcatcctcatccggggcggccggcagctcgatggtgaacgtcgacccctcccccgtacgcgaccagaccgaaatccgaccgccgttctcctgcacgcagtgcttggtgatggccaagccgagtcccgaaccgccggtctcgcgcgaacgggccgggtcgacccggtagaaccgctcgaaaatgcggtccagtgatttggcggggatgccgatgccctgatcgaccacgcgaatggtgactttgccatcgcgctcccccacgccgaccgccacagtggtgtgttcgggcgagtaatggatggcgttctctacgaggttcttgacggcggtttgcatggcctctttgtcggccttgatcatcggaccgctcgtggccgggctgcctgattcttccaaggaaccttcgccatcggccagctcctcgaccttcgtgggcactgactgtccgttgacactcagtcgaatatccacatggcgggagtcggcttgggtctgattggcggcgatggcagcgcgtgccacatccagcgcggaaatgcgccgcgcatcaatcacactttgcgggctttgggctttctgcaagtcgataagatgatgtaccagttcggtcaggcgcgcggattccttggagatacggccggaaaaataccgtacggcgtccggatcatcggcggcgtcggtcacggtttcggccagtagcgagatggcaccggccggagtcttgagttcgtgcgaaacgttggtcacaaagtcacggcgaacggcctcgaaacggcgctgctcggacatgtcgttgatgaagatggcgtacaggtcatcgccgatatcgccaatgcgcacacgcaaatacagcatgttggacgggcgtgactggccggcctccagtcctcggccattagaggacggataggaattgcgattgaccggcagctgaacctcacgctcacgcacgccaccgtcggcggcggcctgagtgaggatgtcctcgacttcgcgcgagttgagtcggtcgccggagaccaggccgaatggcactgagccggggcttgaatattggaccaagccgttgcggtcggtaacaatcagggcttcgggcaggacttcaatcaggcgacgctcggtggggcgcacgggcgcatcatcaccgaatagagaacgcgtatcctcgtcgccggacaggtcctgttcggcggcgagccgacctgaaacgcggcctttgttgtaggcgatgacggcaacccccgccagtatcagcgcggcgagcaccacaatcacgacgatctgccagatatccatgatttccagagtaaaacgtgcaaggcgtagtgagatgcccaaactacgtaagttcgtctattgttcatttttggtgggacgacataacaaaatgctcccgctggcgggagctgtcgaacgcagtgagactgagggtggtcaaagaaccgaaatcccattggccaccctcagtccgctttcgtggacagctcccgccagcgggagcataatatggggagctctatttacagctcgtagtccttgtccttgctttccttaatcaggaacagagcgagcagagcgagggcggccatgatggccatgtaccagcccacaccggcaacgccgaacttggaggcgaccagggcctgggcgatggtcggagcgaatgcgccaccgaagatggcggcgaggttgtagctcaggccggcgccggagtaacgcacgtgcaccgggaacagctcaggcaggtaggcgccgcaggggccgaacaaaccacccatgatcatgaagccgacgcacaggaagatcatgatatgggcggcggagtgcacgagcagcatcggcacgaagaagctgaacaccaaggcggcggcggtcacggcaatcatgaccttcttgcggcccaccttgtcggcgtacacgcaggagaccacgatgaagatggcgaagaacaccacggagcacatctgcatgagcaggtactcgccctgctggaagcccaagcccttgacgccgtaggccagcgaccaagtgccgagtacgtagaacagggtataggtgatacccatggctacggtgccgagcacgacttccttccagtacggcagcaggtcgcgcagcgggtgcttggaggtgcgcttctcttcagtggccttctggaacactggggtctcagacatgcgggcacgcacgtacaggccaatgatcaccagcacggcggagcacaggaacgggatacgccagccgaaggcaatcatctgttccttgctcaggttggattcgagtagcaggttcaggccgtaagcgcagaagaagccaatcggggcgccaaggttcgggaaggaaccgtacagggcgcgcttgtcggccggagcgttttcagtggcgaccagcgcggcaccggaccattcgccggcgaggcccacgccctggcaggcacggcagatgcacagaatcacgacggaccatgcgccaatctgctcataaccgggcaggcagccgaccaggaaggtggcgatacccatggtcatcagggcgataaccagcgtcttcttacggccgagcttgtcaccgaagtggccgaacagcatggagccgaacggacgggcgaggaacgaaacggcgaaggtcacgaaggccatcagcgtggcgagggtctggttggacttggcgacgtccgtgaagaagatcatgccgaagtagctagcagcggcaatggaatagcagtagttgtcgtagaattcgatggccgtaccgaccatggaagcggcgatgatctcaggaaccgaatccttcttcaccggtttggtcacagccgcggttgcgcttgcagtcattttttctctcctcatgctgcagataaaccccagtgcagcgtgcgcattgtgtattcaatgcttcgcgacggtgttgtcgtcgcttaacgaattgagcacagcgaccggcatgcgggagaagaactggtacggcttgtggccccagcgatgaaccccgcacatcgctgtgccgaacaccgagtatggctcaggttataagcaatagtttgaaaacgctcatattgtggtcatcatacccaaaacgtggatggtgagatgggccagcccgccgactacaggcgcttgacgatgtcgacagccagacgggcggcggtatcggcgtactcggagatgtcgaactccttgaatacctcgtaatcggtgtcggcgttgtcggaaagggcacgaatcaccagtgccggcacgtcattgcgggcggcgacctgtgccacggcggcgccttccatctccacggcgtcagccccggtgagtcggatgacctcctcgaccttttggggcgtgtccacgaagtagttgccagaggcgatgatgccggtgatgtgggtaatgcccgcattggcaagcgcctcgtcggcaacttccagcagacggtcatcagagtggaattcctccaccggagcgtccgcagtgccgggcttccactggcctacgagccgcatgtcagtgtcgaggtagcgcagggtgccgccgagcaccacgtcgttgatgtgcaggtgggtgttgaggttgccggcgatgccgctgaaaatcacgacgtccggggcgaactcgtcaatcagcagctgcgtggtggcggccgcattgaccagtcccatgccgcctaccgttgcggcaaccttgatgacgtcagaaccgaaggagtcgaccgtgccggacacgatgtcaaggctgcccttggcggtgtgcgtcacatgcgtgagcgatttggcgatcagtgccacttcttcatccaatgcgccaataatagctacagttttcatacccatatgtaagttcctttcacaacgctttcgactcccatgtcaggggaggtggccgccgaatggcaggctgaggggtagagacgtttcgttgcattgctcccccccgagagagccgatgacgcaactcagtgccaacgccgcgtggccacggcttccgcaagctcgcgcagcaaggcctcggtttcttcccagctgatgcacttgtcggtaatcgacttgccatagaccagctgatcaagcggcgcggccttctgattgcccccttcaataaagctttccatcatgatgccggtaataccctgttcgccagctgcaattctgctggcaatattacgcacgacttcggcctgacgatgctcgtccttgccggagttaccgtgcgagcaatcaacaatcagaccgtgcgaggctgcggattcggcgggcatttcggcgcgtacgtcttccatggctttggccacggactcggcatcgtagttcgggccgtgaatcgagccgcgcaacaccacatggcagtccgggttgccaagggtctcgactgcgcaggcacgccccagatggtcaatgccgaagaacgtgtgctgctgggcggcggcgaagcaaccgttgaccgctgccttcaccgagccgtcagtggcgttcttgaagccgaccggcatggaaagcccgctggccaattggcggtggatctggctttccgtgttgcgcgcaccaatggcgccccaactcaccgcgtccgagatgaactgcgggctggtgggctccagaaattccgtggcggccgccaatccttccttcagcacaccaagcaaggttttgcgagcaagcaacaggcctttgcgaatattgtggctgccatcaatatccgggtcgttgatcaggcccttccagccgatggtggtgcgcggcttctcgaagtacacgcgcatgacgatgagcagctgctcaccgagctcgtccttcagcttggccaatcggtgcgcgtagtccagcgcggccttcgggtcatgaaccgaacaggggccgacgatgaccaacaacctgtcgtcttggccgtacaggcacgcgcgaatctcatcacgcgagtaggcgacgatttcctgagcctgatcggtcagcgggagttcagcgagcacttgcgcgggcgtgggcagcggctccagctccaatacgcggcggttgatgatgcgactgacacccacctgatcttcccagcgcggcacatcagtggcaacgagcgggttcttcccctcccccatcgcctgacgaatggcgcgaagctcttccggggtgttcaacggctgcggaccgacttgcaacggatgcagcgaatgtgctgcttcctcctgctgctgcataacatctctccttggatcagtatctttcccaaggataaggtgtcacgggaacaaactgacatgaccaccgttattggcaaaaaatgctcactgagtgggtctcagtgagcatttttacaaagacaaagctatttagccgagctgcgagcggtgacggcgtcggctagggtgtgcagcagctcgttggtgcgttcccacggcacgcaagagtcggtgacggactgaccgtagaccaactggtcgagcggggccggcttttggtgaccgccgaccaagaagctttccatcattacgccggtgatgccttgttcgccgtgcgccagacgctcagcgatctcttcgatgacttcggcttcgcggttttcgtctttgccgcagttgccgtgggcggcatcgatgacgaggccatgctggctcgggccggacgctttggaaaccttgaggtcttccagagcttgacgcacggattcggcatcgtagttcgggccgtggctggaaccgcgcagaaccagatggcaatccgggttgcctttggtttcggcggaaatcacgcgaccgtccaagttaatggacaggaagtgatgctcgaagccggccgcgaagcaggaatcggcggcggccttgatggagccgtcggtggagttcttgaagcccaccggcatggacaggccactggccagttcgcggtggacttgggattcggtgttacgcgcgccgatggcaccccagctgatcgcgtcgcagatgtactgcggggtgatggggtcaagccattcggtggcggcgggcaggccgaggctcagcacgtcggtgagcaccttgcgggccagccacatgcccttacgaatattgaagcgaccgtccagatcggggtcgttgatgaggcctttccagccgatggtggtgcgtggcttctcgaagtacacgcgcatcacgatcacgagacggtcttcaagctcacgcttgacggcagccagcttttctgcgtactcgtgcgcggccttcgggtcgtggattgagcagggccccacgatgacgagcaatcgatcgtcacggccgttgagcacgtcgcggatttcctgccgcgagtggagcacgagctcgctcatctcatcggtgagcggctgctccctgaggaaggcacgcggcgcgggaatggggtcaagctgacgaatgttgacatcgacggtctcgggaaagacggcctgctcccccaaacgacgttcatcctcggaactatccggaccacgtagtgctgccattgctcgactcctttccttgtatacgtaccgtcggtatggcgctatagacgcaaaagcccaactatagcagtctgttacggggactgcttgttgggccggcggttatggactttgggtgaactcgcctgcgtggactcgcctgcgtggactcgcctgcggcgatgctgtgttgttgtgcggcctgcgaccgcggcctctccccccgtcagcggcttcgcgctgacagagggagagaccctagcagccggcaggctgcgaaaaaacacagcatcggccgtcaggccgattccgggaggctggcgaagtcaggccaaggcgcccatcgggtcccatgcggggagcatggtggctggctcttcgagagccttctggtattcctccggcaacagggccttcgggacggctacctcgtagacgtattcggtgaaccagtcgtcggacatggtgaagtagcccttgtcggcgatcttggtgccccaagagttctccactcgccagcggcgggtggtgccgtcgtcggccacgtcaacgccggcgaaagccatggcgtggttcatggcggagtcaccgaagcgcacgcgggcttccttgtccaaatcgaagtccacgtcgtacacgcggccgtactcgaacaggtcggtggcccaagcgccgttctcacggtccatgaacgggtggcagtcggcaccgaaccataccgggatgccctgctcaacgagaatctgcttgacacagtccttcatgaactggtttggcacgttgaggtactcggtggcgtcgccgccagccacattgccgaggtgctcgatgccgatcttcttgcccttggcgtgctcggtgcgcggatcatccaccaggcacacgtagtcctcaagaccagccggacccacgtacttcttccagaactcaaccggcgtaatctcgccgtcgcggtggaattcgccatccttgtcggtccattcccagtcgaaggagaccggcggctcgcccaggtggatggtcagaatacggtggccggcagcagtggcgtcggcaataatcgcctcgaccttggaggcatcgccgtcagcggcgtacatgtgcgccacggcggtgtgcagcatgtggcgcagctgggtgttcatttcaccggtgttcttggaggattcggtctccgggaacaggtccttgggcacagcgccgtacttcttgtacacgttcatggccatggtccactggccgccatcgcccatcacgtcggcgagcaggtgctgcatcaggcgggagtcggaaggctctccggcagccaccagagcggccacatccttaaggaagtagttgacgcgctccagcttgtcgtagtacatcgcgtagttctgggagaactcgaactccttcaagttcatgttcttcttggccacgaaacgggccacgttcagggagctgaacagccagcagcggccggagcgatcctgatgggtggcttcgccattgtcaacgatggtggagaaacggcgctgcatcagacgagcgcggtcataattgcgagccaccttgtcgatgccggcggcggtcaccgcgttcatggccagacggttggtgccgctctgtgcgaaatcgccgcgcagggtattcaatgcttcgccggtcagaggcgtcaattcactcatgtcatactccttctgtgatggtgcgcttgtggcgcagatccaaacgaatacggcacctggctcgaaagcgcaggtgccgtaattcttaccgctagtagtctaatcgaaggcctgtcattcgccgttctgctcagatacggctggattctcctgagtcggggcctccggttcgccctgtgtctggtgctcggacggctcagacgattcggactgctcattctgcgcagctgaaccagccgaatcagccggtgccgcatctgtctcattgtgatcgtcggcagccgactcgtttccgctcaactcacccggctgatcatcggcctcgttgtgtacaggcttgacttccgggacgggcgcgaccaccggcaatgacgccacggcagcggcttcctgactctgaccagaggccgccgcattaccaccgaaagcgaatccggagaacgcctgcgagaacatagaacgcagttccgaaacacgctgggtgatgacggactcgcgttcctgcagatcggcgatgcgcttggacagaccgtcaagctcgctttgggcggcggcacgacgctcctcgatctgcgcatcggcttcctcgcccgccttatgcacgattgcggcggcctggatgtccgcctcctcgcgcttggacgcggcatatgaatcggcttggtcgcgagtgttcttggcctggccgaccaactcatcggcttcccgcttggccgccacacgacgctcttcgaggtgctgcaggagttcgttgaccttcttcgtggcctcatcctgctgagcggcgatgtcgtgacggatctgctcgacttcggcgttgacctggctcatcgtgctggtgcgcttgacctcggcctcatcagtgatttcctgacccttggtcttggccgcatcaatgatttcgctggccttgcgctgggcttcggtcatcatcttggacacttgctcgcgcacgtcggcgagcttcttgttggcctcggcgagcgccgcctcaatctgatcgttggaatcggacttaagcttggtgatctcctcattggcgcttttgcgcattgcggcgacctgctgggtagcttccgccttcatatcggcgatttcgcgctcttgggtggagcgttcggaagccatcttcttggtgtgctcttcgcgcgcgttgctgagctcaagctcgacggtctgacgctgttcggtgatggtcttggcggtttcggagcgcagttgtgcggcgtcctcgttggcggaggtggtcactgattcggcctgattgttggcgttcgtcagaatcgaggcggccttggcattggcgtcgtcaacaatatgctgggcatccagcttggcgttgttgatcagtgtttcggcctgagcctgagccgtggtacggatggaggacgcgtcctgcttggcgcgttccagcagttcggtactcgtctgttcggcggaggcgagcatctgctgggcgttcgctcccagggaagcgaagctgttgccttccggcttcttgttcttctcttcctgaagttgggcctgcagttgcagaatacggtcgtcatccgccgcaatctgctcacgcatgctggccaacgtctgctgcgcacgcttcatactctcctgagtagcgtcgaaggcagcatcaaccttctccttgtcatatcctcgcagcaccaccgggaaacgatccaccatcgctgtttattcctttcgcacacgcataaagctcttggcacatccttgaagcactgtagcgcatcgcactagcgctgggcgttgagtgacgcgcaatcgttacaatgcgtgcgaaccatgttctattccggcgtggcgcacagcgtgctaggcgatgaggatgccggagctggagggcttgagatagtagcgcacggcttcgcgcaccacatcacggccagcggcgatctgctggtcgagcggcagaccatgctggctggaatccgccggcacgaccggcgggaagctgacgaatccgcccagcacccgctcctgggtggcggtccagttcagcaagttgtagaacagcgaattacatacgaacgtgcctgcgtccgagctcagggtggccggaatcgaatcgtccgtgaaatcattcaggatcgagcgcaacggcaggcgggtccaataggcggccgggccattggggtcgatgggttcgcggcgtggggtcacgttgtccgcgtccggcttgatcgcgtccatcaggttggtggcgcatcgttcaagcatcacgcctcgggctgcgtgcttgagcccggtggcgatgacgatattgggcttggtggcctcaatcgtctctttcagcgtgggccaggctttggcgaagctcaccgggatgctgacggcatggacggtgacggcgacctgctccaacggatcgtccggagcagaggagacgcccaacccctgctcggcgatggccttgggcacttcgacggcgggattgacctccacgccgtcatagtggtcgaagccggagatcacaacattgagttcacgcataatgccagtctagcgatgcatctggccggccgcttgggccagcagggcgtgcatgcgggcgcgggcctcttccttgggatcacgaccgagaatctcctcggcgatacgctcagctgtgggaatatcctccagcgtggtgatcttcaggttggtttccgcaccggagacaatggcgacgggttcatcaggcagataatcgaccacaacgcgcgtgtcgtcggtgggatggaagtccgggtcggcggcagccagatcgtaagcgtgacgaatcgtcgcgaagcggaaggattgcggggtctgcgcgcggaaggtgttcgggcggtccggcaccgacttgaccactttcaaatcgcccagatcctcggtcaacagcacggtgtcggttgaggtgtaggccacggttgcggccgtgaactggtcgagcgcatcaatcgaaccgtcgagggcggactgttccacgaacggacggacggcgtcatggatcagaatcttggcatcgtccggaatgccagccgtagccagcatgtcgagcgcggcggcggtactgtccacacgttcgtcaccgccgtcaatgatgacgcggaccttggtgtagcccatctcgccaaccaacgtttccacttcaccgcgcaccttgggattgaccaccaccacgatgtcgctgacgcgatcgcaatgttcaaaggcatcaatgctccagcacacgatgggcttgccgcccacggagacaagctgcttgggattgtcggggtcgaagcgcgtaccgaagccggcggccagcaccacggccaccaccggcacggtttgtgccggtttggcgccctgagcgggggccggctggacggtaggcgtctcgacgggggtatcgaaatctctctcagtcataggcaccaccgtagggtgagggctggccgtccgtgaactgcatcacatcttctccacggaatgtgcccgcattctccgtttagtcacgcacgatgagggcaaggaggcggccttcgtgtgttttgttggcgagcgcggcgcggcggtgcgagtaccacagtgggttttcgagcgtgcacatgctgtggctgatgttgtcgatgcgctccgcgagctcggccgggccttcgccgtccgtgcggcacagttcggcgagttccgggtcttcctcaaggtactgggtggcggcgtgcacgcgcggcatagaatcgaccacctgatgtacgccggcgaaggcgaggtcgatcatcgcggcttcggcgatgtcgatgccggcaccaccgaagcgggtcttcgtcttggtcagcgggaagcgcttgatgaactggtcggcgatctcgtcgcccacttcatagcagtcgccgcagatgcgcgggccgagtgtggcgacgatgttcgccgggtcggcacccttgctcttcatcaggtctaccgtggcgccgatcacaccacgctccagaccacgacggccgcagtgggccgcaccgatgatgccggtgaccgggtcgcccagcagcaccggcaggcagtcggccgcgaacatgcctagggcgatgccggattgtgcggtgacctggccgtccgcctcgatgacgtgcggagtgtcagtctcaccatgtgtgccggacacgtcgaagccgaagggggtgttgatgacgaacgagtcgtccacgtccacagccacgccggaatgtacttgggagaccagcgataggcgggcttgcaccgcttcggcgagtgcgatgcggttcgacagtacggcctcaggttcgtcgccggacttgccgccgaggttcaggttgccgtaatcgccggcgctcaggccgcccagtcgcgtggtgtacaccaccttgatgccgggggccagtgcgatggggatggtcaccggaatagggcgaccggctttatcggtagagctgatgctgttggaatcgaggatttcttcgctgtattcaggcataaggcattctttcttgggtgcgggcggtgttcatgattcccatgaccacccccagtcagcgggggcggagcggtaggttattcggctttgagggtgggctttttggtgcgcgagcggatggcggcgttgatgggcacctggtgcgggcagggcatcgagaacacgtgcgccggattattgatggcgggtactggcgcgccatcggcatcgcgcaggccggtttccggcacggtaaagaccaatggtctctcgccaggcagcaggaattcaacctgttgaccgggctcgatcttgttacggctcatcagcgtgacacgtccgccttcgtccgcgctccagctcagcacttcgcccactaccagccatgagcggaagtaggcggagcggtcggtgttctgtgtgaccttgtgctccgggtaatagaagccggtggagtagtcgcggtgggccaccttgtcggtttcctcgagcagccattcgggcagttcgacgtgcggggccgggcgaacggccgcatgcttccaatcggtctcgatctgttcgaccgcggtgttggacttgcggcgcgtggagcgggcgtgggagctcatgccgtcgggttcgacggcggtgccggccgacgtaccagaggcagttgagtcggcggcatcagcaaccgtcacgcggtcacgttctgcggcaaccgagccggtgaccgaatcggcaaccgcagtatcagagccacggtcatatccctcatcggccacaccggcgaacgcggcatcggcattgctcatcacttgatcttcggttccttggccaaaatcggggtcgcccgggcgaatcacacggtcacggaaaggcttcagaacattgccatcagcgtcttcaaaaccgcgttgaatcatgtattcattaaccgcggttttgtaggcgttggtcatggcggcgatatagtaggcgcttttcgcgcggccttcgattttgaggctggtggcaccggagtcaatcaaatcatccaagtgccccagcatattcatgtcctgcgaattgaacagataggcgccgttctcggtctgctcgatcgggaagtactggccggggcgcttctcttccacgatcgaatacttccagcggcatggctgcgcgcattcgccatgattgccatcacgcccggtcagatagttggagaacaggcaacggccggagaacgccatgcacatcgcgccatgcacgaagcattcgatgtcgaggtcaccgggaatgttggcgcgaatatcacgcacggcctgcaagtccatctcgcgggccaacaccacacggcgagcgccaagctcatagaaggcgttcgcagcttggtaattggtgacgccggcctgcgtggagacatgcaattccaggttcggagccacttggcgggccatcatcatcacgccgatgtcagagacgatcagcgcgtccacgccggtgtccttgagctggccgacgtactcgcgcatggcttcgatctcgttgttgcgcggcagcacgttgcaggtcacgtacacgcgggcgccgcgttcatgggcgtagcgcgagccttcctcaaagtcctcaaggcttaggtttttgggggccgatcgcatgccgaaggctttgccgccgcagtagacggcgtcggcaccataatcgaccgcggttttcaggcccctcaggttgccggccggggacaacacttcgggctttttgcgggtggggaggttcatcgtcgtattcatcaccgcaatagtgtagtggtggccgtgtaatgcgggcggggctaccgttaggctggataacatgaagatcgatatcgtgagcgtgttccccgaatactttgaggtgatgaacctcagcctgatgggcaaagcccaggccaagggattgttggagatcaaagcgcacaacctgcgcgactggacccacgatgtgcatcattcggtggatgatacgccagtcggcggcggggccggcatggtgatgaagcccgaggtgtggagcgaatgcctggacgaactgctgggattctcgcggccgtctgaatcctccgccctatccggcacaccggtgctcatcttcccgaacccatcggccccgttgtttacccaacgcgacgccaccgagctcagccatgccgaccatctgctgttcggctgcggccggtatgagggctacgatgcgcgcatcccggactactaccgctcccagggcgtcgacgtacgcgaatattcgatcggcgactatgtgctgaacggtggcgaagtggcggtgtcggtgatgcttgaggccatcacccgcctgatgcccggattcatgggcaacccagattcgattgtcgaggaatcctacaccggcgaggacgcactgcttgaacatcgccagtacaccaagccggccgtgtggcgtggtattgcggtgccggacgtgctgttgtccggcgaccacggcaaggtggaccgttttcgccgcgacgaagcgctggcccgcaccgccgagatccggccagaccttatcgcggcactggattgcaaggcgctggataaggccgaccgcaagaccctgatggccttgggctgggaggtctccgccgcccatccgcgccggctcgccgattaattcaccacacggtgggagattcactacgcggcggaatcgtcggaacgctctatatccgagtcgtcatccgcgggctcgatgtagaagacggcggtttcgccgtagttgcggctttcagtgatttgccagccttcgggggcggtgggggtgtcggagcgtaccgagcgttcgagcataatcacggtgttctcgttggtggcgctgcccaccgccagattggccaacaactgattgcattcagcggtctcataggcgtagggcggatcaatgaatatcacgtcaaaggattcaccaaagccgccagccacttgctcggcctttttggtgaacacacgggccttgagcgaggcatcccacgaacgattcttctgtaactgcgacaaggtcttggtaatcagcgccgccgcaggccgggaactttccacggccacgagttctcgcgcgccacggctcagcgcttcgatgcccaacgcaccagtaccggcgaacaggtccagtacacgggcatcatccagcactccccatgagtcgaggtgcgagaaaatcgcctctttggtgcgatccgtggtaggccgggtacccgttttcggcgtagcaagcgccacacccttgaatcgtccagaaattacacgcatagctttcactgtacaggttcatctgcgcataccaatcgtggaaaatggcggaatctcctttcccatcaaaaaaagattgcggaccgtcctcctctattaggaaagacggtccgcaacatttagtaacggatataacgcaatacgttaacgccggatggttcccttgaatggcttatccggagacaatgcgacacgtcccatatcagtccccagaacgttcagcgtaatctccgtgggcttcgaacagcgcaacgtatattccactgtctgatccgtccatgtcgcatccacttggattccacctcttgcgcggagcgcatggaagcttccctcatgccaatcctccggcagggccggaagaacgcgaatccagccatcgtggctttggacaagcatctccgacaaggccgccgggaatccaaggttcccgtcgatctggaacggcgggtgggcgcataatccgctgtcgtacactcctccgcccagcagattggtttcagcgttcgcatccaccggccgtaggaacatgcctatgattcgtttggcgtgttccgcatcacgcagacgagcccacatgatcatgcgccatacgatgctccaaccggaaccatcatcgccacgcacttcgagggattttctcgcggcttcctccagacgcggagtcttagacgtgatgcctgcaccaggatgcagttcgtaaaggtgggacagatggcggtgctgtggatcggattcgatgaattcgtcgttccattcaaggactcttccatcagctcccaatcgcgtttcagccagttgggaacggacggattccgctacacggaccagagcgctgtcctcttcgtcaaggttttccaaatcgtgagaagcctgaatcaaatcatcaagcagattacgcacgatggccgtggcattctcactgctttgcgcaacggataccggttctccattcaccaggaaacagttctccggtgatgttgcaggggacggggccagcccatgctttgtctccgataggaaatccatgcagaatcgcgcgtcgtcccgcatgattggccagatgcgggacaggtacgatgcatcctggttgaacagatattcatcgaacaggttccggcacatccatgcctggccgaacggccagaacgaccac

SEQ ID NO: 1294 - DNA, 17319 bp, Unknown
  R157_18m  MAG No. k141_6347
ccgccatcttccacttcaagtggtcgaatcgcggaatcagccggcggatatcatgtgccgcgtcgttaccagtcaagccgggaaattcgttgcagacggtcagtcgaccagcgaattgatctggatgacatggtcgcgctgcggaccggtgccgatcgcggagatacggcagccgctcagctcttccaaacgcttgacgtaggcctggcaggtggcgggcagctcgtcgaaggagtggcagtcggagatgtcttcgtcccagccgggcatggtctcgtaaatcggcttggccgcggcgaaagcggcctgatcggtcggcatatcgtcgtgacgttcgccgtccacgtcgtaagccacgcagatcggaatctccttcaggccggtgagcacgtcgagcttggtgagcacgatgtcggtcaggccgttgacctgggaggcgtaacggttgacgactgcatcgaaccagccgcaacgacgcggacgaccggtggtcacgccaaattcgtgaccctgctgacgcagccattcgccggactcgtccagcagttcggtggggaatgggccttcgcccacgcgggtgacgtaggccttggagacgccgattacgcgggtgatcttggtggggcccacgccggtgccggtgcaggcgccgccggcggtcgggttggaagaggtgacgaacgggtaggtgccgtgatccacgtcaagcatggtggcctgagcgccttcaaacagtacggtcttgccttcgtcaagcgccttgttgagaatcaggccggtgttggccacgtacggcttgaggcgttcgccgagcttcagcagctcctcggtggtctggtccacgtcgatcggacgacggttgtagagcttgaccagcatctggttcttctggtgcaggctggcctccaccttgtcgtgcagatggtcggcgttgaacaggtcatgcacgcggatgccgacacggttgatcttgtccgcgtaggccgggccgatgccacggccggtggtgccgatcttgtgcttgccaaggaagcgttcggtcaccttgtcgagggtgcggtggtagggcgcgatgatgtgcgcggcctcgctcaccttgaggtgggagcaatcgatgccgcgggattccaggccgtcaatctcctcgaagagcacttccggatccacgaccacgccgttgccgatcaccggggtcaggttcgggttgataataccggagggcagcaggtgcagggcgtacgactcatcgccgaccaccacgctatggcccgcgttgttgccgccgttgaagcgcgcgacgtaatcgaccttggtgccgatcagatcggtagccttacctttaccctcgtcgccccactgagcaccgataagaacaattccaggcataacacacctccgcattcgcacgattccgccggaaacagactaccttacaccctctactcggggcgcggccatctcacgcaatcgggcttctggtgtctttgccgcgcgttgcgcgaggcgggccgacaccaaggcgccgccacggcgaatgacagtttatttgggtgttatctgagtgctttgccggccgagccgagttgcttgcatgcctcagccacgcgggcggacatggattcctcggccttgcggccccaggaacgcggatcgtagaacttcttttcgcccacttcaccgtcgatcttgaggaccttgtcatagttctcgaacacatggtcggcaatcgggcgcgtgaacgagtattgcgtgtcggtgtcgatgttcatcttgatcacgccatggctcacggcttctgcaatctcttccggacgggagcccgaaccgccgtggaacaccaattcgaacggcttgccgttgggaaagtcgactatgccggcggcgctgggcagctcaccctcgaccaccgcgcgcgccacacgggactgaatatcaccgagcagggcgggacgcagcttgaccacgccgggcttgtaggagccgtgcacattaccgaacgtgaaggcggccatgtatcggccacgctcgcccaaaccaaggcgacgggccacttcaaggccatcggccggcgtggaatagagacgttcgtcgattttggcggaatagccgtcttcctcgccgccgaccgcgccgatctcgatctccagcaccgtgtgcgcggcctgcgacttatcgagcagctcctcggcgatgtccagattttccttgagcgacacggtggagccgtcccacatatgcgactggaatgtgggctcctgaccatgcgccacctgatcggcctcatgtgcgagcagcggttgcacccattcgtccagatactgcttggcgcagtgatcggtgtgcagggcgatggtgatgttcgggtacttcgcggcgacctcgtgtgcaaaagcggccaaggccagcgatccggtgacacggtcgttgacgccgatgccggaaaggtatgcggctgcgccgacggacacctggatgatgccgtcggattcggcatccgcgaaccccttcagcgcggcgttcagcgtctgcgagctggtcacgttgatggcagggtaagcgtagccgccgcgtcgtgcggcgtctagcatttcggcataacgttccggtgttgcgattgtcatggcttcattatcactcggggtgtgcccgccagactaggttctggagccaggcgagctgtgaactatctcacgaggaacaccatgatgataatcatggcgaagccgaccaaatcggtcggggtaaagaccgcgccggcgaataggacaccggtgatagtggcggttacgggttcactggtgccgagcatggtggcgcgcattgcaccgcagcgctgggtgccgccgaggaatagccaataggcaccgaatgtgccgaacaccacggtgaataccatcagaccaatgccgaaccagtccaacgcgggggcggtggtccacgggcgcacgagcggcagcagcattaggccggaaacgatgaacatgacgccgctggccatgaagttgccccatttggccattaatgcgatgggcagaatcgcaagcagtgacgtgcatacggcatcggtcaggccccacagcagaccgggcagcggcagactgagctggctgagatcgccgcctgtggcgatgagcaccgtgcccacaaaagcgagtaccacaccgatgctttcgcgtttgccgggcagccgtttgcccataatacatacgaatacgagtacaaccagcagattgagcgtctgcagcactgtggccgtgccggaattggtccagtcaatggccttcaagtaggagacctgcaccatgagcacgcagaagaacgcgcacagcaggagtctcgggtaggaacggtagtccttaagcgagttgatgaacttgtcaggcgtgaagattcctgcgcaaaccagaaagatgacaccggccaatagctcgcgcacgcaggcgatccacagcggatcggcgtgatagtcgttcatcaggagtttggagacggtggcgttgacgccccagaagacgcctccggcgagcgccagtccggcaccgacgaagatgtcgtgcggagtgcgttcgagggttggcgttggttggccattggttgcagcggtcttgggttcacacatcgcccatcacgatacgcggacgacgtgaattgttctcatatagcggtcatacggcaggaaaataagctctcaaaagagggaaaaccgttgaaatttcaaggaaaatcgatggagcggacgacgggagtcgaacccgcctctaaagcttgggaagctttcattctaccgatgaactacgtccgcatgtgcgcttccacgcacgagaggcaagtgtatcacctatgcggcaccttgcgccatgtgccggtttgagttctgtgctggactagtgaattgcgcgcgtggaatacgtggatgcggccaccggagtgccgttcatttcattggccatttgcatcaggcgcgcgatgcgctgatcagtcggcggatgcgtggagaacagtttggagaaaccgaccgcggagaacggattggcaatcatcatcgcggagacggactgggtgccggccgttttgcgcatgggcgtggtctgggcaccataggagatcttgttgagcgcggaggccagggcctcggggtcgccggtcagcagactgccgtcttcgtcggcgtcgtattcgcgagtacgggagatggccatctgaatcagtgatgcggcaatcggcgcgagaatcacgctgaggagcacgccgatcaagccgagaccgcctgaattatcgcggtcgtcgcgcgagttgccgccgccgaaatacatcagagaataaccgaggtacgtgatgacggtggccatggcagaggcgatggcggaggtcagaatgtcgcggttgtacacgtgcatcagttcatgacccagcacgccgcgcaactcgcgggcgttcagaatctgcaggatgccctgcgtgcagcatacggcagcgtgacgttcgttgcggccggtggcgaaggcgttcggactcatggtgggcgcgatgtagatgcgaggcatcggcttgccggccttggcactcagctcgcgcacgatctggtagatttcgggggcttcctgctcgctgacctccctggctcccatggatgcgatggcgagtttgtcggagaaccagtatgagccgaacgtggtggccaacccgataatgacgtagatgcccagcgtctgctgcctgccgcccgtggcccaccatatcagcatgatgatggcccacatcaaggcgaacagcagcgtagtcttcaggccgttgaaatggccgtgcacccgtactttggcatccatgaggctcacactaaaatcactgcctgaatattggctggatgtgcgccgaggggtgaatcggatgggggttggcggtgcttacggtgcggttgacggggatcggaatagcctgtttacatgagattgacgatgcttgacagtgcggttgcttggcctgttttaccgctttaccgctttaccgattggtctgatcgggacgctttgcttgtttggcctgctttggctgcttggatcgtttggcccatcggcctgctcgactggcatgacactggcttttatataaataagaacgctggcgtataaccggcgttcttatttatcgatgtatcaatcgcgccgattgctgctggtgcagttgccggtgcgatgagctgatagtcaatcaggccagagcgagctcacgcatctggtcgggctcgatgaccttcttgtgctcgcggccctccttggcgccttcggcgcgctcgaaggcgtcgaccttcttccagccagcgaagtcaatcggcttgacgccgcggctttccagcagtcggtcgatggattcggggtcgcgatcctcggccacgcgaccaccttcggcggccttggccagatcctcaagcatgttggtcacgatggcaagtgcgtcggacttggtggagccgatcaggcccaccgggccgcgcttggcccagccagtggcgtacagacggtcgcgcacttcgccgccgtccgcttcggtggtgatgcggccatcgccattggcgttggccaggtgagcgccgtgctcgtcgtaggtgatgccgggagcctcggccggcttgtagccgatggcgtggtagacggcctcaaccgggtagtcggtgaactcgccggtgcggctcatcttgccgtcggcactggtttcggtgcgttccacgcggatggccttgaccttgccgtcctcgccgaggatttccgtgggtgcggagttgaagtgcacgtaatacttgcggtcggccggattgccttcgaagtcgacgtcgccgtcatcttccatgtcttcggccatctcgcggatggcgaacagttcctcgaccatctggcgggtgagcttgtccttgccggccacctcgatggtctcgtcgtccaaatcgaagtcgtcctcattgatgatgagctgcacgccgggcagcttctccatctcgcgcagttcctgcacgctgaacttggcctgggccacgccacgacggatgaacaggtgcagcaccttggccttgttgcggccgatgccctcgtacacgttgtcgggaatgtcggtcttggccttgaggtcgtcggcgttgcgcatgagctcgcgggccacatccatggccacgttgccgccgccgatcacggcgacgttctcggccgtcagcggccattcgcgggcaccggtgggatacccgtcgtaccattcgacgaacttggcggcgccatacacgccgtcgaggtcggcgccgggcaggttcagcggcttgtccttgactgcgccggtggcgaacagcacggcgtcgtagcgggcgagcaaatcatcgagggttacgtccttgccgaattccacgtcgcagtagaggtggatgtccggattgtcgagcgtcttctcgagtgcggatgcgatgaacttgatggacgggtggtccggggccacgccgtaacgcaccagaccgaacggtaccggcagcttctcgaacaggtcgatgcgggccttggtgccgaggccgagttcttcgcccagtttcttgagctggcgcaggaagatatcggatgagtagacgccggccggaccagcgccgattacagcaatgcggagttcagtattcacagattcagtcacgcgctctagcctaacgcaaagccttccgttgcaacagagggcgagtggtgggaattctgtgtattaggccatagtttgtgcgtttgggaaacctacgagcactgctaatgtcagattatgggtttccctattggtcaagttattgccgttctcattccaagaagcatgcgaggcggatcaggcccttacttcggatacgtttatgctgcaaggcggttatccacgcatttatgacacgagaatgccgctcaatctgttcttctcgaactacatcgacacttatatcgaacgtgatgtttccgaatatcttgatgtacgcaatttggctgaattccgccgattcttgactctttgcgcactcagttccggagcactcataaactacaccaacatcgccaatgaacttgatgtaagtccgcgaaccgtaaaggcatggatgtcgattctggaatcaagttacatcgcattccatctcatgccgttctacacgaacgcacgcaaacaggtggtcaaaacgccgaaactctatttttatgacactggcttgctgtgtcatctcttgggcattcggacggtcgaagcactggttgcgcatcccaagttcggcgatatatttgaaaacctcatcattgcggaaaccatgaaacagcatttgaacgccaatcaggagccacaattattcttctaccgcgatgccagcaaggtcgaggtggatttgttggatttcaccgatcctaacaaccgtatgctcatagaaatcaaatccggacaaacctatcatgaccggttcgcccgccatctcactttaattggcaatgttctcggtataccgtgtgagcaacagtacgtaaccagtcgggttgagcatagttatgtctcacaaggaatccgcgtcacctccgcccctcgattggctagaaggccgacggtaaagagccgccgcagagcagtaggaattctgtgcaatcagtgaatcccttgaggcattaaagacgtcacctccaacggctctttacgacctcgattgcattcattaggtcatttcttcgttcattaggtcggagagtgctgaagccatcccttggaacggcggggtttcaagggccgctccgaccaaggaccgacctaataaacgtcaaatcgacctaatgaataactccgatgctattgctgctttcgtgggtgggatttccgtttccgccacgtcaccaaccgtatcgccccgattatgtttcgatgcggtggactcgacatacgaccatcccggtcagtcaactgacctacaaaaacagcagaagcctcatattcttaatcagtcccgatcaattagggcagtgagggcccagaggatgctcaccacgtcgatggcctcctggaggaaggcaccgacgacgaccgggataaggttgaacgcggcggcaatcatgccgatggtggcaagcacaaggcccgcgattacggcttgaagcatcacgcgcttggtgcgacgtgcaatggcgatggcgcgcggcacggcggcgatattgtcattcataatgaccacctgagcgctttcggaagcggcggtggacgtgccatcggtcatggccacgccgatatcggcaacagcgagcaccggggcatcattcacaccgtcaccaaccatcatcgtgacggttttgccggctcctgtagcggccctgactgcggctaccttatcctccgggaacagttcggcgtgaacctcgtcaatgccgacttcgctggcaatgatattggcggaagcccgcttgtcaccggtaagcatggcgagctcggtgacgcccaactcatgcagtttggcgagcactgccttggcgttggcgcgcggcacgtcgcgcagcacgatgcgcgcgatcagccggccgtcaacggacacatacgacgccatctcatccggctgcagcaggccaaagcgagtgcgcaggtcatctttttgctgagctccccctcttagggggagctggccgcttcgcgggctgaggggggcagcctcgccgaccgccaggaatccatcctccccggcggccgcgaaagacagccggccaacgcgcaccgcgtggccgttcacctcgccggaaacgcctttgccggcgtcttcattgatgttcttgacgaccggatactcccgtccatggccgggccagctggcctccggctcggggcataggcgctgaccatcctcgaaccgctggcgcagtcgggccatcgcctccacgccagccttggcaatgcctttggacaggatgtgcaccgagtagctttccaccacgccggccatcatcagcacatggtcttcgttgagacgggttgcggcgccgggcagcatctcgacgcgcacgacctgcggctgcttgacggtgagcgtaccggttttgtcgaagaacacctgcgtgacgcggccaaggttttccaacacgtcctgcgctttgataagcacgccggctgcggcgaggcgtccggttccggcgatgtacgccaccggtgcggcgatgagcagcgggcagggcgtggccagcaccagcacctgggcgaatcgcgtcggcaccccggacatcgcccatgcgatgccggcaatcatcagcgagagcacggtaaagggcacagccaagcggtcggcggtttttaccacggccgggcgcgactcctgcgcggaggccacgagctcgaggatgcgctggtactgcgaatcggcggccacctgggtggcacgcatggtcaatgcagtcgagccgttcaccgcgccggacatcacgcgggcgccggagaacacttcacgcggcaccggctcaccgttgatattgctcaggtcgagcgtggccgtgccggacagcagctcaccgtcaaccggcacagtttcgcccggcagcaccatgagtacatcgcccagctgcacctgctcgaccggcaccgtgtcgaagcggtgcgcggcggccgcagccgacgccaagcccacacgccggaagccatcggacgaatcgcccttatcggtagcaaacccacaccccacaccaggcaggttgacgacgtgtgcggtctgcggcgcggcttccataagcgcggtcagactgcgctcggccttggcttgggcgtattcctcaatggcctcgccggacgtaatcatcagcgtcaccgcccaacttgcccagtattcggcgacggccacggtggagaggatcgcgaccacggccagcacatcaaccccgacctgcccgtggcgcaaatcgtcaatcatgccgcgcacagtgtcaatcacgataatcagcaccaatgcgataaccagccactggccgaagcccggattgccaagtaccggaatcgccatcgcattgccccacggacgccaatcgcccagtaaagccagcggaattgcggcgatgacgacgaccggaagcatcggcacaagcttgcagatgtcgagaattttggtgaagaatctgatgagtgcgcccatcattgctccttacgctcgtatacggagtcgattgcggtacggcaagcgtggcccgcgcaatcggcgctgcggtcacgccttgttaacccaccggcggctttgcctggggcttcgctttgctcggctcccgcgcgaccttccgatacacggcgtaaagaaatgttcagttttgtattgaattatgcgctttgttcggagcaccgcccgaactcagtgcttgacctaccctatcaacgagcgttgcgcgacatgccggatatcgaaactacgttggcggcatgggcgcagggcacaatagcgtatacgaaaggcccgtggcaggagtttgctcactgccacgggcctttgcttgtctgacacggtgttcagcggttaccgctcaacaccgtgtgacgttgtcgagtcggctttaccacaggccgaatgggtcggagaagccgccgccgtcaccggtgccgccatcgctgttgccattgccgttaccgttaccgttaccgtaaccattccggccgttgccgttctggttgttctgcttattctggctgttaccgttggaatcggagctggacgaaccgttcaccgacgactcctcctgatcgagcgtcacgtccacatccatggtcttgccgtcgcgcacgatggtcagcgtcaccttgtctcccaaagccgcggcacgaacgtaaccaagcagcgagtagttgttgttcaccgcgttgccgttgaaggccacgatggtgtcgccctccttgaggccggccttgtcggccgggccgccggagacgaccgcgctgccggtggcgctggacttggtgatggtcgcgccgccgcgagtcacgccgtcggcttcaaccgtgtcggacttgatgaccacgccgagggcaacgtgcttgaccttgccgtccttgatgatttcgtcggccacacgcttgacgaggttggacgggatggcgaagccgatgccgatcgaacccgcggagtcggatgaggtggcggtcgaggcgatggacgagttgatgccgatcacctggccggccgcgttgaaggtcgggccgccggagttgccggggttgatggccgcgtcgatctggacggcgttggtgacgatctcgttgttgttgtcgtcggtcacggtcaccgggcggttcagggcggagacgatgccggtggtggcggtgtcgtcgtagccgagcgggttgccgatggccatcacgttctcgccgacggcgagcttgtcggaatcggcgaatttcacggccttgaggtcgctcggcgggttgtcgagcttgatgaccgcaagatcggtggtggtgtcggtgccgacgagcgtggcggaatacatgttgccgttggcaagcgtcacctgaatctgctgggcaccggagatcacgtggttgttggtgatgatgtggccttcggtgtcgatgatggcgccggagcccttggcggtgccgttgctcaacgcggtctggatggagaccacggagccggagacatcgctggcgacggtctgccagtcgggggcttcgccgctcttggcggtggcggacccggagccggacttattcgagctgacgttggacagcgaattgctggtcggcaaggtgatcaggccgctggtgagggcgccgtagccgaggcccaggcacagggccgcggacacgacggcggcgaccacggcgatgaggatgttgctcgccgtcttggacatgccctgcttggcggggccgggctgaccgggctgtcccggctgggtcggaccttgaccgttcggcgtaccggtaccgggagtgccgaaaccgaacagaccgccctgctggggctgctggccattccggccattctgaccggactggctggcaaacgggttgccgttgttctgctgcggctgcgtgggcggattgaacggattgccgttgccctgcggctgcgggttattggtgtagtagggattgcggttgccctgctggccctgtggggtttgctgcgcaggctgaccgaacgggaattgctgcgtgggctgggcattgctgccggcctggccgccctgctggccctgtgcctgagtcggggtcggaccataagcgccatattccggggccggacgatacagcggagttgtggccgaggtctggcctgcggccggtgctgccggagaagccggcgaggaggagaccaccgtgctctcgcccttggcggaggcgtagtccgggatgggctcggtggcggcagtgtcggtagcggcttgcgtaggctgctgatcggcagcgagggcggccgaggaaaccggggcttgctgctcgctggaatcgctggcgttgccggcatcaaccgagtcgccacccacaaacgggttcttcggctcggcgttgccggtatcggcagtactattggggttttcgttattccgcggggtctggtcgacgccctgcgggttaaattcgtcagccattgctgctccttttcctaaattcctatcacgtctgttcggcggctattcgggcacttgcccattgccacttctcgtgtgctacctcagtagtaaaggcagtcaatctggaggttttctgaacgttgattgaaagtctatgcgtaatcatcgcagagtcttatgggcatctcggcttcgaggggctgatttcctgtttcgggaacatctacttgcacttcaaggggctgttcgcgcggtcaattccgagtatcaagggccctcatttaacgccattccgccatttttgcagccggcctacttgaccgggagccccttgaagcggaagtagacgttcgggagcggcgaaatccgcccctcgaaaccgagttcttcacaatttccggcccttttctggcccttctgcctaaagtgaacatatgacgatcagccttcttgaacatccgttgggcgcacagcccggacagcccggcgaccgcagcgccttccatttcgaaacgatcacccgcctgccatccacggccagcgggcttgggcgagacggtgcccgatacggccgcaccggcatcattcacacgccccacggcgatattcgcacgcctgccttcgtgccggtgggcacgcaagccacgatgaaggccgtgttgcccgagcagatgaaggatctaggcgcacagtgcctgctggccaacgccttccacctgttcgagcgcccgggcgaggacgtgctggacgcggccggcggcttggcgcgtttcatgaactgggatgggcccacgttcaccgattctggcggtttccaagtgatgtcgctgggcgtcggcttcaagaagacgctggcaatggacgtgaccggcatgaagtcggacgacatcatcgccaagggcaaggagcgcatggcctgggtggatgaggccggcgtgacgttcaagtcgcctttgaatggtgacgcacatcgtttctccgctgagatttcgatgggcatccagcacaaaatcggcgcagacatcatgttcgcgttcgacgaactcaccacgctgatgaacacccgctcctaccaggaggactcggtggagcgcaccttccgctgggcccgccgatgcgtggacgagcaccagcggctgacggctgagcggctgggcaagccctatcaggcgctgtatggcgtggtgcagggcgcgaattacgaggatctacgccggcgcgcggcctcgcagatcgcctcgctggacttcgacggcgtgggaatcggcggcgcaatcgagaagcgcatcattggagacacctgcgcgtggatctgcgacgcgatgccggagaaccgcccgcgccatgtgctgggcatcgcctccgtggacgatatcttcgcgtgcgtggagaacggcggcgacaccttcgactgcgtggcccccgcgcgctgcgcccgcaacggcgcgatctacacgcgcgccggccggtacaacatcaagcgcgcccagcataagttcgatttcgggccgctggaggagggatgcgactgctacacatgccagcattattcgcgcgcgtacgtcgaccacctgctgcgcgcccgcgagttcaacgggtttacgttggccacgatccataacgagcatttcttcgtgaagctgctagacgacatccgcgcctcgatcgacggcggatactttgatgagttccgcgacgaagcgctggcccacttctacggcaacggcgagcgccggccagggttgtgagtttttctccttcgttgcggcttgtgctgaacttctctctgctcccctcgctgaggctgagacgttaagcaaacagcccagtgggctgtttgtagtcgaaggtgagacgatagtcgaaccagcaggttgcaggcaaggcccgtccttaattgcggacgagctgtcacgaagtgactgaggggagtgccgccaccctcaaagatcacggcgcccgcaggagacccacaagcgatatatccctgcctcccatgcgacacgccgaagattgcatgattacccagccgggtgtaagttagtcgattgtctgcgagtgtggcggaatggtagacgcgctgtcttcaggtggcagtgagtgtatgctcgtgggggttcaactccccccactcgcaccagcaactaaagggctggaatcggaaggttccagcccttttgctttgtccgggcaagcgccgtttttcagggggggctttaggacttgagacttatggcccaactttcgtggcggaaaatgtcccggtacctgcatcaatcgtttgacgttcaagccaggccagaatccgctgtcccggttcgcgatttcgggcgatctttgcaaaccgggacaatttttgttgccccggtataaatgtcaatcgatttatgcgaaaaccgggacaacgtgccaattccagaatcggccttattccgccgattccgtctgccagacgatatgagttgaggaaaccggagtgtcccggttcacgaaaacaagccgaaatcgccgaccgggacagcggattctgccccggtcgacaggtcaaacgattgacatatgaaccgggacaaatacagatcagagagaagcccatgaagcagatttaactttcctcaactttccatccgccataaactagcattacataacatcatgaaccgagacgaaaccaacgaagtatctggagtcaccgacgaccagctcggccgaacggccgagccgtacgaatccggcaactggcggggcggcgtcgggagcatcattcgcagcaatccgaaatcaggaaccgacacaagtcggacccagcagacacgcataatacgagttcacagactcggcgatgtattccgcaaccgcaccaccgaataccgcaccacggaagaactgtaagcattacgaaatcaaccttgattattgcgcgggcctatactaggttacggtagcgtaagttagtggccgggagagcgtcgccggccatagcgaggtgatcagtatgagcgtttccatcagcacgccatctggacgaaccatggcttccgccgcaacagttgcgccttccgcaaccgcgagtcaaaaatccagcgcaaacgccaaccccaccgcactggaccgtgcatcggcccgatacagggccgcgcaatcgcgctaccgccaagccaaggccgcactgaaggcgatcaagcgccagatcgtccccgtggatgcattcggcaatcgcaagccgcgactgcgcggatggcttcacctcgccaccctgccgctgtgcatcgcggcgtccatcgtactcatctgcatcgcgccggccggctcggtcaaagcggcctgcgcggtgtacggcgcctcggccatgctgctgttcggcaacagcgcgctgctgcacgtcgtgccatggcgcagcgcgaaggtgactcgcgtgctgtgcggcatcgattattcgaacatcttcctcatcatcgccggcaccaacacacccgtgctgttcgcgctcagcccggcgattcgccggccatatctcacggtaatctggacgaccgcggcgattggcacgatactgcatatcgtctggctgcggacgccgaactgggtgttcaccaccgtatacgtcgtgttgggactggccccggtaacgcttattccgcagctctggacggctcccgcagtaggcccggcgccgaccgtgctcatcgcgtgcggaggcgccgcgtacatcgccggcgctgtatgcttcgcgctgcgcaagccgaaccccgtccccggctggttcgagtttcacgaggtgtttcacttgggcacggtcatcgggtatgcctgccacgtcgtggcgatttatctgattgtctgtgcgctgtaggttcgctcgcccagcaccgaggcgggccttcatacgttacgagataggtccttgatcagccagccgtgacggccgccttcatagacttcatcggtgagtcgatagccgcactgctcatagaacttgtagtggtcgttttccgagtgcacggcggtcatggttccgccggcttgcgcgatgcggcgttcggcgtcagccagcagccgcgagccgatatgccggccttgtgcctcgggcagtaccgccaggcgcgcgatgatgtatcgcccgggctggtcgggatgatcggggtccgcgtagaaccgacaggtcgctacggggtgattctggctgggctgaatgggctggctgcgtgaggccaattgcgcggacgagccagggcgattgggcgcatcattatccgaatcgaacaccagcagatgcacggacgcggcatcccattcatcgaactccggccgccagtcgcgttcgcggatgaacacctgctcgcgtatggcgcgggcggcggcgggcagccggtcgtatgcttcgattcgtatggtcatgagcgtcagtgtaatgcgtcacgataaccgacaaagcccggctcggtggacgagctcgggcccaagctcggcaggctcaggccgtacgcgcgatctgcacggcggtgccggacgcggtgaccatcagcatgccgttgtcggcgccgagcacctcgtagtcgatgtccacgccgaccacggcgtgcgcacccatcgcctccgcacgctgctgcatctcggcgatggcctcgttgcgggcacgcatcagctcttcctcatagccctggctgcggccgccgaacatgttacgcaggcccgcgccaagatccttgaacatgttcacaccggataccacttcgccgaagacgatgccctggta

SEQ ID NO: 1295 - DNA, 119072 bp, Unknown
  R157_18m  MAG No. k141_6851
agggcgcgcatgtgggaggcggtcatcggcaggaacaggtcggtacggtcgatttcctcacgtgagatgcggtgtgcgaagtggtcacgcggaatctcatcaccatagccacgttcgcgtaacacgcgcacggcacgcgggtcgatcggatggctccactcctcgtcggacacaccgctggattccacgttcacctggtcgccgagaccgcgctcattaaagaagtgacgcagaatgatctcgcccataggcgaacggcagatattgccggtgcagacggtcattacggtgtagggctgggtattgctcatagctttgaataaatcctcaatcgggcttcaacgggccgcacacggcccgactgtattgttggggtcgaatgaatatgaatccggctcatgccgccataaaggacacaagccggattcgcatgctcacttggttttagccaagatacggaaacgataggaatcgatgccggactcctccttggcgggcgtatgccactcgcccacttcggcttcccgccacatcccggcctcgaccagcgacgccatatcgggcgcgtagctgtcggcatccacggtggcggccagatcagtcacataggctttgtccgcgaacggcaacgcctcggcgaacagctgggcaccgccgaggatccaaatctccgaacggtccagaccgtcgtccggaatcgcctcctgacgggccatatcgagcgcgtcgtcaagactggtgaccacagtggcccccggcgcacggtacatcggatcgtgggaaacgacgatgttgtcgcggttgggcagcggccggtacttgacccccagcgattcccaagtcttacgacccataatcaccggatgggagacggtcagctccttgaaatgcttcatatcctcggcacagtgccaaggcatgccgccattgaggccgatggcaccggcgcgaccttccttgtcgcgggcttcggcccagataagattcaccgagaaggtcttgggataatcgtcaccccagtcttcttcagtggcagacagcccggcagatccgggctcgggttcgtgatagccgctacggctactgtcatgctccatttcgcttactcctcctggattgcggaactgggccttagtgtagtggacagcgaagactcggggtccgtcaccttcacagtcttcgctgtccacgaaatggtaatcagcatcagaccgcaacaggtgccttaatagtggggtgatgctggtagccgacgaccttgaagtcctcatactggtagtcgaacagggaatcggccttacgaatctcgatggtcgggtacgggtagggcttgcggcccagctgctcaaggaactggtcgacgtggttgtcgtagacgtggcagtcgccgccggtccagacgaattcgcccggcttgagcccggtctgctgcgccatcatcatggtgagcagcgagtaggaagcgatgttgaacggcacgccgaggaacatgtcgcaggaacgctggtacagctggcagcttagcttgccgtcggccacgtagaactggaagagcgcgtggcagggcggcaacgccatcttctccacctcggccggattccacgcggagacgatcatgcggcgcgaatccggatgatgcttgatgaggtcgagcacattggagatctggtcgatggtgcgattcgggtcctcgggggtcggtgcgggccaggaacgccactgcacgccatagaccgggcctaggtcgccgttctcgtccgcccactcatcccaaatatgcacgttgtgctccagcagccagttgatgttggaggaacccttcaaaaaccacagcagctcgtaggccaggcccttgaagaacacggtcttggtggtcagcagcgggaagtacttcgacaggtcgaagcgcatctgctggccgaacagggaaatcgtgccggtgccggtgcgatcggacttcagcgtgccttcggtcaggatcttgcgcaccaggtcctcatagggcatcggaatgtccgtttcgggacgtgcggggatacgggagcgaatatctgcgagttgttcttcggtcaaagccatgtgcaccagtgtagcttaggggcataatagagaagtccgatgatgcgggagagcggccaggtgccgcgctcccccgctggcatggcgatgggccagatcgccggcggctgaaaataaaggagcagctatgggtaagcgactgtgggttgaacgcaacaaggacggttcgtgggatgcgttcagcgacgatggcgcgcacattaagttcggcaaggatcgtggccagttcacgccgggcgatctgatgaaggtcgcgctggccggttgcgccgcgctgtccagccagttcgccatcgaacatacgctgggtgagggcaagggtgccaagatcgtggtggatggcacgtacgaccccgagaacgacgcctacaccggtttcgaggagcaggtggtgattgatgcttctgacgccagcctgtccgaggaggatgccaacaagctcaaggaacgcgtcacccgccatatcgacaagggctgcacggtcaagcacacctacgtacaggagaccccggtgcgcatgaacgtcaccgtcaagcactgacgtactaataaaccgacgtactaataaattgagctccctctgatgagggagctcattgtatacccggactttactgcctgtcgggatcgatggtcttttcgatctgctgggcgacttcaggctcggctgcggacaccggaatctcctcgacgccggcaatctcctccagcgacttggtaggcacttcggcgggcgagctcggcacggtgtcgagacgcgattccgcagcctcaacatacttgcgtggcaccacgtacaccgggccggccgcatgctgcagcagtccctggctggtggagcccagcagcagaccggtgaagccgccgcgaccacgggagccgacaacaacaacatcgtgatcgtagctggccttggtcagtgcgctgacggccgggccggaaacgatctgcttgttgattttcagatcaggatgcgattcctgcaacggcttgatacgcacctcaagatcgtccttgtaggactccatgatggcatcctcgccatccacgcccttcaggttcggcacagcggaaatcacgtccagttccgcaccccagcacgtggcgaagtcggcggcaatgtccagcgccttcagaccccacttggattcgtcggagcctacggccaccttggtaatcgtgttgttcaggtgcatcaggttgccgtcatcatcggtgtacggcaccactacaatcgggcagtaggcgtatgccggcagcgacgaggacgtggtgcccagcagacgctcggccagaccgcccttgccacggttaccaatgacgatcagattgtagttacgcgacaattcgacgaacaccgatgccgggtctccggtaacaatcagtgtggcggcttcgacgccctgctcgtctgcgatggccttggccttggccagaatctcctgagcatcggaatgcgcggcgttatcgtcccccatcgccgtgtaagttgcatcgaacgaaacggcggcatagctcggcagggaatatgcgcagacaatctgcagcgtcagccccgcgtgctttgcataattcgcggcccaccatgttgccttgtaactggcatgcgacccgtcaacgccgacgagaatggccttgtcgttaatcatgacgacctccttgaagttattgtggcacgaataccgcgtacctccaacaataccccgcgacactcggtttggccggtatcctccgctcaaaaagaaatccgcgtatacgaaaaaggcacatcccaaaggacgtgccttaatacgaattcgcttaccgcataattcttgttacatcacgcggcgaatggaatatccagctccaccgaacacggaaacgttgcttattgccgttccctgcaccgggttcatagcattcatcacctgtccgttaccgatgtaaatggccgcatgagtaccattcgcaagaatgtcacccggcttggcatccgccaagcttgcgaccggagtacccacagtggcttgagcaccagaggttcgcggcagggaaatgccaaactgggagaagacgtactgtacaaaaccggagcaatcccatcctgccggagtgttgccgccggcaacatacggatagccttggaacttcagtgagaagctggcaagctcagcgccagtgccagtcattttacccaagtcaacctgtggaatcgacgcacgctgttcagagcggctggctgcagcagcagcagcggactgggctgccgcagcttcatcagcggctttctgagccgccgccgcagcagcagcctccttctcggcctgagactcggtctgtggcacatcaagagtctcgatgccaccccatttagagttctcgtcaaccgaagtggaggtggattcggcgaacagattcttcttcaccgaactcgccttcgggaaagaacgtgaggacaccacagcactcgtctgcgcggaatcggcagaggcaaacggggctacgcatgcaaacatggcacccgtggcgataaccgccactgatgtggaaataatattcttaacgttcgtcatcagcgccttaccttagcacacatgggtcgatttcataacaggaatgtcttttcgaagatgatgtcgcgggtgtatcactcggcaggagaacgcaacgggcctcggataccgattggcatccgaggcctgcaatatatcaatcaataagactgcatcacgggatacgtaccacgatggtgagtttttcggtcatggcgctagcgagagccacgctgtagccgttccagccaccatggaccgcctgaccgttgccgacatacagcgccacatgatcgtagtgcgcgccgccattccatccaccggtgttggcataaatcagaatatcgcccggctgcagggacccgtctgtaactacgtggccaccgggaacattgacgtactcttcaggccaaccgtggaagttaataccacgggccgccaacgcttgactgaccaatgcggtgcagtccatgctctgtccgatcaaagaatacgcacggtcgatagaggcaccggcaccagcggaaaccgaaccactggcatcggaataagtaacagaagagcgagactcattacggctcgcggcgttggcctgcttctgggtcgcctgagcctcggcctccgtctgcttcttggcctcctcttcggcagccttcttggccgctgcggcatccttttccgcctgagattccgtctgcggcacatcgaggttctcaatgccgccccaatcagcattgtcctcaacgctcgtggcagtggcttcagtcgtcagatctttgcgcacctgggtgtacgaggggaaggacttggtggaagtcacagtaacaccctcagctgcagtcgctgtaggaacaaacataaacgagcaagcacaggagacaatcgcggcaacaatggaagaagctacagttttggtcttcatagaaccatcaccttacacggtgcgcattaactcgtacaggatggaagaaataaaacaccccggagctattgggatatatcggcgtgtcggcacaggtcagttcggactaatacgcggtcgcaacacttgaaatgtcatttcgcgcgaacgattgccgatagggcgacgtcacatccgaacagtaatcaccgaatgtaagccaatgaaatgaatcagtagtggacgtactggaacttaccggcttcggcggcgctgaacgtacgggtcgaaatcacacccaatcccttggcattggattcggagatctcaatggagccgtcggcattgatcttttccagaacggcaacatggccgtatgtgccatcggcattggcctggccaggagcgaacaccacagcatcaccgacatggcgaggagtgttgtccacccaatagcccagagcggaagctgacgccgcccactcgccaccattgccgaagttgccgctggaaggcagtcccagttcggcacgacgctggtacgcgtaccacgtgcactgaccccacggatagttgttggagttggtgccaacggcatggttcgggttgaagccagccggcacagcatcgccatcggcatccatgagagccgacaccacaggattgttcgcattattgcgattcatcagcttggcgtccaaggtgctgtctgaattgctcagcccccaaccgccttcattggtggactgtgcggtaacggaggacgaactcagatcagtacgtgcttcggaacgagaagccgcagtcacatcgctgatgcgcttaatctgcgtggtcgtcgtggccggatcagccacgaacgagttcgtggcgtctttattgttggaaaatgcgagagcacctgcggccgtgccgaccagagcggccagtgaggccgaggcaagaatatggctacggcgttcagcggcacgagcggcctcacgaatggaacgacgagtctggggagcgatttcattgatcttctcggcaatggccggatcaagccccaaaacaacggcgtcgctgccagcggattgcaccgcgcgcacggcacgaacggaatgagaacccttgccggaggcaaacaatgccttcgctaagctgaacttctggcgcgagaccgtggtcgctttatgcgaagcatgcttcatactacgttaactccttggatgggttcggcggggtcctttcaacgaccccgtatgaccggcacaattgagtactgtacaacgaacagaggtcaatcctcaatgcgatcccccaccatccgggcatgtcaaacgatttacgtaaccgtgcggcagggtgaaaaactgccttgtttccgcccgttcacgaacctcactatccggttatcggaagaatcactaactcatgtcattccgacacaccgtagccatgatgtgctgcgtacattctgcactgcattccgcattgccgctactaccgcccggcaccccggaattccgcagtagccccgcagcaatcccgcacaccgagcattatccgcgatattccccaacactggtctacccttgaaaccatgactatcacactgagtattcccgagtcgctgaagccagaagatggtcgcttcggctccggtcccagcaaaatccgccccgaacagatcgccgcgctcgatgccggcgccaccaccctgcttggcacatcacatcgccaggcaccagtcaagcaactggtcgcttcgattcgtgaaggtctgcgcgagttcttccacctgcctgaagggtatgaggtggcgcttggcaacggtggcgccagcgcgttctgggagattgcctgcgcttcgctgatcacccgtcgcgccgcattcggcacgtatggctcgttcagtgccaagttcgccgcgtccgccgcgaacgcacccttccttgaagacccggtgctgttccccggcgagccgggcacttaccgtctgcctgagctcaccaagggcgtggacacatattgctgggctcacaacgagacctccactggcgtggccgccccgattcgccgcgtgcccggcagtcgtgaagccggtgccctgaccgtcatcgacggcaccagcgcagccggcgctttgcccgtggacatcagccagaccgacgtctactacttctcaccgcagaaggccttcggtgccgatggcggtctgtgggtcgccatcctctcccccgaagccatcgatcgtgcggcaggcgtcgaatcaagcgctcatctggaaggcgcacatcgctgggtgccgccgttcctctcgctgaccacggcactgaacaactcccgcaaggatcagaccctgaatacgcccgccgtggccaccctgatcatgatggaaaaccagattcgctggctcaacaacaacggcggcctcgcctgggccaccacgcgttgcgccaagtccgcatccatcctgtactcgtgggccgagcgctccgaatacgccgctccgttcgtcgtcgatgcggacgcccgctcgaacgccgtggtcaccattgatctggacgagcgcgtccaggcctcccagatactgtccatcctgcgagagaacggcatcgtggacgccgccggctaccgcaagctgggccgcaaccagctgcgcgttggcgtgttcccctcggtggaaccggctgatgtcatggccttcaccaagtgcgtcgactatgtggtcgagcacctgtgatggcggtctatgcctcgcatggccgaccatatatgccatgcacattgatcggtctcaactgataccgattgaataaatcgtagggagaggtgtttgacgcccctccctactcttactacagtgcatgagtatgaagttcgcgcctctcattgaccctgccgtccgcaaacccgcgcccaagcccgtacgggtggacctgcgtaaggtgtttgccatcggtaccggtctatggattgtggcgttgattgtcgtgctgattctgctggccgtgggctacagcgtgatgccgttggtgattatgtgcgtggccggtgtcattattggcttgctactgctgatttgggaatacttcgaccgctgggactaccgccgcctcggacagtaataaagttcactgcgccaacggcaacgtcaggctgaacgtactgccttgcccgggcgcgctccatacggtcacatcgccatgatgggttagcgccacatgcttgacgatggccaagccaaggcccacgccatccgccgtgcgattgctctgttccgcaccccggtagaaccgctcgaagatgcgcgtctggtccttcttcgcgatgcccgcgccctggtcgatcacgcgaatcaccgcacggtcgccatccttgtctttggatgcggacacactgaccacaccattttccttggaatagccgatggcgttttcgatgagcttggtcacggcgctgtcgatctgatccgcctcaccattgatgactagatcatcgtcgcccttgatgttcagctgcacgccagccgcggccgcctgcggctccagtcgcgccaccgtggcctcgagctgttccataacgttcagtcggttggcggaagacggcgtaatcggctcctgtgcgcgtatgagcagcagcaaatcggacaccatatggttgagcttgctgcagctggaacgcacctggcgagcatcggcagccacctgctgttcgtccagattgccggactccagcgaatcggcgagtttggccagagcttcagtggggcccaacaattgctcggatacattggtaataaacgagtcacgcacttgagcgaaacgaatcacgtcactgacatcggtaatcaacacgatgacgaactgctcgttgatacgccctacagtcaccttcagccagttggggcggtggacggactgcgtggcgacgtgatcgcccttgttctggtctgcgacgtaccgctccggagtatcggtggtcaagtcgaactggcgcttgccaccagacttgcgcgcctcgtgaatggcatccagcacctgctgctgggcgatggcgtcatctgacaccacacccaggcggtaggcagcgggattgcagcggaccacctcgtcgtgctcgtcgaccaccacggacgcacccggcagcatggacagcagcgtggcggtgtcgtcggacagatcgtcattgtcgtcatcatcggccagcggcgattccacagacactcgatgtgtcgcaaatcccacgatgagcgtgatgattcctaccacaaataaaacagccgcgacaataagagcaatcgcggcgacgagcggcatctgtgtcatgcccccattctttcacaccacacgccgggattgcggtttgccggcgcgccggtaacatgaatttcaggtgaacaactcaatgaacagtagaacaacttgaggttgccattacctacgttgaggtggggaacaagtactggaataatacactggtacaggttgcaataagcaagcatgaaaggctagagaaatgcgcgttattttcaacgaggagctgaagcaggttgctgacgacctcgaccgtatggcgcagaacgtgcgcaaggcgatcaaaggcgctggggaagccctgctgaatcaggacgttgaagccgcacagactgtgattgacggcgacatcgagattgatgccctggagtcctctgtgatcgaccagtgcgtcaagctgctcgccaagcagaacccggtggccaccgatctgcgtgtggtcgtttccaccatgcgtctggcttccacgttcgagcgtatgggcgatcttgcccgccacgtggccgaggccgctcgccgcacctacccggccgccgcgattcccgaatccgctcagccggtgttcgccgagatgatcgacttcctggacaacaccgctgaccagctggtggccatgctctccgatcgcgatgccaagaccgccgaggccatcatcctggccgacgacaagctggacaacctgcaccaccagaccttcgatctggcgctgtccgatgacatcacccgtcagcagaccgtggatatcgtgctgctgggccgcttcttggagcgtctcggcgatcatgccgtgtccgccgcccgccgtgtggtgtacatcgtctccggcttcgaccccaccaaggagccgacccgcgacgagggcaccgacatcgactgattggggcttgtcctcacattgggcgaataactgaacacttgtcctcctatggtttgaggaggatgcccgaaagcggcgatccggctacggctggacgccgtttttttgttgcttctgggcggtacaccggcgtatccatggggcggcaaaacacccatagggcggtaacttgcccatggggcggtttgaaagatatgtgaaaccgcggaattaagccattctggcataccgccccatgagagttttaccgccccatgagagttttaccgccccatgagggttttaccgccccatggggtaatcaccgccccatggggatttggcaggcatagcaaaggggagccacacattatgtgcgactccccttacagcttgtaccgtgttagcggcttaggctcacttctggccttgagcggcgacagcggcggcaccggcagcagcagcctccgggtccaggtactcgccacgcggcttgatcggcttgaagttctcgtccagctcataaagcagcgggatggcggtcgggatgttgaccttggcgatctcttcctcagacaggttgtccagcatcttgacgatggcgcggagggagttgccgtgagcggcaatcagcacggttttgccggccttgagctccggctcgatggcggactcgaagtacggcttcacacgctcaacaacgttggccaggcactcggcttccggaaccggatcgccggcgtagcgcgggtcgttgttctgggcgtactggtcgttcgggtcgatctcgggcggcggggtggcgtaagaacggcgccacagcatgaacttctcgtcgccgtactcttcgcggatctcggtcttgttcttgccctgcagagcgccgtagtgacgctcgttgagacgccagtcacgctgaaccggaatccacagacgatctgcggcatccagagcgatgttggcggtgttgatggcgcgacgcagcagggaggtgaacacgatgtccggaaggacgttcttctccttgagcagctcgccgccgcgcttggcttcggcttcaccctgctcggtcagcggtacgtcgacccagccggtgaactggttggttttattccatgcgctctgtccatgacggagcagtactagtttataagtcatacggttcagtctacagccgcgtgcgcccaaacacgagtattcgtcttattatttcgctctcatagcgccacggcaaccgccagcaccaccgcaaacagcaaggtctggaagctggcggcgggcagagccgggcggaattgacgtttattcacgctggagaccatgcgcacaggtattccggtgcccgagagcaacagcaccgcaccccacggccaccataatgtaccgcacatcagcagggcgatgatccatgcgatgacgcagcacacaatcagcaacgtacgcgcgccggactcccccagccgtacggccagcgtgtgtttgccatgctcacgatcctcgtcgatgtcacggatattgttcaccatcatgatcaggcaggagaacaggccagccgccacagcacccaatagtccgccgacgtccaccgtgccgcacagcgcgtattcggtgcccaataccgcagccaagccgaagaacaggaacacgccgacttctcccagcccgacatatccatacggatgcttgccaccggtgtagaaccagccggccagcaaggaggccgcgcccacggccagcaaccaccatgcttgggcgagcacgaccgccacaacaccgcatatgcaggcgatggcggcgcaaatcatcgccgcgaacagtacatgcttggctggtaccagtccggatgcggtcagtcgctggggtttgcctgatttcgattcgtccgtgtcacgcccggcgtcagtgccgcggatgccgtcggaatagtcgttcgcatagttgacggcgatttgcaggaacagcgcgactagcaggcacaggatggtcaccggccagaatcggtccatcagcagggtctgctgttcacgggccgtggcgcaggaggccggttctggatatattgcgatgcaggtgcccgaccgctcgatatgcacgtacgccatcaccgccccaaccatcaccgacgcgatggaagtgaccaaggtcttgggacgcgcgccccgaacccacaagccgatagacataagcaatccctttcatatataactctggctcccctctctgaggggagccagagtatgcctaatcagccaacgagcggcttgaccagcgggaaggtgatggtctcgcgaatcgtggcaccggtcaaggcgataagcagtcgatcaatgcccatacccataccgccggccggaggcatgcccacgccgagagcctcgaggaagtcctcatcgatgtcgcaggcctcttcgtcgccggcgagtgcatccttggcctgggccacgaaacgctcacgctgcacgatcgggtcgttgagctcggagtagccggtagccagctcgaagccgcgcacgtagagatcccacttctccaccacgccgggcttggtgcggtggcccttgaccagcggggaggtttcgaccgggaagtcacgcacgaaggtgggctcgtaaagcttgtcctcgtagaagtgctcccacaggtgttcgacgagcttgccgtggttctccacgtcgtcgcgctccacgccgagcttgtcggcgatggcgcccaaatgctcaacggaggtgccgggatgctcagggtcgccgttcggcacgatttcctcgcccaatgcctcggacagcgaatcgtacatgctgatggtcttccattcgccgccgaagtcgtattcggtgccgtcgagcagggtgaccttgtgcgagccgtagacgtccatggcggtcttctgcacgagctccttgaccagctggccgatggaatcataggtgccataggcctggtaggcctcgaccatggtgaattcgggggcgtgcgtggcgtcgacgccctcattgcggaagtcgcggttgatttcgaacacgcgatcgatgccgccgaccaggcagcgcttgaggaacagttccggggcgatgcgaaggtacaggtcaaggtcgaaggcgttcatgtgcgtggtgaacgggcgggcggccgcgccaccgtgcagggtctgcagcatcggggtttcgacctcgaggaagtcgtggtcgtcaaaggtgcggcgcagggaggccacggccttggagcggttgcgcaccatgttgcggatgttctcgtccgcgatcatgccgatgtacggcttgcgggtgcgggtgtcttcgttcaggtccttgtgcagggccggcagcggctgcagggccttggaggcgatagcccactcagtggcgaatacggacagctcgccggtcttggaggcgatgacgcggcccttgaggtacaggtgatcgccaaggtcgacgagctgcttgaactgcttgagcgagtcggcgccaatctccttcttggagatcatgccctgaatcttggtaccgtcaccggcggacagctgcacgaagcacaggccgcccgcgttgcgcaggaacagcacgcggccagcaatgccgaccatgtcttcggtctcttcgccagcctcgagcttgccgtcatacttggcgcggaccgcctcgatggtgtcggtgacgtccaagtgcaccgggtagggggcgatgccggcctcaagcatcatcgcgcgcttggccacgcgcatctgcacctgctcggggtgagccagcgggccgaactccttgttggaggggtccacggcttcgtccagcgtggcaccggacttgatcttctcgcggatggtggcgtcctgctcgagcagcatttccgcacgttcgacggtgctcatctgcgggacggccggggtttcattctcagtgttttcggtattttcgacaacttcagccatgattcatcagtgtacgcaaggccggcgattatgagcccggcagaccgtacggccatctgaacacccgctcacatgacgcaaaaccggctctgcacaaggcttgagagacctgtacacacggcgaatccaccatcacgcaacactcgcgacatgccgatttgcattgtccaccaccacaatgtaatatctacgtctgttgccaaacgggctgtagcgcagcttggtagcgcgcttcgttcgggacgaagaggccgcgggttcaaatcccgccagcccgacaactggaccggattgttgagaaatcagcaatccggtttttcgtttcctaacccaacaatcagaccaagcgatcggacagcggtaaacaacccgccgcgcacagcgacaaaccgcgtcgcggcaaggcccgtatttgttggcggaccaccgtaatatatcgctcgaatcaatcgattgccgcactgtttttgtaagtaatactgaagtaattagaggaaccatgaagaagagtctgcttgcactggcttcgggcgcgttcattctcggtgccgccgagttcgtgatgatgggtattctgccgcaggccgcggccgccaccggcgtggacatccccaccgcaggccattacatttccgcgtatgcgatcggcgtgtgcttcggcacactgattctggtgttcggccgcaaggtgccgccgaagaacctcatcatattgtttatggcgattgcgcttatcggtaatctggcctccgcgttctcggtcaatgccgccacgctgattgtcgcgcgcttcattgccggcctgccgcacggcgcatttttcggcaccgccacactcatcgccaaaaccttggccgacaagggcaaagaagcacaagccgtatcggtaatggtcaccggccaaaccgtagccaatatgctcggcgtaccggcgggcaccttgatggctgagttcctatcctggcgcctcgcattcggtattctggctgcatgggcggcaatgaccatcgtgctagttctggcatggatccccttcgttgcgccgattaaggacgccggcatcgccggtcagttcaaattccttactcgtcgtggaccgtgggtgattctggccgccgtattcaccggcaacgcaggcgtgttctgctggtggagctacgtctccccttggctgcagaagaccggtggctggtcgtctaacctggtaccgctattgatgatgcttgccggcttcggcatggtgataggcggtcttatcggcggtcgcatcacagataaatggcgccacgccggcactgccgcgctgggtcagacgatttcctgcatcggcttgctgatggttttgctactgccgggaaaccagggcactactgctttgctgaccttctggatcgccttcggcctgttcttcatctccgctccgcaacagctgttgatgaccgaagccggccaaggcggcggcgagctcatcgccggcgcagccgtgcaggtggccttcaacttcggcaatgccatcggctcgattgtcggcggcgcgatgctcaccactttctcgatgaactatcgctataccggtctgggcggtatgccgctggctctgcttgccgtagggctgctggccttctactcgtggcgctgcgaaaccgataccgacgccattcatcgcatgcgcgaaatcaaggtggactgagaccaagctcacagcaaactccctgacgcgtttgttcacagtattaatagactgaaatcagacacgattcagggaggtctggcggtatggacgaggaagcactgctcaaacaattcgccgcacaattcgcgcatggtccagacgatgccgacgacaccgatgcggcggccgcagcgcaaggtgccgattctactgcgaaccaggccacggacgatgccgatcaatcgcccgcaacctttgatacccaacaattcctgaacggactggacgcgattttcgatcgccacgcggcagccaccgaagccggtccgtacttggaacaggcgatggtggacgcggaaaacgccggcgacgaggccggactgctcaccgtactcaacgaaacgatgggcttctatcgctcgcagggccggcacaaggagaatcagtggattgtgcagcgggcgctggaactggccgctcgtatgggcttgaccaccggcacatccgaggcgtgggccaccacgctaatcaattgcgctaccgcgatgcgcgcggcccaacaatacgatcaggccgaggatttgtatcatcaggcgcagagtgtctgccggcattcgctggcacccaccgaccgtaggctcgcagcactgcacaacaatctgtcgatgctctacagcgagacgaatcggcccgacaaggcggaactggagttgcgtgaagcgctgcgcattatcgaagcctcgagcgtgaacccggacgcggatatcgacgtggccagctcgcacacgaatctggcgttgaccctgctgaccgaacacaagttggagggcgcgcattggcatgcagccaaggcactggaaatctatcgcaccggccatctggaacattccgcgcattatgcctccgcactggcgggcttcgcgcaggtgtgctttgccgagagacggcatgcggatgcggttactggataccggcatgcgctggccgtgatcgaggaatgttacggcaaggacaccgactactggcgtatcaccgccgacaatctgcggcaggccgaggaagaggcggcgaaggccggggtgacggttgacaatgcgggtgttgccggcgatgcaggcgcgctgccccagtccggatcacggctgccggacagcccggcacagggcaagaccggtgcggacgcgacatcttccccatccaccgtttcggtgtcgaccggttctgcgggcgcggccgaggccgtttccgcatgcccggtgtccggactgaagctggcccgcgcgttctggacgcagatgggcaagccgatgattgcggcgaagtatccgcagtatgccgggcgtatcgcctccggtctggtgggtcatggctcggaatgctacggattcgatgatgcgtattcgcaggaccacgatttcggcccgcgcttctgcctgtggcttacggatgaggattacgcggccatcggcgagcaacttgaggccgattacgaggcgctgccgcgcaagttcagcgtggatgcgcaaggccgcgtgacgttcgaggcgcatgccaggtccgatgcttccggggcattcccctccgcaggtgcaggctccaccatcatacccgatgcggcaaacgcacccacccccggtaccgctacggacgatgccgccactgccaagtcaggcgcggcgtcctctgatgtggcggaagcgatgacgactccgattgatgcaccgctcttccccgtcacgccccgcgcacaaggtgccaaccgccgtgacggcgtgttccgcatcggtgacttctttgagtcgatcaccgggtatcgcactgcgcccgcgcaaaccgcgccgcacgagtggctgatgctggctgaatcgactctggccgcagccaccaatggcgaagtattcgcagaccccactgggcagttctccaaaacacgccaagggttcaaggatatgcccgacgacgtgcggcttgccttgatttccaagcgattgggcatgatcgcccaagccggtcaatataatctgccgcgttcgttgaagcgcggcgacggcgcggccgcatggctgtccatccacgagttcgtgcaggccaccgcctcgttggtgttcctggttaacgtgccgatggtggtgggctatatgccgtattacaagtggcagttcgcagcattgcgcaagctgtctggctcgatgttcgcgctgttgccgaacgtgggcgaacagttggaaaccgtgatgcgattgagttcggcagcctgctatggaggggccggattcggcgaaggcggcaagggcgcggctacagcaatcgagaaaatcaacgatatcgtggagcagattgcggcggatatcgtcagagaactcaaacgcgaacacctgaccacgtccggcgagaccttcctcgaatggcagcgcccgtatgtcgaggaccacatcgtctccgatgatccggtgcttaaaagtttgtagattcaagctccctctgatgatccggcgctttagagctccctcatcagagggagctgtcagcctgcggctgtactgagggagggacctcagtacagccgccgcttccctccctctgtcacggcttcgccgtgccatctccctcatcagagggagatattagtgaaaggaacgtcgatgaccaacgaactgactgatgatgaactgcgcgaggctattgtgcgccatgaatgggatcagttccagcgcaccaacaatgagggtggacgcgcggcatgccaaggcaactggccggtgttccaccagatgcggctggcccagttcctcacatgggagcggccattactcaccagctatgccgctgatcttgacgcggccgaccacgtgggccgcaacctcgtgaccgaaaaatacggccgcatgatggcctccaccgcgccggaagatttcacgaagaacatagagccgtatattccgcgtccctctgaagagcgcgtggcccgtcaggaacaggtcatcgcccagcaagtcgcctgggccaaggatttccgcgagcgctaccccaagctcggcgaggcgatgcgcgtactcaccaccaccgaagacacaccatctgccacctcattcgaaacctatctgcgcggcgagcttggtacgtattccgaacggaccttccagctctacgaggtgatgattagcgagcgcgccgcagccagcccgcaacgcaatatcactgaggaaaccttgttgcacacagtccagctcggcggtttcgacactttggatgaggctgaagccgctcagcgctgacgacagtgcctccacgccgtcacgccccatccaccttcccgaatttgtgacgctcacggcgactcagtggcacatattcgggaaggagccggtaacgaccgtgaatatcacagactgaacaacccccagaaagacaatatcgtcaatgtgacaagtgcagccagtgtcaccatcacgcaaatgacacgacgcacgccgataatgctggcgcgataccgccacatacgttccagttcccacgcgaacagcatgaccaacagcacggtcagcacctgcaatgccctccacccaagggaaaacaactgcggttgaggcataaccaatacagccgatacgcctacggcgctcatatagccatacaacagcacggtaatcaccatcaccgctgtgccgataccggcagataagccggcaatgccgtgcaacgtacgctgttgggcggctcccagcccactcggcgtcgcatgcatggcccgcacagtcgccacactacgtcgcccggccagcaacgtctgtagccaagaaaacacagtcaagccaatacctaatatcgccgccatcacgatcagcacgggccctgccaccatcagaccggccagcacgccgagcgagccgacgataccggatctggtacgttgcggcgcggcgaagcgctggtgaggtgtcgcaccggcgacttggggcgttgcccatccatcggctttggttccggcagtcacaccgttcacccaattttccagcgcttgcgtatagccttcggccaatggcaggttcggggtgaataagccctcaccagcccgcatctgatggttgccggcaaaatagcgtacggtgacgttctcgttgccggacttgttggccgtggcgatgatccgctgcgccccctgttcgatgggcatggccgtatcgtaggtgccgtagttcaccagcaccggcatggtgagggatttcagataccggtcggcatcaaagtcggcataggccagatcgaatggcgcgtagtccagcgacatcaatttggccatgtctttgaccacgggcttgggcgcgccggcctcatgcgtataggcgctgacagccatggccatttgctcacgtccattgaacaccggtgcggatgtaagtatggcaaaggcaatgtcttgccgtttcgaggttagaatcgtggcgatccaggtgccttcggattcggcgtagatgccggttttggcggggtccacgccgcttatgccacgcagcacgtcgagcgaacgcccgtattcgcgagcaaaacgcgggtagtcgcgatgcagcacggtgtagttgtcgttgcgcttggccggcaccaaggtcacgatgccggcagaggccatggcgttggcgatatcgccgaaatcctcggcaccgctggtaccggacccgtgaatgaacagacaagccgggcgtggcccgggagcgtcgaccggttcacgtagtacggcgggtagcgtgacgccgtcgccggtcttgatggatagtcgggtttcacgcgtactatatcgcccctcgtggggaatgttcgcatgggcaggggtgatggtggtgtcggcagaagcgatagcgatgtgcttggtgtagggccgtgtgttccattgcggcatcatcgcccagccaagtgtggcgaataccagcgtcatcgccatcgcggtggcgatgacgctcgctacccgccgcgccgaaatccgtttcatagttactatgcctccccccatcagcatagaacggtcggctcttatcggtcggctcccgtcataatgtgcttctactgggaccgtaatgcaatggttgtaacgctattttctcttcttgacggcaccgactatggcccatacaacggccactattaccagaataagtcccactacggcgcagataatagccgtcagcaattgcggattcggcgagaacagcgaaatcatccgatccggagatatgcacccgaaaaccagcgcgatcacgccgataatcacgcctaatagtccgaataccacagtaagcgcgctgatgctctgtttctggatgttcttggcactcttgacatccttagcattctggacgttcttggcgctccccccaggctggcatggtttgccggcggtctgagactgctcataggaaggttgcgctgaagatgctgcgtacatcggtacatcatcggcagatggaatcggcccaccatccccctccacggcatcggcaactgcttccagggcaatccgatctgtggatggttcgatgggcgatggagaggcagctgttgcctgcgtatccacatccgagactggcgcatccgcatgatcgtcggggacgggtagcacagccgttttgtcatcatccgctgcggatggcagcaccgtggtatcggttcggtcatcgacggtcaccatggttgtggtctcggtggtctcgtcggtttcggaaggtatggccgtggtcggtgtcgcatcctcgatggaggcgaattccttggtttcatcagtcatgattccatctcctggttgtaacggcttgatcattccgattgcccggttgtgttcttgcttgtgctgttgccgtcgtatatatcggcaagcggctggaacgtggagcctttccaatcggaggcgtacaccacgttgacgcgtgcttccactgcatagggaatattgatttttaattctgggccgttgtccggcatggcggatcccttatccaaccattcgtaatcaggcccattcatgggattggtggcgctttcagctccgaagaaaacaaagcttagacccatgtagttgttgtataccatctcgtatttgccgccgacgtcactcgaagtgaagtaggagtcggcggtgccgaaggcgtaagtgcaggaatccggcagaacgatatgcacttgcgcctgtgttgcggctatggtgatggtaccgaccgggcaattactgatggaggttttgccatccagcatcttcactgtgtgcggtccatgtgtcttgtcccaatcggaccaatcaatgattgcctggtcggtgttgtagttttcaccgttgaacgccacaccttgctgcaatgtttcgaacgtggcatcgctggcatcggcaacgaagatgccatccttttgcacatcgttcatgccgtcgctgtttctcgcactgacagattggctcagtgaaacaacagtattgatgccgctggcaccaagatcacggtagtgcacgccatacgtgcctgaaacgatggtcatgcagagcgcgcatccaccggcaaccagtccgagaggaatcagaccaccggtacgccgccctctgaatccgagaatgatgaccaccagccccatcactatgcatactgcggcaatccagatggtgctcagacgcataatgccgataatgcccatgtcgtttacccaaatcagtcccatcagaccggcaaaggagaggaaggtaaggcccagtatgctcaagaccacgattgggcccgccggcttgcggcgcttggactcggtgggggcataagccgtcgcattcatacggtcgggggcaaacggcccgttgggtactgtgccgggcatcgcgctgggcactgtgcccggcatcacgctgggcatcgactgatagacaggctgtgaaacaggttgtgaaacactaggcgcggttcgtgaaacagattgtgaaacaggttgcggagctgaatacaaaggagatagagggaccggttgcgcggctggatatgaggcaggctgtggagctggatacgacacaggctgtgaaaccggtcgcggcgcagatgccccgaatccgtacccttcctgctggcgaatgccgcttttggccaacaaccatagcgctaaggcggcgagcgcaatacaaacccaccccgcacctggaatcacgattgccacggctaggaacaggaagcatccaagacaattccagtcccattggccggcaatgaggtcctcggccaagatgtgcccatcgcgtacatccggcatcagaaaccagccgagtgcgtacagagctgcgccgaagccgaagaacaatgtacatacaatcaccaacgcacgtactagtgtggggctccagccaagccgtaaagcgatgccgctgcatacgccaccgatccaccggtcgtcgccgcgaaccagtccactggatcgcacccaagtgaagaagcgtcgcgatgtcttgtttttttgcggaccaggctgcggctgtggctgatacggattcgcgtttggattgctcatgattccattacaccgcccgaccactgccacaacgctcggggaacaccctgattgttccctgaacaccgggtaaaaccccggccgcaacgccctgagcgcggcacaataggagtatgacgtcatctcccgaaccattgctgcccgcgcgcatgccgctgatgcgcccccggcagggccgctggctcaccggcgtgtgcaagggcatcgccctgcacttgggcatcggcgtggcatgggttcggattgcgttcatcgcactgaccgtcctctacggcgcaggcatcatcgcttatgtattcctgtgggtgttcatgcccgccggagacccggtggcggctgcggctcgcacagtgcccgttgatcaggcgccgcttgcgcgaggcaatcagccacttgccgctcatgacgacgaatcggctgccgcaccggaatcattgtccgaggccatccaacgtgctccgaaaccggccgtcgtggcattggccggtttcgcgttgatggccaccggactgctgctcaccagcaccggtgcggatgcccagattgtgcttccgctgctggtagggttgggcggcatcgcactggcatggatgaatcttagtccgcgaggcacgcagctgttgtctatgttgggcggcatcgcactgattttcatgggatgggcattgtatgtgcataatgtcagcattcctgggtggggcacctctcctcgacgcattgttgccagcggattcatgatgatcgtcggtatcgtggtggcggtgatgccgtgggcgaacgcgatgctgcaacgactcacccacgagcaggcattgaaggaacgcgaagaggagcgcgcggacatgaccgcccatctgcatgatggcgtgctgcaaacgttggcgctgattcagctgcactccgaggaaccgaccaccgtattcgccctggcgcgtagccaagagcgcgagctgcgcgaatggctgtatcaggaacgttccacatcggatcgttcggtgggagccggattgaagcagatcgccgccgaggtggaggacgagcacggcaagccgattgaggtggtcaccgtgggcgacgcgcggccgagtgcccagaccgatgcgctgctggacgccacccgtcaggcgttggtcaatgcggtcacgcatggcggcgagccggtgtctttgtattgcgaggccagcgacacgatggttgaagtgttcgtgcgcgaccatggcgaaggcttcgatatggacgccattccgcccgaccggctgggcatccgcgaatcgattatcggccgcgtcaaacggcgcggcggtacagtggagatagtgtccagggccggctggggcaccgaggtcagaatgcatatgccaatcgcgctgaaagcggcgcagggagaacatcgatgagcgagaatgagacagccaagattcgtgtggccgtggtcgatgaccatgagatgttccgtgcgggcgtaatcgccacgttgcgtgattccttcgatatcgtcggccaagcggcggacgtgcccggttcggtggcgatgatcgcacagaccaagccgcaggtggtgttgctggatgtgcacgtgcccggcggtgaaggtggcggcggtgccgagatcctcgccaaatcgcggccctactcccccactaccgtgtttctggcgttgtcggtttcggatgcgccgcaggatgtgggggcggtgattcgcgccggcgcccagggctatgtgaccaagacgattaccggcgctgatttgatttcatccatcaagcaggtgcatgagggctatgccgtgttctcgccaaaactggccggttttgtgctttcggcctttcagggtgtgccggcggcggggtctgatggcggcgctgatggtgcggcacgggctcatgatgaggagctggaccggctgtccgcccgcgagcaggaggtcatgcggctgatcgcgcgtggttacacgtataaagaggtggcggccgaactgttcatttcgatcaagacggtcgaaacgcacgtgagctcggtgctgcgaaagcttcagctttcgaatcgcaccgagctcacccgctgggccgccgataggcgcattgtgtgataaacgacagatgagctccctcatcagagggagctcatctgctcatatcactcggcgtcgcggaaaccgttggggttcttggtctgccagttgagggaggaggcggccatgtcgtcgatggtcagctcggccttccagccaagctccttctccgccttggaagcgtcggcgtagcaggcggcgatgtcaccggggcgacgcggcttgatcgtgtacggaatcggatgaccggcggccttctcgtaagccttgatgacctcaagcacggagtagccgtggccggtacccaggttgtagacgaacacgccttccttgtcgatgtggtcaatgacggccacgtgacccttggccaggtcgaccacgtggatgtagtcacgcacaccagtgccgtcgggcgtgtcgtagtcgtcgccgtagacctggacttccttgagctcgccgaccgcgaccttggccacgtacggggtgaggttcgccggaatacccttcggatcttcgcccagcaggccggactcgtgtgcgccgaccgggttgaagtagcgcagcagcacgatggtccaggacggatcggccacatgtacgtcgcgcagaatctgctcctggaacagcttggaggtgccgtacgggttggtggtgccgccggtcggcgtctcctcggtaatcggcagttccttcggcgtgccgtacacggtggcggaggaggagaagatgatcttcttgacgttgtgcttcttcatcaccttgagcagcacaagcgtggagtacaggttgttgtcgtagtattcgatcggcttggccacggactcgcccacggccttgagaccggcgaagtgaatgacccaatcgatgttgttttcggtgaagacgcgttccataagcgcctcatcgcgcacgtcaccgtcgtaacgcttgaccggcttgccggtgatctgctcgacgcgctcaagcgccacgggagacgagttgccgtagttatctacggaaataacgtcgtagcccttgtcgagcagttcgatgtcggtgtgggtggcgatgaatccagcaccgcccgtaaccagaacagtagtcatatctcctcctttggaaggacttgccttcggttttccttcagtattgagcttacttcacttgacctgtttcacctagcggcaaaaccaagactttcgaggaatgtttgcgtggtggctttctgcttgaagacggccgtgttgccgaggatgcggtagcagacactgccgagctcgtcacgtacggcttggtggatggcctcgcggtcgcggtttccggccaatgtttcagcgagttcgccccattcgagactgaattcgctgacttcatcgggcaaatcgcggccttcggcgagcgcctcctcgacgatgccgagctggtcgacgagccgtccgggcaggatgaacaggccttgggcttcgatcagtccaatcggctcctgcttgaccggccagtattcggggtgtgcatggaaaataccttccgggtactcgtcgctgatcgcattgttgcggaagatgagactcatctcatagccgcgttcggtgatgattacgctgggcgagagggcggattggcggttgccgtccgcgtcatggctggcgatgccgttcgccgcgtcgtcataaccgacccatgcctcgcggatgatgtcggatacgtcgatgatgctctggcggtttttcgacaccacacgcacggcggtaccgggccagtcgaggatttcgaccacggcgtccggatagtcggcgagcgtgaaggcggcccaagtggcggccttgtgcatcggcagcagttcgccgccgccctggtagtggtcgtgggcgagcaccgagccgccgatgcgaggcagcgcggcgttgcatccgaggaagtatccggggaagcggtccacgaagtcgagcagatgtccgaaggtgtcgcggtccacgtgcatcggcgtgtggtcggtgttcacgcagatgccgtgctggtcgaagtagccgtagggcgagaactgccagaaccatgactcaccgccgagcgtgaccggcagggtgcgcagcgtgcgcttgtcacgtccggcgaagccctcgttctcatggcagatcgtgcacttcgggtagccgccggacacggcgttgccggccgccgccttcttcatgttcttgaattcgggtttggcgaggttgatggtcaccgtcagcccgtgcgagtcgaagcgcgggttccggtcgagctgggcacgcttgacataattgttggccacacagtagtcgtagaaccattgcatggcggccatgccgccgtccctgtgctcgatgagcaggaaccggtcgtcgagatcggcggggttggcggagaggatgcccatgatggtgtcggcgtaggccgggccttcctccggatcgaagaggccggcggttgtggcggcggcgcggaaggcggcgagtagggggtcgggggtcttttcgtcagagggggcctggcttcggctgccgacaatgtcttggactgcgtctgacactgacgccgccgacgttgtggttttgggtccggggtaggaatccaggtggaagagggcgaagatttggttgcgggtccagtctgcgttgcgtggatcgaggtcgagatgatccaaggcgtaatcgactagggcgtcgatgctggcgtatacctcggtcagctgatcgctcattgctcggcccccatcatgctggttcgggtatggttcgactgacggctcacttggcagcctccatgatgtcggctacgatggcgtgggtttcactggccttctgctccatctcctgcacgagtttgatctgggtgcgggtgcgcaccagattgtgctcggggtacttggtggcgaagtagatatcgccttccaagtagtcggcgagaaagcgcatgccgcattccatggtgagcaggttgccgctgaacggcagcagttcggcctcgcgcgcggtgatgctgccacgtagttcgcccacgaatccttccgtgtaggcacggaacagctcggtgctgaaatgcaccttgctgaggtccttttcgtcttccagagcagtggacgcaccaaagcgtatggaatcgccgaagtcgaacagcatggagccgggcatgatggtgtcgagatcgatgatcgcacgcgccttgccggtggtggcgtccatgaggatgttgttgagcttggtgtcgttgtgggtcacgcgcaacggaatcgaaccgtccctgagcccatccatcacgacggcatactggtcggcgtggctcagatagaagtcgatttccggctggcatgcggcggcgcggccgagcttgtccgcggcgagggcggccttgaagtcctcgaaacgatgcggggtgtcgtggaagcgggcgatggtttcggtcagctggctggcgtcgaattcggacaggaagttctggaagtcgccgaatgcgctgccggcctcgcggaacacgtccgggttcggcacgaggttgtacgacacggtgtgttcgatgaacttgtagacgcgccatgcgccgccatcgatctcggcccaggtggcgccggaggtggtgggcacaatgtccagcgtctctttgccctgagccttgagagtggaggtgaccagttcgacattgcgcatcagattcaccgtatcggggaagatgctggtgttcatctgttggaggatgtagcgggggccgtccgtggtcaccagataggtggtgttgatatggccgtctccgtaaggttcgatgccggtcacggcaccttccagcgcaaaatgcgaggcgatgccgaataaaacttcattgctttcggtcatgatgggtccgttctccaaaacgcgggaatcaggcttcacgccatgcgatgccgctgtcgggcaggtcgaagtcctcggtggtgccgtcggccagagtcaccgtggtcttctgcggctgatcggtgttgttgattacgcagtacaacccttgctcggggaagtgcgccacctcgcactccgggttggacgagctccaagccgcatacttgtcttcgttgtgggaggcgtagaacagcacgcgttccagcagtcgggcgttggccgccgaatagggcagaccggagatgtacacaccgcggccttcgccataatcattggtcgcgagctgcacctgcccgccgtccgcgcgcagcagggtcacgttttcattgaccggatacgtgttgagcacgggttcgccgaagtcgatgccgcccaacggcttgatggactggccaccgccgcaaccgctcagtgggatgcggtagccggcctgttcccaagcctcgcgggccgccgggtcgaccggcacatcggcggtgatgaagtggtccggcaccaccggtgggaagtacttgtccacggagagggtctgatagcgctcctcgtccacgccaatcacgtcggccagctggaagaaccggcccgcttggaagcgcggtgccgagctcggctcgcccacgcccacgaacgcgccgccaccacgcacccaggagcgcacggtttccacgagcttcgggttggtccacacgtcgccgccggtgaatgcggtgtcgaccgggccgccgttgatgattacgtcgatatcactatcgatgccatgcgcgagtacgtcgtcgaagctgatgaaccgcacgttcacgcgcatgccggacagggattccagaatgccgtagtaggagtaggtctgcttgttgggcagggcgtgtgccacggtgaacgccatccaggaacgcatcttgccccaggaattcagaatcgccacgttgagctcgccttcggcggccaccccaccggtgcggtcgtggatgtcgcggaattcgtcggcgatatgggtcaccgtgtccacgaacttcgggaacttggcggccaaggagaggtagccaccgtagcccatacggccgatcggcgaacgcaggatcgcgcggcgggccttacgccagttgtcgaggccttcgatgctcgggtcgttgccctcgtagaacgtgtcggggaagaagtacggcaggaagcgtccttccgtgtatttgacgcccggaatgtccgcgatcatgcgggtggtggtgccgtctccgatggagccgacgaccgcatccaaacccagcttttcgaacccgtccttatacggttcggtaccgatccactggtcgccaaggaacatcatggcttccttgcctgccgcgtgcgacatgtcggcaagccgcttgacgttctcgcgcacgaatccggagaggaagtcaatccagtcgcgttgcgccttgcggggcacgcgccacgcggagttgtaggcaccgccatccacgaaatcctccggacgcagacggtaaccgtactccttctcgaaatcgtccaatgcgcgcgggctcacggtgcaggcgcaaccgaaccagtcgaccaccttttcgcgacgcttggcatcgaacaggagcgtgaactggtagaagaacgtggtgaaacgcaccacatccacctgcgggctgtccttcagccactgctcgaacgtatcgaacacgaacttgcgggtggccggatggtagatgtcgaacggaatctcgtgttccttgtctccccaatcattggtcaggtggttgtacatctcgaccgggtcccagatgatgtaggccaggaaactcaccgtgtattcgtgcatcggcacggcagcggtcacgtgcacggtgtcctcgcccgggtcgagcgtccagccggacgggtccacgacctcgcccgtggtgcggtccacgacttcccagtacttatgagggtcggcgtcacggttaggcttgagctgttcctcgaagaaaccatccatcagcggcacatccaccgcgttggactcggccaggatacgggcggtcagcaggtagacctgcggggtctcgtccatgtgcagggtgatccactcgttgtgggcgcgggtcgggaagtaggcgctgtagattttcttgccaagagcgagcactgcctcgtccagatgcgtgccgtcggagttgcggatggcgtccgcaccccacaattcggcgagttccttggtcttttcggcaaaattctcttcactgggcagcgtgaagcggccggtgctggtcatgagtgctcctttgtggggttggtcatcaaaaaactacaaagcgacgaattcgtcgcatacaaaatgaccggcgtcatcgcgggccctgggaccctgactgcgtagatccttgacgcttacggtgacgccggacgattggaatcgtgtcactgaatatgggagggacgttgcccggcaccggaaggagtgacacgacatgccgggcagcggattggttagcccttgacggcaccggcggcgaggccggactgccagtagcgctggaggccgaggaacagcacgatcacgggcagcacgccgagcaacgcacccatcatcagggcgccgcgatcggtgaacgtggccagcgagaccatgccgtacagaccgagggtcacgggcttcaaggtgtcggaagacaccatcatcaacggcagcaggaagttgttccacgtggccacgaacaggaacaggaaaatcgtcaccatggccggggccaggagcctcagcacgatggtgaagaagatcctcgcctcgctcgcgccgtcgatgcgggcggcttcaagcagttcgtccggcaccgaactctgtgcgtacgtgcggcccaggaagaagccgaacggcgaaacgcagcacgggatgatgatcgagagcatagtgttggtcaggtgcaacgtgtggaagatcgagtacatcgggatggtcagcagggcggacggcatgagcatgcaggccataatgatgccgatggccgcgttcttgccgcggaagttgaattttgcggtggcgtagccagccatcacagacacgatggtgccgatcaatgccgagacgcccgagtagatcagggagttcagcacccagcgccagaagttgccacgagtccagccaagcagcttggaatagttagtggcgatggcattgggcagctggtcaagcggcacagcaaaccacatgccgttgctaccggtcatctgggccggcgtcttggtggacgcgatgatggcccagtaaatcgggaacaggaagtagatcaacaccagtaccagcagcaccacggtgagggtcttcacggccgcggacggtcgcatggagcgaggcaaatcgtgttgcgcagcctgacgctgcttttcgagcttgcgctcggcctttttgcgggcgcgttcttcaacggttgcggagctcattactcgttcaccttcctttcggccaaggtgtacagcacggcaagcacacctgcgatcagagccatgacaatggcgatggccgaggccggaccgtcaccagacggggtaatggtgccctgagaagtgttcatggccatcatcatcggtgtatacgacttggaaatacccggatcagccgtagacatgatctgcggttcgttgaacagctgaatggtgccgacgatggaaagcagcatggccagcagggccgcgccacgcacgttcggcagcttgatcttcgtggcaatctgccaaccattggcgccgtcgatacgggcggcctcatagaggtcatgcgggatggcctgcagtgcggcaaggaaaatcagcatgttgtagccggtgaaggtccatgtggtgatgttggccatcgagccgagcacgatgttcttgttgaagaagtccacattgacgccgatggcggcaagtcccttgacgatcggcgagatttggccgttgtacaggtagacccagataatcgaggccacgacgccggggatggcgtagggcaggaagtagcccagacggaaaccggtgacatgcttgaccacgaacgagtcgatgacgatggccaacgccagtgcggcgatgatcatgatcggcacctgaatcagggtgtagagcagcaccctgccgacgccggaccagaagttgccggaagtaatagcatactggaagttctggaatcctacgaatttattgaccagctcgccaccgccgtatgcgccaccgccctcggtgacctgacggaagaagctggaatagatggcccagatgatgggcaagatgaacacgaaagtgaacaggacggcgaacggtgccatgaacgcccagccggtgcggttctcgcgcttctgagcgccggaccgcttcggcttggcggcggcacgcctaggtgctttgcccttcgcctgagtagtggatgcagtcataatacaaaacctgtcttcgcaaagaacagtaaaacaaatgacaagggccacagcgcccctgcagcaatacccccaaacaatacggaaggccggagtatgtgccccggcctttcgctatggtgatgcgaggcatcggaggtcttggacggccggctatttcaagccggcccgttgacaagacctagtgaggtcactccttgacggacagaccgaggttcttcagcgtatccaccgaggtcttctgagcggtgtcgaacacatccgaaaccttggcagaaccatcggcagccttggcggcggtctgtttcattgcagcgccgactgcggagaagccaggcatgtaggtgaagtcacccatgttgtcgttcgcggtcttgaactcagccatgacatcctgtccgctgaagtagtcggaccacttctgcggggtcttggcatccgcggtggtggcggccacgacaaggccctgggagacaaggtcatcaacctgggtgttgaaccagtcaaggaactccatggcttcggccgggtgcttggaacccttgagcacggccacaccggaaccaccatcggcgccggtcttggtgccattgccgaaccagtcaccgagctgggtgaccttccactcaccagcaccagtgccaccggcggaatcgatgaacagtggggcttcccaagcggcggccacggtgccgatcagctgaccggactggatggagttatcaaacgatgcatcccaacgcgggttggtgagggcggccttgttgtcgatcagctgctggtagacatcggccacggccttggagcccttagtctgggtgttgacgacccaggagttgccgtcgaccttgtaccacggaccggaagcgccggcctggccggacatcatcatcatggcctcatcaggttggaaggtcatgatgtacttgccttgggcagcggtcttcttggcggtctcaatgagctcgtcagcggtcttcggcacggtgatgccgagcttctcaaattcagcggcgttgtagaagtaagtcagcgggccggtgtcctgcggcagaccgtaggtcttgccgtccacctgcatcagtgcgaacgggccggaagcgaaatcgtccttgtacttggcggcctcatcggtgacatcctgcagaaggcccttggtgaagacctcaggaacctcggagtaaccgacctgagccagatccggcgcattgccagccttgacgtcggtctcgagcttcttgatcatgtcggcggcattgccatcgaacttggtggccttgacctgaatgttcgggtgctccttgttccacttggccacaatgtcgttgaccaaggtcatgccttcggaatcgggcagacgatgcatataggtgatgttgaccacaccgccatcgctgccggacttcgtgtcgccggcagtgtcgctgccgccgcaaccggccaaaccaatacccattgctgctaccgcggcaagagcagccacgatgcgcttgttgtgcgataccatatctctactccttcctagtgaaatcatcacctcagcgtgatgactgattgctaatttaggcctttgctcttttattgtcaacttagctaacaattaccgcgcgtcccgttgaggtgagtggcattaaaccgattcgatgctcgattgtgcgggtttgttcatttcattaactccccttacaaagcaacgtacttttggtccaccggtagacctaatgagatattggatagcggcaacaatccaagacgttagcttgcaatcgtccaccacaaattgcaagcacttgccaacattatcggttttcaggttgccggcgcgatacccgactaggggggcaccgcgccttaatgagacgctacacgagcagtctcagcaactggtagagctgccacaggctacgcacgttgaagtgcgtgccgtcaaccgtggcgttcgcctcgccatcgcccacatggacgatcacggtgcgcccgttcacggtcagactaccgtgcatcgtgatatgattcatcttgcaaccttgttgattaaaagcgcaagccggtaatcaacgcaaaggcccgatgccgcaaacgtcgggccttttcttatcggctcacgccgattggcccgtcatatcaacggggacaccgcatgttacggcattacaaaccaatatatcagcaccccggtggcgatcaagaagacaggttccagaaaaagaaaaagggcctgggcatgttgcccaggcctcggttcgcggacagggcgagattcgaactcgcggagggttgcccctcaacggttttcaagaccgtctctttaggccgctcagacacctgtcctgatgcgcgttcacacgcgcaagtattcattatacagaagggagggatgttgatattcggcagtgcggtcggtcttggattcgcctgctggctattagcgatctctccctcagtcagctacgctgacagctcccccattaaagggagctaaagcacgatgagactcaggcctcccacttagtgggctcgatgacttccttgccgcccatgtaggcgcgcctggcctgcggaatctcgatggagccgtccttctgctggtggttctccatgatggcgaccagccaacgggtggtggccagcgtgccgttgagcgtggagaccggacgggtgccgccatcttccatacgctcgcggatgttcagacggcgagcctggtactcggtgcagttcgaggtggaggtgagctcgcggtagcggccctgggtcgggacccaggcctcgcagtcgaacttgcgggcggcggaggagccgaggtcgccggctgcggtgtcgatgatgcggtagggcacttcgaccttggcgagcatctcctgctccatggccagcaggtgctcgtgctccttgtaggagtcctcctgcttggcgtagacgaacatctccaccttgtcgaactggtggacgcggatgatgccggaagtgtccttgcctgcggcgccggcctcgcggcggtagcaggaggaccaaccgcagtagcgcagcgggccgttgccgaggtcgaggatctcgttctcgtgcatgccggcgagcgccacttcggaagtgccgaccaggtactggtcgtcgggctcgcgcagacggtagatctcgtcggcgtgggagttcaggaagccggtgccgcgcatgacctcggggcgcaccagcgtcggggtgatggccagcgtgaagccgtgctcctcggcctggtccacggccatggtgagcatggcgatctgcatacgggccacctggccacgcaggaagtagaagcgggagccgccgaccttgacgccgcggcgcatgtcgatgccggccacgccggtgccgagggtcaggtggtccttgggctcgaagccttcggccgcgaagtcgcgaatctggccaaccttcttgacgaccacgtagtcgtcctcgccgccttcgggagcttcgggctccacgatgttggagagcttccacatggcggtggtgtattcctcggcggcggaatcggccttggacttgtattcggagaccttctgggacagttccttggtctcggcgatgagcttggccttctcgtccgccggggcggaggcgaccttcttgccgatttccttctgctgggcgcgagcctcttcgaaggccttcagcgcctcacgacgtgcggtgtcggaggagagcacttcgtcgacgagttccacggactcgccgcgcttgcgctgggattccttgacgatatcggtgtgttcacggatgaattgaatatcaagcatgggcaccagactagccgcgtaagcagacaccgacaatggccgaatgcgcgggagtcacgcggaaatcacagggaagcccgggaaagtccgcggacgggtccacccggccaatttcgtcagatgagacgcgattgaaccataatcgcgccccacggggctgttgcgtgcaggaaatgttcacgtacggcgcaccatggccgcaaacgacctccccaccgataacaataggagccatgcctcagcctgccctcaccgtgtttctgatcatcgccgcaatcgccattgtggtggtgctcatcgccgtcatcgtcatcgccctgcgcgcgcagcgccgccgcaagctggctcagacgctggagaagcgccgggacgacgaggtgcagtacgccttcatcgtgaatccgtccaaaccgcaggccgaagcccgccggctgcatatccagaggttctgcgaggccaaggggctcaatcgcatccgcttctacgacacccagcttgacaaggacggcagggtctgcgcgcttgaggcgctggaggacggcgccgacgtggtgatcgcggtcggcggcgacggcacggtgcgcacggtggcgagcgccgtctccggcaccggccatgcgctgggcatcatccccatcggcaccggcaacctgtttgcccgcaatatgggcgttcccgtggacgatatcgacgccgcgctgaccgtggccacctcccacggctcccgcctggtggacatgggccgtctcaccctgctcgaccacccggaggacgaccacggccacgccttcctcatcatcgccggcatcggcttcgatgcggccatgatcgacgacaccaaccccgagctcaaggcgaacatcagctggctcgcctacttcgtgggcggcgtgaagaacctgttcgcgccgaagttccgcggcacgctgacagtcaccagcgccgacggctcgacccacaccatcaagaatctcgatttccgcacggtgatggccggcaactgcggccagattcccatgttctcgctgatgccggcggcatcctatgacgatggtctgctggacttcgaaatcatcgacaccaccggcggcatcctcggctgggccaacctgttcggcgacgtggtgcaccagacgatcatcggcaagcccgaacagaacccgctgtccacgaactcgaccatcgaacaggtccagggtgtcagtgccgaaatcacattggaaaagccggccaaagcgcaggtggacggtgacatgctgccggaaacccgccacatccgtttctcggtggatcaccgcgcgctgatcgtgcgcgtgcccgacgcctccgcgctggaaaagaccgcgcaggccgctgcttcaaatgccacctcgaatttcgccgaaatgaccggtacactcgagccgattcgctgattcgccaatccgctaatccgttactacgatgcgtggccggtgactcgggcgacatgcatcgccaaataagcgatttcgtcgtcgctgatatccgtgtcgaggcgcagttcgagcagggaggcgatggttcgcgcgcatcgcagcgcagcggggtaggactcacgaatcaccttcatcaccggtgccggctcgtccgtcagttgctggtgctggtggatgcgtacgaacaggtagcgcaggtgggtgatgaaccggcccacgttcacggaactgcggtccaacgtgatgccgtagctgtggtcgatgatgtcaagcagttgctggatcacgcccgtcatcgtgtacgtataggacaggtcgccggtggcgaagccggcgttgaccagatgcatggcaagcgcggtggcctcgccgtccggcagcgtgacgtcgagccgtgcattgagcgatgcgagcatcgcacgcccctgcgcgtattcctgcgggtacaggttgctcacctcgccgagcagcgggtaggtgatgtcgatgccgcgccgcacccgctccaccgcattcgccacgtggtccgacagggccatgaccagcgtggtgctgccggtctcgcgctcccccagtccggtctcctgcatggattcgacgaccacgcggatgatttcgggcggaatgtccgccagcatctgcgccagatggtcagggtcgcgcccgtccgatggcacgaaggtgcgcacaactttcgactcgtcgaccgtctgccccggcttggcctggaaccccagtccgcggccggtgagaatcacctcaccgccgtcgccgcctttggcgagcacgacgttgttgttgaacactcgcagtatttccatggcatcctttcgcaacgtcattgttccacatcgatgatcgggctgccggctgatacggttttgcagtcgccgccgttgtcgtcgctgctaccgtcgccgatcaacggcgtgaccacggtcagttcagcggcgttgaccaccgtcaccaccaccacaacgctgtgcccggccgccgcgactttgccgaaatccacggtggccagtggctctcccgccgcgatccgctcgcctttgcccacggccacgacgaatccctcgccatccatattgacggtgtcaatgccgacatgaaccagcacttcgatgccgtcatcggttttaatgccgaaggcatggccggtccgggccacggttttcagcgtgccactgaccggtgctagcacggccgtctcgccggccgtctccggcacgacgcctacaccctcccccagcgcgcgggaggcgaacaccggatcgccagtcgcttccagattcatcaaccggccggcgaccggcgacaggatggcgttggagtcaggagtccgatcggaggcaggccgcgatggggaatcttccgcagactccgcatccgacgatgtcgcgccaatccctctcaccgcatcctgcgagcgtacgttctcgcccgccgagaccatctgcgcctccgtggcgcgcggcggcgtacggtacccgaacagcaccgtcagcaccatcgccattacaaacgcaacggcgatggacagcgcgtacacccacattctgtcaaacaccggaatcgtcagcaacgaggagaaggcgaacgccgtagtcgtgacgccccgaaccatctgaccggatggcagcacggacgggaacagccagccaagcaccgcgctggtcacgccgccggccgcgcagccggcgagcagccagcggtagacgcggcggtgatgcagatggatgccgtacaggctcagttccgaaacgccacccagcaatcccgcgagcaacgcccccaccgcggtctgccgcatggccgaatccttgccgcgtacggccagcacgagcacgccagcggtggcaccgaagcaggcaaagttccatacacccatcggaccttggacgaaatcgtagccgagcgcctgaatgttcatcagcatcagggcattcaacggccagtgcagaccgagcggcacgagaaacgggtagagcatcgggatgatgagcgcgaataggaacggcacgtgcgcgttaagccatgctgtggccgctcccagcccaccgccgagccatattcccagaggcccgatgaccagtatggtgagcgcaaaaacgacgaccagtgagaggaatggcacgaacaccagctgtacgctgtcgggaatgacgcgcttcaacccgtggtagaccacggcgagcacggcagccatgagcaacggcacgaagacgttgccgccgtagtcgttgagttgaatcggtatgccgaacgccgacacggtgcaggtttcggcgccgaatacggcgttggccgagcattgaatcaccccggagagggcgctggatacggacgtcccggacgtcccggacattccggacatcacgccagtaaactgcggggtcatcagcgcggccataatcgcgccgccgagccaggggtcgacgtccagtttcttggccgcattgtaggcgatcataatcggcagaacggtgaacacaccctcccaaatcgccttgagtagtatccagccggcggaggtctcgccgtcaggcacgatgccgagtgcaacgatcacgttgacgatggcgatgaccagcgaggcaccgagcagtacacccagaatcgggcggaacgagtcagacaggtagtcgaaaaacgcggcagcccaagcgcgggcggcactgccccactcgcggacggtacgaggcgtgaagtgacgggatgtattggatgggccgcaactttgttcggcgtcggtggcagtatcgcgcgatggtgcggcatcgtcggaaaggtacggcgcggactgcgcgggttgcgtgggctgtgtggattgcgctgactgcgcgggctgcgctggctgagtgggctgcattgactgagtgggttgcgttgactgcgacgctgactgcatcactgccgatggcaattgcgctgccggcatcaatcgcgccgtccgcagccgaacgatctgctcgtacaccgaggcgaccgctccgccgatgatgacctgataacgattgccggctcgcgggaatgcaccgaggactccggggatggattcaagaccgtgctggttgacatggccggcatcggccagttcgaagtgcagtcgcgtggcgcaatgggtcaggctggtaatgttcgcggggccgccgacggcatcgacgatgcgcgccgcaatcactgcaggcgttgcgttcgatgcgttcgccacggttcctccttgctgccgtatgccactgtgttccattatcggcgctgggtgccccaaaagcacggcaatgccggcaaagcatcgcgaaacggcaactatgcgctacggtgctccgcgatggtgtcccgccataatgttccgcgatgatgcttcgccacacccgttctccgtatttgccgcagcgcccattccgacatcattccaccatgcagaatcctgcaatcgttgtcaaaaatcatcgttttttgctgcctattcggagtgtcgcgactgcggaagtcgtattctatctttcacacacgttgcgtagcagggttgttactcaaaacgaggcaagacctggagcgacgtggaatttgcgtatcgtaatatgcgaattccacgttgttccaggtctttttttgttttcgggcgacttcagacaatcgaagcctgaccttgcacgcggcagaggggccacgcaacaggcgcggtccgtcaacggcgaaaggacaaggcaatgacgacgacaacggcatcacccgtatcgaaacagacggcatccgcggcgcaggaaaccagcgcaaccggtgcggcggccaccgcaatcgaaaccatcgaaaccggcgtggccggagtggcgggcgcggccacaaacgcggcagccaacgcaatcgaggacctcgaagccgccgaatcgcacggcttctccacgcgcttcccgctcaacagcgcattcatcttcaccttcggcgcgctcggcggcatgctgttcggtttcgacaccggcatcatctccggcgcctccccgcttatcgaatcggacttcggcctgagcgtctctcagaccggcttcatcacctcctcggtgctgatcggctcgtgcgcaggcgcgctgtcgatcggcgcactgtctgaccggttcggccgcaagaagctgctcatcgtctccgcgctgctgttcctgctcggctcaggcctgtgcgcctcctccaccggattcgcgatgatggtgtgcgcccgcatcatcctgggtctcgccgtcggcgcggcctccgccctgaccccggcgtacttggccgaactggcgccgaaggagcgtcgcggctcactgtccacgctgttccagctcatggtcaccttcggcattctgctggcctacgcctccaacctcggattcctgaaccacaacctcttcggcatccgcgactggcgctggatgctcggttcggcgctggtgccggccgccttgttgctgctcggcggcctgttgctgcccgaatccccgcgttatctggtgaacaagggcgacacccgcaacgccttcaaagtgcttacgctgattcgcaaggacgtggatcagacccaggtgcagattgagctggacgaaatcaaggccgtggccgcacaggacaccaagggtggtgtgcgcgaactgttccgtatcgctcgtccggcgctggtggccgccatcggtatcatgctgttccagcagctcgtgggcatcaactcggtgatctacttcctgccgcaggtgttcatcaagggcttcggcttccctgaaggcgacgcgatctgggtgtcggtgggcatcggcgtggtgaacttcgtgagcaccatcgtggccacgcttatcatggatcgtttcccgcgcaagggcatgctgatcttcggttccatcgtgatgaccgtttcgctcgcggtgctcgccgtgatgaacttcgtgggcgacgtggccgtgctggcagtgccgacgatgattctcatcgctttctatatcctcggctttgcggtctcgtggggcccgatcgcctgggtgcttatcggcgagatcttcccgctgagcgtgcgcggcatcggctcatccttcggctcggcggcgaactggctgggcaacttcatcgtctcccagttcttcctcgtgctgctcgatgcgttcggcaacaatgtgggcggcccgttcgcgattttcggcgtgttctcggccctgtccatcccgttcgtgctgcgcttggtacccgagaccaagggcaagtcgctggaggaaatcgagaaggaaatgaccaagcgctagacaaccggcacacgattcgcacaaaagttgacaactcttaacataagagtacccaaagtggcgaaaaacgtggcagaatagggaacatggtagcaaacaatgcgggtcagcccgccaccccagcagatctgattaatgtcgatgaggttatcggcaagtactatgacctcgtccccgatcccgaagtccccgagcagcgtgtcatcttcggcacctccggtcaccgcggatcgtccctgaagacctcgttcaacgaggcccacatcatcgccatctcccaggccatcgccgaataccgcaagaaggccggcgtcaccggcccgctgtacctcggctccgacacccacgcgctgtccggcccggccaagaagaccgccatcgaggtgctcgtcgccaacggcgtgcacgtgcgcgtcgactcccgtgacgacttcgtgcccaccccggtggtctcccaggccatcctgacccacaaccgtgcggtcgacggcacccagcgcttcgagggcgagggcctcgccgacggcatcgtcgtcacgccgtcccacaacccgcccaccgacggtggctttaagtacgaccccgtcaccggcggcccggccccggccgagaccaccaacgccatcgccgctcgcgccaacgagctgctcggcgacttcaagtccatcaagcgtgtgccctacgaggaggccatcaagtccgagtacgtcgagggcttcgacttccgcgagcactacgtggacgacctggagaacgtcatcgacttcgacgtgatccgcaactccggcgtgcgtctgggcatcgatccgctcggcggcgcttccgtgaactactggccgctcatcaacgagaagtacggcctgaacatcggcgtggtgcgtcctgaggtcgacccgacctggcgcttcatgaccatcgaccacgacggcaagattcgcatggacccgtcttccccgtacgccatgaagggcctggtcgacgagctcaacgccggcgcttgggacaagtacgatctggtcggcggcaccgacccggacgccgaccgtcacggcatcgtctgcccgaactggggcgtgatgaacccgaaccactacatcgccgtgtgcgtggagtacctgttcggcggcaaccgtccgggctggcctgagggcgcagccgtgggcaagacgctggtctcctcttccctgatcgaccgcgtggccgcatcgatcaacgcgaaggtcatcgaagtgccggtgggcttcaagtggttcgtggacccgctgttcagcggcgaagtcgccttcggcggcgaggagagctccggcatgagcttcctgcgcaaggatggccgcgtgtggaccaccgataaggatggtctgatccccgacctgctggccgccgagatcactgccaagaccggcaagaacccggcccagcttcaccaggagcaggtcgagcgcttcggcgagtcttggtacaagcgcgtcgacaccccgaccacactggagcagaaggccaagttcgcggcactgtccggcgacgacgtgaccgcctccaccctggctggcgaagacatcaccgccaagctgaccgaggcaccgggcaaccacgccaagatcggcggtctgaaggtcaccaccaaggacaactggttcgccgcccgcccctccggcaccgagaacatctacaaggtgtacgccgagtccttcgtctcccccgaggctctggacaaggtactcgacgaggccaccgtcgtggtcgacaaggccctgagcgagtgaaatcgctgcgttagtcgcgttcaccgcaaccaataaggctctgcattggattcatgcaatccactgcagagcttttttagcgcatatgcagttcgcgaccactgaaacacgcaggtcaacggttctcctcatgcaccgtgactgcattttctcaacatcactgcagggcaggacggccatatgaccgcgaaacgttcgcctgcctaccatcatcattgtggggtcacagcggccagatgaccgccgaagcgttcggtcggcttgcatcatggtcgagttttaacatcgttgtgggacgccacgacgaatttgcccattccagagctgccatcccacaaaagcgtgggacaacagctaagtcaatcgttttacatttcccccatcccacacactcaaactggaaaccccggaaagacgccattcctgccacacccgtcacagccattacccgaggggccgtgggacgccacgcaaaaatcggcaaaacatgcgtagcgtcccacacccattggcgcaaatccacgctcaatgcaccgacaacacccccaatcgaccactatgacacatttccctccacaatcgaacactagtcattcacgaaatccatcactacgaggcatcgcaatcgaacggcatgcaatatcaagcacacaccacaacaacaggtcgtacaaatattgcctttacatcagtccgtttcgaacatcatggtcacagcaggctctgcgccaactcttcaagagacatggcaactacatgaaactcgaatacggcaccgcgcgaagcaagcgccctcgccacgttgaaagcgaattcagcacgagcgtcctcgttagcgatacttgccgccgtggcgacgaagaccagccatctccgcccgaccagcacaccccttttctcttggtcacggcgccattgagtcttactcgtacgatgatgatcgccatcatattcaacagcgaccttgaactccggccacgctaagtccaacgttatgggagctccagatgcaaaagccgcatccggcaccacatagttcgcaaccggctgtggaatcccatgcgctaccagagagagtcgttcttctgattctttgggcgaatcagcaccaggtgatatcagaggcaatgctcgaacgcaggacgggcgccctctgaatcgggtaaattgctccacgaacttcaccagatcctgatagattgcagcagcatcacgatccttggccaatactggctgtttgctcgtagcagcgatgacggcatccccgagcacaatcagggactcaaaagaaacatacggggcaagttgggcccatacgtgaaacaggtccagcgcaaacacgtgttggttcatttccacattggcggctttagccgcatgtttccaaatatgcgtttgcagtggtgcatggcgtgtacgaaaccgcttgctcttaacgctggatacagtgtgcagcttggccgagtcgaggtcgcaatcggcgggaatcggtacggattgcagagcgagggaagtggtcatgccgaaaagcagcttcttgcccgcccgtttcgcttcctcagtgcagcgtgcgaccatgtcgcgtctgcgctgggcgaggctttcgctcatggtcggtgtcgctgcagaatcatgtgcaccactgttcggcgatgacgagtcgcgagaagtcgggtatttcgagtcagtagaaaatgaccccgcaaattcgggcggaacaaaaactgcctccgattcttccggaggctgatcgtatatagagcctggcagagctccatagttggtgatgccgtcggtcatcctgttcatgacaccaccatatgggtagtgggtgcggaaacggaagccgatccgaggtatgtggtcctagcttcacttacgcacattcattgtggataaccatgtggacacctcacttatacacatagtcatccacctcttcaaccccgatttgacacactaactgcatctgatatgattacagtatcataactgtacacatcatagttacagtatcgactcggtaaggaggtcgtttcatgaacggcgaccattcactggcagtgcacgcattggtctaccttgaccatcgcgccacacacctgcccagtcagatcctggccgagaacatatgtaccaatgcggcgcgcgtgcgcaaagtaatgcgaccgctcgcctcagccggactcatcgccactaaagagggtgctgaaggcgggtacgctctggcccggcccgccgccgaaatcactttgcgtgcggtagcggaagccaccggcaccacttttgtgaaagtgaactggacaccgggcgacgtacacgaggactgtctggtgtcatcttcaatgggcgcagtgatgaacgacatctatgccgggctcaaccgcacttgcctcgaacaactcgaacacaccaccatccacgacatcaccgaacagatattcagcgagcgcaaaggctaataatcccgcgcgtttcccctagccagcatcagtcgataacgcttcggcagtcaaagaagaaaacagacgccgcacggcacacaacacatcagcacaacgcactcttatcactcgaatacgtaaggaagtaaccatgtccatcagcacacccaatgccatcagcacacccagcacctcccccactatcaccaccgacgccctgatcattggattcggcaagggcggcaaaaccttggctgccaagctcagtgcagccggccgcaaggtcgtcgtcgccgaggcaagcgccgacatgtacggcggcacctgcatcaatatcggatgcttgccgtccaagtcactgattttgtccgccgaacaggcgcggcgggatggcgcgaacagtactcccgaaacccgcgaagcagcgttcgaggctgctatcaaggagaagcgccgcgtcacttcgatgctgcgcgacaagaactatcacaagctcgccgaccaagacaacatcaccgtaatcaccggccgcgctcacttcaccggccctcatagcgtggaaatcgccgccgctgagggcccggtcgccgtgaccgccagcaagatcttcatcaataccggtgccacgccgcgcattccggatattcccggtatccacactacgcccggcgtctacaccagcactggactgatggatctcgacgatatgccgcagcgactggtgattatcggttcaggattcattggacttgagtttgcctcgatgtttgccgatttcggcacggcggttaccgtgctgcagcacaatgccgagttcctgccgcgcgaggatgcggatgtggcggccgcgattcgcgcacagttggaagcgcagggcgtcaagttcctgttcaacgcggataccaaggccatcgcgcctgctgctgacggcggcgtcaggttgtccgttgcggtgaagggtatgactcgcggcgcatcgcaagcttgcgattccacccccgccggcaccgggaacgctcataccgatatcaccggtgccaccgacgccaccggcgccaccgacactacaacaaccaccagccccactagcaacccgaccgatcacgccacgatgtcacacgttcaaacgaaaccatcagacgatggcgagccgcggttcgccgagccggctgaagcccgattctgcctgaccaccgacgcggtactggtggccaccggacgtacgccgaacgtcgagggactgcatcttgaggcagctggcgtggagctcaccgaacgcggtgccgtgaaagtcgacgagcttctgcgcaccacagcagccgacatttgggctctgggcgatgtgaacggcggcccgcagcacacgtacatttcgctggatgactatcgcgtggtgtggtcgcagctcaatggttccgaccgtccgtacacggtgaaggaccgcaagcatgtgccgtcgagcacattcctcgccacgccttactcgcgcgtgggattgaatgagcgcgaggcgaaggcggctggattggattatgtggtcaagcgattgccggtggccgctgtgccgaaggcccaggtaatgcggcgaccggatggtctgatgaaggcgattgtggaacgcaatactggccgcattctgggtgcgatgctgctttccgtcgagtcgcacgaggtgatcaatatcgtcaagttggcgatggatcttgacgcgccggccagcacgttgcgcgatatggtgttcacgcatccgacgattgccgaggcactgaacgacttgttcgcgtagtttgtccgcatagcacgcccgcgcagcatgacccgcgtagcgcagcccgcaacagactcccctaatgcgcgcgaaggtcctcatcgacgtaaaccgatgaggaccttcgcgctgtcgtcatgatccgtacgtgacagcaatcacgtccgaaccagccgttacttcaagccgagcttacggtccagaatgccggaggcatccaatcccaagcggcgtcggatgaaccagccaagaccgagcggcaggccgggagccaaggccatgccgcctggaccgagtgccacggttttggagttgcctgcgataagcatggtgcccttggatgcggccgtggccgtcgaaccatcgctgtccgcctctggtttgaggatttcgatgttgccgtcactggttttgtacagtcccttattctcattccagataccggatgcgccattgttgccggcctcacccgcagagaggaaatgtcttgtttttcttgtgagcgctcacctattcacgcgcgatggcatgtttttcaagcaaagtcaataggtgtgatgttattcacactcttcactacgttgttttgcctcgcactggacaaccccacttcagcaagagattgcacaacttgcgttagggtggagaacatgactatcacagtatccacagatgggtccgcattagggaatccaaacgggccaatgggctgggcctgggccgatcatgagcagaacgccggcggcaagcccggccataagcacgacgaccatggttatgatgcgggcggcgcgaccaacggcaccaatcagattggtgagctgtgcgcagtgctggaagctttgcgagcgcacccgggccctgagccattgctcatcgaatcggattcgcagtacgccatcaattgctcgaccaagtgggtcaaaggctggaagaagaacggctggaaaaattcgcagaaaaagcctgtgaagaacaaagagcttattcaggcgatcgaccgtgagatctcacaacgccctggcccggtggatttccgatgggtcaaaggtcacgccggcaacgagggcaatgagttggtcgatgaactggcacgcacctatgcgggcgattgccgttcgggtgcgcgcgacggctatctgccgattgaaggctggcagtcgctactgggctccgaatacgcacatggcaccgatgtgcctccagacgtgcagttggtgctggatggcaaggcggatgcggcaagtttgcgcaagccggctgcggcgacggattcgacggatgccacaaggccagagaccaagtcttcgtcacccttagcgacacaatcagcgcaacctgtacaatcagcgcaccccgtacaccccgcaaagccaagcggactgacggtatccggtacgctgaccttctcccccgcgccgaaaacgagcccgtatttcaacgggcagccgatgccgatcaaaggcagcatcgaaatcgaaggctatgtggacggcgacggcaacctgaccatcgccaacgcaccattcgtacgacactaacacccaaacacacgaatatgtaccgcaatcggacacgatgacacaaaatcgctcattcgcgttaggataggagataaggcttcacgccgttgatccatgcggcggaggcaaggatggcaaaggagaaaccatggataaggcacagcaggatgcgctgaagaaggcggccggcatcgaagccgccaagctcgttgaaaacggcatgatcgcaggcctcggcactggttcgaccgtgaagttcctggtggacgagctcggccgccgtcatcaggaggaaggtcttgagttcactggcgtaaccacgtctcgccgcacgcaggtccaggctgaaagctacggcatcaagatcgtggacatcgacgacgtggaccacatcgacgtgaccattgacggcgccgacgaagtcgacaagaacttcaacggtatcaagggcggtggcgctgctctgctgtgggagaagatcgtggccaccaactccaaccagatcgtgtggattgtggacgagtccaaggttgtggacaccatcggcaagttcccgctgccggtcgaggtcattccgttcggcgctggccacgtcatcaagaagttcgaggaccgcggctacaagccggtgcttcgtcttgacgccgatggcaaggaagtgcgcaccgacgagaacaacttcgtggtggacctgcacctggagcgcatcgatcacccgcaggagctggccgaagacctcatcaacacggtcggcgtggtggagcacggcctgttcctcaacatggtcgacaaggtcatcgtcggcgacccgaacggcccgcgcgtgttgaccaacgccaacaagtgatcgtctcacatcactgaacttttccaagcccgcatctgtacatcgcaggtgcgggctttactgttgcccgaacaaggcaaaggagccaaaaagagaaaccccgcgaccataacgatcacggggtttctaatgccttgattgcaggtaagactacttacgctggtggcgggtcttacgcagcagtttgcggtgcttcttcttgctcatccgcttgcggcgcttcttgatgacagaacccatctgaagcctccatttcgattaatcgtaaaagttgcaacttgcaccataatacacgtgttgccagacagaggaaaccagtatgttgtcgatagtccgcatatgccctgaacgcagttgaggcatccacatcagcaatgtggatgccccaacgttcataagtttgtgcagcagctgacagccgatactagatactacatcgggaacttctggtagaagcgatcgaccgcttccttggtgccggtagcttggaagaccacggtatcgttctgccagatggcagcggcgttcttgctgttggaggcatcggccttcaccacgtacgcgcccgtgacgttgccggaaaccttgacgttgccggatgccgactcatcgccggtctgcgcagcgaccaacgcatcgtactgggtcttggcattgtccgccgacgaccactgcgcggcgaccagcgtgacatccttggcggcatcaccagtggagtaggtcagagtgtactcctcgagcggcgacgcggaattccacgtcgtggaggcatccgccttggtacgcgcgtaattcagcacgctgtccggcatggccttcaacagctcactggcatcatccggcaaagctgtggcgtcgatggtcggcttgatcggctcggatgattcggttttctgctggctgttttgggtggtagtggaggtgccatcattcttctggatggcccaacccggccacacaaaggccgaaagcaccgccaggataatcacaacagctgcggcaaccaccactgcaatcaacttgccatgggattgtgtggtcgaggagttctcactattagtcatgccccgattctctcacagccgcgtgacgctagacggccgtaatcttagtcgttgtgcgcaagccgcgtgaaactcttgtgaacggtaaaaatttaccgtccgctggtgtttgggttagggtgagaccatggcgaaatcaagtgtgcagtatgtatgttccgaatgcggttggaacgggccgaagtggtacggccgttgccccgagtgtggtcagtggggcacggtcgaggaatttcacgaggctcggccggcggcaagctctcgcacggccgctcccggccgaacatcacgcacgcagtcggttacggttgccgacaacgccagatctgcagcccgtccgattaccgaagtgggcacggaaagcgtcgagcggctcggtaccgggttttccgaattcgaccgtgtgctcggcggtggcgtggtgccgggttcagtgacgctgatagcgggcgaaccgggtatcggcaagtcgacattgctgttgcagacggccggcaatatcgcgcgcgttgtggcgggagacagtacattccgaggagccggtcagcggtctgcccaacagtcgggccgggcgcagggcggcacatcaaacacggtgtcggtacagggcaacgcaccgtcggtacatgccaataccgtgctgtacatttccggcgaggaatcacaggcgcaggttcgtttgcgcgcttcccgcatcaacgcggtggagccgaacttgttactggcctccaccaccgatctgtccacagtattggggctgatcgaacagaacaagccggccttggccattgtggattcggcgcagaccatcgtctcgcaggaggtcgatggcatttccggcggttcgactcaggtgcgcgaagtggcaagcgcgctgatagataccgctaagacgcttgacattccggtatttctggttggtcatgtgaccaaggacggttcgattgcaggcccgcgcacattggagcatctggtcgatgtggtctgccaattcgaaggcgacagcgagaccgcgctgagaatgttgcgagcggtgaagaatcgttttggtccgaccgatgaagtcggctgtttcgacatgagcggtgagggcatcgaagaggtcaccgatcccgccggattgttcctgtctggagacggccctgatgcggccaacgcggcacccatggaaggcacctgtgtgacgttcacattggatgggcatcgcagtctgcctatcgaagtacaggctctggtcaccacgtcggtgctgcccacacctcgacgtgcggtcaatggcgtggaccccagccgtatcgccatgctggtcgcggtgctctaccgtcacagcaagctcaacctgctgtccaacgacctgtatatctccactattgccgggggccaggccaaggagcccggttccgatttggcgatagtggcggcactggcgagcgccgccacgtcaaaacccattgcgcgagccacgtgcgccattggcgagatttccctgaccggtcaggtgcgcccggtaccgcgtatggaatatcgccttcgcgaggccgcgcgccttggctttacaacggcagtcattcctccgctgcgcaagccggtgcatgtcgagggacttcggctggtggagtccaacacattgtccgacgccttagatgccttgggagtgcgtaaatagccctgagatatgcctcaggcggtaagacgcttggtctcttcgacgttgcgcttgagttcgtcaacgagttggtcgggaccatcaaacttgacctgcgggcgcaggaaaccgacgaattcaacgcgaaccttatggtcgtacagatcaatccactcatcggtgatgcaataggcctccaccacgcgttcgttgagtcctgttttctcgctgaaggtgggtttggtgccaatggagatggcggcaggccagcggttctcaccatctaccagccaaccggcatagacgccgtcgaccggaatgtagcctgcaatgtcggagccaagattggcggtgggaaatccgatggtgcggccgcgctcctcaccgtgtaccacttcgccttcgatggcgtgcggagcacccagaatggcgttggcatcctggattcggccatgagccagcaggtagcgcacattggtggagctccaggcgcgcattgccttggcctggttcttcttgctccatgcgcggcgctcggccttggtggcattggccagcgggtcgacgggctctccccattcgctcggggcttccggcttgaaatcgcgcggaatgcgcacttcacccgggccacggtcatcgaccacatcaagttcgaatacaccggtggcggcggcaagattggcgatatgcttcacatcaccttctcgccccttgcccatggcggcatcctgcccgaggaccagcgtacgcatgcccagcttgccggtgagtctgccaaggaagaaaatgtatgacatggctgcgaaggccagcgtgtagtgcaccaccaacacatggtccacgccgaactgttccatgcggtgcagtcgatcatccacactggtcaaggcttcggcatccacgttctgcaccgcgggttcctcgccatggtgcgaggcggcccagccgtgcacgaatgcggggcgcgggtcaaacagaatcaccacggaaaaagcatcatgctggtgcgcgagttccaccacacgcttgatcaccgcctgatgtcccaagtgcatgccatcaaatgcgcccaatgtcaccacggccttcttgtcgttactgaacgagggccattcaatcgaaccttcggcgtcaggggtcaggtgcgtgatatccatcagtgtgctgttccttttatccgtgcgatgttattcatgcaatataggcgttgttgtgcgcggcctgtatcaagctgcacttttcaccgcgtctactttacgcgagggggaatacggtgaccggcttggcctgatgagcgttggcacgctcgataatcgccgccacatcatgcgtttgcggcacaatggcggcagtgggctcgctgattgtacgctcgatacggcggccgaagcgcaattcgctggcttcctcaggtgtgatgtcaagcgccggcatcgcgcctcgagcggcctgttccatggtgagggcatggtcaagcagccagttgcggcgctcgtcaccggcaaggccttcaggagtgttcaatacgcacttgttgcgcgtgacggtttgcccttcccgattagtgaacgtcttctgatcggtatgtgcggtgacggtatgggttcgcgtgtcaagcatcgcctcagaggcgataagtccgctggtatcgtccggcaacgcgaatcggccgactcgcgtacggcgcaaacgggtcaggtatccgccgacgccaagttcattgccgaggtcgcgggcgagcgcgcggatataggtgcccgatgaacagctgacccgcacgtcaatatcaagtgcgggaatcgttcccgtgttcgcgtcttcccgcaatggttcagcggcctgctcccctgctacgaatccgctgcggatatccagcacggtgaattcgctgatggtcaccaggcggggcttgagttccacatccttgccttcgcgagccaagtcgtaggcacgctggccgttgattttgatggcggagaacgtattgggtacttgttcgatatcgccggtgaaattggtggcgatggtgcgagtgagcaggttttgccatgaggcagttggtgacgccgttggttcgccgctctggccgccctcagtcagctgcgctgacagcgtttgccagcgggagcgggcttcatcatcgacaagcgcctcgccttcggcatcgtcggtagtggtgcgcaggccgaggcgtatggtggcctcgtaggttttgtcatgcgccacgatggcgttgagcagtcgcgtggcgtggccgaaggcgatgaccagcgtgccagtggccatggggtcaagggtgccggcgtgaccgaccttcttgatgtgcaacgcgccgcgcacggcggcgacggcgtcgaaactggtcacgccttgcggcttgtcgatgatgagtaggccgctgggtgttgtatgaagcacactactcctcgtcggactcgaactcatcgccctcggcttcggcctcgtcgtcgtgcttgtacggatcggcgtcgccggcgtactgggcggtggcgcgggcgcgggcgagttcttcgtcacgcttcttggccacggcgagaatgtcttcgatctcgtgagcctcgccgggcacttcatcgaacacgaattggagctgcggagtcaggcgcaggccagccttgtggcccaccagagaacgcaggtgacccttggcctgatcgagcgcctgctgggcgcgcttgcgttcgccttcctcgtggccttcgtggccgagctgggtccagtagaccttggcgatctgcagatcgttggtcacacgaacttcggtgacggtgatgctggcgagtcgcttgtcatgcagttcgcgctcaatggaggaggcgacgacacgctgaatcaaggccgcaatacgtgcggcgcgcgggttggttcctgccataggaatttccttttctagacttgagccccctctgacgaggggctgccgaacgcagtgaggctgggggagagaaaattcatggaactaccatgtctctcccccagtcagcctgcggctgacagcccactcgtcagagagggcttaacaatgactacttgcgctcgacttcctgcatctcgaagggctcgatgatgtcgccgagttcaatgtcgttgaaggtgccgaggttgataccagcctcgtagccttccttgacggactgaacgtcgtccttgaagcgacgcagcgaggagatctcgaggtcgttgaccgtggccacgccgttgcgcaggatacggcacttcgtaccacgcttgacctcgccgtcctgcaccatgacgccggcgatgttgccgaacttggaggagcggaaaatctcgcggatctcggagtgagaggtgacgacctcttcgtattccggcttgagcatgcccttgagggatgcctcgatgtcttcgatcgcacggtagatgaccgagtagtacttgatctccacgccctcgcgctcggcgaggtccgccacctgacggttcgggcgtacgttgaagccgatgatgacggccttgtcgaccgtggccaggttgacatcattctgggtgattgcaccgacgccgcggtggatgacctggatgccgacctcgtcggatacctcgatcttcatcaaggaatcctcgagcgcctcgaccgaaccggacgaatcgcccttgatgacaatattgagcatgtcgatctcggactcggcgaacttcttcttgaagtcctcgagggagacgaccttgcgacgcttggccagctgggcggcacgctcggtggcctgacgcttctcggcgatctggcgagcggcacgatcatcggaggcgaccaggaagaggtcaccggcggtcggcacggaggtcaagcccagcacctgaacaggtgtggacggaccggccgcttccatcggctgaccgttctcgtcgagcatggcacgcacgcggccgtacgaagtgccggccacgatggcatcgcccacgtggagcgtaccctgctgaaccagcacggtggccacggcaccacgacccttgtcgagtcgggcttcgacggtggcaccacgggcgtccatgtcggggttggcgcggaggtccagctcagcgtcagccgtgagcagcacggcttcgagcagcttgtcgacgtgcaggttctgcttggcggagatgtcgacgaacatggtgtcgccaccatactcttcagggaccaggccgaactcggtgagctggccgcggaccttctccgggttggcaccgggcacatcgatcttgttgacggccacgacgatcggcaccttggcggcctgagcgtggttgatggcctcaacggtctggggcatcacaccatcgtcggcggcgaccacgaggatcgcgacgtcggtgagctcggcaccacgggcacgcatggcggtgaacgcctcgtggccaggggtatcgaggaaggtgatcttgcgcggttcgccttcaaggttcacggtgacctggtaggcaccgatgcgctgggtaatgccgccggcctcacgtgcgatgacgttggtcttgcggatggtatccagcagtcgtgtcttaccgtggtcgacgtggcccatgacggtgacgaccggcgggcgaggcttgagatcctcgtcatcctgcagttcttcctcgtcaaggttgatgtcgaactgctggagcagttccttgtcttcctcttctgcggagacgagctggatgttccagccgatctcttcgcccagaatctggaaggtctcctcatccaaggactgggtggcggtagccatctgacccaggtggaagagcacggtgaccagcgcggcctggttgacgttgatcttctccgccagatcggccagggaagcgccctgacgcagacggatggtctgaccgttgccgttggggatgcgaacgccgccgatggtcggtgccttcagctcctcatactcatggcgctttgccaggcggttcttacgggccttcgaggacttaccgccctgacgtccgaatgcacctgcggcaccgccgcgaccgccgcgaccgccgccacgtgcgggaccgttgctcggtgcgccgccgccctggaagttattgccgccgccttggcccccacggaagccgccgcgtgcgccgccctgaccggcaccctgggagccgccgccctgacccggacggttgtggccccactggccgggacgaggaccgccctgaccaccttggcccggacgaccgccacggaagccgcggccttgcccctggccttggccgggacggcccggacgaccgccacgaccgctatcagcagtcggacgagccatcggatgcggacgcggaatatcacccggcgtcggggtgtgcataccctgcttgcgggagaacgggttgttgcccgggcgcgggccctgagcgtgcgggcgcggaatcgcgtttgaagcggcattgccgccattggcaccggcgccgccctgagcgtgcgggcgcggagccgaagcattgtcgcggttgttctgatgctgccccggctggccattgttcggacggccctggttgttacgacgatcgttgttacggcgatcgttcgggcgactctgacgaccgttctcgcggccttcgcgattatcgcgaccattctcacggttgtcgtgctgaccgtggcggccgggggtcggcatgccggggcgtgcgccgccctgcggacgcggtgtcggtgcgcccggagtcggagcctgctgatgtgccgaggcgggcgatgcctgacgtgcgggagcggccggagtcggtgcggaagatgaagtggaagccggggccgaaggtgcggccgggcggcgctgctgcacgggcttggcagcaggcttttgtacggaagatgcgggcttggaatcgcccttggcgttgtccttggcgaactctgccttcagacgccgggctaccggcggttcaatcgtagaagaagcggacttgacgaattctcccatgtccttaagcttctcaagcacggttttgctatcgacattcaaaaccttagccagttcgtatacgcgtggtttcgccactaattactcctattctgtgaccacgcgcgtgcatgggcgtggtcagttggtgatgacggcaagcctaccctgtctcatcgtgcgaccatgatcgtgttacctcgtctctggtgtgggcgatttcgcgcacactgcaccagcccacatacgccaatcaagcatactcatagcgctggatagcgtagacgcagcgagccgcgccattgctgacgcggctcgtatcaggaaataatgcgccctgaagatcattcgccttcgagcccggcggcctattcggcttccggagcagcagcctcggccgcagcctgggcggccttttcagcggcgaccttcttggcatgggcctcggcggattcgatgccgatcttccagccggtcagcttggctgccagtcgtgcgttctggccttccttgccgatggccagggatagctggtcgtcgtggatgaaggcgatggcggtcttgttcttctcgctgatcacctgtacgccggtggccacagccggggacagcgcggctgccacgaacttggccggatcgtcggagtagtcgacgatgtcgatcttctccgggccaaggttctccataacggcacgcacgcgagcgccgccggggccgatcagcgcacccttcgggttcacgccatcggtgttggccttgaccgcgatcttggtgcgggcgccggcctcacgagcgatggccatgatggacacggcaccggagaccagttccggcacttcacgctcgaacagcttgcggaccagctccgggtgggagcgggacaccacgatttccgggcccttgatgccacgggccacgttcaccacgtacacgcggatgcgttcgccgtggcggtaacgttcgccgggcacctgctcacggcgaggcagaatggcttcgacatcgcccatcgcgacatgcacgttggaggggtcggaagcatcctgttggatgatgccggtgatgagcttgcccttctgaccggagaacgcgccgaataccttctcatcttcggcgcggcggaacagctgggtgatgacctggcgtgcagtggcggcggcgagacggccgaagtcacgcggggtgtcgtcgtattcctcgcccagcttgggagcggggtgcgggtcgtcctcggtgggctcgaccgggatttcgtcggcggcccagacggtgaagttgccggaacgttcgtcaagctccacacgcgcgtgcctggcggcgtgcggagtcttgaggtaggcgaggcgcagggcctctgccagcgcatcatccagggttccggggtcgattccttgctcggcggcgagcttgtgtattcctgtcaggtccagttccatcgatccgtacctcctatgaagttatgtggcgcatggcctatgagtggtcacagttagctattagtgtaggtttccatgcagacacgcttctcttcaggacggtttacccggcgcttggcatccgcactatgcgcgagcgcgatgctgtgttcgctttcggcgtgttcgatgccgcgactggccggacgggccgaggcggaagctcaaatgagcccttgcgagaaagcgatgacgttggcggactacgccacccatccggctgaaggcacgccgttattagagcagtatgccaccggcctggccgctcccctgacttggattgacgttgccgggtattgttcgggtcgttttgccgagggaacgttacgtgacgcgcagaccaagcaatggctggcttttctggccgataaattcgggcagtccgcgcctgaggtgacgccggcgcgtcttgatggcgtcacgtccgccaacgttgaccgaccggtattggatgcgatggccgtggccgaggatcgcgccggattcgctatcgaggtcttggccgcacgaggagcgaccgctggggctacgttggcgttgagcgatatgcataagaccgccgggcagcagctggttgcgctggcaaacggcaattttgatgattccggcgcacaatccagttcttccggccaaagcgacccccgccaaaaggtctatgccatcgaccaactactggccaaccccaccaccatcgtcgacaaggcaagtggccaaaccgtacccacggccgctgccatcgaaatggattgcgcccgcgcgcagatcaaggccgtgaccgaatcgaaatcttccaccgagagcgacacgctgctcatcctcgccgcactggccgccaagcacgcctacaccgcgttccaacttggctacccagcgactgacgccgcattgttcgagtagtttcgcagtaaccgttttcgtgaaccatagtccggtagacgcgatgccgttcaacaattcaacaggtaaaacacctgtattcgtatgcattacgcatcgcaccaagcaactgctggcacgagacctatacgctacaaccgagtggaaccacgctctataagctcgaaatcagtgcaatacgtgcgtattggcccctcgtagccctgaatacgttcaatcaacatatctatgccgcacttcacgtaatcgctcacatgcggatctacggtggtgagtgacggattggagaattgagcttctggcacattgtcgtatccaataagctgcacatcttccggcacatgaagaccattcgcctcaagaccatgcaacacgccaatcgccatagcatcgttcaggcagacaatcgcatccggccgtaccccctgcttcaacatgtgattaacggcacgcacaccactgtcgctcatcattaggccccacgaaaacagcatatccatgtccggacgtagtcctcgttcttcgaaagcaagaatgtacccacgaacacgcatctcctgtgtgccttcagtagcgttcatatagtagtcgtaatcgcggttgccctcgcatgcaccgaacagcgcgatgttccggcaccccgcatcaagcaaacggccggttgcctgccgcacaccttcgacattgggcatggtcactttatcgactctgtcatatgtttcatagtcgctagcaacaaccaacggatacggctgctccagtaacgcgccttcattggcaaggggctggtcaatgaatacgaaccatccatcaggtgccaacatggcggcattatccataaccgatgccagtccagcaccgccttggccatatgtattaacgattacgccatacccacgctgacgcgcatagtcgataacctgatcagatagatagggagcaaaaggctgcgagaaatcaaaaatagatagtcctatcagaccggtcgtgccggttttcagcgaccgggccgacaagttaaccgtatatccgagtttgacaatggcattttcaacacgttctcgcgtggagtcacgcatactgccagtactgttgagcacattggaaacggttttgaacgaaacgcccgcttctttggccacatctttgatggtcacatgcctaggcattattcactccttaacaatttgctcattattcacattgtaattacggtttaccttcaataatgccactatgacaacgagcccgacacacatcgaaagaagcgaaggatgtgcgtcgggctcgtcgagagcgaaggcgggccgaaggagaagacccgccaagtcgtcaggatttcacagaaccggccgtaagacctcccacccagtagcgctgaaggaagagaaaggccagcaccatcgggatgatggatatgaacgcaccggacgtgaccaaattccacacctgttcagaagccgcaccagcctgggacttgacctgccactgcgtcagaccaacagtgatggggaataacttgttgttcgtcaacactacctgcggcaggaagaagttattccaagctcccaccgtggacagcagatataccgtggtgatggctggggtcataatcggcagcgacacctggaagaacgtgcgcagctcgccggcaccatccacacgggcggcctcgatcatctcgtcgggcaacgattcctggcagtagatacgcatgaggtacacgcccatggggttgagcagcgagggaagcaacacggcccaaactgtatcaacgatatcgatattcgacatcagcaggaaggtggggatgaccaacgcggtgttcgggatcatcagagctgcgagcaccagattgaagaacatcttcttgccacggaagcggaacttagcgaagccatagccggcgagaacggcaaccgtggttgcgcccagtccaccgaccaacgcatacaggaaggagttgagaatccaacgccagtagatgccaccctgataggtggtcagctgcttgatgttgtcgaataacgcgaacttgtcgtcaaaccacagtgaaccgtgcgcgccaaagaacaagccgttattggtcttggtggaggcaacgataagccaccacaccggaatgaggaagtaaacgatggcaaggcagaacactacaatcgtaaacactctcgaattgccacgaatgtgattggccttagcagctttgcgtgcattcttagccatgtcagtcctccaatcccgattggttcttcgtcagtttcataaagacgacgctaaagataacgacgatgagtcccaaggcgaacgaaaccgtcgccgcatagttgggctggttgtagttgaacgccagtgcctgtgcatacatgttcggcgtgtattccggctgtatggccgtcggtgcctgattgcgcagtaccgtcggttccgtgtagaactgcaaggttccgattagggagaagatggtcaccataaccatcgagctggagcacatcggaatcttgactcgtgtggcgatctgcagttccgtagcaccatcgattcgcgcggactcatacagctcatgcggaaccgattgaagtgccgaatacagaatcaccatgtagtagccggtccactgccaagtaaccacattgaccaacgcgccgaaaattccatcaggagtgaggaagccaggcgtaggcagtccgaacaactcgaaaaacgtggtaaatggacccatgttgttggagtacatgaagccccacatcaacgctccgaccacgcctggaatcgcgtacggcaggaaaatgaccaaacgagtcacggatgcgaagcggtttttgagggagtcgagcagcagagcgaagaacaaggccaggccaagctgaatcggaaccataaccaccgtgtatagaatcacgcgccccatgcccttaaggaacaacgggtcagtgaacaccctctggtaattcgacaaaccggtgaattggacgccgaacacgttggatgtgaacagcgacataacgaatgcatatacgaggggcactacgaggaaaatcacgaaaatcacgcaaaatggagcagtgaacagccatccccagatattgccgcgacgagtgacgataccgtctttactaacggtctttgttgcgtttttacccatgtgtatctccaataatcaggtgaagaagctgcgggccgagccggttggcttcggagccgttggcccagcccgcaactcacctgctgtcagggttattcgacagtgtaaccctgctgcttggcgtagttgttgagcgtctcatcgaggctcttgaggttgctggtggtatccttgccatccttgacgatgctagtgaacgtctttacctgctcgtcgtatgcgtaggtctggaagggcaggaatgagtagcccttgtaaccctcagccgtgggaatggtgatctcgttgagcttctgcccgccgaggaactcctcctccatgttcttgaagctgtcggactgcagcttcttggtccaagccgggaacaggccgccatcggtaacaccgatttcctgagccttgtcggaatcgaacagctctcgtgccaccttgtatgcggcttcggtgtccttggcctgatcggttacggcccaagcggaaccgccttggttcaccatcggggtggagtcatcccacaccggagcattgtagatgcggaactgaccattggtgtcgccggcacccttcagatagccggtctgccacgaagcctgcacccatgtggcgtacttgccgccaagaatgttggtggtccagtcgttcgtgttggcatcagtggtgtctacgaggccctctttgacgaggttctgccagtagtcgagcacttccttgactccatcggtgttgaagttcaccgaggccttggtgggatcagacgccgagtagttgtagacgttctgattcttctgcgcgaacagtgcaatgttgaacgcggtgccattcggcgcgaaatcagtcaggtagccgtcgtatccggctgccttgaggtccttgccggcctgctcgaactcagcccaggtggtcggcaccttgacgttgtacttgtcgaagatgtcctggcgcacatacatgacgaatggtccaaggtcgacgggaacaccgtaaaccttgtcttcagaacccagctgaacgctcttccaggcaccttcggtgtaatcgtctttatgatcggtgaaaccgaattggctcaaatcgacaagatgttgctccttgccggccataaactggggcatggcttcatattcaagctgaataacatcaggggcacccttaccggccttaatggcgttctggaatttggtgtattcaccgccgccctggccgccgttattccagcaaacctgaagatcatcgtgggtttcgttgaaatcatccaccacctgttcgatagctggataccaagcccaaacggtaaccttctgcacaccctttttcttaacggtattggtgcaggatgcactgtcattagcggtcttatcgctgttgaccttggcaccattcgcgttggagcttccgccacaagcgcttacggtcaatgccatagcgccagccgcaatggctgccatgacccgggttactttcttcatgagctcctcctttggattctcatttgttctttccttattgttctttagttatgggcgctgcggaaattcgtcgaagcgattaacgaaatcccgcagcacagttatgttgttggcgcgcccgctacgattaagcgaaatgcaacgccgtccagctcacggggggcagcacaacatgcgccataccggtctctccatcgagtgatgcggtgtcgttgtcgtgcagcacgacacggttctgattgtccagagtgttcttggcgagtaggtcatcatcatgcagcgtctgcgccgtgacggttttcgcaaaaaggccttcaggcaatttgatttcgaagtcctgctcagcgtccaaagaacgattgaccacgaatacactgaccgtaccatccgcgccacgtaccgccaccgaattgacgaccggcacctcgccatatttagcggtgtcataggttccagaagcgagtttcggctcaagcaccgtaccgcccttggcatattctgcagtgaccgcaaatgggtagaacgtggtctgacgccatgccggcccattgggctcagtcataatcggcgcaatcacattgaccagctgagcaagactagccgcatgcacgcgatcggcattcttcagcaaggtaatcatcagatcgccaaacaccacagcatccgcgacggagtacagatcctcaagcagacgcggcgcaaccggccagttgccgatgccttccggattcttgctcggctcatcatgctgataccacacgttccactcatcgaaggagatgtagacctcatgcttgctcttcaaacgggccttggtggcatcgatggcagccgccacatcattgatgaatccgtccatatcgacgccggatgcgaggaagctgcccatatcgcgggtgccatcttccttaagggccgggaagtaataagcatggcacgaaatgaagttgacggcttcgtaggtcttctcgagaacggtttcttcccaacgaccgaaggtgtccatctcatgggaagaggaaccgcataccacgagttcaaggtcgggatccatcatgcgcatgcccgccgcgaccgaagcggcaagagtgccgtagtcttcggcgctcttgtgcccaatctgccaaggaccgtccatctcgttgccgaggcaccacatacgtatgtcgaacggtttgtcagcaccgtttgctcggcgctgctcggaaagggccgttccgctaggaatgttggaatactccagcaaatcaagcgcttcctgcaaaccacgggttcccagattggcggcttccatcagttcgttgccgccgcacttgtccagccacttgaccatctcgtgcaggccgaactcgttggtttcagtggaatgccaagccaaatcaagacgacgaggacgctgacccttcgggcctacgccgtcttcccaacgatatccggacataaaattaccgcccggatatcggatggtggtggcacccagttcgcggaccagatcaatcacatcctgacggaaaccatcttcatcggccgtgggatgaccgggctcatagatgccggtataaacgcaacgcccaagatgctccacgaaggagccgaagagacgattgttgaccggcgcgacctcaaatgcgtcatcgacgacgagacgcgccttgttcgcagtgacttcttgtgccataggaaccctttcctgttactgtttctcacagagttagtacaacgttgtcttaaaggcgaaaaaagaaccacaacctttctgaaacaatgttcggtgcatacgaagcggaaaccacctcttatgggagaatcatcgaatcaatcggttgctttgaacacttctttctatttagtacaaccttgtaccgactgctgatacacaaggtacaccagtacgcaaaaccgcgcaaacgcaactagtataacgttggagtaattcgcagattttcgcccaacacgccgtgtgctgtcctcaagtatcgcttgaaaacgaacattgaacagaacagaaacgaacacggcctataggaacttttgtggtgcttataacccgggtttggccttgtgggagtaggcgtgccggggtgttatttttcccggcgggaaaataggggcgtcccggtggtgggctggacgcatgagaacgaagtccagcaaggcgaagaaatgcccggtgtgcggccggccgatgaagaagaacggtcggaccgcgaaggggtgcagcgctggaagtgcgcatcctgctcgctgagctcgacgatgccacaggagaacacggagcgggccgggcagctcgacgcgttccttggatggctgctcggccgcgcgagccagtccgcgtgcgacgcgaacggcgattcgcgggccctgcgcaagcgcaccgcgtggtgccggaacatccggcccgccatcccgccgtgcagggtgaaacatcatacggtgatggcggacggcacgtacatgaaccacggctggtgcctggtcatagccatcgacggcgggaacggcgaggtgccgggcttccagtggtgctcgaacgagagcaaggccgcctatatggcgttgttctcgcgcatccctgctccggacgtgccgataacggacgggctgcgcggcgcggagagcgcctgcaacgtgcagcgctgcctggtgcatgtgctgcgcaacacccgcgtcgacctgacgaacaggcccaagagcgaggccggcggggagctgctcggactcgcccgcaggctcgtcagggtgacgacggccgacgaggacgccgcatggctcaaggagctcaacgactggcacggcaggcacgacgatcacttcaaggagcgcaccaccgccaaacaggatcccatgcacgcgaggggacgcaagtggcggcggacgcacgaacgcctgcgccgcgcccacttccgattggtcagactgaaccgggccggcgtgctgttcgcgttctgcgatccggccgtcctcaagagcggcggcccgctgccgtcgacgaccaaccagctgaagggcggcgtcaacgccgtggtcaagcgcgcgctcgaccaccaccggggattgtcggaggagcatatgagacgctgctgcgaatggacggtgtacatgctcacggagcagcccggccccatggcgctcgtcacacctgaacaccggaggacgaggaaggggaagccggtcgggaatgacgggcccatgcccggcaccatgacggccgtgcaggaaccgaccgacggcgtcgacgcctacgagagcgggttcgggatcagaaaaggatgggtcgggcgatcaacctgaccatgacacgagggaatagacactttttaacccacttttctttacttaacccaaagatggggttccgcaaaaacaaaaaaggttccgagatgacctcggaacccttgcaggcggataaggcgagattcgaactcgcggaggctttcacctcacacgctttcgaggcgtgctccttagaccgctcggacacttatccatgctgccaaaatggcaacttgttcattatgccacattctgccgacctggcaaatcggagtttcgctgagcaagtctcgagtgtatgccgcttgagacatgtcagatcacaatcccggaattcgcccgaagcgctggcattgcgtttacgcgccaagcactccgacaggaattacatacactccatcatcgcgttgatacgcgaactcgccgacccccaccaacaccgccaagaactccggttcacgggttcgcgcactcggatttctcagcagtttccctttcagtctgcatagatttgccgctgcctcagggactttatcctcactggacttaatctcgatgccgccccaccgtccatcggacaattcaataatggcatcacactccagaccggaatcgtcatgataataccgaaccggttctatcccaatatcgaggagagatctcgcatacaccaacagatcgcggatgcatagattctcaaacagaaacccaaaagtctgccaatcgccgataagagcagcaggactcatgcccaacattgcggccgcaatggaaggatcggcaaaataccgacgcgccttggtctggagtcgctttggatcccgtgccggcggaacccagccctttatcggatcgatgacgaacatgttctcgaacatggccgtatacccggataccgttctctccgaaatgaaatcgtcaagatttgcttcagtaccgtacatatccttacgtaaggttttgaatgtcacagcttgactgatattgcgcgcaagcgaatccagcagacgacgagccacatcaggatccttgccttgcctgggcacactctcagtcagcgtgagtcgcatgtattcccgaatcagaatctgtgcgtcagatacaggcagagccaccgcctccggccatccacctcggcatacggcatccaacaacatttgtgtacttatctctgattttgcagcggcgaacttatgttcaaacagtccactgagacttaccgcacctgtcgagagtccggactcatataaagtcagaggattcatacggatacgtccgattcgtcccgcaccactatggttcggccgattctcattgagaggagtggatgaaccggtcagaatccactgacctttattcgcggaatcatcgtcgacgcgatgacggacttcatcccatatagctggagcgagttgccactcatccacgatatgaggcctatctcccagcagcatcaatgacggatccgccttagccgcagccaaattgttattgcgatccacataggtaatgctggctgcatgggcccgcgcagaccaagttttcccgcaccacttggtgccggtaatctccaccgcgccaaagatgcgcatatatcgttcgatctgtgcatccacgatacgagggcgataggctttcggcttgatgtcgctcgccagagaatcggccattccgcgcacctcccgttatttcacgtccgccatcgcaataatccgaatttctcaactaccaaaatccgaatgttgcaacgacgaaaatccgaactttctaactacaataatccgaatttctcaactaccaaaatccgaatgttgcaacgacgaaaatccgaatattggtggtggtagaagcggtgacggggccactctgcattgagcggtctctctcagtctcgctacgctcgacagctcgaacgcaatttaaggacagctttccagctgccattttatttgctcactgtcattcgccttcgcctaaaaacgcctccggcgttttcttcacggctcagctcatcagagggggcttggaattttgtttacgccacctgttcgtggacggaggcattgacccattgggtctgctggacgttgtagccggagaagatgccgatgtcgagcatgcagtcgcggtaatcgcggccgtgggcgatggtgatgtagctgtcgtccaccaatcggttatgcgtgggatccagtccgacccatcggccatcctgatacacctcgacccaagcgtgggtcgcgccctctcccccaagcaaaccggcaatgtagcgcgcggtcaatcccacatgccggcacacggacagcattacatgggcataatcctggcatacgcccttgcgctgggccaaggcctgttcggcggtggtgcgaatcgtggtggaaccgggcgtatacacaaacgccttgtagacctcatccatcacttcgtcggcctgctgcaccggagtggcgtcggcaggcaacgcagccaagcgttcgcggcatacgtcgatcatcgcctccacgttcgggccgggaatggtgagcgctgaattgaatcggtacagcggtttataggcttccttatggatatgcgcattgtccacgaaggcgatgccggtcaccgaatagctgaatatgtcgtgcggctcggggatgaatccggtcatcaccacggagccaaaggagtcgatggtggtttcgagttcggtttcgggctgaatcttcacttccacgtcaatcacctgttggcgagggccagtggcgggaatacagcgaagctggaacctgtgatcggtgaccggtgcgctgaaggacagcttcatctcatagtcgaacacgagttttttcacaacgtctcctgcacttacacacgagccggcaaccggcacattctcgggataacgacactacagccatggctgaggtatggtccgcgcgctcacagtccacgcatatattccggcaattcgccgatacgcatcggccggcactcgggcgcacggtttttcgccataccaccatagcatttgaacccgtcagggcgaacgtcgggttaggggcgcttggcatccatgttcatggagctcagtgagcccatgtctttgatggccagggcgctgacacggccggaataatcgtcaaggtacttcttcagcaggtcggcgacttcctgatacccgcgagacggcagctgaccgaccagccagctcagcccatcggcgaagcaactaggcaacggcatgccgtcgaggatcatcgagtaggaggcgagcttcctaagcggggcttccatctcctccatcgtcaggccgaagcgcgtgtacaggtcgatgcgctcaagatacttgccgatgaagatgaacgccttcagcgtggggtcgaccggcgaattctcgatgccgccccagaaggcgagcatgtcatcggtaatatcgcgctgcttgtagatgtcctcggcgtcggccgcgtatttggcggcatcggtgatattggtcatcgccaactccacgtactgcaacagacgcgagctcaattccgggcgcagaatcacggcgttgttgaatgcggaggttacggccgaccgcaccgaatcagggttggacccgtcgtacaggaagctgttcacgaacccgtcgaagtcctcgaaatcttcgggcaggtcgagtgcgtgagcgaacggacggaaggcgtccacatcggtgtccatcacacgatcgtagaacgggaagaactggttcagcgtggtgaaggcgcgctcggtgtaccgacccagccaatacaggttgtctgccttggaggcggtgaccagagacaacgagtggcggcgggactggctcagcaggttcgccacctgcacttcagcaccgtattcatgctccacgccggattcgggtgccaacacccacgtatccttgaatccgccaccctgcgacgagttgacgatcatctggccgggcaccgacgagtatcgagtcaagcccgaataccacacatgcgtgtttttgccgatgaccacaaaggcacgcaaatcgcatttgcgcggcgacatctcaccggtcttcgggtccaccacatcgatatcgcggaactgaatcacctcttgggcgatgaatcgacgaggctcctccttgatccggttggcaagctcctcacgtgcggcagcatccagcgacgaaccgaacaccacgccgtaaccaccggcttcggccacatccttgatgaccagctcgcccatacgattcaggacttccttacggtcggcctcgaacatcggcatatacgtgggcgcgttgttgagaatcggttcctcgccgagatagtacttgatcatctgcggcacgaagtagtagatggccttgtcatcggccgcgccgttgcccggcgcgttgacgatggccacgttgcccgcgcggtaggcggacaggataccgggcacaccgatcaccgaatcaggattgaaggcaaacggatcgaggaattcgtcggacagacggcggtagaccacgcccacacggtggcgtttgccggcgtagtcgaggaagtagaccttgttgtccaccacttcgaggtcttcggggaaggccagtgcggcgccggttttctccgccagataggcgtgctcgaagaacgcggaattgtagcggccgggggtcagtaccacggcgatgccctcagtggacacaaagtccatggccttgcgcagtaggcgcgggtattcgcgattgtcgcggatgtgcacgtcgcggaacaggcgcggggagatgcggcgctcgatgtcgcgcacgaacagcgggtagctggcgcccgaggggatgcgcaggttgtcttccagcacccaccagcggccatcttcaccctggaccaggtcttcgccggcgatgtgcgcgaagatgccgccgggaggggtcacgccgttgacctgcgggaagtagccggccgaggtgtatacgtattcctccggcacgacgccgtcatggatgatggccttgtcggagtagatgtccttcagataggcgttcagggcgttgacgcgctgcttcaggcccttctccaattcgtcgtattcgtcggattcgataatgcgcggcacgggatcgtacgggaagagccggtcatggtattcgccgttcttgtagatgccgaagcgtacgccgttgcgggacagctcgcggttgatcgcctcgcgacggtttaccagttcatgggccagtctgcgtgctgcggattcgatcatcgtgcctgctccttgctgtggcggcttctgtggcctcaagcggttaggcgtttcgagcgcacgctgacgccgcaagccgtaaccgggtttgatggttacaacctaaggcggccccgtttcagcaaacgcgcgagaatgttacaggcaggtcacttcgccgaccgcactcgtctcgccgaccgcgcgcatctcgccgaccgcgcgcatctcgccgaccgcactcgttacaatgaatggctatgacacgactgcgcattgacttggcctacgacggcggcggattctatggctgggccaaacagcccaatctgcgtacggtgcaaggcaccattgaagatgcgctgcacaaggtgctgcgggtgccggccgatgatgcggccgaaccgttgcgtctgacggtggctgggcgcaccgacaccggtgtgcacgcctcccaccaagtggcgcatttggatgtatccgatgaggtactgaatcgctgcgtaggtcacatgaccattccggtcaccgaggcgctgactcgcagactcaaggctgtgctgccttcggacatcgtcattcatggcattgccgtggcaccggccggtttcgatgccaggttctccgcattggagcgcacttatgtgtatcgggtcgccgatcgttcgtccgagatcgacccgcgcctgcgtggatgcgtgcttaccgtggatgaatcgctggatctggagcttatgaaccgcgcagcctcattgaccatcggcctgcacgattttggttccttcgccactccgaatccgggaggcactacgatccgcgaagtcaagaccgcctattggcggcgggtgccgatcactcccctggtgccggatgcgatggcatcgcatgaagcatatcggactccgtcgctggagtccggactggcggtgttcacgattgtggcggacgcctttgcccgcaatatggtgcgctccttggtcggctcatgcatcaaagttggttcgggacgcaaatctctggaatggtttgccggcaaaatggccgagccagtgcgtgaaggctcaagcgggccgattgcgccgcagggcctgactttggagcatatcgcataccccgtcgatgatcagctggccgcaagagccgaggccattcgagccgtacgtacgttgtagtttctatgaaacaacgcaaaagggctggaacccaaacggattccagccctttcagctagcttggcgaaacgctattcagctcactcggccttctcggcgtcagcggcttcctcagcgggagcctcagcctcagcggcggcggtctcctcgaccggagcctcagcggcctcagcctcaacggccggagcctcttcttcggcaaccttggcggcggcttcagcttccttcacaacagccttcttggcaaccggctcggtgacgagctcgatcacagcggccggagcggcatcgccaacgcgcggggcgatcttgacgatacgggtgtagccaccttcacgctgctccatctgctcggcaatctgggtgaacagaatgtgcaccacggacttgttgcggatgacgcgcatcacgcgacgacgggagtgcagatcaccgcgcttggcgaaggtgatcaggcgctcggccagcggacgaaggcgcttggccttcggcagcgtggtggtgatgcggccgttctggaacaggctggtcgccatgtttgccagcatgaggcgctcgtgtgcggggctggaagccagacgcgggcccttcttaggtgtaggcattgggtttactccttatatgtccgttcttcaggcaagcaggtgggcatatgcccgaacatccgcttgcctagtgaacgaacgattggtcaaagaggcagatcactcgtcttccggcgagaagaacgtaccaccttcgagattattggtatcgaaggccatcggcgaggacttgaggctcaggcccagggtctgcagcttctccttgacctcatcgattgacttcataccgaaattgcggatgtcgagcaggtcctgctcggtgtgggagacaagctcaccgatggtgtggatgccctcacgcttgaggcagttgtaagaacgctgcgtcaggttgaggtcctcgatcggaacggccatctcggggttggtctcctcggccaccggggccggaccgacctcgacgccttcagcctgggcgttgagctcacggcacaggccgaagagctccaccaaggtggaaccggcggaagccaccgcgtcacgcggggagatggcgggcttggtctccacgtccagaatgagcttgtcgaagtccgtgcgctgttccacacgggtggcctcgaccttgtagctcaccttgagtaccggggagtagatggaatcaaccggaatacggccgatctcatcgttgtcctgcttgttcatctgggcaggaacatagccacggccacgctcgacagtgaactcgatctcgagttcgccatcgtcggcgagggtagcgatgtgctgctccgggttggcaatagtgacgccggcaggcggggtgatgtccccagccacggcttcgcccttgccgctcttgcgcagatacatgaccacaggctcgtcatattcgctggtgagcacgatgcccttgatgttcagcaggatctcggtgacgtcttcctggacgcccggcagagtggtgaactcatgcagggcaccggaaatacgcacggaggtcacggcagcacccgggatggagctcagcagcgtgcgacgcagcgagttgccgagcgtgtagccgaagccaggctcgagcggctcgatggtgaagcgggagcgctgcggattcagagattcctcggtaagagtcggacgctgtgcaataagcactgtggttatcctttcagcttgaactcggtggtgcactcaccggtcaggcggttttggatggatttggtattgctgagtgctcagacgcgacgacgcttcggaggacgaacgccgttgtgggcttgcggggtgacgtcggtgatggaaccaacctcgaggcccgcagactgcagggaacggatggcggtctcacgaccggaacccgggcccttgacgaacacgtcgaccttcttgacgccgtgttccatcgccttgcgggcggcggactcggcagccataccagcggcgtacggcgtggacttacgggagcccttgaagccgacatcaccaccggacgcccaggacaccacggcaccggacggatcggtgatcgaaatgatcgtgttgttgaaagtggacttgatgtgagcctggccgaccgggaccgacttgcggtcgcgacgacggggcttacgagcggcttgcttaggcgctgccattgaccctcgtttcctagtaacgaactttgttgttgacgttcgggcgatgggatgaaatcatcccgtggcccgaatcatgccaccgactacttggtggccttcttctttccggcgaccgtgcgcttcgggcccttgcgggtacgagcattggtcttggtgcgctgaccgcgcacaggaagtcccttacggtgacgctggccttggtagcagttaatctgaatcttgcgacgaatatctgcatcgacttcacgacgcaggtcaccctcgatcttgtagttggcttcgaggtagtcacgcagcgtaatcagctgctcgtcggtgagatccttgacgcggatgtccgggctgataccggtcgcggcaagcgtttccttggcacgagtgcgacccacaccgaaaatgtaggtgagggcgatctcgatgcgcttctcattggggatgtcgactccggcaagacgtgccattgcgattccttcttgttgccgtaggtcttgcacccgctcgcccggatacccggcacgggcctacgtacccgtggttcagtgtcgttcccttgcgggaagcactgtgagagagtgccttatttacttagtgccgctggagaatctgctctcagccctgacgctgcttgtggcgcgggttgacgcagatcaccatgacgcggccgtgacggcggatcacgcggcagttttcgcagatcctcttcacgctagggctgaccttcatggttatccttttcttgtgtacctttacttgtaacggtacgtaatgcgtccgcggttcaggtcgtaagggctcatttcgagcacgacacgatcctgcggcagaatacgaatgtagttcttacgcattttgccggaaatcgtggcgagcacgatgtgcttgttctcgagttcaacgcggaacatcgcgttaggcagtgcttccactacctgtccttcgacttcaatcacaccgtcttttgccatgtgcctctagtcctattccgttggatgattactatggcatatccgaagacacaccaactgtcaactatatacgcacatacccctgtacgaacactcggcgtgtcgcacaggggtatggaaacgttgatgtggtatttcggcatcactccggcttgttggccgggctgccgaacctactactcgaggtggctgatgatacggccgctgatctcgtcgatgtcgccgacgccgttgaccacgacgagcaggccacgggattcgtagatgtcgagcagcggagcggtttccttctcgtaggtctccaggcgcttggcgatggcctccggagtgtcgtcagcgcggccctgctcggcggcgcgcttcttcatacgctccagcagcacgtcacgggcggcttcgagggccaccacgtggtcgagcggagtgtcgaggtcggcgagcatctcgtcgagagcggtgacctgggcggcgttacgcgggtagccatcgaggatccagccgttattgcagtcttccttggccagacgatccttgacgatcttgttggtcagggagtcaggaaccagctcgcccttgtcggtgtagctcatcgcctcaagaccgagttcggtcttgttcttgatgttgtagcggaagatgtcgccggtggagatggtggggatgttgaagtgctcggcgagcagagcagcctgggtgcccttgcccacgccctgggggcccatgatgagcagacgcatagtggtctccttttgtgtcggttattaatacggttttggctcccttggttaggggagccattgagttatatgtggaagaaagattgctccgtcgtggaactcctcgcgcggccgcctgcccattgcgggcgaccgctgccaagcgggcgtcagccttctttgtggtccacgttttcgaacaggaagccggtgtactggaactgttcggtctgggccttggcctgacgcagggtgtcgaggcccacgcccgcgatgatcaggatcgtggtgccaccgaacggcagcttggcgttgagtccgagggccatgatcagcacggtcggaatcagggccacgaacagcaggtagacggcaccgacggtgttgagtcggttcatcacgtaggtcaggtagcggctggtggcgttgccggcgcggatgccggggatgaagccgccgtactgcttcatgttgtccgcggtctcgtccgggttgaacgtgatcgaggtgtagaagaagcagaagaacacgatcatcagcgcgtacagggcgatgtaccacacggatgtggtgttcgccaggttggcgttgatccacttgacccaggactggtcggacttgccgaactgggcgatcagggtcgggatggcgaggatcgaggaggcgaagatcggcgggatgacgccggacatgttgatcttcagcggcaggtaggtggaggagccgccgtacatcttacggccgatcatgcggcgcgtgtactgcaccgggacgcggcgctggcacagttcgacgaagtcgacgaagatgaggatgaccacgagcacgcccacgacgatgccgaacttggtccagtcgccgttcttgccgttggtgccgtagccgatctcccacaactgcggcaggaagccggagcagatggacatgaagatcaagatggacatgccctggccgatgcccttgtcggtcacgagctcggccatccacatgatcaggccggtgccgccggtcatgatgaggaccatgaccacgaggttccacacggagccgtccgggatgacctggtcgcagcggtagttgaacagggcaccggagcgggcggtgaccaggatggtggtggactgcagcacggccaggccgatggtcaggtaacgcgtgtactgggtgagcttggcctctccggactggccctccttatgcagggcctcgaagcgcgggatgaccacgcgcagcagctgcaccacgatggacgcggtgatgtacggcatgacgcccagcgcgaagatagacagctggagcatagcgccaccggagaagaggttcaccagtccgatgaagttctcctgggaggcgctgccgacagtggccatgcacttgttcaccacgttgtagtccacgccaggggtcggaatgaacgaaccgatgcggtagacgatgatgatgaacaggacgaagagaatcttcttcctcaactctttggtcttcagggcctggattagtgtcctcacctagatttcctcccaatagcgcgccaatcacgcgaaatacacaaactaacgaatgagcatagtctacagtgcctacttcggccacttcatgtctcgcgaatgttatctgaattatgctccgtcgtactgaacgggggaagcatactcaaaacgatcattgtgttgagactgcttctctgcgctcagaacaacaatttttgagaaaagggaacccccgtccacctattggcgggcgggggttgtacagcctattgcgctccccgtaggactaatcagtcctcggaaacggaaccgccggcggcctcgatcttggacttggcggaagccgaagccttaacacccttgagggtgaaagccacggtggtctcgccgtcgcccagaaccttcaccggagcgttgtcacgaacagcgcccttggcgatcaggtcggccacagcaacctcgccaccctcggggaagagctccacgagacgagcgatgttgatgacctggaactcgaccttgaacgggttcttgaagccacgaagcttcggcaggcgcatgtacagcggcagctggccgccttcaaagcccggacgcacgtggttacgcttcgtctggcccttggcgccacgaccggaggtcttacccttggagccttcaccgcggcccacacgggtgcggtccttcttggcgcccggggcgggcttcaggtcgtgcatctgcaggatttcgttatctgccataatcagtcaacctcctcaacggtgaccaggtgacgcacggcgttcaccagaccacggttggccggggtgtcctcgcggacaacggtcttaccgatcttgttgaggccgagggtcttgacggtggcgcgctgagccggggtacggttcacgatgccgtggtgcagggtaatcttcaggttcttagccatgagtatcactcaccatccttctcttcggcggccttagcggcagcagcctcttcgcgagccttgcgagcctcggcaatgccggcggcacgggcgcgcagcagagcatcgggagcaacctcgtcgagcgccaggccacgacgggcggcgatctcctcgggctcttcgagctgcttgagggcgtcgacggtagcgcgcaccacattaacggcggtggcggagcccatcgacttggtcaggacgtcggtgatgcctgcgcattccatgacggcgcgcacggagccaccggcgattacaccggtacccggggcagccggacgcagcaggacggtgccagcagcgtcgtgaccctgaaccgggtgggtgatggtgccgcggacgcgaggcacagagaacatgtgcttcttggcgtccagctggcccttggcgatggcggccgggacttcacgggacttgccgtagccgacacccacggtgccgttgccgtcgccgaccacaaccagtgcagcgaagctgaaggtacggccacccttgtgggtcttggacacacggttgatggtcaccacgcgatcgagcagctcgtcgccgtggttttcttcacgacggttacgacgctcgccgcgacggccttcaccgcgctggccacgacgacccttgcggtcctcgttgttggattcggtcgccacagtgttctgagtttcttcagccacttgggtttccttcgtttcgttgtcgctcacagtgcaagacctccctcgcgggcgccatcagcaacggctgcgacgcgaccggtgtacttgttgccaccgcggtcgaacacgactgcggtgatgccggcagccttggccttctcggcgatcagctcgccgaccttcttggcggcctcagtcttggtgccttcgaaaccggcgaagtcggcctgaagagtggaggcggacaccaaggtaatacccttggtatcgtcgaccacctgagcaaccatgtgacggttggagcgggtgaccaccaggcgcggacgctcgggggtaccggagatgcgcttgcggatacgcgcgtgacggcgcttgagagctaccttcttgccttttccgagaatagcaacgctcatatcacttaccagcctttccagccttgcgcaggatgcgttcatcggcatacttgatgcccttgcccttgtagggttccggagcgcgcagcttgcggatgttggcggcaacctggcccacgacctgcttgtcggtgccttcgacaaccacgtggttggcgtcggtcaccttcagggtgatgccttcgggcgggttgacggtgatggtgtgggagtagccgaggaagaactcgatgcccttgcccttggcgacggcgcggtaaccggtgccgacgatctcaagagtcttggagtagccatcgtgaacacccttgaccatgccggccatgatggagcgggccagaccgtgcttggcacgggtcggacgcaggtcatcagcggcggtcaggacgatctcgttgccttcaacggcagcggtgatgccttccggaaccacgtaggagtcagaacccttagcgcccttggcggagaagttctggccttcaatcttgacttcaacgccagcagggatggcgatggggagcttaccaatatgcgatgccatgtttcagctctcctttctcaccacacgaaggcgacaatttcgccgccaatgcctcggtcgaggcattccttctgagtcagcagtcccgaagaagtcgagatgatggcgatacccaggccaccgagcggcatcggcagggagtcggacttcgcgtaacgacgaaggcccggcttggagatgcgcttgatgccctgaatggaacgctcaccgttcggaccgtacttgagggtgacctcaagagtctggccgaccttggcttccttagcggtgaagtccttgatgtagccttcgcgcttcaggatctcggcgatgttcgccttgaacttggagtacggcatatccacggtttcgtgcttggccgcgctcgcattacgcagacgcgtaagcatgtctgcgatcggatctgtcattgtcatttgggcttgttgccctttctcgctatggtttccgccgccctcacgcttcttctagaagcgttcgggccgcggaccttcagcgtcgatgtttaccaactggacttcgtaacgccgggcagttcaccgcggtgagccttctcacgaaggcagatgcggcacaggccgaacttgcggtagacggagtggggacgaccgcagacctggcagcgcgtgtaagcgcggaccttgaacttcggcttgccggccgccttgttcttaagagcggtttttgccatatcagttctccttgaaggggaagccgaggtgcttcagcagcgcgtaagcttccttgtcgtccttggtggaggtcaccacagtgatgtccataccgcgcacgtgatcgatcgaatcaggatcgatctcgtggaacatggactgctcggtgagaccaaagttgtagttgccctggccatcgaactggtggccgttgatgccgcggaagtcgcggatacggggcagcgcgagggtcagcagacggtccaggaactcccacatgcggtcgccacgcagggtgacgtacgcaccgatggcctggccttcacgcaggtggaactgcgcgacggacttcttggccttggtgatcttcggcttctggccggtgatcagggtgaggtccttgacggcaccttcgatgagcttggagtcgcgggcagcggcaccaacacccatggagacgacgaccttctggacacgggcaacctgcatcgggttggagtacttgaactccttctcgagctcaggaatgatctgctcgttgtacttgaccttcaagcgcggggtggccggcgcttcgacagtagtatcggtcatgccagctcctttccggacttcttggcgacgcgcacgcgcacggtcttcaccttgccgtcacgcgcctcttccttaacggtgatgccaacgcgggtcggctgcttggtctccgggtcgatgaccatcacgttggagcgatggatcggagcctcagtggagacgatgccagcctgctggccctgctgcgttgcacgcacgtgcttcttgacgatctgcacgccttcgacgatcagtcgatcgttggagagcacctgcttgacggtgccttccttgccgcggtccttgccgcggatgaccttgaccaggtcgccgctcttgatcttggctgccatgtcagatcacctccggggcgagggacacgatcttcatgaacttgtgctcgcgcagttcacgaccgaccggtccgaagatacgagtgcccttcggttcacggccggagccgagaatgacggcggcgttctcgtcgaacttgatgtaggaaccatccgcacggcgggattccttgacggtacggacgacaacggccttaaccacgtcgcccttcttgaccgacccgccaggaatggcgtccttgacggaggcgacgatcacgtcgccgatgccggcatagcgtcgcttcgatccgccgagcacgcggatggcgaggagttccttcgcacccgtgttgtcggcgacatgaagccgcgtttcctgctgaatcattgattctccttagccgagctggttctccccatttaccggggcatcgtggttgcccataatgccccggtaaatggcgagccttgccgaactttacttacttggcgcgctcgataatggattcgagacgccagcgcttggtcttgctcagaggccgagtttccataatactcacgaggtcgccaatgtgggcgtcgttgtgttcatcatgggccttgaccttgctggtggaacgaacgaccttgccgtacagcgggtgggtcgaacgctgctcgagctcgacggtaatcgtcttgtccatcttgtcggacacgacgtagccgcggcgaaccttacggaagttacgctcttcagccataatcacttctccttggattcggtagcggccggctcctggctgatgccaagctcacgctcgcgaagcacggtgtacatgcgggcgatgtcgctcttgacagccttgagacgggcggtgttctcgagctgaccggtggcgtgctggaagcgcaggttgaacagctcttccttggacttcttcaggaagccttcgatttccgcgttggtcttctcgttgagattcttgatggagtaatcagcggtaccgactgccatcagatatcaccaccttcacgtgcgataatgcggcacttcatcgggagcttgtcgatagcgcggcggagggcttccttagcgacgtcctcggacacaccaccgatttcgaacatcacgcgaccagggcgcacgttcgcaatccagaactccggggcacccttaccggaacccattcgggcaccgagcgggtgcttggtcagcggacgatccgggaagatcgtgatccacacgcggccaccacgcttgatgtagcgggtcatggcgatacgcgcggcttcgatctgacggttggtcacgtaggccggggcgagggactggatgccgaaatcaccgaagttgatctcgttgccgcccttggacatgccagaacgcacagggcggtgctgcttgcggtacttagtcctcttggggataagcattcttgctcactccttcgtttctgcagccggagcggcctcggcgggagcctcagccttgggggcttcgacggcctgcggggcggcggaacggttgccacggcgcgggcggcgatcgccaccacgacggcccggacggttgttctgctgagcctgctgctcttcgaactcggattcggtcatgtcgcccttgtagatccagaccttgacgccgatacggccgtacgtggtcttggcctcgaagaagccgtaatcgatgagggcgcggagggtctgcagcggaacgcggccctcacggtagaactcggaacggctcatttccgcaccgccgaggcggccggagagcttgatgcggatacccttggcaccggcgcgcatggcgtcctgctgggccttgcgcatggcacgacggaaggtgacgcggttggtcagctgctcagcgatgccctgagcgacgagctgggcgtccagcgcggcgttcttgacctcgaagatgttgagctggacctgcttgccggtcagcttctcgagcttggcgcggacgcgctcggcctcggcgccacgacgaccgatcacgatgcccggacgggcggtgtgaatgtcgacgcggacgcggtcgcgggtgcgctcgatgacgatgcgggacacgccagcgcgctcgaggtccttgctcatctccttgcggatctgatcatcctcaagcacgaagtcgcggtagcgttcgccggccttgttggagtcggagaaccacttggagcggtggttctcagtgatgcccagacggtagccaaacggattgatcttctgacccatctttagcgggctccttccttgttagccacgacgaccgtgatgtgggaggtgcgcttgttgatacgagcggcgcggccctgggcacgagcgcggaagcgcttgagggtcacaccttcgtcaacgtaggtctccttgatgtacaggtcgttctcgcggaacggctcgccggccttgtcggccttcacgcgagcgttggcgatggcgctctccagggtcttgcggaccggcagggccgcagcctgaggggcgaacttcaaaatggtgacggcttcggtcgccttcttgccgcggatgaggtcgaccatgcggcgagccttgcgcggcgtcacgcggacgtgacgagcgattgctttagcttccatgttctattccttatccttagcgacgggccttcttgtcgtccttcacgtgacccttgaaggtcttcgtgggggcgaactcacccagcttgtgaccaaccatggcctcggtgacgaacaccgggacatgcttgcgaccatcatgaacggcgaaggtgtgtccgatgaaatcaggggtgatcatcgaacgacgggaccacgtcttgatgacgttcttggtgcccttctcgttctgctcgtcgactttcttctgcaagtgggcgtcgacgaaggggcccttcttgatgctacgagtcatcttctcgatactcccttacttgcggttcttgccggacggacggcgacgaacaatcatcttgttcgaagccttcttcggacgacgagtacgaacctcgcccttgccccacggggagaccggcggcttaccaccgcgggtacgaccgccgtgcgggtggtcgaccgggttcatggactcaccacgggtgatcggacggtggccgatccagcgggcgcggccagccttgccgagctgaatgttggcgtggtcctcgttgccgacctcgccgacggtagcgcggcagcgcgcgtcgacgttgcggatttcgccggacggcatacgcagctgagcgtaggcgccatccttggcgacgagctgaacggcagcaccagcggaacgagcgatcttggcgccacccagcgggcggagctcgatggcgtgaaccacggtaccggtcgggatgttcttcagcggcaggttgttgcccggcttgatatcagcctgagcaccggtctcgatgacgtcgccctgcttgatgcccttcggcgcgatgatgtagcgcttctcgccatctgcgaagtgcaggagggcgatacgggcggagcggttcggatcgtactcgatctcggcaaccttggcgggcacgccgtccttgtcccaacgcttgaaatcgatgagacggtactggcgcttgtgaccgccgccgcgatgacgggaggtgatacggccgtaagagttacgaccgccggtcttggacttcttgcgaaccagcgacttctcaggcgtagaacgagtcagctcggagaaatccgagacggacgcgttgcggcggcctgcggtcgtcggcttataaacgcggatagccataatgtagttcttcctttaacttttctcggctagccttcagttaccaaagatgtcgatcgtctggccctcggcgacggtcacgatcgcacgcttctgggaagcgcgctggccgaaaccggtgcgagtgcgctgcttcttgccagcgcggttgagggtgttgacgttcgtcaccttgaccttgaagatctcttcgattgcctgcttgatctgcaccttgttcgcatccggagccaccacgaaggtgtactggccacggtcggaagcggcgtagctcttctcggagacgacgggcttaagaatcacgtcgtgagcgggcttgtgaatagcgaccatctaaatcaggcctccttcggctcggtcttggcagccacgaaagcctcgaaggcttccttggtgaagaccacgtactgcgaggtaatcacgtcgtacgtgttgagctgatcgacaaaaatcgggtgaacggtcgggatgttgcgcacggagagccactcgttgatgttgtcgcgagtgaagacgaccgtggtgaacttgtccgcggtgatcggggccagggcggcgacagcggccttggtggacggctcggtgataccgaactccaccacggcaacgcgaccggcgttggcgcgatcggacagggcgtagcgcagagctgcggccttcatcttcttgggggtgcgctgagagtagtcacgcggctgcgggccgaacacggtgccgccgtggtaccactgcggtgcacggatggagccctgacgagcacgaccggtgcccttctgcttccacggcttcttgccgccgccggaaaccatgccacgagtcttggtggcgtgggtgccctgacgagcagcagcgagctgagcggtgacaacctggtggatcagcgggatgtgagcctggacatcctcggcggaaacgccgaagagagcctcaggagcttcaacggtgccggtggcctggcccttggcgtcggtgacgttcagagtaacgtttgccatggtttatcaggctcccttcacagccgagcggacgagaacgatgccgcccttggggccaggaatggcacccttgatggcgaggatgccgttctcgacatcagcggagacgacggtcaggttctgggtagtggcggtcacatgacccatgcggccggccatacgcttgcccttgagaatacggctcggagtggcgcatgcgcccacagaaccgggacggcgctcgttcttgtgagaaccgtgagtacggcggtaggacttgaagccccaacgcttgatggtaccggcgaagcccttacccttggtggtgccggtcacgtcgacctcagcaccctcttcgaacaggtcagcggccagttcctggccagcctcgaactgatcgacgtcgtcggtgcgcacctcgacgaggtggcgacgcggggtgacaccggccttggcaaagtggccagccagcggcttggtcaccttggtggggtcgatggcgccgtagccgagctggacggccttgtagccgtcagactcctcggtcttcacggcggtcaccacgttggtggacacgtcgacaagagtgacgggcacgaagaagccgttctcgtcccacacctgggacatgccgagcttcttgcccagcagagccttgcgattagacataatgcttcctcctcccttacagcttgatttcgatgttgacgtccgcaggcagatcgatgtgcatcagggagtccacggccttgggggtcgggtccacgatgtcgatgaggcgcttgtgagtgcgcatctcgaagtgctcgcgagaatccttgtacttgtgaggagaacggataacacagaagacgttcttctcggtcggcagcggaacggggccaacaacagttgcgcccgcgttcgtcaccgtttcgacgatcttcttcgccgattggtcgatgacctcgtggtcataggacttaagcctgatgcggattttctgtcccgccattgccgtccgccctttctagcgatgttcgttgtactgtttaccaacctgcttctagggcaccggcgcgcatggcctcccttagacatacgtcctctggcggtcatccgacatcagtgcgcggtttccggctgtcacttcacttgaagtggctcccggcccgcgctcgcttttttaattccaatttgcgagcccaaatcaggcaacttgtttattcaagcattgaggtgggacagcgcggaggaattcgcgcgtgtcgcgctcaggccgttcgtattacctcgcggcatagccgctcggcgtcgcctaccaacatccttctgagacttacctatatatagtggcacagctcacgttggcgaatatggattgattaattgagttggacggtaacgcgaattactcttaaggctcgtgacacaatcactggcaaagaacatcaaacctattcgtgagcacggtgccaacgtgttatatcagcacggcactttggccttactcgtgccggggctgctggaaggcaccaccaccatcggcgaattgctcaagcatggcgacaccggcatcggcaccggcgagggcttggacggcgagctcatcatcctggatggcgtggcatacaagataggccaatccggtgtggccgaacgcgtgccggacgacttcaccatgccattcgctaatagccatcgcgcggccttccagtaccagtgcgagcgtcatgatatcggcctagaagagctcaacgaaaagatcgtcaaggcgaacggccgcgcgaacacgttcttttcggtaattgtgcgcggcacgttcagcttcatcaagacacgcgcggtcatcaagcagcaggcaccctaccccacgctggtagaggtggccgaccggcaggccgtgttcctgcgccacgacgtcaagggcaccatgctcgggtacttctcccccgtgatgtttcacggcgcggctgtggccggattccacgagcacttcctgtccgacgacaagacgttcggcggccatgtgctcgatgcggtgctcgagcgcggcaaaatctacagtcaggtgttcgataccttggtgcagcatctgccggtggacgaccctgattatcgcaaccacgacttcagccaagatccgatagccgaggccatttccagcgccgagggcgatactcaacgagattagtctcacataaacacaatgtgagccaaatgaacatttccgaacaatcgcacatgttgcataatggcggaagcactggcttctcgcacttcctatgttcgattgtcgcaatgcaggtctcacatctttcttattgagaaccattcgctgcgatatcatgacagatatggcttcccgccgcaagactcttaaacgcgattggttcgacaaccaacctggcgcatgggtaatggttatgctgcccgctgtggctggcttctttatcggcgggcctaatcttgatacgctttggctgttggcgacgtgggccgtgtgctattgcgtgcagttcagcgccgcgcactggttcaaagcacacttttcacgccgttatctgccgccgatgctcacttatgccgtagcgctcatcgtcatcggcttgccattcctgattacgcataccggcatactgcgttgggctcctttatatatagtgctggttgcgctgtcgatgctgtcctcgtggctgaggaaggagcgctcgctgtggggcaatgccgtgtcggtgattgccgcatcggccatggccacggtgatcgcgtcgtttggcaacgctgttgagacggcatgtgttattcccatcaacgcagcacatgcctcgtgcgcagccgctgatgtcaccgccgcacgcgccgcgattcggaatatgccagatttgagccagatattcgaccttcacgcctggtggcctgcgggttcattgcccgtgaacgggctgattgccaccgtgctgtttgcgctgacgcagtatgggtcggttctggtggtcaaaaccatgatccgggaacgcgggaagcgttcgtacgtggcggcttcgcgggtatggcatgtggcgctattgctgctagccgccgtgccggctggatgcagcccgtatctgattgcgatgactgtgctgctgttggcccgcgccgttgcgttgccggtggttacacggcgcacaaccttgaagcccgtggtgaccggcattaccgaggcgtttgccagctttattgcttttggctgcattattgcggtgatttagcgacgctcagcgattccatggggcggtaattccctcatggggcggtaattagcccatggggcggacggtaaaattttaccttccgcagaatagagccgttttcgtacaccgccccatggggttttcaccgccccatgggcaagttaccgccccatgagtaggttaccgccccatggaggcacctgccggctgagggagcgccacatatgcaaaggagcccggcccctgtaatggggtcgggctccttgtgtccgctatgcagccactaagctgcaacaccgcggttggtggctactgctggtgccagcagccgccaaccgcctgcaatcagcgctcggaggcttcctcagtggcggcctcaccctcgcgctcgatgcgtagcttgtggccttccgcctgggagacgccgtagtaagcaccgacggcgatgtccttcatgtcgttgatcagcgggatgcgcgggttggccggggtgcactggtcctcgtaggcgcgcatgccgatctgatcgagcacggaccagaagtaatcctcgtccacgccgcaatcctggaagctcttgttcataccgagcttgttatcgcggtagtcctcgacagccttcgccaggttctccacggcttcggccggggtcttgccggtgtcgatgccgaggttgcgggcgatgtcctggtagcgctccggggcgatgtacttgttgtacttcggccaagaggtgggctcctcaggaatctggccgttgtagcgaatcacgtacggcagcaggatggagttggtacggccgtgggcgatgtggcacagggcaccgatggtgtgggccatgccgtggcacatgccgaggaacgcggagccgaatgccatgccggccatggtggcggcgttgtgcatcttctcctgagcgtcggtcttggccaggccgggctcgccgttgacggactcagccaggttgtcccagatgagcttggccgcgtgcagggccatgccgtcggtgaagtcgttcgcgtacacggacacgtatgcttccatcgagtgggtcagggcgtcgaagccggcgtcggaggccagcttgcgcggctgggtgcgagccagcaccgggtccacgatggccacggacggggtcagcgcgtagtcggtgatcgggtacttgtagccggtcttgtgatcggtgatcacggcgaacggggtgacctcggaaccggtgccggaggaggtcgggatgcacacgagcttggccttcttgcccagcggcgggatcttgaaggcgcgcttacggatatcgaagaacttctcgcgcacgtcggagaaggcgatttccgggtgctcgtagagcagccacatgatcttggaggcatccatcggggagccgccgccaaccgcgatgatcgtgtccggctcgaactcctcgcgcatcatctccgcgcccttttcgacggtctcgacggagggctccggctcgacgtagtcgatgatgcggaaggtcacacggttggagcgggcgcgcagctggtcgatgaccttgtcgacaatgccgagctgctccatgaccttatcgcacacgatgacggccttctcgatgccgtacatgtcgcgcaggtacttgatggcgttcggctcgaagtaggtcttggccgggatcttgaaccactgcatgttgttgttcctccgagcaatgcgcttgatgttgacgagattcacggcctgcacgttgccggacaccgagttgccgccgtaggagccgcagcccagggtcagcgacggggcgatggcattgtagatgtcgccgatgccgccaagggaggaaggctggttccagatgatgcggcaggcgtgcatacggacgccgtactcacgcacgagctcctggttgttggtgtggatggcggcggtgtggccggcacccagcttgagcatcttctcgcacatctcgaaggcctgctccttgttgtcggccttgagcacggcctgcaccggagcgagcttctcgtgggtcagcggctcgtcgtcggagacttccttgcactcggcggccagaatggtggcgtcggccggaatctcgaagccagcagccttggcgatgaactgcggggacttgcccggcaccacggagttcagcacgggcttgacgccggaaccggcggtgcagccgaacatgtactgctccagcttggccttctcttcggcgttgacgaagtaggccttacggaccttgagctccttgatgagctggtcgtagacgtccttgtgggcgatgatggcctgctcggtagcgcagatcatgccgtaatcgaagtgcttggagagcaccagatcgttggcggcacggacgatgtccacatcggaatcaacataggccggggcgttgccggcacccacgccgagggcgggcttgccggaggagtaagcggccttgaccatgcccggaccaccggtggcgaggatcgtggccacgcccgggtgctgcatcagcgcgccggtggcctggatggacgggtgctcgatccactggatacagttctcgggagcaccggcctcgatggcggcgtcgcgcacgatcttggcggcctcgacggagcacttctgcgcgccggggtggaagccgaagacgatcgggcagcgtgtcttcagggcgatgagggacttgaagatggctgtggaggtcgggttggtaaccggagtgacaccggcgaccacgccgacgggctcggcgacctcatcgatgcccatcacgtcgtcttcgcggatgatgccgacggtcttctggccggccaggtagttggtgacgtgctcacaggcgaagatgttcttggtggccttgtcttccacgaggccacggccggtctcgtcgacggccatcttggcgagaacgaggtgcttgttcagagcggcgatggaggccttggcgacgatacgatcaacttgcttctggtcgaggttctcgaattcgtcgagagccttcttggcgcgggcaaccagcgcgtcaacttcggcctcagctgcggcctgcttctcttctggggtcggattggcagcttcgactttcttctttgcttctgccacttggggtcctcctcgatcttcttggggtattatggcaaagttctgggccatcgcctcgtcacctcagttgcaccagcgggataccgcctcagtaaccgaaaatgaccggtgatgcgttgtcacattgcatatgtgacttgagtcacaatataccgaacggtccggcgcgatgcatacgcacaaaatcgacggcgtttcacgtgcgatattgaacagtttttgttaagagttgtgcgaaatatcgaacaaatcctcactttattcggcgatttggtactttttgttcactttttaccgaaaatcacatgcttgcaaacaacgcaatccgacaactttcttaaatcaagtttccaaaagtactcattttccccacatttctagaaaattggtttaaaaaagtgcccaaaatcgcctacaaatatacgattgttgcctcataatctccgcgtcgaggcacatgaaagccactttcataaagtatacttacatatatctcatcgtacaaaggggtaaatatgagggcaatgccatcgaccgcagtgaaagcgcacaaccgcagtgccatgacccagtatctgtatggccatagccatgtcaccaagcaggaactggaacgcgaactcggcctcagcctgcccaccatcacccaaaatctgcgcgccctagaagatgacggactcatccgcaaaggcgaactgcaggattccaccggcgggcgcaaggcgcaaaattatgagttcaatcccgatcatcgcactgccatcggcgtagtgatgcggtccaacgaactgcgcctgtgcgcgattaacctgtacggcaacgtcatcgaaaaacgcaacgatgccctgccttaccgcaacaccaacgtttactaccagcgtatcggcggcatcatcaacaacttcgcctccgacgtcgaaaagaagcacggcaaagtgctcggcgtctcgttcgccatccaaggcatcctctcccccgacgccaccaccatcaccttcggcaccattatgggcaacacggggcttacgctcgaaaccatcagccagtcggtccattacccgtgcatgatgatccacgattccgatgcctccgccatggtcgagctatggttcgactccacgctcaccgatgcggtgtgcgtctatctggagcgacgcccgggcggcgcggtgatcgtgggcggcaagctgtatcagggtccgaatatgtgcaatggcgccatcgaacacatgacgctggtgccgggcggccgcgaatgctactgcggccagcgcggttgcatggacacctactgctcgccggagaccttgcccgaggattacgaaagtattcccggcttcttcagcgtgcttgagcagggtgaacggcatcatcgcgagcgcatggacgaatggctggattacgtggcgcaggccatcgtcaacgcgcgatccatcatcgcgggcgacgtgattgtcggcggtgaagcagcccagcatcttgaagacagtgacatcgaggatctgaaggcgcgcgtcatcgcacgcagtccgttcggcaccgaccatttcaatctgcgcaagagctactgcgccgaagaccagaacatcatcggtgccgcattgcgattcgccgagaattatctcgacgatatctgtggtgctgcggaacgcggcaggaaatcaagggcttccaccagaagtgacaacacgtctacaatggaggtatgaaaaacccaccgttgcatcgttacgccactcgcccagggctgtacttcactgacgacggtggggctgacgtcgttgttcgttccgaaactgccgatcaggtttggctgtgtgtgctggagcccattgacgagcccggcgccttcttccaagacgccatccgcctgttcgaagacccgaacgcctcgttcatccagcagatccatgagtttccggtgtgcacgcgcattatcgaacatttgtatctgcgcgagaccctgttccgcatgaccggaccgaactacggcctgtggtacgtgcacctgcccaaagcatgggacggcatgcgttatggctaccgcgtggacggcgcatgggacccgaaacacggcgtgcgcttcaatccatacaaattcctgcttgacccgtatggcaagggcatcgacggctccatggagctcacccccgccgccttctcctatgaatgcgatgtcgtggaccacaaggtaaccggctcggcatacggtgccatgagcaccgtagactcgctcggccatgtgccggtatccgtggccatcgacgatcgcgatatccataagcatgagggcgacccgcagcacccgcatgtgccgtggcgcaaaaccgtcatctacgagatgcatgtcaaaggcttcaccgccaacgcgccgtggctgcccgaagcgttgcgtggcacctacgccggactcgcccaccccacaacgctcgcctatctgcagggattgggcatcacctccatcgaactgctgccgattatggccaagcaggacgagctcttcctgcaagaacacggccacaagaactactggggctactccaccctcagctacttcgcccccgaaccctcctatgccaccaaagcagcccaagagaagggcgcggccgccgtgcgccaagaagtcatagacatggtgcgcgcgctgcacgaggccggcttcgaagtcatcatggacgtggtctacaaccacacatgcgaaggcggcgtcgaaggcccgacggtctgctggcgcggcctcgacgacctggcctactatcgccatcaaaaatccaataccggtcgactcgaagacaccaccggttgcggcaatacgctggacttcaccaacacgcatgtggtcacctttgccatcgactcattacgatactgggccaagcgtatcggcatagacggtttccgtttcgaccttggcgtcacgctggcccgcctggaaggcgaattcacccatcatcacccgttcctctacgccctgcgttccgatctgctgctgggcaacctgaagctcattatggagccgtgggatctgggcaacctcggctggcgcaccggccaattctccgtgccgttcgccgaatggaatgaccgcttccgcgacacggcccgcaccttctggcttgaggatgtggacggcggctccgatttcggtcgtatcagtttgcaggagatggccacgcgactctgcggctcggccgatctgttcgccaccgaacccgggcgcggcgctccggcctccatcaatttcgtgtcctgccacgacggtttcacgctgacggacctcaccagataccgctccaagcacaatgaagccaacggcgagaacaataatgatggctcgtcggtgaaccattccgccaatttcggcgtcgaaggcgtcaccgatgatccagacgtcatcacggcacgcgaacaggcggccatgaacatgatcggcatgctgctgctctcgctgggtacgccgatgatgctcgccggcgacgaattccgcaacacacaggacggcaacaacaacgcctactgccaagacaacgacatcacgtggctgaagtgggattggatgtattccaccaacaagacacgcgaaatgcgtcgcctgaaaaccgtgtctcgactggtggcgctacgtaaatcactggacctgtatcaccacgaggacttcttcacccgactgacccaactcggcctactcaaaccctcaagccgcgtgcagtggttcctgcccgacggcaccacgccgatggagcgtgactggttcgatctgggcgtacgtagcttcaccatgcgattgctgtccaacagtgaggtggacgtgtgcattgtggtcaacggcaccgctgacgaccgcacattccacctgccgccagacactcactggacgcctaaatggtgctcggccgaaatcaacggccgccgagccgggcatggcattcaggtcgaggaatgcgatttgaacgatgacaccaccgttcggacgcagcatgtaccggacgccagcgagacggtacgcacgctggtcgaagaagtggccatgcagcgcacggaatcctcgactgaggatgaagcggataccatcgaattcgcgatgccagcaacggatcacgccgcaaacggcacctcgtccgcgcctcgggatgaggtatcagctgatatgcctgatgcccctgtggatgatacgccggacactcccgtcgacgacaatgtctggaccatgccggcgctgagcatcacgctgatgaaacaggtgtgagtcacactcaaaacagcacgacacaaacacaaaggctctccgcggaattccacggagagcctttgtatgctcggtacaggacaagcgaaattaacgcttggagaactgcggggcgcgacgtgccttgtgcagaccagccttcttgcgctccacgacgcgagcgtcgcgggtcaggaagccagccttcttcagggcggcgcggttggcatcacgatcgatggcgttcagagcgcgggcaacgccgaggcggatagcgccggcctggccggtggtgccgccgccgtcaacgaggacgatagcgtcgaacttgccttcgagcttgagcagaacaatcggagagttgacctcacgctgcagcagcttggaggggaagtactcctccagggtgcggccgttgatggtccacttgccgtcacccggaaccagacggacacgggcgacagcctccttgcggcgaccggtgccgtagcccggctcgatcgcggaggtgccggtgccagcgccagcgttggtctcggtggtgtagttggtgagctcctcttcggtctcgacaacctgggagtcgttggtgttttcagccatgattcttatctcctctcaggtttcacttggcctgctgcgagacctgggcgatctcgaagacctggggcttctgcggggtgtgcgggtgctcggcgccgcggaagacacgcagacggtcgagctgcaccttggccagacggttcttcggcagcatgcccttgacagcgttcttgatgatgcgctcggggttcttctcgagcagctcggcgtaggagtcacgacgcagaccaccgggacgaccggagtgcgagtagagttccttgcccatcttgttgccagtcagagcaatcttgtcggcattgatgatgatcacgtggttgccggaatcggcgtgcggagcgtaggtcggcttgttcttgccgcgcagcaggattgcagcctgggtggcgagacggccgagcaccacgtcggtggcgtcgatgacataccagtcatgagtcagatcagctggcttcggagtgaaagttttcactggattaccttttctatattgtgttccgggtctcagctgcttggcgtggcttggtcagggccgcatccaagaggcatcgaacctcattatccgtgggctccctgaaagtcctcgatggcgagtgggatagcgctttgaaggaccccttagggaaacacaacaatccactagtatatcgccgggcttgacatagggcaactggggacactccattgggtttatggcttctcttcccctatttatggtttctcttccacccacttcggctaaccgactcgcctacggtgaggcaattccctgccttctctcagctatcgcttcgttcaggcctcgtctacggacagtccactggactgtccgcttaacgactcggctcgtcagagggaggtaaagtgggtcaggaattgaagatttgggcgaagcgttggacgccgggggtgtcgaagagggtttcgagcggtaccacgttgcccttggcgtcggccagcgggatgcgccagttcgggtattcgttgttggtgcccggctggttctgcgcgcgcttctcccccaccgcgtcggtgatcgaggcggcgagcagcttgcacggcgaacccttcagtgcgcggtacagcgcgtcgatgatatccgcctcgtgatcctcacgatgttcggcgaagtcggcatcaagatagccctgctcgaccagcatgaccagcatcgcatcctgctcggcctttgcggaggcttcgaattcctcagccgggccggtcagcaagcccagacgctcacgaatcttgacgtgctcgtattccaggtaaccggcggtcggcggcaaatcgtgcgtattcacggaggccaatgcgtacggacgccactgggagggggcgcggaacacgccgtcgcactgttcgaaccattcaacggcgcaaccgagaataccgtggctcgacagggaatcggccacatggtccggcaccacgccgaggtcctcacctacgaccacgccgccggcgcgagaggcctcgatggccagaacgcccagcatgatgtctgagtcgtagtacacataagcgccatccatagccgaccggttctcgggaatccaccacaggcggaacaggccgagaatgtggtcgatgcgcaccgcaccggcacgggcgaacatgccatgcaccatattgcggtaggtctcgtagccggtggcctccagattgatcgggctcagcggcggctggctccagttctggccttgctggttgaacatgtccggcggtgcaccgaccgtggctcccttggcgaagcgctcgggattccaccacacgtcagcgccggaggggtgcacgccgacggccatatcggacatgatgccgatatgcatgccggcgtccttggctgcctgctgggcggaggacagctgctcggcggcaatccattccagccagcggtagaagtccaaagtgtccgggtactgcttgcgcagattggcgatttccggggagttgcggttgaacttgcgctcccagttgctctcctcgccgttgggtgctccccacttgtcgtagcacaggcaccacgtggcatacgcctccaagtcggaaccgcagtccgccttgaattggtcgaacgcgctttggcgttcggcggtacggccggccttgaagataatccacagggcgtgcatcttgctgcgccacatggcgtcacggtcgatgagctgggaatcaccgttcagcggttcggtgtcggcatgcagtccgtcgacggcgttcttgtcgcccgcgctgagcgtggcatattcggcgatcgcctcggggcggatgtacgtgaagttgatcaggcgacggcttaccggcagatacggcgacggggtgagcggggacaccggctcggcggcatgtaccggattgatgagcacgaagtcggcaccggtcttctgcttggcgtccaccagcatggtcttcagatcctcgtaatcgcccacgccccaggagttggaggagcgaatcgagtacagctgggccatccagccccacagactgccgcccttcatcgggtcaagcagatcgacgcgatcaggtgcactgatcaaagtggcgtcttgcacacggtcggcgaccttgacgtgcagcgtatggtagccaatcggcagatcggcgggaatgaccacagccgcattcgaaatgaacgtgccatccaagtcgtaggcctgggatccatctccaggaccaacttcaacggtgccctgatatggctcgccgttctccagcgtgatgctcgccgaaggcacgtccagaatgccggtgttcaccagcacccggtcctcgctaccggcgatatgcagcacggtgggtgccaccaatcgggagtaacgctcgttcagaatgcgtcggatggcgatgagttgggcgttctcgctggaggcgtcgatgcccagcgctgccagcacctcgatcaggacgtcatcgtctatctcgtggtagtcatggctcatgcccacataactcgtgccgacaccgaccaacttggccagtcgaatcaacggacgggccagacgctcttcactctcggtaatctcactcatagccccagtctaacgccgtttgattgcgccacaccgtaagcaaaatgccgtgattccgccaaattatgtactttttaccctcacatagtgagatgtgagcgctcacaatggtggatagagggtgattgccggccaaatttgcacggcaaaacacagcaatagtgtgcttagcggcggctttccacggcgtgccgcacctcggccgaggggtcgttggccaatttggcaagcatcgcttcggacgtattggggttcagcgccacggcacggcggaccatcgaggaaagcactgccggtgctccctcttcggattcggtgccaagtacgcccaagaaatccaatgtctccgcatccgcagtggggtcctgcgcaccctcaagccgcatcttccagctggtgcgcttgtttttcaacgccgtatcccggaccgcaggtaccgggtccttggtcaggcggccgaccagccaattcttgtcatccccgttggcggccacggcttggcgcacggacggttcggggtcttcggagagtttgaccaatacgttcgggaacggcatggtgtcggcgaggaacacgcgatcggccaccggggtgtgcgggttgccggccacagcctccaaaagtgcggtggcgcgggagaacgccgcctgatcggcacggtcaggcaacggccgacgggcgaattcggacagttcggccgggtcggtggaatgacgcagacgctcgtatgtagcggtcagcggttcgaaatccaccggagcggcggactcggctgcgtcctgcgcgccttggtcccgctgctgggcgcccgtgtcgattgcagtctcggttgcggcctcggtgggctgggtctgctggctggtggtgttctcgtcggtcatgatgcccagcttagtcatacaggcgtcacgcgagcggaaccggaatgttgaccacgtcaatcggatccggcaccaccgcggcattgaacgcttcccgcacacactcctcgaatcgcgcgcaatcatcctgcggcaccaccgcggtcagttcgacgttcaccgcatacgattcatcctcctgactgccaccgagctgcgccagaatctgctggaatcgtgccagctgcgggtattcgagacggacccggtatcgcttggcggtcatgatgcgggcggcgcgggcggctttcatcgccaatgatgcggcggatgagtacgcgcggaccagaccaccggagcccagcagaataccaccgaaatatctggtgacggcaaccacgcaatcggtggtgccggactgcttgagtacgtcgagaatcggcttgccggcggtaccggacggctcgccgtcatcgctcatgcgttcggacagtcgcccatccgcgcctccgcacacggcggcatacgccacgtgtcgggctttcggatgctgctcgcggatcgcggccacgaacgcgagcgcctcgtcgagcgtatcgacatgggcggcgtcgccgatgaattcggactttttttcgacgagcgaatcgtgggcgggatcgtcgggcgtgttgagaatcgtctgcataagcgtgttccggtggtcggctgactgggtgttcgattgagcgcgaggctagacaggactatcagtgttcggagacgacgacgttatagtcctcgccggcgaagtaggcggtcaggcaggcgatcatctggcgggtgagctccttgaacgcgccgtcggtacgccagccgacgtgcggggtcaggacgatgccgggcacatggcagatggcgtcgtcggcggtcagcggctcgtggtcgaacacgtcgagtgcggcgggaacatcgcccttttgcagtcgggcaagcagcgcaccggattcgatgacttcggagcgggcggtgttgatgaacagggtgccgggcttcacatgcgcaaggttctcggcggtgacgatgccgcgagtggcgttgttgagcggcagatggacggagatgacgtcgctggtttcgatgagctcgttgagatcgtcgaccggagtggcgccggagcgttcgaaatgctcgggcggcacatgcgaattccatgcggcgacctccatgccgaaggcgcgggcgatgccggccacggtggtgccgatgccgcccagtccgatgatgcccatgcgacggccggcgagttgcagtccatcgccgccggcccacgcccagttgccggccttgacatccttatcgagttggccaacgcggcggatgagctcgaacaggagagcgaaggtgtgctcggccacggcgtgatcgccataatgttcggcgttgcagacgcggatcttcagctcgcgcgccttatcgagattgatgtagctggcgacgccggtaccgcagaacacgatgcacttgacgtgcccctgctcgctgatggtgcgcagcagatcatccgaaatgtggtagccgcccaccagcagggcgtcggcatccttcagacgctcggctacgatcgcctcgtcggacgtgaattcctcgaacatacgcacgcgggcaacgtcgtggagcgcggggaactgggccttgatgggctcgatcatcgcgtcgagcacggacggcatcacgacgaggggcagatcggtgcgttcgctttgggtttcgtaaatctcggtcatgggctccacattaggaggccgacgggaaaagcgtcaccttgcggcttcccctccttgagaccaagccgagcaactattgctttgccgcctgctcctgcgtgatgttccattccttgacgacgttctggtccgcgcccatcgaatagatgacatcccagatgcgttggcgtatctgagcgtcgtaggcttcgtcccaacatgtgcctatgggatggtcgctggatatcgggcaccattggtagttgccttgatgcacgttggcggtgggcacccagtcgatgcggttgacgcgccacgaccccttgacgcccttcttgccggcgaactggatgcgtgcggtcacaccctggttgttgaccaaggtttccggcgtgttcgccgactcggtgacggtgttgcccagaccgtagacaatccacgtgccgttatagttctcgatgggctgcgcacaatggcagccggcaccgtagataacgtcgaaggcaccagtgtcggcaagctcatgggcttccgaaatctgccaggaatcggcgtaatcaaggtattcctgcaccgagtgcatggcgatggccaccacatcggcaccttgctcgcgggccttgttggccttgtctaccgcgcgctggatgtcgctgccgtgattcgggtcgccgtcttcgcgcagacgatccacctgccagtcctcgtcggcggtcatgccgttgagggagaccgtgccggtgaccagacccagcttgccgccgccggtcggggaatcgatgactaacggtttggtggagtcggcttcggttttgtacgagccggtctgggcgatgccatcggcctcaagcgtgtcccacagacgggcgatgccatccgccccctgatcccaggaatggttggtggcgtgtgtgcaggcgttgtatcccacgttgcgggcggcatccgccacttccggcggaatgttgaagatcgggtacgcggcatatgggccgccgcgctgggcgatcggggtttcgaattcgcacacggcgatgtccgaagcctgaatgtactgcttcatcggcgcgaacagcgggtcgaagttgaaggcggtgccatccgtggcgttggggttcgggccttggaaatggctccacaatccctcatggaacaacaaatcgccgttgaccagcatggcgatgcagtccgtatccgggcaatccggtgaattgccgtgatgttcggtcaccggtttgggcgtgttcttcgctttattcaacgcgacgtccgacactccggcgcgtgcggggccattgccgtccgtgcgatgggttgcgaaccatgcgccgatgcccagcgtaacggcgagcgcgatcacgaacacgataatcagcgccgcacggttggttcgtgtcgagttggagcgatgttgcccctgcccagcgatatggctcatctttgcccacccttcggaactcttcttctctctctaggataccgcccatctcagtcaaacactgcggggaggaaggcgatgggcaagcgattggacaagcggcataaaccggttaatcttcaatcaccattcacgaacaccacgcaaaagtctcacttagtggacattcttctttcgtttgttagcctttccccgaggtgccgcactcgttcacccgctaaaatggcggtttggaggcggacggacaatggcgtacctccgactccgcttaccacaagcggagaccgaccgtcctcggttatttcggttatttctagcgacacattcccaggaaagtttcgcaaaacagacccccaagcaacccactagaaacacattcccaggaatgcgtcgcaaaacagatatccggacaacccaccagaaccgtattcccggggttcgaatccctctgactccgcgaagtgcgaacaggcccatcatcaggagtttccggaaaacaaaaaagattccaagctttcacccggaaccttaatcggcggagtcagagggattcgaaccctcgagccgtttacacgactaacaccttagcagggtgcccctatcggccactcaggcatgactccacgttacgcaataatgcgcaacagcaaattactgtaccacgtcctgcggatacggcgtgccgaacgacacattattgaccgtccgcgggcgcggcatcgccggagaacgtaacaataaccgcgcaaatcaccaacgccacaccgatgatttcaccaacgctgggaatctcgccaaacgccagtcccacggccaccgccatggcgggattgatggattgcattaccgaaaatgcgccggatgtggtgcgtcgcagcgtgatctgctccaccacatagggaatgaacgaggccatcagggaaatcacaaacagcagagccagcagcttcagcgagccgccgggctcaagcgcccacgtggcatcggccttggggtgaaccacatgagccacagccggcacgccaaggaacagggactggaccagccagccgatggtcacggcgatgcacagattatccagcgaattgccgccagccgccacgcgccggccggtgatgatgtacatgccccacatcgacccgccgatcaaaatcgcaatcagaccatacaaaaacgtgccattgccggacggattggccaatgatatgccggccaacagcaccacaccgaccgccgcgatgccgataccgacccgctcacgccagcttttgccggtaatcaccgccaccgaaagcggtcccaaaaattcgatagacacggcaatgcccatatccatattgctgatggccacataaaacagggtattcatcagcaccagcgagcagccgagcagtacgaccagcccccagccgcgggcgtcgcggtgaaacagctgcgctcgcttagccttgctccagggcctgcaccacagcagcaacagcaccgccatgaatcccacgcggtaccacaccgaatacagcgggtcgagctgggtgaacgcaagtttggcgacggccgtagccaaataaatcaccagtgcctcaccaatcacgataagcaccacgggaacacggttgaggataccgaccactgccttcttcacgaggtttacgctactcggagagtcgggacagcgcgcagcgacttggaaggcgttacggacagtgacgcaatgtggacgattccgtggaatcgcacccaccatgcgaaacagccgcacagtgcgcaaacccttggaattccggcgatattcggcattacgacaatgagcgccgcgccatgcgcgccacatagtgagcatgacctcgttcggcattcctacaatggtggcatgagcaccgcaccgagacttgaggccgccaaacgcgattggggccacgacgagaccggatgcaccgtgctgcatatcgacatggatgccttctatgcctcattggaggtggcgcgcaaccccgggttcaaaggcaagccggtgatcatcggcaccgggccgcgcgcggtggtgtccgccgcgagctacgaagcccggagatacggcatcaattcggcgatgccggccgcgcgcgcccatcagttgtgtccgaacggcatttttctgccagtggatatggcgtattaccgcatgatgtcgcaccgaatcatgcatgaggtgtttttgaccgtcaccgaccggttcgagcaggtttcggtggacgagggctatatggatgtgtccgccgcactgctggagtgggggcggccgagcgcgatcggcgcgtggattcgcgctcaggtggccgagcgcttccacgtgacgtgttcagtgggtatcgcctgtaacaaactggtggccaaaatggcctcgaccaatgccaagccggacggcatgctgctgattccggcggcccgctcggctgagttcgtgcagatgatgccattgcgtggcattccgggcatcgggccgtctttggagaagcggcttaatgcttggggcgtgcattcggtggctgaattggctcagctggatgaggctgcattgactcgtgccactggctccccggctgcggcacgtggattatgggcggcctcgcacgggttggattcccgtgaaatcaccacggtgcgcgaggagaaatccattgggtccgaggaaaccttggccgaggatacacgcgatatgcgcgtggtgtgtgggctactgcgttcggcctgcgacgaagtagccagcacgctgcggcgcaaggggctggtggcgcgcacgctgacggtgaagttgcggttcgccgacctgagctatcagacccggtcttttacgatggagcggccgaccgatacggccggcgtgctgtacccggaatgcgtgcggcagctgaaagtcatgctggggctaccggcctcggcggagtctgccactcccctgcccaaaactattcgcttggccggtatgagcacgtcttcgctcagtgaggcggcggctacggccgtgcagccttcactggatgacatgctcgaagaggccgacaatgcccgcggccagacctcacaggcacgtttgcatgatgccgaggccgcactggacgctgtgcgccgcaaatttggcagcaaggccgcccagtttggggcgtgaacggctcaacgccacttgcgatctcattacgccgtgagacgttcgcaggcggagcggatggcctcgtcggtggcggtggcggagaaacgcaggtaggcgggagcgccgtagaattcgccggggctggggatgatgccgattttggcgagctcggccatatcggcccagcagtcgccggacttggccttgacccatacgtacagcgcgccggagggcatttgcgccgaatagccatatgccttcagtgcgtcaaccagcgcggataggcggcgacggtaacgcccccattgctcgtgcacagcggctgtgtccttcagacctgcggccatggcggcctgcaccgggccggggataatctggccgatctgcttgcggtattcggccatttccttgaccagccggtaatcgccggcaatcagagccgtacggtagccggccatgttggactgcttggacagcgagtagagcaccaggatgccagctgccgaaccttcacacacatgtggattcagggcacatggcgtggcggagaggctgaatgcggtatcggaggcgggctcgttggattcggccaccggtgcggcaggcacagacgcagcagatgcagacgcggcaggcgcataggacgcggctgtattgcggcgcaccgaacgccagtccattaacgcatagcattcgtcggagagcaccacggcaccgatgcgacgggcagcagccacgatgtcggtcagccagtcagcggagatgacctcgccggagggattacacggcgagttgatccagatggccttgacgttcggaatattcacccaggaatcgacgtcggtcacatcatcgactttgaccacggtggcgccggcaagttgggtaccgatttcgtaagtcgggtaggagacagccggttggacgaccacatcgccttcgccaaggtgcagcaggctggccatcagcgccacggcctccttggaacccacggtgggtacggcggcagcgttgatggatttcagatccaccccgcgcagttcgcggaaccatgtatcgatagcggccttaaggtcggcggtgccggcggtgaccgggtatccatgggcgttgggggcgtctgcgccggcaaccagcgcctgctggacactgctcggcaccgggtccacgggtgagcctacggacaggtcgatcatgccacccggcacggttttggcggtggttttgaagccggcgatacgagaccagtcgtatggcgacgaatatgcgtggaagcccatgagaacccctttcttggacggtatgttcctaagatacgacgaaccctcggccgtgatagaccgagggttcaatccgaactatgcgctgtgtgcagcgcttatccgcaaatcagcttactggttctgcggcggcagcgcggcgacctgttccgggtctttgccgattgggccattggcggaagcgccgcccaaatcgccgacttcagcgaagaagttgatagcggcatccttgtaccaagcccactcgtccggcagatcatcctcatagaagatggcctcggtggggcacaccggttcgcatgcaccgcagtcgacgcactcgttggggttgatgtacagcgagcgggaaccctcgtagatgcagtcgacggggcactcgtccacgcaagccttgtccttgacatccacgcaaggctgagcgatcacatatggcatggaatcctccttaacaaatactggtacgagggtacgcgcccgttgggacgctcctcgctctcagccgttaacggccttatcggtttcggcggacagcgtttcggtcaggtcgcccttgccgaggcgcgcatgccagtagccgtagccgaagtagatggcgacgccgaccacgagccacaccacgaaacgaatccaggtgagcacggacaggttgagcatcaaccagaagttggccacggcgatgaggatcggaatccacgggtcgccgggcatcttgaaggcgcgcggcaggtcggggcgcttcttgcgcataatcgggatggagatggccaccagcgtgaaggcggacagggtgccgatgttgaccatgtcggagagcacgccgatgtcgaagaaggcggccacgagcgccaccaccgcgccgacgacgatctgcagagcggccggggtgccatgcttgccggtcttggacaggccgcgcggcagcagaccatcgcggctcatggcgaagacgatacgggtcaggccgagcaacagcaccatgaccacggtggccaggcccagcacgatgccgaagctgatgatcttggcggcccagtcggcacccaccagttcgaaggcggtggccagcgaggggctgtcttgcttggcgagatcggcataggagaccatgccggtggtcaccacggccacgagcatgtacatgacgatgatgagcagcatgcccacgccgatgccgagcggcacgttcttgtgcgggttcttggtctcctcggaggcggtggccaccacgtcgaagccgatgaacgcgaagaacacgagcgccgcgcccgaaaggatgccgggaacgccgtacacggatggggtcatgccggtggcgaactgccacagcggctgggtcatcacgccggtgacggcggaggaaccttccacggtggaggccggctggctcggcggaatgaacggggtgaagttggaggccttgacgtagaagaagccgacgatcaccacaaagaacacgatggcgatcttgagcacggtcatagcaccgtccacgcgggcaccgatcttggtgccgaatacgagcagcgtggtaaagaacgccacgatgatgatcggggcgatatcgatatggaaggagccgaacgccaggttggtgttggcgttccagcccatcaggcgcatgaaatcgttgaggtatacgccccaatatttggaaatcacggagccggccatcagcatttccagaatcagatcccagccgatgatccaggccatgatctcgccgaccgtggtgtaggtgaaggtgtaggcggagccggccaccggaatcatcgaagcgaattcggcgtagcacatcacggctgcgccgcacacgatgccggcgatcaggaagctgatgatcacggccgggccggcgtggaaggcggcggcctgcgcgcccaccgagaagatgccggcgcccacggctacggccacgcccatgattgacagatcccaccaagtcaggttgcgcttgagcttgcggccctcttcacccgtttcggcaatggtctgttcgacggatttcgtacggaacagttgcatagtgctcttctttttctctgttgtttgcgcaccgaatgcgcacaataccgacaatcgagtatagaagagcccgcgtgtcttgtctattaataagacttagagtccgcaatatatgggattaataccccactccatcgatcaatagcgcgattacagcacgccgacgcagaccggttcgggcaccaagtccactccgaacgcgctcttgaccgcctgctgaaccgcacgcgccaaagctgcgatatcggccgcgctcgctcccccacgattggtcaaggccagcgtgtgctgcgtggatagactggccggcgcgtacgcatcgaccttatatcccttatggcagccggcatggtcgatgagccaggcggcggacgtcttggtgccgggagtgccgtcaggcagagtcgcgtcgaacttcggcgcatcttcgggcagggccgccgcttggccggcggtcagaatcggattcataaagaacgagccgcagctgtggcgattgtagtcgggagcaggcaggccgtcatcgccaacgggaacgccggcggcctcattgagggaggccagacgctccagatcggtcaggatattggcctcgcgcttggcggtggccatgtcgggcaaggcgtagcgagtgggatcctcaagcatgcccttggcggcacgtactgcgagcacggctttgcggatgtcggcggtggccatacggtcgcccacttcgacgccaagcgctttggcaagctgtccgtaacctaccgtgccttcggccgagtgggtcagggcaaaggtgacggagagcaccacgtaacgtggcgtcgggaagaatcggtcggccggctggccgggaccggcgtacatgctggccttcagtgcggagtatcgatagccgaatcgaagatcggcgggtgtgaggtcgcgcgttgttttggtgtctcgatcccagacttccaccgattcgaccgaagtggcgacttcctgtccgtaggcaccgatgttctgcaccacggaagcgccgactgtgccgggaatgccggacagtccctcgacgccctcgagcccgagctctacggtgaaggccacgaaatcatcccaattggcaccggcctcggcattgacatgcacggtgcgatcctcgccctctaccggtgcagcctcgtccggcacagtgatgaggcgtcgggcgtctcgaaccaccacgccgtcaaaaggcttatcggaaacaagcaggttggagccgccaccgataacgaccaagggcaggcctttggaatcggcatcctccacggcttcgatgagccccacgcgcgtggtcggctcgatgaaatgggcgatggggccgcccacgcccatggtggtgatgtctgcaaagcttgtcatgacttcctatcttagtggcgcaggtgcgatatcggggcaatcatcggctgaaacggcagaacgcccgcgaggggttcgttcagacgcgggatttctgccatttctcacgcgatgcggatactgattccgcaccctaccactcggctctggagtcaatacgcaaaaacccggccgaatgggccgggttttgtaaagctgtgatgcttgcgatcaacgagtctcgcggtgcacggtctgcttgccgcagcgcgggcagaacttcttgagctcaagacggtcgggcgtattacgacggttcttagtcgtaatgtagttacgctccttgcactcggtgcaggccagcgtgatgcccggacggatgtcggcgctcttagccattgtcattcacctctgtgttcttaggtatagtgcgcgcccaccggttagcgggcgcgatttgtagcgaggaagaggctcgaactcttgaccttacgattatgagtcgtacgctctagccagctgagctaccccgccagagagccccgagtgagaattggactcacgacctcttccttaccaaggaagtgctctaccactgagctatcggggcgtggcggatagtggattcgaaccactgaagcacgaagcggctgatttacagtcagctcc

SEQ ID NO: 1296 - DNA, 19893 bp, Unknown
  R157_18m  MAG No. k141_7026
ccgcgtattcccggcaacaccggttcggccatccgcctgtgcgcagtgaccggcacgattctgcatctggtggagccgctgggcttcaacctgcgcgacaccaagctgcgccgtgcgggcctcgactaccatgacatggcccacgtggtgttgcacccgaatttcgacaatctggtggagtcgatgcccaattcgcgcatcatcgcgttcaccgcgcacgccaccaagctctacaccgaggtggaatacaagccgactgacatcctgctgttcggccccgagcccggcgacatccccgacccgatggacatcatggagggccctcatgtggccgaacaagtgcggctgcccatgcgcccgtccctgcgttccctaaacctcaccaactgcgcatccatcgccatctacgaagcctggcgccagctcaattttgcgggcggagcgtgaggagaaggcccggtgggccttcgagtagcgacgccgaacgaacgccgacaggcgcgagagcggaaacactgagcttcgcgcagtgatgaacgctgaatataaggctacctgcgtttcgaggggcggatttggcatccgccggaggtctactgccgcttcaaggggctgtcaaaggacgagaccccgagtatggccgttgaaatatcaatgcttgtactcggggtcttcatatataccagcccctcgaaacggaagtagacctccagaaaggtcggaatcagcccctcgaaacgggaatagacctccagaaaggtaattcgagctggtatctgcctttaaagaggtacattcgagcgtttgcagaatgctatctgccttcaaagaggtaccgcaatcgagaaaccccgggtatgagtgttgatattccaacgctcatacccggggtttccgcatataggtacctctttgaaagcagatagctctccgcgaggggccaaatgtacctctctgaaagcagataccctaccgaatcaattcttgaagctgtgaatcggcgcagggattcggccgccacgggtcacgaaggcctcgcagctggtctggttcaccggaatgatcggcgcatagcccatcaggccgccgaagttggccatctcccctacgcctttgccttccaccggaatcacgcgcacggcggtggtcttctggttgaccatgccgatcgcggcctcgtcggcgatgatgccggaaatggtggctgcggtggtgtctcccggaatggcaatcatgtcgaggccgacggagcacacgcaggtcatggcctcaagcttttcgatcttcaggcagccagtggttgccgcgtcgatcatgttcttgtcttcggagaccgggatgaacgcaccagacaggccacccacgtagctggaggccatgatgccgcccttcttgacctggtcgttgagcatggcgagcgccgcggtagtgcccggtgcgccaacctgttcgaggccgatcttctcaagcacttcgccgacggagtcgcctacggccggggtcggcgcgagggaaaggtcgatgatgccgaatggaatgccaaggcgacgggatgcctcctgtgccaccagctggccgacgcgcgtgatcttgaacgcggtgcgcttgatggtttcgcacaggaactcgaaatccttgcccttggcctcgtccaatgcacgggagaccacacccgggccggaaacgccgacattaatcaccgcgtcgccttcggtgacgccgtggaagccgccggccatgaacgggttgtcgtcaggcacgttgcagaaggccacgaacttgacgcagccgtaggagtcgttgtcggcggtgcgctcggcaacgtccttgatgatgtggccgagcagttcgaccgcgttcatgtcgatgccggtcttggtggaaccgacgttcacggacgagcagacgatgtcggtctcggaaagggcttgcggcagggagcggatgagcaactcctcggccggggtcatggacttggagacgagtgcggagtagccgccgatcaggtcgacgccgacctccttggccgccttgtcaagcgcgtgggcgatcttgacgaagtcctcgctcgtcttgcaggagctggcaccgaccagcgagatcggggtgacggtgatgcgcttgttgacgatcgggatgccgtagtcgcgttcgatggccttgccggtggaaacgaggtccttggcataggtagtgatcttgcggtagatgttgtcgcaggtcttgtcgacatcgtccgaggcgcagtcgagcaacgagatgcccatggtgatggtgcggacgtcgagcttctcctgctcgatcatctgattggtctcgtggacctccatgatgttcagcatggtttgttccttacaggatatttaaagactagtttggcggtcaccctcatcagagggataaggatggctccgtcagcggaaagcccaccgggctttccgcctcctcgcgtgcggcggcctgctgagcgggccgcctcaaatacggtgcatcttggtgaagatttcctcacgctggcagcggatgcgcacgccgatgtcgtcgccgaggtcctcaaggttgccgaccatcgcgccgaagtccttgtccgcgttggcgtagtcgacaatcatcatcatgttgaagtaaccgtcgatgatggtctgggaaatgtcaagcacgttgacgttgtgctgggacaggtaggtgcagactcgcgcgatgatgccgacggtgtcctgaccgacgacggtgatgattgccttgttcatggctctccctggtcgtatacaaaaagcgggtgactacccaattatagggaagacacccgccattatgttcattaccgattcatgtatcgtttgccgcccttgaacatgaaggagaacaccagcacaacgcccgagttgacgccgatggtaaagaacagtgcgccgccgatcgcggtcatcaccacgccaatggccagtatgcagccgacgaccatccactgggcggtaccggaggatacggagaactcgtccatcaaatcgggcagggcgatgttcatggatgtctcggacagcatgccgaggaatgcgccgatgtacaggccgagcatcaccttatgcggatggtcgaaatgcctggtttcaggagcgttatgggggttatgggaataagtggtgccggatgcgccggcgggcatggtggtggtgcgggataaaacgaagctccctcgtcagagggagcttgcaatggctcaggcctcgcgcaaagcgctcggcgctgcgcacgcggtcctgcaattacggacgacctacggccgacccagcattacctcggcctcgcctattggctcgacctcgaccgcatccgccggacaacccaccgggttgtcctaggcctcgcgcgaagcgctcggcgctgcgtacgcggccagggcgcgcggtgcgtggaagccttgattttcgaattcgtcggcgatcttctgagcgacttcctgagaacggcccttatcaaccaacgcgatgatggagccgccgaagccgccgccggtcatacgcgcaccgtaggcgccgttcttgcgggccacgtccacggcgatgtccagctcggggacggtgacctcgtagtcggcggccagcgaatcgtgggaagcgttgaacagacggcccgcagccttgatgtcgccctgagcgaaggcacgcacgaaggaacgcacgcgctcgatttcggtgacgacgtggcgcacgcgcttcttcatggtctcgtcaggcagggcgtcaagcgtttccttgagggcctggaactggtcatcggccttggagatgccgtcggcggtcacacgcaggttggccacaccgagaatcttggcggcttcctcgcaggtggcgcgacgctgagcgtactgaccatcgttgagctggtgcggagcctgggtatcgaccacaagcagctcgaggttgtacttgtcgaggtcgaactcctgctgggagacgttctccagcggggtcagctccgggcggcagtcaagcagcagcgcgtggccttcggtgcaacgcatggaggcgttctggtcaagaccgccggtggaggcaccggccatctcgttctcggacttgatggcggcgttgatgagggtcacacggccggcgtcggaatcgccgtagccaaggccgtacacgtcgtccagagccagagcggtggagcaggtcatggcggcggaggagctcaggccggagcccagcggcacgcaggagacgaaggcggcgtcaaagcccttgaccttgtcgaaaccagcctgacgcagcgcccaggccacaccggtcgggtaggcggaccagccgtccacgccacgggccttgaggccatcgagatcagcttcggcgaccttgtcgggagccacgtcggagacgacgcgaaccttggtgtcttcgcgcggcttcagggcgatgaaagtgcggtgcggcagagcgatcggcaggcacaggccggcgttgtaatcggtgtgctcaccgatcaggttcacacggcccggagcagcccacacgccctcgggcgcagcgccgtaggtatcgacgaacagcttggtggcttgcgagacgccttcctcatgggtcagcggctcaatgaattcaacagcagtcattgatgttttctttctatcagtcggcgatgtcgatggagccgagctcgtggaagcgcttggcgatgagttccggcgtggtgtcggagatccaggcggccatgccggattcggagccggcgaggtacttgatcttgttggcggcgcggcggaaggagaagaactgcaggttcaggcggtagttctcgcggcgggcgtcgtggatcggggcctggtgccaggcggcgatgtacggcagatccatgcccttgccgtcgcccttgtcgaagaaggcgttgccgcgcttcaggaggtgcgagtacatggaggcgaggtcccaacgctcttcgtcgttgagctggtcgagggtgagcacgtcgcgcaccggagccacgtggacctcgaggggccaacgggcggcggccggcacgtaggcgacccagctgtggttgcgcatcacgatgcgttcgccggcttcgagctcggcgttcatgatgtccttaagcaggttgccgccggtcttctcgtggtaggcctcggtgtgctggagttccttctccatcttcggggcgatgaacgggtagcagtagacctggccgtgcgggtgggcgagggagacgccgatttcctggccgtggttctcgaacgggaagatctgctcgatgccttccatcttggagatttcggcggtacggaaggcccaggcctcaaccacggtgcgcaggcgggagaccggcagatcggccggcaggccatcctcgttcgggtcgaagcagatgacctcgcagcggccggcggcgagcttcttctcccacagcgggttgccgtcaacgtaggtcacgtcctcggagacgccgggcacgcgcaccatggaggggaagcggttctcgaacacgacgacgttgtagtcggtgtccggcacttcgccgtcctggtacgggtcaccgggcttgcgggcggccagcgggttgcccttggcggtggcgccggggccggcggtgatcgggcggttcatacgggcggtggccatcgggatccagtcgccggtcagcgggtcgcggcgcatctgcggggcggcgtacggcacttcgttgccgtcggcgtccaggtgcggggcgaaacggtagtccagcgggcgcgggtccttgagctcgcgggtcttggcaccggagacgaactcggggtcgtcgtccaggtagaagaagtcacgaccgtcggcaagcgtcgtcggcgtgatgcggatgtgctccttcgcatactccccgggggtgtagttggcgaaatcagccatgggtttactcactttcctcaatgatctcgctctggtgggccagcacgagttcctttaccaaatccttggttttggcggcggagtcgggatcgagcccgtcgtcagtaatgaccgtgtccacctggtcgaagcgcgcaaacagcgacagcgatgtgcagctccacttggtgtgatcggtcaaaactatggtacgatcggcgatgtccatcatcgccatatcggttgcggcttccagcgaattcggcatcaggaagccacggggaatcgacaccgagtgggtgccgaggaatacggtgttgacacgcagcgaggcgacgaccttgtccgcgatcggaccgacaagcgagttcgatcgggtgatcacgccgccggtgacgatcacctccacgtccttggattcgagggcctggaccagttcggccacgggaatcgaattggtgaggatggtgatgccgctggactgctgcgattcgagcagatgctgggcgaagacataggccgtggtgccgccgccgatggcgatcacatcgccgggagccacatatttgatggcttcctgggcgatggcgtccttcaggccgagatccatctgagacttgacagagaacaggggttcgctgagcaaggtactggtagtcaccgcgccgccatggacgcgcttcagcagtcccttgtcggcaagttcggcgatatcgcggcggatggtcatcgctgacacacccagttccttcgatagcgccgtaatgcgcactgccccgcgcgtgcgcaacctgctcaagatgaggtgctgacgttgtgacgaaatcatgtgaacattatcgcacacaaaagctcacaaaccaaaccggcttgagcgttttggggacaatctctcgaaaattccgggcaattcaggtgttcatttccacaaaaccgcgcaaaatcgcacattgtgcgaaccgatattctcgcagcgaccactagcgcgatgactcacgaccgacgactctcccgagcgcgttgctcagcggcgagtcacgcctgatacctggtgcatcccgattcatgtatcttctgccgagccgacgcctgcgtgcgcctcgacacgcggtagccccttccccaattcgcctaggcaggaatcgcctagccgcaccagcccaagcgtgagacaataggcggtatgacttacgtttctgaaagcttctggcacgacgccgtcaacaaagccaccaccgatctgttcaccttcggctacaagcacatcatcaaaccgaacttcgtgttcaaccaccgccccgatgaggcacacgatcagatgatcgagttctgccacgtcgtcaagaacgtcccgccgctgctgctcgccgagcagctgatgctcgactacaccgaccccattctggaaacgaatgtgatgggcgtcgatttcaccaacccgttcggcctgtccgccggcctcgacaagaactgcgacatgcccgtggtgctggaccatgccggcttcggttttgaaaccgtaggctccaccacctcgcgtccctgcccgggcaacgccaagccgtggttccaccgtctgcctgaatacgattcgatgatggtgcacgtcggcctcgccaacatcggttcggacaaggtcatcgagcgcgccgagaaggcttggactcaggcccgccagatgcagctgtccgtgtcgatcgcccgcaccaacgacgaccagtgcggcgatttggacgaaggcattgaggattactgcatttcaatgcgccgcgccgccggccgcaccgcgatggtggaggtcaacgtctcctgcccgaacacgcacgtcggcgaaccgttcaccacgactccggaagcgctcgaccgtctgtttacggcgctcgacaagatcgaccgcccgcagcccacgctggtcaagatgccgttgaacaagccgtggggcgagtacaaggagctgctcgatgtgctggccgagcacaatgtgcaggggctgtccatcgccaatctgcagaaggaccgcaccggcctcgagattccgcgcgattgggagggcggcctgtccggcggcccgtgcaccaacgccagcaccgagctgattcgcaaggtgtataaggagtatggcgaccggttcgccatcgccggcatcggtggcgtctttacccccgagcaagcctatgcgaagattcgttccggctccagcctggtcatgttcatcagctcgctgatgtaccgaggcccgcagcagatcaccgtgttgaagcgcggtctggcccagctgctgcgccgcgacggattcgagcacgtctccgacgccgtcggcgtggacgtggagtgaactcacatattgccctattacccatggggcggtaaaacccgcatggggcggtgatggtcccatggggcgggtagccaaatttcacattccgcagaataccgccgttttgggttaccgccccatgagggttttaccgccccatgagggttttaccgccccatgggaaagtcaccgccccatgaggattcagtacgcaccggccacgtattgcggggcgtaggggacctctgtggacggtatgcccagcttgttggccgcacgcaacggccagtacggatcgcgcaatgcggcgcggccaatttccacggcatcggcttcgccacgggccaaaatcttggccgcctgcttcggcttggtgataagacccaccgcggtcaccggaatatcggccttggacttgacctgctcggcgaacggcacctgatagttcggcttgaccggaatcgacactcccgacatgatgccgccagtggacacgtccatcacatcgacgccatgctccttcagcaccttggatagtgcaatggtctgatccaaatcccaaccgccagcggcccaatccgtggccgaaatgcgcaccagaaccggcacgccctcggggacggccccgcgcacggcatccacaacctcgaccaggaaacgagagcgaccggtcaaatcgccaccatattggtcatcacgctcattgctcagcgggtcaaggaactgagaaatcagatagccatgcgcagcatgaatctgaatagcctggaagccggcggccaccgcacggcccgccgccgcggcgaacgcaccgaccagaccatgaatctcatccacggacagcgcgcgcggcgtacgcagcccgccgaacgcgatttcagacggtgccatggtgggccagccgcccgcctcctccggcacactctgaccgtcgtaaccaacggcgaagcaaccggtcgaagccttacgccccgcatggttgagctggatggcaggcaccgcacccgcctcgcgaataccgtccacgatccagcgccaagcatcaatctgcccgtcttcccacaggcccagatcgcacggcgtgatacgcccttcaggagccacggcggtggattcgacgatcaccatgccgaatccgccgaacgcacgagacacgtaatgctggtagtggaacggcgtgggcctaccatcgcaggcgaacgacgaatacgtgcacatcggcggcaaccaaatacgattacgcacggtcacttcgcgcagcgtcattggcgcaaacagtcccggacggtccttgctggctttcttatctgccttgctcacagcttccctttcctcataatcctcataatcatcgaacgattcgctcgtcttgcccgcgccggcccgcttcttggaccgtgcgtcggattttgacttcttcttaccgtgcctacggttcctcgatgcatcctcgtgcttggtcttcggctgcttggactgttcgccgtccgaagacgaagccagcgtcaccgctttgagatccggcacgtcgaatccacgaaaatcaaaattctcatgcgtcagatcgtcgttgctcatcgttcccctttccaatgcgcgttcatggcgaatattcgatgaacgcgctggcgttgtcattaagtattgtaaaacgggcgtcacctgaaacaggtaacgcccgcaaactacgtaatttgggtatcgcagtcgactatgttacgtagactcagccggcctgcaatcaccaaatgtcaaacgccaatcaccaatcactggccatcattcgaccgctctgaattggtgccctgggtttgggtgttgttttgcccagtgttctgcgactgagactgcgactgggattgaccattggtggtcgtctgcgattggctgttgccattcgtagtggtctgcggcacgctgaacgttcgtccgccaatgcccaggtacttgccagtcgtggtgtacttcgagacgggctggccgtaatcgttgtcaatcggtattttcttcttggaaatgtagctattgaagaagttggtaacggccggagctgcgattgtcgaaccatcccaatagctgttgtaccggccgttgatggcaatgttggaaatacggttggtgtacgggttctgtgcatcgccgaccacagcgaacgccgcaatctgattaggaatgaacgatccaccggacaccgcaagatcctcactggtaccggtcttaccaaacgacttacgcccgtcagccaatctgaatgaccaaccggcaccatccggccgcaccgtaccttggttcagggtataagcgagtgtttggatgatgtccttatccaccgcctgatggcagttcgcggatggaaccttgagatcgttgccgtccttatcggtcaccttgctgatggcaatcgggttgcattgcacaccattcgaggcgtatacggcgaagatgctcgccatggtcagcggggacacattcaccgagccgatcatcatggatggtgtatacacctgggttttgtcgatggtctcacccgtggcggcgtcatggtatcccagtttggtcgcggtgtccgccaccttgcacagtttgaggatggcgcccatggaggcctgggtggtgttgtgcgatcgcaccagaccgaggaacgggctttccgggttcaccgtgccggcgcccatggcgttcgacacgttccacgaatcggcaccgcccttgtagttgttgcaggcgaagtcggtcgtggggtacgtcgtggtggtctgtaggttgtcgttgatcgaatgacccgcctccatccacgcaatcaggttgatcggcttccaagacgaaccaatggtccaaccggagccgccgccgtccaccagatcgacggcatagttctggcccgacttggtcggatcgttcgcggctgccggagtggcgtcatagtaacgattcaggccaaagctcagcacctcgccggttcccggtttgactgcggccatggctatttccatgccgctgggatcgtccggtggaatggtattacgcgcggtctccatcatcgtggaattcgcttccacatccaacgtggtgacgatcttcaggccaccctcctgcagcagcttgttacgctccgcacgagtcttgccgaattcttcggagttctggatgcgatgcaccacgaaatcacagaagtatgcgtagtcgccggtgtcctggcagccgacgttcacggcctgcaccttcagcgtgtccttcagcggcgtgttcacggcttcggtgtactgcttctgggtgatgtacccctcctgcagcatcagcttgagcacgatgttgcgctggttctcgctttccttctggttctcctcgaccagcggatcgtactggctcgggttcttggtgatagccgcgatggtggcggactgcaccacgttcaaatcggcggcggacacgctgaagtagcgctgggctgcggtttccacgccatacaggttgttgccgaactgggcgatgttcagatagccctgcagaatctcggccttggaatacttcttctccatctgcacggagatcagcatctcgcgaatcttacgggcgacggtgtcttcggtggcatggtactgggcgatcgggtcgtcgtcctcgatcgcctgcatgagcagcacgttcttgacgtactgctgggtcagcgacgaaccaccctgctgggagcctttgacgaggtaggtctgcacgaacgcacgcatcacgccttgcacgtcgacgccggcgtgagtccagaatcgacggtcctcgcgcgccaccactgcctgctgcatggttttggaaatcttcttcagcggcacgacgatacggttttggttgtagaacgtcgcgataacggtggaaccgtctcgcgcgtacatcgtcgacttctggggcagaccggtcacgtcgaagtccacgttttctaccttgagcgacggaatcaccgctttggcggctttattggcaccgaccacacccggtacaaacaacacgctggccgccacgccaccgcagacggcaagcatgatataggccaagaggagaacaagcacacgttggagagtgagggacttctttttgggcatgggccccattctaaatggggtgccctaccaaccgggctcgcagtcagcttccgtgaacatatcatcacaagaaccgcactagcgtaacattggctggaagtcagccgaacggtcagcgccgcgagcgtcgaatcagcatgcctggctggaagatgatgatcgatcgaccgtcacgtgcgatccatccgcggttggaaaagtccatcaacgccttgttcacggtctcacgactggagcccaccagttgggccagctcttcctgagtcaggtcatgcggcactttgaggccctgttccaccggctcgccgaaacgtgagcccaagttgagcaatgtcttggccagacgcgccggcacatccatgaataccaagtcggagatgcgttcgttgttgccgcgctggcggttggccatgacctgcaacatgtcgatggccacacgcggatgctcatcaagccatgcgaacagggcatcatgctccagccagaccacgcgcgtgccatggctcatggacaccgcggacgcggtgcgcgggccaccatgagggtcgaataccggaatctcgccaagcacttcgcccggcgcgtggatggacagcagctgcacgcggtcatcggaagaagtgcgaatcagcttgacgcgcccctgctccagtagatacatgcgctgatcggtatcgccttcggagaagatatagtcgcccttatcgaaggtcgcacgcttcaaatgcggcagcagctcctcggcttcggctggcgatacctgcttgaacaatgccgtatgcagcaggatgttctcctcgtcagcaaaagcgtttggcgtttccaagctcatcgcaccatccttatcgtcctacgaccgtcgtcggccatccgtcatattgtaacgcgccccacaggtttcgtcagaagcatgccatcattcgtcacttcatgtgtggcgcgatccgatagccgtacgacatgctgacgaatgtgttaccgcgaaaaacggcactgtcgcggttaccgcgctcgcccatgacaaaaccacgcacggccaccggcaaaatcgtatacggccatcggtgaaatcacgccgcaaaccagtcaataaggtgttcgacgatgtgttcgcggctgagacccgtctggcttttcatcgggtccacgcgtttgactgctgatttcaccgctttgtctgacatcttctcgcgactggtgttgagcacacggctcatcttggccgcatcgatgtcatatgccatggtcacatggtgcagcaccgcgccgcctgagcctacggggaagcgccgttgcgccgctcccccgatcttgccgtactgcgaggcgatatcattgaggcccgcgaaccgcacatccaagccaagttcgcgcagcgcttcgaccagccaccagtcacagagccggtaggattcttcgatgcttacgccctgaacgaaatcgagcggtgcatacagagaataggtaatggtgttgcccggttcgataaacatcgcgccaccacccgtgcaacggcgcaccacgtcgaaaccgagctgctcggcaatgtccagattcacctcatcctgggccgattggaaacggccgatgaccacagccgggcccgcccactcccagaaccgtatggtcggctgtcgtgttcctgctgcgacttcacgcgcccaggtctcgtcaatggccatttgctcgtccggagtacgcggatggtcgtggatcacggtgagttgaggtctgagggcgttccagcgctcccggtattcagagcttttgtcgggctgcttggtttgtgtattgatggatgccggggtgttcggcgcatcggggctgaccacccccacccgctgcgcgggagcccccaccagcgggggcaagttgctgcttacggctcggctatatgcggttttgatggcaacttcatctgtgccgataatttggcaactagggtgagcgtccaatacggaccgcaatgaatcatcactaattagagcctgttccaagtcacgcaacaaagcatgagattcggcatccgaaactgattcaataaagaaatcaccgctgatatggcatgactgtgcggtgccgtcatcatcgacggatacggtcacggcgactagtttgccgccaacggttttgcattccccatgtcgtatttgcatgcaactcagtataaacttggctcccctctggaggggagccaagtgggacatcacatgcgggccagaatgtccttgccgacctggtcggtggagcgcacggtggagccgagctcctcgatgtccgcttcgacggcggtgtgaatcttcttggccgcatcatcaaagccgagatgctcgagcagcatggcggcggagaggatggcggcggtcgggttggccttgttctgaccggcgatgtccggagcggaaccgtgaatcggctcgaacatggacgggaactcgtcggaggcgttgatgcagccggaggcggagtagcccacgccgcccaccacggagccggcctcatcggtcagaatgtcgccgaagaggttgtctgtgagaatcacatcgaaacggctcgggtcggagaccaggaagatggtggccgcatcgatgtgctggtagtcgtgggtgacctcagggtattcctcgccgaccttgtcgacgatgcgttgccacatatcaccggcgttgacgagcacgttcttcttgtgcaccagggtgacgtgcttcttgcgcttcatagcgagcttgaaggcgtaacgcaccacacgctccacaccgtatgcggtgttgatggacacctcggtggccacctcctgcggggtgttgcggcgcaccgcgccgccggcgccgcagtacagaccttcggtgccttcacgcaccaccacgaagtcgatgtcgccggggttggcgagcggcgaggtgacgcccttgtacagcttggagggacgcaggttcacgtactggtcgaggtcgaagcgcagcttgagcagcaggccgcgttccagaatgccggccttgatgcgcggatcgcccacggcgccgagcagaatcgcgtcgttggccttgatgcgctcctcttcgtcctcgggcaggatcgcaccatcgcgcagataacgctcggcacccaagtcgaagttctcatactcgaagtcagctacgccttcagcggccttttccaaagccttctgagcccacggagtgacttccttgccaataccgtcgccgggaataacggcgattttatatgtctttgccatagttcaaggagcctactcgcgcgaccacctgccggcccgaacccgctcagctagtggacacaaccaacatgcgtatcgtgtcgagacattcattaggtcattttagtgttcattaggtcggtgtgggttcatttcagggactgaaatggcggcatttcagtctcacatagaagaggacaccgacctaatgaacgacgaaatgacctaatgagcgagccccatcacatccatgcaccaagcgttctcataggaaacctcttcccattgtttgtaacgcccggatagaccgccgtgaccggcctcgacctcgatcttggccaccgcgtccacgccggcggactgcagacgagccagccatttgagcggctcgacgtacagcacgcgggtgtcgttcatcgaggtggtaatgaagattctcgggaattgcgcggcggcgaccgcgccggcggcagccccatcagcactgccgtcaccggcagcctcgtcgtcgccgccctcgagtacggccaccggcacattctcgtatggcgtgtacgacttcatgtactgatacacctcagggtcatgcaacgggtctccccattcgtcccattcggtgacggtcaacggcaagtccgggtcaagaatggaggtcaacgcgtccacgaacggcacatccgcctcaacaccggcgtagcattcgggtgccatattggcaatcgcgcccatcagcaggccgccagcggatccgccgttggccacggtgcgccaagcatcagccaaatgcgccttctgcagcgcgcgcgtggcgtccacgaagtcctcaaaggaatgcttcttgttcagtctgcgcccctgttcataccaggcgcgtcccatttcgccgccgccacgaatgtgcggcacggcgtacagcacaccgcgatccaacatgctcagacgagagaccgagaaccccggatcggaggaaatctcgtatgcaccatatccggtaatgaacatcggcgaatcctgcgccgggcaatcgcggtgccagacgagggaaacaggaatgcgttcgccgtcgcgcgcggtaatccacacacggcgttccatgtaatcgcgtggattgaagtcgcccagcacggtggctcgtttcagcagcgcatcttcgccggtggcgggatcgatttcgtgcagctcgcccgggcgggtgtagctggcgaacgagtagcgcatgcgcggcgcctcatacgatgggttgccgccgacgccgatggtgtacaagcgccgggtctcaccgggcaggtggtcgtcgctggcaccatcggaagatgacgtgtgatccgtgggggcctcatcttcggtccacaagatctcgccatgatcgccggtgaagccttcgcgatcggcggcaaccatgtcccagtcgtcctccagggcaggcggcagcagttccgtaaaccgccacggccgtccggccaggaagtcggcggcggccgcgctcttggtcatgtatgccacgtgcggctggccgtcggcacggtagctcagggacacaaagttgcgatgcaacgcgatgccttcgatgcccagaccgtgggcaccctgcaatatcgccggattggcggcgttgaagtatgcctcggtaatcggcttatccggctcaccatgttcacagccgtacggcgacccggcggcgatgcacacgccttcgccgagtcggtacggcggctcatggccacgcatgtcaatgacgtcgatttcgaaattcggattggcggcgttgtggtagaccacggcgagtggcacatccgcaccgttctcccccgcgccttcaaaacaggcaaagctcacatcatattcaatatcgttctgacgtggaatgaaggcttggaattcgccttcaggcgtggccaccggcagcatcagcacttcggtggtggttttggaaccggtgccgatcacgatattgcgctcatcaaaactgatgccgacgcccacccagaaccgttcatcggtttctcggtacacgcacacatccgattcgaccgccgtgccaacacgatgccgccacacggcgagcggccgccaggaatcgtccaattccacccagaacacccattggccgtccggcgtgaagcatgcgctgccaatgccggtgaactgttcgggcagttcgctgaccggctccccggtctccagcccggcaaggtcgcgaatgcggaaatcatatcgttcgtctcccgcaacatccacgccgtacagcatccaacggccgtccttgctcagatccaagccgccgagccggaagaagtcatgcccctcggattccttgttcgcatcaaaaacgacctgttcaccgggcatggagccgggcgcgccttgcggatccacgaccggcgggtcccagtcatcggcatcgcgcacggggatgcggcattgcacgccatactgtttgccctgctgcgtgcgggtgaagtaccagtaatcattgacgcgcgtaggaacagacatatcggtctcttccacatgcgatttcagctcttcaaacaacgtatgccggaaatccgccagatgcgccatgcgacgctcgcagtactggttttcggcagctacgtagctgcgcacatcatcggagtctttgtctcgcatccactcgtaatcgtcttcgaaaacgtcaccgtggaattcgcggcgcttcggctcgcgcttggcgtaaggcggcatcgcggccgcggcgtttgtgctctcgtcagtcataccacgcgattataggcgaggcaccacaccaggacgcattcggcgttcatcacgccgcgcttatcgcaacaccgtcttcagatacggcagcatggtcttcagaatgttcgagccggtggtgccggtgaatactggtacatcggttaccggagtcggctgggtcgaggtgagtcccgtcaccgacgccaatccggttgattcgcgcgggctcaactcacgaatgacgatagccagtacacgtccgggatatctgcgggcgatggtggcgtacgtggtcgggtccttctgcccgtcatcgcccaccagaatgaacttcatgtccgggaagtcggccataagttgttcagcaaactcaagtttgtgctgggggccggtgggcacgaaggtcttgggcctcgggtcgaggtcgcgcagcagcagcgggccttcgggaaaaccatggtcagtgatgaagttgcgaatcgaactctccacattccaaggcgatgtcgaaagatagaagaacggtgcgccggggaacaaatcggcaatgcgggtgaacagcacgctcatgcccggcacggaggctttcttcttggggtcgaggaacagcaggttgtacgcggccttccatggcaccggggcctgcgtgatcatgatggtgtcgtccacatcggagatgatgccgactttggcactggcggggatggtgtacaggttggcgctcacgggtttgcggttggccacgctgtaggagacgcgatggatgccgggcaccagacgatgctcggccacgaggtcgaggtatccggcggaatcggagatggcgtattcgctgccgagatcgcgcgtgcggtccaccttgtcatagacctcggagacgccgatctgcacggtgttcagcggcatgtcatcaatgctggcctgcacgtgggtgcgcggcgcgggcacggcaagcatgccgcggatgccgcggatcagttcgccggagtgcgcatgcttgggggcgtataccgtgcggcagatcaggcgcgagtaatcgccggtgccataacccacatagggttccactcgcggataccagccccattggcgcaccacctgagtggagatgtgtgaccatacgccgaacacgcgggtgatggcacgacgtatgaatcgggtgatcggcggcttgacctcgatgcgctcatgcttggagggggtgtcgaacgtcgtggcagccttgcgtgcgggaatcggcacggtgggcatgtcatcggaatgttcagcattgctggcattgctggcattgtcggcgccattggcggatgccttgacgtcagagactggcgcggtggcggacagcgctgcattgcgagcagcagcatcccaaggcagtcgcttgcctgccgcctcaaaatcctcgcgtgggcttctcatagacaccaatataggccatacgcctcattttcttggctcccctccataagaggcacgatgcatataggtttgatgccacatactggctcccctcagggaggggagccatgggtggaactaccgcacgaccttcgcgtattcgtcggcgctcagcagctccggctcatcgtcgtcaagctcgaccttcagcagccagccttcgccgtacggatcgccgttgaccacggacgggtcgtccgccacgtcacggttcacatacttgaccgtacc

SEQ ID NO: 1297 - DNA, 55646 bp, Unknown
  R157_18m  MAG No. k141_7362
gtgttcatggctatgcccagcaagccggaaggcgcacgtttcgacgatgacgcagtagctgccccgatgcctcagggtgcttacggcgcaccgtacggcgctcccgcaaccccggacttcaaccaggccgctccgggcaccgctccgaacgcacccgctcctgacttcaaccagccagccccggcctatggtcagccgaccgcaccggctcctgactacggccagcccgctgtgcctacgcccgattacggtcaggtaccggttccgcagtacggccagccggagaccccggccccgcagtacggccagcccgacgctcaggccccacagtacggccaggttccgccgattcccgaaaacgttgatgatgggtccaccgtgctgtctccgcacacggctcccaccgatgacaacgcacagaaaccctggcaaggccagtgactgacgccggcgaagttcgcttaagaagttcgcctcatcactcatgaagcccaacaatgaggccccactcatcaagcggcggtagtattccccgccgttcagtaagccaatgccctgtgtactggatcattccagcacacagggcattgtgcgttattgcggcccctctcttcgcgcaacattccccggaatgcgttacgatggaggatggacgctgcgccgagctactcctacaagctgcctacggagagcgtttgggagatcacatgggattctcccgggcccagcgtcacgatgcggtcgcggcataccgccgcttcaaccgccacgaaaccgcgccattcgcccggcttggtgtagctcatattgtcgccgtccgctcccggattccacaccacggtttgcggcgacccggtacggctgatatgaatcgcacgccccaacatgtcatcgcgcagttccagacgcgcatccgagtaatacacacgattcaccggctgctcgccaaacgtcaccacttgcgcgtcctgtgttttcggcggaaacccttcttcggtggcatccagatacgtcgctccctgcaatccgaccagctgagcaccggacacatcgccgacatgcagataggaatgcaacgcggcctcgtacgacataggcgccgtgccggtgttggtcacggtcaggctcatggtcagcgcattgcccgtttgcacgtcatacacggcatgaaactgagcacccggctcgtcatcgaaccaaggcacttcattgtcgttcagctgctgcgaatccaacacataccgtatgtggctgtcgtcgaatgaaccctcgtccaacgcccaccgacgcagacgtgcaaaaccgtgggatggattgagtgccagctgcttgccatgcgcaaaacccgggccgaaccacgggaagcagatcggcactcccccgccgagcgacttaccggcttcgatatgccacgtactcggcgtccacaccacatccgcctgcccggccggggcccagcgcaacagatgcgctccgtaatcgctgattaccacgctgccgccattgttggcgagcatacgcaaatcgacaccattgcccataagtttcccattcccattgcgcgaacgatacttttcactaaataggatacttccttaacaaaaaagaatcgcaaagtatggccgcaggatgcacaaaggccgtgccaccccattcgccgacgaccgccacgcgccaatcgtgcgcaagatcatcggatacgactggcaatagatgctggtcacgcgggccagtgcccggctcaagcacgacttccccctcgcgcaccagttcgccgtgctcccaatggtgcacataaacgcgatccgcacccaaatcgctggtcagcacgcggccgtccggcactggctgcacccagtgggcgacggcgcgtccgacagcagccgttcgcggcgtagcaccttggcgtcgccactgttatcgccgccggcatccaataccaattgttcgatgccggggcaagccacatgatgcagtttgccgaatccaccaaccagaatatccatgaggatgttccgttttactacgaactacgaaactcttttcgccacacaatacgccgtcgccggcggggcaaaatatgccaaaattagccaattgcagaaaaagggcgatccccgtataggaatcgccctttgcgcaaacactcaggcggagggaagtgcctcaggccgtcaaaccggcgaagagcgccgaccagtcctgagactcatcctcaaggtcgaatcgttcggtgttcatcagtgcctccttcaccggtccgggagccctcccctcaagtttgtgtattgagtaatcggtgagatcactcgtcgtggcccccaatgcccatccggaatgcggcaaatacacgtggaattggattgagcagacgaagacgccgacagtgatcatcgaacgtgatctgccgctgctgggttcccgctacgtcgattcagtgcgcaccaaccatccctatggcgtgcgtaaggcggcggtgcgcttcctgcaacacggtcacacccgtgtgggcgcggcgttcaccgatacaccgacttcggagctgattcaggatggctggaagcaaatcgtgacggaaagcgacgccatcgaatgcccgttcaccatcaccggcattcagccgtacaacaccagggacgtcaaccaaatcgtggacaccattctggattcgggcgtgacggccatgctggtgcactccgattatctggcgatcgccatcgcgcagaccctggagcgccgcggcaagcgcgtaccggacgatatctcgatgatctccgtcaacggctttgccacgcccagctcccgcccgctgaccgtactgcgctcgtccgataaggatctggccgaggcggccatcaacctgctgatcaaccgcatccaaaacccggattctacaacccgccacatctacgtggacccgacgctgaccgatcgcggctcggtaatcgataagcagtaaccccacctccctctgacgagggaggtggcatcgcaaagcgatgacggagggagaggcaccaggcctctaaccgttacgagcgaagcatcggccagagcaacgcccttactctttacaactccacggtctctttgccgggattatccttgacatgcgcgaacttggcggccagagcctccttattgcgcttttcgtcttcttccttggcctgacgcttagcctcgtccgggttccagagcacatcctcacggtgcttgttccattcggcaacggccagaggagcgatgtattcggcggtggcggtcagggtgtctgcgtcggcggctttggcacgggcattaagcaacccgaggatctgctcgtcggtcaggcagatgcgcggcaccgagcactgctcgcgcagttcgttgacgtagagcagaatcggcagaatcttggcggcagcattggcgacactgtccgctgaaccatcggccacagcatcaccggacacctcacccaataacgcatcgcacacggcgagcgcggtggcgaaccgaacagccacatcggcgggcttggcagacgtggccagacgaccatcggcttcagcgtcggcctcgacctgggcttccatggccgcgaccgcctccctcaccgattccgccgtcgcggaatcccagtcgattcccaacacgtcggccgcctcaacgatcagcctggcatcaccggactcggcgtagtcggccatcgtgtcgtaggcgtcattggcggcgagcagggcgtccacgatgctctgcgggcgaccgggaatctcatcggcaccttcgtagacgaactcggcgtccggcacggtgacgtcctcgccggtcaggatgcgggcgaatgcacgggtgacgcgcacctgcaggttctccgcgtactttgcgtcattgtccatctgcatggcttcggtcagcggccacaggctgatcagcgccgagccggcttcggcggcctcagttaccgccggcaatgccgcgacctgtgcgattgcctcacgattgagttcaatggtcatctatgctcctttgcgtccaccactcgattgcagtgcgtcttggctcccctctccgaggggagccaatgtcctaacaccagtgtgccgttacttgacgttggctgctgggtcgacatacgtgattgacatcacacggccggtttcgttgtcatacgtcaccgaggtcacggaggcgagcgccgtgtgccgcaggaacatccagtgctcggggtggccggtctccagataatggcgataactgaaaatcggcgattcgtggctgaccaccacaatctgctcgccggggtgctgggccaccttctcgcgggcgaagtcgtccatacgcgccgcgatgtgctgataggactcaccccagctcggcttgtacaggttggtgacgagcttccagttgccgttcttccacagcgcgccctcgccatggccgatgcgcttgccacggaactcgttgccggcctcaatcacccgttcatcagtggtgagcgtgagcgaagcctcgccacgagcctcgcgcacggggttcagcgcatcgagaatcgcgccggcggtctcgcgcgtacggtcgagcggcgaggagtagacggctgcaatcgtattggtttggggattcttggccaagtacgtggcggtggcttgagccatgcgacggccaaggtcggaaagatggaagtcgggcagtcgctcatagagcagatggtcggggttatataccttgccatgccggacgaaatggatggtggtagcgctcatgagccgcctttctgcttcccgccctgaagggcatgagaacgttgtcttaatatctccaatctaccgcgtgtcgcggagtggacacccgtagagtatccgtgacgcaaatatgcggatgggaaaatccgacgcaaactttgcgcgaccatggacaacacatcattcgatgagggcttcgccggcaacgccacgccagcgggggacatccaatcgggagcggaaaggagcgtagtgctgttatgtccaataactcgtccaactcgaattcgagcaccattctgaccggcatcaaggaagtaggccacaaagtctttggtgggtatgcggaactactgcgcattccgcataccgcccgttattccatcggctcggtcatcgcctgcatgccattcccgatggtcggcatgaccatcaccatttccgtacagcattattacggcaactattcgctggccggcatgctcaccgccattcaggcgattgcgctggccgtggccacgccgctgctgggcaagctgaccgacaagttcggccagaggcaggtctcgattccgacgattatcgtttggattgtggccgccatcgcgctggtgacggcgattaccaaccgcgcgccggaatgggtgctgtactgtctgacgccgttcctggccgccattccgccgtggggcgcgatgagccgcgcgcgctggaccaagattcttaagggtgaccgggagcgcacgaaccgcgcgctgtcgctgtgcggcgtgctcgacgaatgcatgtgggtgatcggtaatccgctggcctccacgctggccgtgatctccggtttgctggcgttctcgttcaccggcatgtgcgtggtggtcggtgcgctgatgttcctgaccgagctgaccactgagccaccgtcgcagaccgcgctggcgcgtgccgagggcatctcccgcaaggaataccgtgagcgcgaggccgccaaggctgaggcgctgaaggtggaaaccgccgccgaggagacccgccgccgtcttgagcgtgaaggcgtgaccgatgaggccacgattaacgcagccattaagcaggcggtcgccgatgcgcgttcgggcaagaaggcgtccatttggggtccgggtctgattgcggtgtgcgtcacctggttcggtttgggcgcgttccagtcggccacgggcatctccatcatcgcgtttgccaccgaagcgaatatgaagcagtacacgggctttgtgtttgcctgcttctccttcagctcgctgatgggcgcattggtgtatggcgcgaagaactggtcgattgccctgtggaagcgcttctacttctgcctggccgtggtgaacatcggcatcagtacgttcctgttcgccaagcatctgtgggtgatcatgatcatctacttgattattggcgtatgccaggccccgacgtggatcaacggcaaccagctcatgttgcatctggtgccgccctctcgcttgaccgagggcatggcgtggatgggtgcgatgaattctatcggctcctccgccggttcggcgattgccggccagttcatcgaccgcatgggctcgcacggaggcttcatggtggtgaccaccttggcactggcctcgctggtgattgcactgatcggcttcaagcagatcaagggctccaccgagcagccgaccctgactgaagtgagtgtgtgagacgtatgctaagccccctctgacgagggggcttagcatacgtcaaaacgctacttcggccagcctttgggcgtgtgctccaaggaccagatgccgagcttgtgggagaagctgttctgccacttggcttcaagctcctcggcattcagtcgattttcagcggacttcagacggttcatcgcattggtgtgcgtatcgtcgagcagccacttgcgaatcaagaagttccagatcattaccacggcagtggccaccaacttgccgatattggtgcgcaacagatattcggcatgctgcgatacataggcatcatggttcataccataggtggaaatccagataatcgcgtcattcatgaacagaccgactacagcgcccgccacgaagataaggatctccatccagcgtgccatgtcatcacgatgcttgaatacgaatttcatgctcgccagatagttgaaaatcagcgagatgatgaaagagatggtggcagccagcacgttgtgcatgtggaatatgccaaccaataggttgaggataccccagtcgataacaaaggcgataacgcccacaatgccgaacttcatcagctgttcaatcagttttctcacaagagtattcaacactattgggctgactgcggaacgtgtattggctggaaaggccaatatctccccaattggccttgccccggtccgttctgcaagcagcttcctacgtccgcatgccatgttcaacagcagccgctgaggctagactggaagtgaaccgaatcaaggaggaattatgcccgttattcacactcatgtgtccgtgtccaccacccccgagcagcgtgaggcactgaaggccgcctacggcaaggcgattaccgctgtgccgggcaagtccgaaggctggctgatgtgcccgttcgaggacaatatgccaatctacttcggtggtagcgatgaccagcccgccgcctatgtggaggtcaacgtattcggccgctctgtgccgggctctgcttgggaaaagctgaccgaaagcattatggccgcgctgaactccacactcggcattcccgaggaccgcacctacatccgctacaccgccaccaccgattggggctggaatggcggcaacttctagttgccaccattcccctcgcagcatagctgttcgcatcgcctacggaaagcccagtgggctttccgtttaatggctcagggtggcaactagtttgcgtattctggctcccctcagtcagcttcgctgacagctccccctcaaagagggaagctcagatgtagaaagcccgccggtgccgggctttctacgtttcaaggggctgatttccaacattcagaagctctactagcgtttcaaggggcttttaaaacaagaaacccggagtataaacattgcaatttcaatggtcatactccgggtttcgcaatcgaagagcccctcgaaacgcagatagacctccggaaaaccggaaatccgcccctcgaaagcgagttacctcacctcatgcctgtcatcacacaatcttgggcatgggggtggtgaggctggtggtcaggttgacgtggaccagaccggcaccggcatgcacctcgaccttcttcagggtcacggtgcgctcttcttcgggggcgcggtcgttgtcggtcatggtcgccggggacttgaccgccacgaacgccagatcatccagcgagatgcctgcgctctggcacagttccatggcctcggacacggactcggtgaagcccggcttgtagatcacgcgctcggccggtacgccgtaggcgttctcggccacccacttggcgttctcggtcagggccatgcccttgtgcgaatgcggttcggccggcatggagccgttctgcaacgcatcgacgaaaccgtcaagctgcggggccagcgcctcgccgccgtcgcggaacaggttgccgatgatcggcgtgcggaagcccagctcgtcggcggtggcctgcagggacgggacctgatcgtcctcgccttcccacaggttgatgagcgggaaggtcggaatgtccaggttctccaggcgctgcacgtggaacgggtagcgccaggccagctcgggatcgtcgcgccaggtggaggcgcgggtcaccacgatggcggcggacggccactgcgcgccatactcgcgacaggcgatgtccagccacttctgggcaccggcgtcggtgccgtaaccggcttcgacgacaaccacgtcatgcagagcgcaggccatttccacggaaaccagcgtcggaatgccgatggacacgttggcgaacgggccaccgtgcacgtagaccggggagccgttcacggtctcggtcttggccggcttgaccgcgtcggccagaatgccggtgatgcgccacaggtccacgaactcgccgaaggtcacggccttgccgtccttggtgccggcgatcatcttggatacacgctcggaaatctcgtccatcgagcgggagagcaccatgatctgcatgagctcgcaggtcggcgtgagcacgaccttctccggcacgttgcccttgccgtagtccacggcggtggagcgcagggagcggctcggcacctcggagacacgcggcacgagaatcgtgtcaagcttgccttcatcgatggccttctcggcgaaggagacgagcaggttctgggccgcctcgatggcgcccatttcgccgcacagaccccagtcgatgagctcggggtgggtcagggatgccttgccgccgccggaggcaccgcccttggaaccggctgcggtgatgcccatgctcggctgacgcagcacggcggccgcatcaatgccacgcttgttcagggcgtcgatcaaggcgatggtcgtggtgttcttgccttcgccgcgcgatgccttgagcggcgtatcggcggtgacgagcaccaccttgccgtgcttgcacggggcgtccgggttctcagccaggtacttcatgtaaccgaatgcgtcgatcttctggaccaggccgtactggctggtgaagtcttcgatggtggtcatttaatgcctttctgtgttgatgatggcggagcggggtggtggggcggccgccgccgcctcttcgcctagaaacagcccactgggctgtttcttaacagcttagcctctcagtccgcttcgcggtcagttcccctcagggaggggagctcaatacggactaaaagtcggacatgtggaagccgttcttcatttccatgctgcgagtgtacagcacggagtcaagcagcttgtcggtttcctccttgagctggtcggccatggtctggttggcggcggcgagaatctcgcgcacctcggggttacgcagcgcggcgatggtctcgtccggggtcatcggctgcacatcgccatccacgttgtcggcctcgaattcctcttcagcggcagactgcgcggcttcctcggcggccgtcaagcccagacgggcgatctgctcgtcggtggcggcgaccaagcggtgacccatcgcaccggtcttctcctggtagcgctcgacggcgttggacgtggagcggaaggcgccatcgcacagggcggcgatgatgcggttggcccagtagaagttctcggacgtcacgcgggtggtggtgtcctcaaggtaagcgggtgtggcgtccacgttcgggaagaacggtaccagcgtgttgaacgggttggacccgtatgccatccactggatggcgcgggaggcttgcgggcggtacgggcgaatctgcatcaccgcaagctggctctggcggttgatgccgatcgtgcggtacatgtggcgggtgcgctcatcgcccagctggccgtatggatcgaacggggtgccctggtagtgggagctcagcacgtacttgatgtcttcgatggtcaccttgcgctccggctggcgggcccacggaatgtcgtcggaggtgggcttgtggtcggcgtccgggccgtcccacacctcgtcgtacgggttgaggaagcgctgcatgtaccaggcgcgcggggtgttgtacacgtggtcggagtcggagtgggagccgaaggcgtcgcgcgggttgaacggggtggtgttctccaccgcgaggtccaaatggttggtttcgatgaattcggcgagatcttcggagcacatgtgcgcttcctggtcgcccagagcgtcctcaaggtcgaattcgtcgataccgagctggttcggcatggtcacgtaggcctcgtccggcacgcgcttggcaatccagtgatggccgcccacagtttccagccaccagatttcgttggagtcggagaaggcgacgccgttcatctcgtaggtgccgaattcctcaagcagcgcgccgaggcgctggacgccctggcgtgcggtcttgacatacggcagcacgatggtcaggaagtcctcttcgccgatgccgccgggcacctcgggctcatcgcccctggccggcgtgtattccacgaacgggtcggcgccgagcacgcgctcgttggtggtcagggtctcggtggcgctcatcgccacgttcgcctcgttgacgccggcctcgccccagatgccttccttgaggtccgcgttcggcacggcggtgtactgcagcgggtcgtccggcagagtgatggtcaggtgggagatcactgatttgtattcgcgcggctgttcctccggtttcacgacgatgaagcgcttcgggttgaactcgccgttcgcggaatcctcgttgcgggcaatgatggtcgaaccgtcatagctcgcgtctttgcctaccagaatcgtggtgcaggccatagtgtgatggtgtcctttctcttattcaagctccccttgtcaggctgagccgttcagcaaacagcccggtgggctgtttgtaggcgagggtgggagataagtcccaccacagatgttgcgggcggtagcccgtccgtaattgcaggacgagctgtctcgcaaagcgagactgaggggtagtcactctagctgtctctcccccagtccgcctacggcggccagctccctcatcagagggagctcacatacgccaactaaaaatcacgccttaccggtcaggaagatgccgtcggtgtcgggcgcttcgccgctgttgcgcagcgcgtgcaacagctcgttgagccagaagccctgattcaagccgggcaacggcttcttggtggcccacacctgcaggtagtactcgtggtccttgtccggcggctgcggaccgttgtaccgcatgatcaccgctgggtcagtgctgcggcccaagaacttggaggccgaagaattgcggccttgcacggtctcgggaatcatggccggcagctgacgggagaagtccggcgggatggccaacgcatgcgaatcattgaagtcgtacatcagcgcgtcaatcggcagattggccacggaccagtgaatccactcgaagccgcagaccggaatcgaatccgggtccacgaactcccagtgcaggtaacgggcctcggggttcacatcaccgatgtagaacgggaaggagacgaccggcacgccgccgttgaagtactcaggcgcggcggccttggcaaaatcgtccggaatgacggtgaaatcggcggaaatcttcatatgtcccagtatcgctcatatgtgtgacgtactgggggctgtgcgttacgggggtctctcccccagtctcgccgcgctcgacagccccctcgtcagagggggctggttgcgtcgggttatggaattagggcgcagaagagggattcgaataccagtagcgggttgccgttgccggctagacgcttgcgggcgtgggccacttcgtccagacgggtcacggcaccggcccggttcaaccgcaccgacaattcggtgatcggcgagcggttctccaggttgatgaggcccaccgaatcctccgcattgttctgcagcaccgccacatcccggtagatggaggcgatggagttcagcgcacgatccaatacgtcgcgcgtacggcgggtgaccaaacgcttcacatcgtctttcttggcgatctggttgaacgcgccacgcagtttcggcgggatgcggtcgttcggtgccagtccgttgatgcggcggaattccgcttcctggccggcggtgatgcggcttgcgtccgcctcggcctgggccttggcattgtcgataaggctgccggccagcagcaccgcgtccgaggcgcgagcgaggttcagtacgcccaccaccaattcgtcgcgatccgtcatcacctgctcgtcagtggcgtacaacttggcgatgccgatgtgtccctcggccagacgggccgcacgctgcgccacttttggctcgacattggtggtggaggtcaagaattcagccaccgccgatgcggagggcacggcgaggttcacgatgcgcgtgcgcgagcggatggtgggcagtacatcctgggcgctgggcgcgcatagcagccagatgcagtgttcggccggctcctcgatctccttcagcagcacattggtggtgcgctccagcatgcggtccacatcctcgataatgatgatgcgccatggtgccgtggcaggcatttgctcggaggcggtgatgatctcgcgcacctggtcgatgccgatggtcactttgttggtggccagcactgtgacatccgggtgggtgccagcgagcacctgttgggtgacgcgcgtgggctcatcgttcatgccgtggtcggggctttccagcgccgccgcgaatgctcgggccatattggaacggccggagccgggaggcccgcaaatcagccacgactgggtgatctgacccgggtcgccctgcgcgatgcgactgagcatgtcgattaccggctgctggccgactagtgaatcccatacgctcatcggacaccgcccatcgtcacggctcctgtagacgccccggatcgcgccatcaccgtatccacatctgcaacattgtcccgcagcagtgtctgaatgtccgcttcgatggcggaccacacctgttcgatggactggctggcatcgatcacgtggaaacgattcggctcggccacggccaagtcgaggaacgcctgacgggtgcgggactggaagtcgctgccggccgactccatgcgatcttcggcatgctcaagacgattgtgggaaagcgccggatccatgtccagcagatatgtgcggtcgggcagcaggttgttggtggcccacatgcttaaggatcgaatctcttctggcgtgagttcgcggccaccggcctgataggccaaggaagagtctagatagcggtcggtgatcaccacttcaccgcgctccaatgccgggcggatggtttcggcaacgtgctgggctcggtctgcagcgaatagcagcgcctcggcgcgcggtgcgatgtcgacggcgcccccatccacaccgtgcaacagcagttggcgaatggccttgcctaacgcagtgcctcccggctcacgggtaacgaccacggtacgcccctgagcctcaagatacgcacgcagccgctcgacttgcgtggtcttgcccacgccatcgacaccttcaaacgaaacaaacagaccgctcatgctattgaccttagcgttaggcgcagagttgcgcccaacaggcagtcaaaccagctctacctccgtttcaaggggctgatttggtcttttctgaaggtctacttccatttcgaggggctgttgcccaagtagacaacgttccaaaacggcggaatgacgttggcgcggagccgttcatactcgtggttcagcagatgaccagccccttgaagcggaagtagatattctcaaaacgagaaatcagccccttgaaacgcaagtagagcaataattccgctcagccacgcttgggaattacggcggggcgctcgtagccctcgttggcagtcagccagtcgacatccttcttgacggtggcggcggtggagctgagcttttcggcgatgcgctggttggaccagcccttgtttgccagcttcttcacctcggcacggcgtccggcgcgcttggcctcggcggcattggtcgcagccgaagcagcgcccttcttggctcccttggctcccgacttcgcggcaccggcacgcccagcaccgcgacggccacgggtggagggaccagccgcacgcttttcggcgagcagtcggaaggcgtcatcaggggtgatggattcaggcgtgtactgacgcggcaccgtgcggttggtctcgccatcggtgatgtacgcgccgaaacggccgtccttgatggtcacgttcttgccggtgttcgggtccttgcccaaatcacgcagcggcggcttggcggcaccacggccacgcccgcggccgtacttaggctgcgagaacagttctttggccttgtcgatatcgaccgtgaagatctcgtcttccgaggccagcgagcgggtctccgacttgccgtcggcacccgtcttggtcagataggggccgtagcgaccgttgttggcggccaccgtgcattcggatacctcgccggtttcggcgttggtttcctcgtatgtgcccacttcgcgcggcaggctcagcagctttagcgcgtcttccagcgacagcgattcagggctcatcgtcttgaacaacgaggccatcttcgggcgcgacgcggcggcggccgcggccttcttcgaacccttcttggccgcagaagcaccagcagtatcgccagcagcgccagccgaagcctcagccggcggcaccaacgccacatacggcccgaaccggccattgcgcacctcgacggtaccgccggataccgggtcaacgcccagctcgcgcggtccaccggagtggttgtcgatcaaatcgcgggccacggccaccgtcagctcatccggcgcgatggtgtccggcagagacgcgcgcttcgggttgccttcgacgtccagatgctccatgtcttccagatacgggccgtaacggccgacgcgcacgtgcaggccgtcgccgatgtcgatggtgttgatggcgcgcgcgtcgatctcgccgagctgcgcgacctgctgttgcaggccttcgtgcgcctcgtcggcgttgcgggcggcgccctcgccggaaccgaagtagaagtgggtgagccagtcgcggccggattcctcgccgtgggcgatgcggtcaaggccgttttccatctcggcggtgaactggtagtcgaccagcttggggaagttcgtttccagcagcttggtcacggagaatgccaaccagctggggatcagcgcacggccacgctcatacacatagccgcgatccataatcgtggagatgatgctcgcgtaagtggacgggcgaccgatttccttggcctccagcgtcttgaccagcgtggcctcggtataacgggccggcggctgggtttcatggccgtccggttcgatgtcgcttgcctcgacctgctggccgacgctcatcggcggcagggaggtgttggattcggaggcgtcacccctgacggccttgacgtccgtcttgccggcggcagcagcctggtccgagccagccccagcgccgggagcggcggctttgggcttgcgcccctcccccgtggccttcataaagccggggaattcgatgacagtgccggacgcttggaacacggcctcgccctcggtggggccggccggcgcagacaggcgcacggtggcggtggagccggtggcgtcagccatctggcaggcgagcgtgcgctgccagatcagcgtgtataggcgcagctggtcgccgggaagtttggaagccagctcatccgggtcgtggaagcgcgagcccgccgggcgaatacactcgtgggcttcctgcgcgccagcggttttggtggcgtactgcttgggctcggcggagaggaacttgtcgccgaaatggtaggagacggcgttgcgggcggcggtgatggcctcctgcgacagcgtcaccgaatcggttcgcatataggtgatgtagccgttctcgtacaggctttgggccgcgcgcatcacgacgcgagcacccatgccgaggcgattgccggcggtctgctgcaaggtcgaggtggtgaacggcggctgcgggcggcggcggtacggcttggtttccatcgacatcacagtgaaatcggcggtcctcagcgcttcagccacggcagtggcaccagcctcatcaagctggcgaacgttcgccgcgaacccgtccggggtcagctggccgtcggcaccgaaatccttggagccggcgagtcgcttgccgccgagcgcgatcatgcgggcggagaattcggcacgctcccccagcgcgtcaggcgcggccaacatggcgacgatatcccagtacggcgcgcgcctgaatgccatgcgttcgcgttcgcgttccacgatcaggcgggtggccacggactgcacgcggccggcggacaggcccgggcccaccttgcgccacagcaccggcgacagctcatagccgtacagacggtcgaggatgcggcgggtctcctgtgcgtcgaccatattgccgtccacgtcgcgcgtgttgttcagggaggcgttgatggcgttcttggtgatctcgtggaacaccatgcgcttgaccggcaccttgggtttcaaggtctgcaccaagtgccacgcgatggcctcaccctcgcgatcctcatcagtcgccagatagagttcgtcggcgttcttcagggccgatttgagttcgctgaccgtacgcttcttgtcgccgtcgacgatgtaatacggcttgaacccgtcgttgacgtccacgccgaacttgccgaacttggccttgtctgccgcgggcacctggctgggctgcgcgaggtcgcggatatgaccgaccgacgccatgacggtgtaccccttgcccaggtagtcaccgatcttgtgggccttggtcggagactccacaatcaccagtttggtagccatacccactccttatgtattgcgcgaaacacacgacgtttctggcgtcataatactcatgaatcatatccaactgccaaattccgccgttgtgccgggcaaattcggccgttcgcacctcatgttttaccgtttgggcggtgccggcggagcgccgatcaggcccagcctgcttaagggcgctgcagtgatctgacgtagggccagcaacagtccgaatgcgagcatggccacacccgtaatgcccacaacagcgctgacattcgccccctgaaccgcccaactggcgctgacattgagtcccggcaccacctgccagatcacataaccgctgtaggcgagcaacagcaggcccccggtaatcaacacgctgccgacgatctgcacactcactgaggagacgcggtggcccggctcgtccatgccggacttgcgtgtaaccgccagagcgagcagggccaatcccgccaccagcaggatggacatcgccacatccgaagggcgatgccattgcccgtatatcacagagacaccgacggtcgccgcccaaaccacgccgatgacgcccgccaaagctcgaaccgcacgaggcacggtaagcagcagaatcaccgcacaggctgcggccagcatcgtgtgtccggaaggcgcggaattagcggcaggcgattcagtgttgatgatgaacggacgcggcaacagacccttgatacgggtgacggccaagcagaccacggcgaacacggcgatttgcccggccaaccaccagcggcgtcgaatcagcgccgtaataatgccgattgcggcaattgtgcagctgacagcgataaccagccaggattgtgcgacggcgttcatcatgccggtggtccaggacggtacatcgttgtgcaggattttccagaccagttcgtcgtacgattgtccgttttcggtaaacacgcacccccaccacacgccgaagccaatagcgatcaggagcagaccgaataccacgcacagtacgcggctggagattcgcgggcgcacggtaagcgggtcaagccgggccaagccacggtcgatatcagatgccccatccgcatcgtccatgcccagcggcctgaaatcccctaaggagcctgatgtggatgccgatgcatctgaaccggagaccgggccgagcgcagccaatgggtcaacaacgttcgacgacgagtcaggctgcgctgcgcctgagccgaccagattgaccgccgcatgcgggtcgcgaattctaggggtctgtgcgtcattcatacgttcgactgtacggccgcgccccggacagggagccgtgctcgtgccagctcacggccaaatccgcacaaatggaaaacctccacgcacccgtcagaggccacttacccttgctgcattcctgccctgggggagttgggtgacatagcgccgcgtggaggctggggataagtctatggagacgtatggaccagcgcagcgacacgaaacgtgcgcgccgggtcgcacggcaggccaaccagcgcattcaggcaatattcatgcagcatcaaggaacgtgcccaattgtaagaattccggaaaaataccggcataaatgcgtgtggttacgctcacgtcaaacgattgttcaaggccaacagttacggtggacaccatggcttcttatactcgtcgtgcacattcgggaggcaatggccccgctctgaggcaaccgcgcaccgcgcaaagcagagccgaccactccgcacaggagggcccctatacgccccaggagagccgttcccgccacgcaagccacaaggcttccaatagccatcgagccccgaacaggaagaaaaagaacacaggaaaaggcaagcaccgtgtactgaaatgggtgctgggcatcttcttctccctgattggactgggcttgctggccggtatcgcagtattcgcatacctgtacaccaccaccgaggtcccgcaacccgaaaagttcgcgttggccgagaaaaccaccgtgtattacgcggacggcaccaccgcgatcggctcctacgcggaacagaatcgttcaatcatctcttgcgaggggctgccggactacatcggcaacgcgattgtggcgtccgaaaaccgtacgttctacacggataaaggtcttgatctgaggggcatcgcccgcgcattcattaataatgtgaccaagggcacgcgccaaggtggttccaccatcacccagcagtatgccgagcggtattacatgggcgaaaccacatcctatgcgggcaaggcgcgcgaggccatcgtggccatcaaaatcgcgcaaaccgagtccaaggacgaggtgctgtgcaattacatgaacaccatctatctgggccgcaactcctacggcatccaggcagcggccaaggcatacttcaataaggacgccaaggatctgacgctgtctgaagcggcgatgatcgccggcattattccgtcaccgtccacgtgggatccggccgataacgccgatatggccaaatcgcgcttcaagcgtgtgctgaacatcatgcaggaggatggttacatcactgccaagcagcacactgatgccaagttcccgcagactgccgcggtggcgcagcaaaacgaatacgcggggccgaacggttatctgctggatatggtgcgccgtgagctggtgcagtccaaggcctttaccaaagaggatttggataccggcggatacaagatcatcaccaccatcgacaagagcaagcaggaccttatgcagtccatcggcgacacccgtctggacgacatgcctgaatccctgcaaatcggcggcatagcgctggacccgaagaccggtgaagtattgtccgtatacgccggttcagattatctgtccaagcagctcaacaatgccgatcaggccgtattcgaaccgggttcgactatgaagccgttcgctttgctgggggccgcgcaatccggcgtcagcttcgatacgttgttcaacggcaattcccaccagcacttcaccggcttggatcaagaggtgaataacgctctggagaacaactggggcaacatcaatctgtatcaggccaccgccaactcggtgaacacggtgttcatgaacgtcaatgagcatctgacgccgaagcgcacggccgcaatcgcccatgaagcgggcattcagggcgatatcgatgaaaactccatgtacaacgtgctgggcatcaacgccctgaccgtgtgggatttggcgcaaggccattcgaccatcgccaacaatggtgtgaagagcaccttgcacatggtgtccaaagtgcttgattccaacaataaggacatgtacaacgcgcccagcaaaggcaccaaggtgttcgatgccaacgactgcgctttggtgcagaaggccatgcagggcaccaccacgtacggtacggcggccggcacatccaacatgctgggccgacccatcgccggcaagtccggtaccgccaacgacgaaatggcttcgtcgttcgtgggatacacccccagcatgatgaatgtgtgggctatctggaacccggacgataagggcaatccgcaggcggtgccggccttctccggatacggcatctcttccactggataccccgcccacctgttccaggagttcatggctcaggccttgcaaggtaccgaggtggagcagttcccgaccgctaaagacaatggcaagatcggtggacccgacggcacttggggcttgggcaagggacagagcagcggcctgtccaataacaccaacaagcagtccaccgaagacgcgcagaagcaggctgagcaggacgcacagcagaaggcggccgaagaggaagccaagaagcaacagcaggcccaggagttcgcccagcagtgcctcgccaatccgagctattccaccgagtgtccgaattatcccggcaccactaccggcggagatggcaacaatggcaacaatcccggcaataccggcgggaacaacgggaacaataccggcaacgataatggtaattccggaggcaccggcgggaacaacggcaccaacggcgtcacccagtagtaagtaagcacagacaacaaagctccctctgatgcaatcagagggagctttgttttgttgttagcgctcagcgcttgcgctgggaacggttgatggcagagataatcgacttcagagcgctggtggtgatcgacgaatcgatgccgacgccccacacgatctgcgcatcatcggcctcgccgacctggcattccacgtacgaggcggccatggcgtcggtgccgacggacatggtgtgctccacgtaatccataatcgaggcgtcaacgccaaagttggaaatggcgttgaggaaggcggcgatcggaccgttgccgatgccggagacctcgcgctccacgggcgcatcgaccccgacgttcacgccgcggtcgagcaggcgagccttgagcacggtatcggagccatcctcaccggagctgacggccaccttgagcagcttcaagcggccccacggtgcgagcgaggcgtcatgagtatcgcccacaaccacaccggcggcggtcatgccggactgttcgatcggcaggtactcgtccttgaacagacgccagatatcctcgtccttgacttccttcttggtcgtgtcagcgtagtcctgcacgatcttgtcgaattcaatctgcagacgcttgggcaggtcaagattgtggttggtcttgagcaggtaggccatgccgcccttgccggactgcgagttgacgcgaatgatggcctcgtacgtgcggccgatgtccttcgggtcgatcggcaggtacggcacaagccacacgaagctgtcgagatcggcgccagcgcgctcggcggccacctgacgagcctcgagacccttcttgatggcatcctgatgcgagccggagaacgcggtgaacacgaagttgccggcgtacgggtgacgctcggagatcttgatctggttgcagtactcaaccgtcttgcggatctcgggcacgttggacaggtcaatctgcgggtcgatgccttgggtgagccagttgaggcccagcgtgaccaagtcgacgttgccggtacgctcgccgttgcccagcaggcagccttccacacggtcggcgccggccagcacggccagctcggtggcggccacgcccatgccttcgtcgttgtgcgggtggagggagagcactacggagtcacggtcgtcgaggtgggtggagacgtactccacttcgtcggcgaacacgttcggcgtggtcatttccacggtggcgggcaggttgatgatcatcgggtgctcgggagtcggcttgataacaccgatcacggcgttgcacacctcgacggcgtactccggctcggtgccggtgaaggattccggcgagtactcgtagtacaggtcgatgcccttggcctcgttctcgaggtccttgcacagttcggcggcgtcggtggcgagcttcttgatctcttccttgttcttgcggaacacgacctcgcgctgcagcacagacacggagttgtagaagtgcacgatggcgcgcttggcacccttgagcgcctcgtaagtacggcggatgaggtgctcgcggcactgggtgagcaccacgatggtcacgtcgtccggaatcagctcacgctcgatgagcatacggatgaagtcgaaatcggtttcggaagcggacgggaagcccacctcgatctccttgaatcccatggagacgagcaggttccagaaacgcagcttgcgctcggaatccatcgggttgacgagggcctgattgccgtcgcgaagatcgacggagcaccagcgcggcgcgcgctgcagtcgcttgcccggccacgtgcgctccgggtaatcaaacgggatctgcttgtcgtaggcggcgtacttgttatacggcatacgactcggcttctgcggatcgccgatgaatcgtgccggaggcagcagcgggtcgttgttccccccattggacgccgcagccactgccgcgagatcaaaaacggatgattgaccctgacccattgttcctcctttactggttattgcgcgggccctcttgcggacgcgactgcggcgttgtgccagggcggcgccgggccacgcggatttgtcaatacgcacgtaacatcctacaggccggttcgggcaaacccgcgggaaatgccgtatcgtggcatttgcttatgcacctggctgatatgagggcactcagcgtcgtcagcggaccacgctttgactccggcacaacaccccgcctgcgataccccaccagatggccctccatacgtcggcggcgggccaaatattggtactgcaccgacagccaaactgctcagcgtcgtcagcggaccaacttatggcgaaataccgactctgggaaagcttatcgtcggcaaattgccaggctatggcacactatcgacgctacgaggcccacaaccatcggcaacgcgacaaatattggcccaccgccgacgctagcctctttgagcgtcggcgccgggccattccatgaatcagtaacgacgccaatggtctcagaacgtcagcatagggacgctgtctggatctccaccgacgctgcatgacaaaatcgcggcaccatcaagcaacaacacggctgcggcaccccgccctgccccgtcccttgctgtgccagtcctgtgaacgcgcgggcgatccgccgcccggcaacatagactgaagagctatgacgagcttgcgattccgcgaagacggcagcttccgcgtgctgcaaatggccgacgtacaggacggccccgatgtgttgcccgacaccatccgcctcatccgcgaggccatccgcgaagccgatccggatcttgtggtgttcaccggcgaccagatccgcggctatgatcccgcctacatcgacacgttcctgcgccgccgcggcgaggagccgggcgctcgcgtgcgcgcggtcaccgagatcgaggccaaaatccgcgggatcaagcgtcaccccgtaattcgcaaagtatccgatcgcgtggccgatcgtctcaccgaagccggcaagcctgtaccagccgcgctgcttgaccccgataccgtgacgaacgccgtcgccgctgccggcgccgattcgaccgacgtgatcacgacttccgaagtaggcgattccgttgagaccagccccacgcccgagacggtttccaccctcgtatattcaacgcaatccggcaaggccagccccgcacacgagacgccggcgaccctcgacgaactcatgaatgagacccgcgaaaaggtccgccgcacgttctccggtttccttggtccggtcgtcgaggccggcgtgccctttgccgccacctacggcaaccacgacttccaatgcggcattctggccgacgaacaggatgacatctaccgcgaataccccggctgcctgaaccccgacgacagtctcgagcccggcacgttcgcgctgcccgtcgagtcctccgatggttccggccgcgtggccatgtccgttatgatggtcaattcaggcgattatgccggcaaacccgaagaaaacgatgcccaatacccggcgtatgtggtcaatccgcgaggactcgacctggccgacgccgacgggtacggcacccccacccccaaggccatcgaatggctggggtccgtccaaaccgagttgggcgagcgcaatggcgacggcaagcccgtgccggccatcgccttccagcacattccgccgcaggaattctacgattgtctgaaggaagtgcccgcatggacgccgaacgccgtggaaggcgcgcgcacgcacgccgggcgttgctatgtgctcaaccatgaggtctgccgccccggctcgcggctcggcgaggcaatcggctgcgcggacgagaatgtgggcgaggtggatgccttgcgcgaggctggcggctatttcgcgctgttctgcgggcatgaccataagaactctttcgttggtcatgtgcatgatatcgatctgggctatgcacccacgtgcgggttcgaatgctatggtcccaagtcgcggtaccgcggcattcgcctatttgaattccatgagagcaatccggcgggctatgtgacccgcatgctcacatggggtaatctggtcggccgctactccagcaacgagctgcgcgtctggttcgaggatcattgcgttaccggagcggtcagcgcacgcaacgagctgcgccgcccgcaggtgttcgccgtggtggccggcgcgatgagccttggctttatagccatcatccgttcgctgatcaaggccgcgcgctaaacctacttaaacagactcaccccgcgacgggccgtgcaatacgcgttgcccagccaggtatggcgggaattgggccagacagctcccagtcgcggtgcgttctggctcatccagatgctcggcacgcggccgtctgcggagcgtgagccgagcagattgaagccgttcttttccagcagccactccgggtgctgggtggcgatggccaagccttcctcgagggtgagcggcaggcgttcatcggagtcgataagcttgcgggccacgtccggctcgcgattgatatagcacgtgccggtgtgcggattgacgaccagatagaacgggccttccggcggcatgaagccgtcttgaggcaggaagctggcgatgtcacgcggcggcatggtggtgaagccggccatgcgattgatggaggttcgtgcgatcagtgactcaggcgaaaccagttcgcgcgtgggcaccagcaggatgttcgatcccaaatcggaatgctcgagcgccccgatcaggggtcgggccagcgagcggaatgcggcggcggaaatatccgccacatccggatagccgagagccacgatacggtcgagctgtttttgggcctctactgatgcgatagacatggctaccagtgtagaacaccgccgtctcttcgttagtcaccccgttgtctatttagaagtgcaacatccttgttgttcggttaatgatagcagttcgtcggcgaatgcctcggccggggtgcggtagccgagcacgcgcatgggacggttgtcggtctcgtccacgatggcctgtatctcgtcggccatggacgggtcgacgcgcgtgcgcttgggcaggtagcggcggatcgcgccgttgcggttctcgttgccgccgcgccggcacgacgggtacggggcggtgaagtaggcggccatgccgagccgttcgcgcagttccgcgtggcgggcgaactcggtgccgttgtcgtgcgtgacgccggtcctggcgcggcggcgtccggccttccggtgcgcggggccggagatgtggcaccggccggtccacggccccgtcttgagacgctccggccggtacggccggtaggattcgttctcgttggacgggaaccatgtgttgcgtttgattccgcggctgaccgtggagacgtgtctgccgatcaggccggcgatccgccgtatgctcgtcccgttgccgatctctatccggatgatccgccgttcctcttccgacaggtgcgaatacacttgacccaaggcgcgacaccccttcactggttatctggacaatctccaatctaaagggtgtcgcactttcaaatagacaacgggggcaacaagtcagcgggcaagcggcacggccccgacaagccgcgcaatccgctcactaacggaacagcgagacgcccctgcgggccatgcagaatgcgttgccaagccacgtgtgcttggaattcggccacaccgcaccgagcctcggggcgttctggctcagccagatgctgggcacgcggccgtcggcgctgcgcgagcccagcaggttgaacccgtttttctcctgaagccagcccggatgctgcgtggcgatggccaatccctcctcgagcgtgaacggaatgcgctcgtcggagtcaatgagcttgcgggccacgtcgggctcgcggtttgtgtgtacttggtaccggtgcgcggttccacgacgatgtagaacggtccctcgggcggctcgaagccgtcctgcggcaaaaagctcgcgatgtcgcgcggcggcatcgtggcgaaaccggccatgcggttgatcgacgtacgggaaatcagcgattcgggcgacaccagctcgcgcgtgggcgccagcaggatgcgctcgtcaaaatcggtatgctccagcgcctcgatcagcggacgggccagggagcggaacgccgcggcgctcacatccgccacgtccgggtaccccaatgccacgatgcggtccaactggcgctgcgcttctaccgacgccttcgacatgactcccagtgtagagcatcgcggcggggcggtgccgtgacgttccagccggttccggcgtcccgtcgcaccggcgatccggcccagcatacgggcacccggttcttcttgttccgcccgattcgtaagattgatggatacgtgtggccatttcgctacggctgcccgaacgtgaaatcaatccgtcaaacccagaaggttgttatgtccgaaaagttgaaagtcggcattctcggcgccaccggtatggtcggtcagcgttttatcacgctgcttgagaatcacccgtggttcgaggtggtcacccttgccgcttccgcgcacagcgccggcaagacgtatgccgaggcggtcggagaccgttggaagatggaaaccccgatgcccgaatacgtcaagaacatggtggtcgtcgatggcgacgatgccgagtccatggcctctggcgttgatttcatgttctctgcggtaaacatgccgaaggaccagattcgcgccattgaagagcgttatgccaagaccgagaccccggtggtctccaacaacagcgctcaccgttggaccccggacgtgccgatggtggtgccggagatcaacccggagcacttcgaggtgatcgagcaccagcgcaagcgcttgggcaccactcgtggtttcatcgccgtcaagccgaactgctcgattcagacctacacgccggcactggccgcatggaaggaattcgagccgcgtgaggtggttgtgagcacctatcaggcgatttccggcgcaggcaagaccttcaaggattggcctgagatggtgggcaacatcatcccgttcatctctggtgaagaagcgaagtccgagaaggaaccgctcaaggtgttcggccatgtggacgccgaaaagggcgagatcgtgccgttcgacggcgacctcaagatcacttcgcaatgcatccgcgtgcccgtgctcaacggtcacaccgccaccgtgttcctgaacttcggcaagaaggccaccaaggaagagcttatcgaccgtctggtgaactacacgtccaaggcttccgagctggagctgccgcacgcgccgaagcacttcatccagtacctcaccgaggatgaccgcccgcaggtcaagctcgacgtggactacgagggtggcatgggcgtttccatcggccgtctgcgtgaggattccatcttcgattggaagttcgtgggtctggcccacaacaccctgcgtggtgcagccggcggcgccctcgaatgcgccgaaatgctcaaggctctaggctacatcactaagaagtagttgaatctcgttaaaatcgcaaaagccctccgcaaggagggctttcatcgtattaggcgcggaattcgcggctcagcggccagtaccgccgtacaccacggcttcgatctgatcggcatcgagaccgtatgcagtgtgcagcgccttgacggcgtcgttcagctggtcgagcggcacaagcgcggcgatacgaatctcggaagtggaaatcatcagcacgttgatgccctcatcgctcagggcctggaagaacttggcagccagaccggcgtgggtcttcatgccaacacccaccacggctaccttgccgacgttggtgttcacatcaaaggagtggtaacccagcacttcctgcttgtcgagcagcgtgttctgcacctgcttgacggccgattcgggcacggtgaaggagatgtctgcagtgccaacggatgcgccggcctgcacgatcatgtccacgttcacgtcggcggtggccagctcggtgaacaccttggctgccatacccggctcgttcggcacgccacgcacggtggccagcgcctcggaacgatcgtgggcaatgccggaaatcaccggtgcctcggggcccaggtcagggaacaggtcgcccatggatttcgcttcttcttcagtcatgtcttgccttgtcttggttgaaattacttacgattattgttcgctgtagccgcgctcagtcgaggttcggcagcgtgcgcgggtcaatgccgtcaggcacaaccagcgtgccggggcgacgggagaacgaagagcgcacatgcagcggcatgttgaaacgctgagcgtactctacgcagcgcagtgccagcaccttggagccgcaggaggccatttccagaatggcttcgtagccgatggaaggaatacggcgggcggaaggcacgatgcgcggatcggcggtaaagatgccgtccacgtcggtgtaaatctcgcagatgtcggcaccaagggccacagcgagtgccacggcggacgtgtccgaaccaccgcggccgagcgtggtggcgtcacccttggcgttgatgccctggaagccggcaacgatggcgatgtctcccaatgagagcgcgttcttcacgcggtccggtctcacggccttgatgtgggccgcgccgtaacgggtgtcggtgaagaagccggcctgctgaccggtgaaggagtgggcgcggctgccttcggcgtgaatggccatggccagcaggctcatggaaattcgctcgcctgcagtcatcagcatatccatctcgcgctcgggcgggttggagtcgatgctcagcgcctgatcgataaggtcatcggtggtatcgcccatggcggagaccaccacggccaccttattgcccttcttctccgtctccacaacgcgcttggccacacgtttgatcgaatcggtatcggcgaccgacgagccgccgtacttctgcacgatgagagccactgctgtcctttgttcttctcttagggatttgtttggtcgatattctacgcaaacgcaacgattataagggctgtcgcgttcaccccgcgaccccgcgccggcatgcggacacgggtatggcctacgttgttcagcaaatattcaagttttcaccggtggttctttgagacagccgcatccatcctttgagattcgagcggttaactatcaattaccggcaaacgaaagcaaaccggcgaggtttccgcagaaccccataactgaataccttcttcttcctctctccttttcaaggcccggtcccgctctattgtggaagttggaccattttcgttgtggaagttggaccatccctattagggaagttggacactagattacgaactagactttttcggacttcttatacccctacattgcccctatatggcccctatatggccctcgtcggcatgttgcatgaaaggcttggtgcggagtaacgtttcgcagtgtggcacgtgcggcgttgccacttgcggcagcacctatgccaaccacgactaagacgggccggctgtcttgtataagcaaatcatgagcagatcaagcgaaggaacaggcgactatggcattgctgcatcgacgttcgacgagtaaccgtgcctcacagaaaatgcgggaaaacaacgcggccatgcctgatgacacatctgcaaatgacaacgtttccccagcgcgtcccgagcccacagcattcgttccaactccatttgacgaagtcatcgatattagcgatctcgtggccgagcgccgacgcctgcaacgcaatctgtgggcgatgcgcatcatcaccattgtgttgctgatcgccgcaatcgccgtggcctgtttcccgctagcgttgcaattcgagtccgaccgcaacttggccgccaccacagccaccacagccaaagaagtagccggctggccttacccgcaggcgaaagacaagctcacggcggcccacgcatacaacaagaagctcgctgaatccggccagcccatcttgggtgaagccgtcgatccgttctccgccgcccaaggaggatcccaagccagcggcgaggattccgcctcaaagaaagacaaggaataccagtcactgcttaataccggcaacggcgtgatgggcgcaatcaaggtgcccaaacagtccatcaatctgccgatttatcacggcacttccgaggaagcactggcttctggtgccggccacctgtacggcacgtcgctgccggtgggaggtaaatccacccattcggtcattaccgggcaccgcgggttggttgaagcgctgatgttcacccgtttggacgaggtgaaagagggcgacttcttctacatcgaagtcatgggcgaaactttgggctacaaagtggaccgcatttcggtgattttgccggatgacacgtcgaagctcaagattgtgccgggtgaggaccgtgtcaccttgatgacctgtacgccatacggcgtgaacacgcatcgactgcttgtctccgggcaccgcgtggcaattccgatgccggcccccgagccgaatgacgtgcttgacgcgcgcaatatcgcccttggtgttggcctgggcatactggcggcaggactgttcattatctggttggcacgacggcacaaggccgcgcgcatcatccgccacggcgcattctggccgtggatgcgccgcaagggcgaaagcgccaatgatacgctggcctaggcctcacgccgaccggccagcgccctgcccagcgtgatttcgtcggcgtactccaagtcggagcccaccggcaggccgctggcaagtcgggtgaccttgacacctacgggtcgcaatagctgggtcaagtagctggtggtggcctcgccttcaatattcgggtcgagcgccataatgacttccttgacctcatcgccttctaagcgtttgagcagactgggaatacgcaggtcggcagggccaacgttggccattgggttgattgcgccgccgagcacatggtataggccgcggtattcgcgcgtgcgctcgatgctcatcacgtccttgggctcttcaaccacgcagatcaccgaacggtcgcgtctcgggtcggcgcataccgggcaggggctggattcgcacacgttgccgcaaatatcacagaagcggatcttggccttgacctcctcgatggcctcggccaaatcgcgcgcttcatcttcgggcgcggacagcatgtagaaggcgatacgctgcgcgcccttcggcccgatgccgggcagccgcccgaaagcgtcgatcagtcgctgtattgcgccgtcataagcaagtgccatgggtattcctcgttattcgtcctcattattcatccgagtgcttcttggcaggctggatgttcttggggttcttcggatcatctgccgcgaattgctcgacttttttgacctcgaatagctttttcagatcgtcaagattcatggccgtcgcctcgccgagcgactggtcgttcatcgagtattcgtcgtcctcggccgcgacttgcggttgcggctgcggctggctattccacgggtcggcattcggcgtcggctgtgcgggctgcggttgattccacgggtcatcgccggcagccggctgcggaaccgattggggctggttccacgggtcatcgcccgacatattgcccgacatattgcccgacactgtctgaggaaccgaagaagccggagtctgggactgcggctgattccacggatcatcgtgaggagactgctgatatggctggttccacgggtcggcttcgaccggttgcagtgccagcgaggccgtagcctgagattgcggctgattccatggatcatcgcttgcgccggcaactgccgtagcgggagctgcggtggctggctgccccgtggactgtccagtgggtccagcggacgcaacggacgcagcgggtgcaacaggagcagccggagcggcccacggatcaacaccatcactgatgtccggaaccgcaacatgcttcttgtgatgctcttcgggcgcaggcgcagcagcgggctcgttaggtgcgaacccgtctgcagattgcggtgaagcgttgcttacggccggcttggcccaagggtcatcgtcactccagctcttcgccgccgtggatgcactggattggccggctcgatggctgtcgtccgtatcctcggcttggcctgttgcagtcggcttcggagctttcggctcgctccccatatgaatgcccagacccgcgcccaaactcgacgcggccaatccggccttggccatggcaatctgctgcttgaccttggccaattgctccgggctcatacgtttgacggattcgactcgctcgccattcgccgcgaccgcagaaggtgcaataaccgcattggcaccgaactcgttgcgcacggcatccaacaccacggacgccgccttcttaccgctgttgtccacggccaaggcgaaagcgtgctggctcagcgacttgtcgaacgtcatcgacaggcaaggcagactcttacggttgggaccgaattttacggtcggcaccttgtctcgtgacacatattcacgaatggtttccggcaaagcggcgacggctgcatcccacttctcgtcgatggaccgattatccgatgccgcaggcgaggtcaccggttgggccgggacggccggcgacgtggcgggagcaccccaggcattggcagcagcagttgctgcggcaggttgcgcagacggagagcccgcgggccggtcgctgactgggctgctgacagggccattgtctcccacagcggattcatgggaagcggtgctctgaggcgcggctgcttgctggttgcgtgcagcaccggagaatccaccatgtgaggctccggcaaacccgcctcgcgatgcgccggcaaaaccactggcacccgtaccggaagcggctgacgtagtcgaagtcgaagaagcagccgcaggcggcatgccagaagaagctggcgcgggagcggctgttgcaaagcctgattcactgccggccaacaatcgtgcggccagcagttccaagcgcatacgcggagaaatggctccggtcatggcacccaacgtagtgttgatgatgtctgccatggcggtcagtgcgcccagtcccagcgccttggcttggcggtgcagatcgtccatatcctcggcctcagccgtgtcggacagcacggattccgcacggtccccggccaacgtaagcaccagcagatcacgcacacgagccagcaggtcttcgacgaatcgtctcggatcgaatccgccgaccacgactttctggataacgccgtacagggcttcgccgttgtgattgattaccgcatccactgcctcaccgatcagcgcctccggcgtgaagccgagcagggctatagcggcatcatgggtgataacgccttcgaccgaaccaaccatcagctggtcaagcacagacagggtatctcgcatggagccgccaccggcgcgcatcgccagtttcagcacaccgggctcgggcttgatgccttccttgtcgcagatcgtctccaggtagggacccatgacttcctgcggcaccagacggaacggatagtggtgggtgcgcgaacggatggtgccgatcaccttgtctggttcggtggtggcgaagatgaacatcacatgttcaggcggctcttcaacaattttaagcagcgcattgaagccctgctgcgtgaccatatgggcctcatcgagaatgaaaatcttatagcggtcgcgcgcaggggcgaaaccagcgcgttctcgcaattctcgagcatcatccacaccgttgtgcgaggccgcatcgatttcgaccacgtcgatggaacccggaccgccggtggccaggtccttgcagctttcgcattcgccgcaggggtgggaagtcggccctttggcacagttgacgcaacgggccaggatacgcgcggagctggttttaccgcatcctcgcggccctgagaacagataggcatgcgtaagcttgccttcgtccaaggcgcgcatcagcgggaccgtgacttggtcctggccgatgaccccttcgaaggtgtccggacgatagcgacgatacagtgcaagtgccatagctactaacctacctttgccctcagaattaaccgataaaaagtcaagataaaccgggctcatagctgccgaatcgggaaaactctttatattccaacgacattcatctgacaacggttaccgcatttttattgttattaaccgctttctttgtattaacatagtgtcaataacggttgtagtcaggaggtgcccatgagcgatatcctcgacgagaaacgccccacccgtggcgatgcccggcgcgacgccatcgtgcaagccgcgcgcaaggtgtgtctggaaaaaggcttctccaaaatcaccgtttccgacatcgcaagcgaagtcggtatgacgcgttcgctgttctaccactacttcgaagacaaggaagccgtagccgacgcagtactcgatgacgtcatcgacgaaatcctcaccacgttgaagcagtggaaccaagcgcgcgaaacaggcaacgtgaacaaggcattagacgacatcgtgcatgtgctccgttccctaatcgccgacgagagccccttctcaaaccgtatgatccaagatggcaacgccgaactgtatatcaagttcattgaccgcgcggcggaccgtattgccgactacattgcccagaccaccgtacgtgatttcgagcagatgcatggtctgccaatcaccaacgtccatgagacattcttcacgctaatcgtggggcttatctcgctggttcgctcgcatccgaacatcagcgaccgaaccatcaaagaggtcatggcgcagacgctgcatatcgaaagctatgtcgtctgaggtctgacggccattggctctggtaccgctctcccgcactcccctcagtccgcttcgcggccagctcgtccgcaattgcggacagcctacggctgactttcttctggttcgactatcgtcgaaccctcgcctacaaacatcccactgggctgtttgctttacggctcagcctaatgaggggagccaatataatcaggtcaggcgaactggccggttacggggtcgcgaccgtctcgggcgatggcgtcgagcacttcctgtcgggagtccacctcacgggcggctacggccggcggtaccagcacgcgtagcgcgcagtcctcggccactaccctgaatggcagatgcccgatgtattcgccgtccgccatcagcaccggtggctcgtcgccttctgcggctcgcgtgacttcgatctcgcgtatgcgcttccacccgaacacctttgaggcgagcagcttgccgttataggcgttcgagatggccaccgcacattcgccgaagttcggcacatgattcatccacaccaggtccaacagcccgtcggagaagcaggagtacggtgagacctcgatgccgccaccgatatgacgcgaattcgcaatcgtcagcaacggcgtgatgatgtctcgttcatccgtggtaccgtccgccagcgtggccttgacgtggtacccataacgcttcatatgcgtcagctccaccagcaccgccgcaaagtagcgcatggtgccggtcggcagatgcgaatgattcgcacggtcgttgatacttgcgtcaagaccacaggacagcatgcccgcatagtaccggtcaatcgggtgctcggcagacttgttctcccggtactcgtattccccgccggtggatgggttcacggcatagccaccatccaaagaggtcacgcgtcccatgtccacatcaatgtgtgatccgcgcacgatagcgccgacgataccttccactgcggtttcgatgcgattgaccggcagcttaagtccccgagcgaaatcgttgcccgagcccatggccacgatgcccagcggcttaccgccgcaacccacggcattggcaccgagtgcgatcatgccgtcgccgccgaccaccaccagatagtcgtactcgtgcgcgcgttcacgcgcctggttcagggaatcgtcgaaacttacgccggtgatgtcgatgacgtcgaagttatgggcacggccggcgtcctccagcagtcccaatactcgcgcatccaccttggcaccacggcccttatcggaagtgggattgcccaccatggccaccacgcgacggcgttctgtgcgttcactctcgctcatgctctcaccttaaccaaaggtccagaagcccgccagagcatcagtgcttacggtccattattgtgataattgtctccttccgtacaattcaccggtccggcccgagccatccgctccacggatgatgccaccggaaccatggtttccaccttgatggttaccaacacgtcttcatcccgcacggagcaggagcccagcgtgacgccattcgcttcagccatgtttgcagcaagcgcgcatggatcaccgatatccacatgccacagcgcatacgcggcgtcaaaggcgatgagatcggcgagggaacgcgctcgattctggcagatcatgaggttgcccacacttgccgccaccgcgagcgcaatgcccaccgccataaccagcatggctccggccatcgtgcccgatccctcctcataacgcattccctgcaccgcagttcctttctattgcggccgcccagccagcagccgaccagttattggcttatcgccgtagcgttgccggtgacccgcgttggagtgacatccagtgggccgggcagtaccgaacattcgaccatcacgctcgtcgattggccgttgcgggcaatgctgacgcggggatctccccctgcaacgtccgcagctatgctgcgcgcggatgattcgtcaccggtaaccacaaactcgcgtgcagccgccgtcgcggcaccttggcagtccatggaaacgatgaccacacgtcccattgccagtatcagcccggcgatggcgataacgctgggcaatacgatcgcgaattcggcggtggccgatcccgtgcataggtctggcggcagtctggcgagcctccaccggcatctcatggtcttcatggctgtcacccgactttcagagcctgtttgatgatgttggtcagcaacgtcttgatggcatccgacttcaggatggcgaccagcaccgccgcaaagcctgtagccgcaacgagtacgactgcgtattccgcagtggctgcgccttcttcgggctcagccatgagggcgcggatgcgtgcgtccatgaggcatagccgttctttcgccttggcgttcagcgtggccacacgagccttgctgtgcgcaaagatgccggcctgcccgtcgacgatgacggggataggggtattcattggcgttcctttcggtaaggaggggaagctgcgcagtggcttcgcaccttccccatgcgtatgtgagtggttggcccccgcgccgggttgacgcggggtgcataccactgtggactatcaacgcttcatgcaccaggaaaaacggggtatgtggttctagcttgccgagttatccacacctcgatgtgtcgtccaccacaaatgtggataaccaaacgcagccaagtacaataccgagcaatacaacaagattcagcctaagcgcactcagttcacgcctatattcacatcgtgaaggacgcaatcgccggaatgactcctaccagcacgaatgccggcagaaaacatagccctgtaggcatcagtagctttaccgacagcttcgcggcattccgttcgatagcagcacgctcgtcacggtccagctgttcaatggcggattcgaggcgcacaccaggcatatcgccatgcgtccatgacgattccaaagccgattgcagcaggccaagatctcgttgcgtggtattcgtatttcccttggatggactatcagctggcgcaccctcatgctgaacagccatagcggcatgccacgcatcagcccagggaacccctctggtcagggagttcccgacctcgctcatgcgagcgccgcagtcgccgccgacggctttgcccaccatgtcaagcgcccggggaatcgaggaaccctgacgcaaggacacctgcaacatacgcaatatgagtatggtccatgacgacccgcaatcatgcgctacggccggctcctcgcccggcaagcggctgtcatgacgagacagagccttatacagccaaccagcaatcgccgcacagcctgccgcggcgtgtacccacaccgtactcataatccgctgcctttcaacaatgcccgcatccatgccaagccggcagcataacaacatcctcccaatgtcaagcagaccacaccgcgtggcgatccaagcaagaacgccaatggtctagctcccagaagctcgcccaatgccacagtgacggccggaagcgcgctcagcagccccacagtggctttaggaacggcacatgcttgcgatcgcaagttctgcatcagcctcatctgccggtaagcagtcaataccgcttccagacatggcaccgcttggcaaccgagctcatcgctcaaaaccgctgcggcggcgaccccgcgtgcagcttcaagtacctgcgctggtgattcgtcgggcagacgccgctgttcgaacaccgttatgagccgttccacagtaatgcgatgagtggcgaagcgtctgctggattgttcctcgaatgcttcaaccaatgtgccgccacctcgcaatcgcgcgatggcggacgtaatcacctgcgcaacgcccacgcgaggtgagtcggcatatcgaggttcgtttatggctgcggaatcgaccgcgcgcccgcggtaagccagccggtacagcctcccggacttgttccccggccatatcagcacggcgagcgccaccagaacagcacaccacatcatcacccaccaccactcggcctgggaacgatgccccatcgttcaatgaagtgcccccattcggcggcataccgaggaggatggcagccattccataccgccagcggtgttcctgccagttcaccatgtgctacgcgcagttcgccgatctgcgtgatacgccgctgtccgttcactcgctccaaatgcaccaccgcgtcgaaagcgcctgccgccagcatggtcaacgcctgtggactgactccggcgagtaatccaagcgaaatcagcctggacggtactcggttcacgccgtccgcatgcacggtggtcatgccaccgtgatgaccagaattgaacgcgcgcaataggtcgacgatttccgcgccacggcattcgcccagcaccacgcggtcggggcgcattcgcaacgtcgctttgaccaagtccgccaggcttatggctccgacgccctccacattcgcctcgcgtgttaccaacgagacatgatcgtcgcgtcccagttcccccagttcacgaacttcctctacggtgacgatgcgctcgttcacgtcgcattgcgccagcagcgccttgagcaaggtggtcttgcccacgcctgttccgccggtaatcagcactgtggcatgtttgcgcaccaatcccacgaacgtcggcagccaagcagccgggaatacgcctaatttgctcaggtgctgtagcgatgccatggttcggtcagggaatcgtatggaaatcgcggcaccttgtggcaccaatggggcaatcaccgcatgcacgcggatgccatccggactggcggcatccgctatcgggcaggcatcatccagtctgcgcccgagctgcgcgcacagttggacggcgtattctcgaactacttgcggcgagcggaacggcacatgcaatactgtttcgcgcatgccattgccgcggtccgcccaaacgcggccatcacaggtcaccgccaaatcggtaacctgcgggtcagatgccacgtcatccagcagaccgaagaatatggttctgagcgctgtgccagcctcattggctcgcgtgctgacggcagccatagcatcactggtccttgtgagaagctcccgaaaccgggcgaatggcctgttctacgagatcggcaagcaagttcatggctttgcgactgcctttggtcaccgatctgatgccgaggccttccagtacgtctccgcacagattgacacttggcttgatgggccccaataccgtggcagtcaaatagtcctgcgcctcgccaatacccacgtggcctctcccacgtggagcgccacgtggttccacacctacgatatgtggcgcttcacagccccatgaatccaatctggaccggtgcgacttggctctggccagccccattaccgacaattccgcggcaatcacctgcaggccactgcgcagatcgggtacggtctcaatgagtccaccctgaccggcatctacgatgacaacgtcgttcgtttccgccaaagcccgaatggccgcttgaacttcccaccagtcaggctggcgcgcgctccaagggtcatagggaagtactcgcacaccctcccacatcatcagctcatggttcatcgcctcaccctcgatacggccgaggggcgcgtcgacttggctgaaccgcaagcccggctctcgttctacaccaagcagcaggtcaaggcatccggccacgaaatcagcgtctatgagaacgcagctgtgttcacgtctcgccaatgtccatgcaagcatggaagccatgacgctcaaccccacgcctccatgacctgacgtcatcgttacaatgttatggaagctggtgtctgtagttagggcgagtgccggagcctcgcccgatctctgccgttcgcatgaggccaacggcctgggcggcggagtgtagtagcgatacgctggaattggcgcatcgtccgtgggcagcggaatgcccgaaggtgctaccgctggcgaggtgatcctacgcgccacgcggggtgtggtgttgctattcataagccgattgaaacgtgtccgagttcaatgctcaacacgaatcgaccattgtggttctagcttgctgagttatccacaccccggcatgtcgtccacgacaaatgtggataaccacgctgctgtttcacgcccatctcatgcagaaaaggccctgacctcacatgcacagtcagggccttcattttcacgacgattccttatgcggtaatctacatttcttgcttacttatcgaggttcttaatgccgtcttccatagcatccaactgagcatcggtcaccttggccggcttcttcttgccgaacttggccttgagcagaccgatgatggtcggggcgagcgagaccagcagaatcagcacgatcaccagctcgaagtggtcctgtactgccggaatgttaccgaagaagtagcccagcagcgtgaacaacgtggaccagcacaggccgccgagcactgagaacggcgtgaaacggctccaacgcataccggaaataccggagatgaacggcatgaacgtacgaatgaacgggaagaaacggcccaggaacacggccagcgggccccacttctcaatcatgtgctcggttttggccaaacgctccggggtcaaggccttcaccttgccggactggatgatgcgacggccgaagaaatgaccaatgaagtaattgcactggtcgccgataatcggggcgcaccagaccaccggcagcagccagaacagcggcagcgcggccttgccggtcgcggcatcgggagcggcgaacacaccggcggcgaacagcagggagtcgcccggcaggaatgggaagaacaccacacccgtttcgataaatacgatgaggaagatgaagccgagggtcggcgccacgcccatggcaatccaaccggcaatcgcggcacgcggatccttcagcagttcgaggatgaaattaacgaagcccatgtgtttcctatgagtcctaaatcttgtattgagctgccagcccaatgaaccagacagttatatgcaaaccgtcaaataccctaccagccggctaacacaactgctacacctgcggcgaggaagcgcggtaacgcaacgaatactccacatcaatacgccgcctcggcgcccgagcccccgtcttgacctgatcaagaatcgacgtgatggcaatctcagcaatacgcgcgcgctgcggatccacagtggtcagcgagggaatcgtgtacttagcctcatcgatatcatcgaagcccaccacacgcacgctttccggcactcgcacgcgcatttcccgcagctgactgataacacccatcgccagcaaatcattcagcgcaaaaatgccatccggtcgaatgccctgcgcatacatctcacgtaccgcctgagcgccctcggcactggtccattcgccgcactcgcggatcaggttcagatcaggcgtcactccacgttccgcaaaggcgctgagataccccttggttcgcatcgaacgagaggacggcacggattcgtccaacgttccgcccaccacggcgacggtgcggcatccggcctccagcagatgcgtggtagcggcttgggcacccaattcattgggcatcaccacgtgcggcgcaggtgcgttgaagatacgctcgcccagcactaccagcgggtagtcgccctcgagctcggccacatcctccgcccgcatggccgtggggctcaaaataagtccgtcggtcatattgctggccatggcatgtgcgctctcgatctcgcgctggcggtcgtttccggtcgattcgatgatgatgcggtatccatattcccgtgcccgcgtgatcatctcttcggccagttcggaaaagtaaatctggttcaaatccggcagagacaatgagatgagtcctgtgcggccggaacgcaaattgcgagcctgctggttggtcacatagcccagctcgtcaatggcctgctggatacgttcgcgcgtggccggcttcatataggggtaatcgttgaggtaattggacactgatgccacggacacgtgcgcacgtttcgccacatcgtgcagcgtcgccttgcgcgaactcgcaaccatagcgcccccttatattcagtccatcaaccactcggcatggcaccatccacgtcgccatattggttgtcgaacgtttcagatgtgtgtttccagcataaaccatgtgggatatcgcccccgcaggccgtttcgcttaggcgtccgcagaatcacccccagtcggccttgccgacagccccgctagcagggacgggtccgacacgccgcccacgactcccgctgcaaccgtcaacagactccgccggcggtaataaatcagggccacttcggcaaaccaacaaagaaggcccgccagacaacgagaattcgtaccggacgggcccactcgaggagtagaaactatgcgatattcctatctataggctcacctttcgatggattcgttgacctgctgaatggccttcagcgcggagtcaacggtggcgtcgccggtgtagatgttctgcatctgcacaccgatctcgtcgttgagttcctgggaggtgagcttgcgctcaagcttggaagaggcctggcccttggtcaccaaatcgatgctggccttggcggattccgtggcgtcagacggcacttcgaccttcatgtccttgtcgaccggagcaccctgcagcgtgttgatccactcctgctggccttcgccggtggtcatgaactcgatgaacttcatggcggcctccttcttcttggagtccttgttcacgctcaggccgaagtccacaccagtggtcgggccggtagccttgtctcccacctgcgggaattccatcatgcctagctcgtccttctcaacggccgtgcccttggtctcatcgttcggcagcacggcggaaacgtgccaggagccggtcgggaagaaagcggacttgcgggcgtagaagtagttgtcgcgagcatccgggtaggtcgcagtaccaactgcaccatcctggaacagaccatcaccgatcatctgcttccaagccttcatggtcttgacgaaggtctcatcagtgaacttggccttgccttcggcggccttgtacacgtcaccttcgccgtactggttggacagccacacgaagatatcgtcgaggtgccagccatccttggcgccgagggccagcggcatcagacccttggccttgagttccttgttggcagccacgagctcgtcgtaggtggtgggcaccttgatgccctgctcgtcaagcagcgtcttgttgtacaggatgtattcggagccggaggtgatggtcggcatggccaccatcttgccatccttgttggtggtctgcgccacggcgccctcggccaccttggaatcccagccgggcatgtacttgtcggccagctccttcatatcgtcggcgaaacggccgtactgttccacagtggaaccggcctgcacaccgaacacatccgggccttcgccgccggccatcgaggtctgcagcttcttctggtagtcggccatttcagaagtacgccaccagttgatcttgatattcgggtacttcttctggaaggcggcgtaaatcgacttccactgggcatcggtaggctgccaggtccagaaggtcagctcaaccgggctgtccttggtaccgactccctcatcggagccgccgctgcccgaaccgcatccggcaagcagacctgcagacatagcgagagcgcccactgcggcgatcgccttcttcatgttcaacatgattgttctccttattttccttgtttctcttattggttcacttcgttgtggaagatcatcggaattggatggcgaagccagccacacccgatatgtgcggctgatgttggctcaattgccggacgcactcctttcctcgatgctggattccagcgatgtcctctcgtatccggtcagggatgcgcgatcaagagtgatacgggcacgggccgcattgtccgcaaacggcacctgccaggttttgccacgtaggtgcagtcgcatcgtgccgttcagagcttcgatacggatggtgagcacggctcggcccgaacggtcacggcggacgttgtcttcaaagacacgcagcctggccggctccggggtggaaggcagagacttgccgttgcgcatgaactccacggatgatgccgtgccggacaaacggtattcgccaagagacaacagcgcctgcccacggctcgtctgcccagcgaaatcaaggacgaaacggttgctgaccagcgggtatgccagttcgagtgttaccggacacacgccgctggacctcacgccgccgtcgatgacgagtcggcggtcagcatgcaattctcgaccgagatcccgcaatccggcaccccacagattcacatgttcagtggccgcatatgcgctgaacgcggcccccgttcgcaacgagaacaatcccgcccgaccgggcttatcactgatggtgcaggacgcggcgaaacggccatcaatgcggatctccagcctgcagtagcggcgctcaagccggtactcatgccaggcatgggaatcgaagtcatggaggtcggcattggtcacgcgttcggaggcaacgccgccgatcacatcgaccacgctaattacctgacggccagcatccacctcgagtttggtgaggttgttggcatcctggtaccgcaccacgataccgaatcgtgcgcccagtggggtgacgggagctttggcccagacgtcaatcacttgggttgcggacgatttgcccgacacagcgatgaatacactggattcgtcggcaacaagcgcgtgaccgtccacatcggattcggtgtgggccgcgccggaaataaccgaccatccggcgttcaggccatccgcaaaatcatcatgcacagtgccatacagcggtgcgctttgagcggcggcggtaggtcctggggtgtcgagccctccttcggcgtagtacagcgggtcgatgcgcattacgcgctgttcggtgcccacatacagctcgtcatcggcgttacggccgtggtagacaatccagtcatcaacggcattgggcgctttgactatggagttgtggcccgtgccttcaacctttgggctgcggataagcagcggatcgaagcggttctcgttgagctgtttcgtccaatcgagctgatcgatgtgggcgtcggcctgcttattcggcagctgtgcgtacgagtatccgacgaagtagtcctcatgctcgtaggcgttggccgagtaggtgatgaacgcgcggtcacggtaggcgaagtatgtggcgccttctacggtgtgccagtcgcggccatcgccgaaacggttgcgggcaaagatctcctcgtccatggtgggcacgatgagcgggcgcggtttgttctcacgcgaatacggggtcacaaggcgatcgatcatcacggaggttccgggccggtcatcgctcaggccggtgacctgattgtcggcgtaaagcaagtacaactggccgtcatcgccatagaccacttgggagtcgatggcgaaggtgttgaacagctccgctttcttttcgaacgggccgagcggatcctcgctcacggccacacgcatgatttccgtgtgggtgtcggtctcctcggccggcatattcgagaagtacatgtgaaagacgccgttgatgagaatcaccgatggggcccagaagtttctgcgtccggcttcggtgtagcagaatccatgtgaggtccagtgcaccatgtccggtgaggtggagaccagaatgccgtgctcgtcggtggcatagcagtagtagaggtcgcggtatttgagcacgaacgggtcgggcgcggtatgggacttaccgtccgcatatggaaccggattcgtataagtgcgttcggccagcggcttcaaatcgccagattcggcaagcaaggcggtggggtcagctgcgccgagctcgtcttccgcagggctgtagctggcggatacaccgttgctgatggttgcggtcattttgggtcacctcagctcttgacggcgccggcggtgatgccggactgcagccacttctggctgatcaggtagacgatgatggacggaatcgtcatcagaatcagggcggcgtattcctgggccaccatctccggcgtctggctgcgggtctccatgaagtaggtggaggccagcgtgaccggatacttggattcgtcgcggatgagcagcaacggaatcaggtattcgttccaggagtagacgaaggtcagcacgccggtggtggcgatcatcggggtggagataggcatcaagatacgagcccagatgcgcagggaaccgcagccgtccacgcgggcggcttcgatgatttcgtctggcacgccgttgaagtagttgcgccagagcaacagcatctgcagggcgttgaacgccaccaacgggatgatcatgccgaggtaggtgttggtcaggccgaatgtcttgatggtgaagaacagcggcatggtcacggaggcaatcggcacggccatgcaggcgagcagcagcacgtagatcacctgggaaccggtgaacttcatcttggcaaaggcgtagccggcgagcgaggtgatgaccaccacgatcacggcggtgaccacggagatgaaaaagctgttgaacaccacgcggaagtagtgcacgtccttattgttgatcacggacaggtagctgttccagccgcctgcctgcagggacttggtgattgccgtgtaaatcgggaaaatccagatgacgaagaagaatacgaggacggtgtacatgatgaccgtcgcactggttttacgcttcatgatgacgtcctctcgttagttgttggcacgcttgttgaaggcaagttgaatcagggagagcatcacggcgatgatgaggaccatcacgccgatggccgcggacagaccgccgttgaactgctgcacgccggccttgtacaggtaggtgttcaggaattcggtggaacggccagggccgccgcctgtggtctggatgacgatatcgaaggtcttcagcgagccgacgatgccaagcaggataagcgtgttggtggtgccggacaggttcggaatggtgatgcggaagagggtgttccagaatccgcagccgtcgatcttggcggcttcgtagatgtcatcggagatagacatcagaccggcgtagtagatgatcatcgagaagcccatccattcaaagatgttgatggcacagatcgagtagagggcgatgtgcggatcgccaagccagctttgggccaggaagtccaagtgcaggaagcgcagggcctcgttgatggcaccgacgttcggatccatgatgatgcggaagatggcggcgatgatgaccggggccatggcgatgggcatgaagaagatcgccttgaagaagctggaaccgcgcaggcgctccttgaggatcaccgcgagcagcagtccgagcccggcctggatgaccacggtgacgaccatgaagatgatgttattcatcaaggccgtccagaacacggagccgggagcgagcagcttggtgtagttcttcaggccgatgaagtccatctcactggagatgccgtcccagtcggtgaaggatgtggccacggtgaagccgatgcagtagtagatgaagacgccggagagaatgaccagcggggcgatgaacaggtaggggcgcagcttgctttgccatgagttctgcgatgcgccgctgtgcttgcgggcacgaacacgtttgccggctgccgcagccgcgttgctcacctctcccccacggctttgcgctgcccccgctgcggcgggaacggcttcctgaattgccgtcatgatgacctcccttggacctcatcttctttttctgtaacatttcagaaactggccatagaaaatactcgggcatgctttgccggagcggaaaaccagtcaaccgacgctgctgtgcgccggtttttctagaacgtttcagatttcttcgttggcaacaattctataacgtttcagaagtttgtcaaaacagacatcaaatggttgatataaacattgcaaatacttgcgacacaccggaatgcaatgccgatacaatcggcctatttctactcccccaaacgctggcgcacgaaaccgtccagcgcggccgcatcgataccgtcatacgattcgatggacgcgaactggcccaggccggaagtatccgtgcgaatccagccagtctgcgcgatcagagtcgcgcccgatgccgcaccggcctgaagtccaaccgaggaatcctcgagcaccacgcacttggccatgtcttcacgggcgatgccaagcttgtcggctgcggccagatagggcgcagggttcggcttgtgttcgtacggatcgtcgccacagacgtagccggcgaacagtccctcggactgcttcatgatgttctccgccatacggcgcggcgacgtggtgaccagcatggacggaatgccggcctccttgagcgagtgcagcacgtccaatacgccgggaatccacggcagacgttcgacctccgccttgaacacataatccttgagctgtttgtcgatttcgggaacgctcaatgtgcagccatgcgcaatcatgacctctgccacgtgtggcaccggagtgccggagcactcccaaccgaggtcctcgttccactcgccgccattgttgtgcgcaatctcgatttcaccgtcatgccaaagcggctccgaatcgataagcgttccgtccaaatcccaaaacacggccttgagcagcatggttacctccgtacgtcgcagtgaatcctcaactattcgtattcgatatacctatctcaccaactccgcacgacagccgaacagcaaatcaccaaccccacaggaccatggatttggaatcggcgggggtggagtcggattcgcgcgtggtgtcggcagcggtatcgcggccgggcagttcgcgggtttcgcggcggatggcgttgcgccagaggcgggcgcggttggagcgttgtacctccacgatattgccgtcacggcctgcggcgaaaacgctctcctggtcgccggtttgcatgcgtttgacttcgcggcgcagttggcgattctcttcttcgagggccaaaatgcgtgcgatgccggaaagattgatgccctcatcctgacttaggcgctgagctcgagtcaggcgggcgatgtcgcgcaggcagtagcggcgtgcgccgccatcggtgcgctgcggacggaccagacccagccggtcgtactggcggagggtctgggggtggatgttgcccagttcggctgcctggccgacggtgaagatgggcagttcgatgtcgaagccgacgtcatcggctccgtcgagatcggccctgcccatcaccagcgcggttgcgcacatcgcgtacaactgcttcatttggttggctaaccgcgccattgttcacctcctgattacaggctgagatagtcgccggctttttcgtcgaattctttggcggcgtgcttgacggccagacccggcttggcggggaccatgatctgcacgcggccgatcaggtcgcccggctggttgccgcgctggacgccaagtcccgcgagcttgacctcggcaccggagctggagcctgccggcaccttgaaggtgacgggattgccgtcgatatccttggcctcgaccttgccaccggccacggcctggcccacagttacgggcaggtccatgacgatgtcgtggccgcgcatcgagaacgcggcatcgggcttgacggtgacgtgcaggtacaaatcgccggccttgccgccgttgatgcccggcttgcccttgccggcaagcttgattttctggccgtccttgacgcccgcaggcacgtgggccttgaacttcttgccgtccacggacagggacacggtagcgcccttgaccgcctgacgcagggtcaggctgatcttggagttgcggtcctcgccgttttcggggcgcagggcctcctcatagccatagccgccggcattgccgtacggcgattggccgtagccgccatacgactggccgccctgacctgcagcaccgccgaacatcgagaagatgtcgttgatgttgttggggccgccgcccgaagtggagaagcggatacgcgaaccgttgccaccggcaccctggccaaacatggagccgaagatatcagagaaaccggaagcgtcgaagccgccggcaccggaaccgcctgcgaagcgggcgccgcccatgccgaactggcgaatcgcgtcgtacttttggcgatcttccttcttgctcagcacgtcgtaggcttcggagatgtccttgaacttctcctcggcttccttggtcttgttgacgtcagggtggtacttgcgggcgagcttgcggtacgcctttttgatgtcgtcgtccgaagcgtccttggagacaccaaggactttgtagaagtctttactgagccattcgttttcagccattcatgtctcctttcttgaagagtctttatggttggctcccgctggatgaacagcccagtgggctgttcatagcagtgcgcaattgcgcacgtcgcataaaacatcgggagctgtcgaacgaagcgagactgagggtggtttatattcaatgtttgaccaccctcagtcagccttcggctgccagctcccgccagcgggagccaaggtaatgtcagctcgttaacgagctggccgttatcagttttgcggggaggctactactactcgggcggcgcggattacgcggtcgccgatacggtagccggcttccaccacggtgtcgacggtttccttgtcggcatcggcatccggcttgtgcaggattgcctcatgcttggtggggtcgaagtcctcgcccttttcgccgaacttctcgacgccgaacttctcgaaagccttgtcgatcttggcggcaacggccttgaacgagtcgtccatctcgctgtgttcgcgaatgcggtcgatgtcgtcgagggcgggcagcagcgcggtcagcacgtcgatgatgccgtgctggcggaagcgctcctgctccttctgcgtgcgattgcggtagttgatgaactccgcacgttcgcgttgcagggcttcgaggtagtctgcggcttccttcttggccttgccgaggggggtgagggtgtcttcggaatcggactggccttcgccagtcttctctccggcatccgacttctctccctcagctgcggcaggagccgcgtcggctccttcattggaaggagcctgggcagccgaatcctgcgcagagtcggactcggcggaggcgtcagcccctgaagaggcctgagcggcctggccggcagcctcagcatctgagggatccggcaggtcgttcaggtagtcgtccttgttgaactcggacatcacttgttgtccttgtcgtcatcgtcgtccacgacctcggcctcgacggtgtcgtcgtcggaaccggaggcggagccagcggaagcgccggcaccgtcagcgccagccgcaccggcaccagccgcggcaccctcagcaccctgctgggcgtagaggacctggccgatcttctgggcggcggtcatcagctcagtctgggcagtcttgaccttctcggtgtcgtcacccttcagggcttccttcagagcgttgaccttgtcggtgacttccttgacgatgtcgtcggagagcttgtccttgttgtcgttgacgagcttctcggtggagtaggcgaaggcctcagcctggttgcgggtctcggcgtcttccttgcgctgcttatcctcagcctcgtgagcctcggcttccttgaccatgcggtcgatctcgtccttcggcaggccggaaccaccggtgatggtcatggactgctccttgccggtgcccttgtccttggcggacacgtgcacgatgccgttggcgtcgatgtcgaaggtgacctcgatctgcgggacgccacgcggagccggagcgatgccggtcagctcgaaggtgcccagcggcttgttgtcgcgagcgaactcacgttcaccctggtagacctgaatcagcacggacggctggttgtcttcagcggtggagaagacctcggagcgcttggtcgggatggccgtgttgcgatcgatgagcttggtcatgatgccacccttggtctcgataccgagggacagaggggtcacgtcgataagcaggacgtccttacggtcgcccttgatgacgccggactgcacggcggcaccgacagccacaacctcatccgggttcacggactggttcgcttccttaccaccggtgagttccttgaccaggtccttgacggcgggcatacgagtggaaccaccgacgagcaccacgtggtcgatgtcgctcacggagatgccggcatcgtgcagcacgttgttgaacggcgtgcggcagcggcccagcaggtcggaggtcatttcctcgaagtgcgcgcgggtcagggtctcgtccaggtgcaccggggtgccgtcaggagtcatggccaggtactgcatggaaatgctggtggaggtggaggaggagagctccttcttcgcctgctcggcggcttccttcagacgctgcagcgcaatcttgtccttggacaggtcgacgccgtacttgttcttgacttcggaaaccagccaatcgatgatcttctgatcccagtcatcgccaccgaggtggttgtcgccattggtggcctggacctgaatggtggagaagccgtcgtcatccttgccgatctccagcagggagacatcgaaggtgccgccgccgaggtcgaagaccaggatgcgctcgtcttccttgcccttctcaaggccgtaggccagagcggctgcggtcggctcgttgatgattcgcaggacgttcaggccggcgatcttgccggcgtccttggtggcctgacgctgggcatcgttgaagtatgccgggcaggtgatgacggcgtcggtgacgggctcgccgaggtatgcctcggcgtccctcttcagcttcatcaggatctgcgcggagatctcctgcggggtccacttcttgccgtcgatgtcgacggtccaatcggtgcccatgtggcgcttgacggaggagatggtgcggtcaacgttggtcacggcctgacgcttggccacttcgccgacgaggatctcgccggacttggagaa

SEQ ID NO: 1298 - DNA, 15369 bp, Unknown
  R157_18m  MAG No. k141_7780
caagaccgccgcgccctgccgttatatcgccgccgatatcgagaacgcgggcggccattacgtcgacgagcagctgcacgtggacgacgccaacggcttcaagctcatcacgtcccgcaagcccgctgatttggactacttcgtggacgcaatcaaggatgcgctgaagtaactaccgctccttagcggccaactgcccgcaggcaccgtcaatgtcctggccgcgggtgtcacgcagtgtggcggtgatgcccgcgcggtgcaggatctccaggaaccgctgttcgtctcccggcttggaggcggtccacttcgagccctcgatggggttgagcggaatcgggttgacgtgggcccagttgtcgccgtaatggttaagcctcttggccagcaactgcgcatgctcggcctggtcgttgatgccgcgcatcagcgcgtattcgatactgacgcggcgcttggaggccagccaataatcgtgcgcggcatccaacacctgcgtggtgttgaaacgcttgttcatcggcaccagctcgtcacgcagttcgtcgctgggggcatgcagggaaacggccagacgcacgggaatgccttcggcagtgagcttcttgatgccgggcaccacgcccaccgtggatacggtgatgttgcgcgcggaaatgccgaagccttcgggaggcatggcggaaatctgtcgtacggcggacagcacggagttgtagttgcccatcggctcgcccatgcccatgaacacgatgttgctcaggcggccctctcccccggccacttcgccgtcacgcatcattttggcggccacacgcacctgttcgattatttcaccggtggacatgttacgggtcaggccaagcttgccggtggcgcagaacgggcagcccatgccgcagccgacctgcgaggaaatgcacagcgtggtgcgggtcgggtatcgcataagcaccgattcgatgagggagccgtcgaacagcttccacaaggtcttgatggtggtgccttcgtccgccacttggcgggtcacctcggtgatgagctgcgggaagaacgcggcggcggcctcgctgcgcttggctgccggaaaatcagtgaattcagcggcattcacatcgaaatggccaaagtaatggttggcgagctgcttgactcggaacttcggcaatccgagttcggtcgctttctcgatgcgctgctcgggcgtcatatccacaaagtgcagcggcggcttgccacggcgggcatggtccttggatagcacgtcacggaaggcacctgatgtgccgccgggagtaatgccggtttccggagtgtcaggatgctgtgtggtcatgatgggttcgcttcgctctcaatatcagaaaatagtcaaacatgcaatagaaatatcagaatccaccatacggcgtgccgcatacgaatcagatggcccatgtcttagcccatggcgaacgcatattgaacgatgatttcccccatatatgacatgtggcaccgtgcgatatacacacgatgccacattgttcatgcacgaggcatgcgaatcacagtccggtgacccacagcaaggcgcaggtgaacggtgcactcatcaaaatggaatccacacgatccatcacaccgccgtgtcccttgagcagatggcccatgtctttgatgccgatatcgcgcttgagcatggaagcacacaaatcaccgaacgtgcccacggcgccgatgagaatacccgccacgatcggcacccaccaacgagtggcccatttcgaggcatcatacgtgcatgcgaatacggcgaatgcgccagccatggcgaagagcatcgagccgatcaggccctcaacggacttcttcggcgagatacgcgggctgagcttgtgcttgccgagccaggcaccggcaaacaaaccacccgtatcggagagggcgggcaggaacaccagcatgatggcgtgtgcaatcggatgcccattgaaagtcagcgagatgatgatgcagctggccagcaacggaatgtacaacacggtaagcacggacacagccacatggctgagccgggaatgatgctgttccccgccctcatgattgaacgaggattcgaggcgcgcgctggcatccgtgttggacagtttgccggcaaccgccagagataggcggttgccgacgctgatttttgcgctggccgcgatggcgaccagaataatcgacacgatgatactcagcgacatcgtgatgagatggtacggggaataataggtggcgatgagggtgaaggacgcgcacagccacagcatgaacaccgggatgtgcaggcctacggtggcgaagtccaccctgagctcccacagcgccagaatcatgaacacgactaccagcagcacgaagaggtcgacgctgagcagcaggcacgcgacaataaggatgaccagtgccgcgcctgtggcgatggcctgcggcatgttgcggccggtcttcttgttgatccggtcgagcgtctcctcggcctcttcatggagttgttcgttgcgttccataattctccggacctggtctgaatcagacctccatgatctccttctgcttggtctccagcagagtatcgatctcgtcggtaacggacttggtgaccttgtcaagatccttcagcaggcgatcgccttcgtcctcacccatctcgccgtccttgacggccttgtcgatggtttccttggtcttacggcgaatgttgcgcacggcgaccttgccgtcctcggccttgcccttggcgagcttgacgtactccttacgacggtcctcggtgagttccggcatggtcaggcggatgacgttgccatcacggttcgggctgatgccgaggtcggagttgcgcagggccttttcgacggcaccggcctgggaagcgtcaaacggggtgacggacagggtgcgcggttcgggaacgccgatggaggcgacggccttaatcggggtgggggcaccatagtagtccacggtgatgccgttgagcagggccgggtttgcgcgaccggtgcggatgccggagaagttttccttggtgttttccacggtcctggccatctgttccttggcctggtcgataagagacatattcactccttgtgtgttggtgttcgtctgtgttgttcgtctatgaacgtttgattcgattgtaggcgtttgcggcttactcggccacgcgcgattcggcggtggagaccagcgtaccgatttcatcgccgacgagggcgcgggtcacgttgcccggctcttcgaggccgaagacgcggatgcgcttcttgttgtcgcgggccatggacagtgcggaggcgtccatgactgccagattgtccacgagggcgcgattgtagctcagggtttcaaaacgcttggcgttctcgtccctgcgcgggtcggcggtgtagacgccgtcgacgccgttcttacccataagcacttcgtcgcagtggatttcgagggaacgctggatggaaaccgtgtcggtggagaagtacggcatgccggcaccggcgccgaaaatcaccacgcgacccttttcaaggtgacggatggccttgagcggaatatacggctcggcgacctgtcccatggtgatggcggtctgcacgcgggtggcctgaccctcctgctccaggaagtcctgtagagcgaggcagttcatcaccgtgccgagcatacccatgtagtcgccacgggaacgatcaataccggcctgctgcagttcggcaccgcggaagaagttgccgccgccgaccacgatggccacctgcacaccctgttgtacggccggaacgatttcctcggcaatgcgacgaatcacatgggtatcgatgccgaccttgccaccaccgaatgcttcgccggacaacttgagcagaactctgcgcggcttgtcgctatcagtcatatcatgcctttctcaaaaccgaaagtgcgaaattatccgtagacaagcgtatcggtttacgacgacaccccctagcaacgacacccttggaatagcgaaacgccatccgattattgaataaccggatggcgtttcgttgaaattacgctaagcgcgtggagtaagccttaggctcactcctcttcgcccttgccgacctcgacacgggcgaatgcggtggcgttgccaccgacttccttgaacaggtcgccgacggtcttggacgggtccttgacgaacggctgctcgagcagcacgacttccttgaagaaagcgttgagacggccttcgacgatcttcggaacgatcttctccggcttgccctcggccagggacttctcggtggccacgcgacgctcggactcgaccacatcggccggaacgtcctcgcgggtcagccacttagcgcccatggcggagatctgcagagcagcttcgtgagccacggcggcgccggccttgtcggtggcgatcatggcgacgatgctcggcggcatctcggcggacttcttgtgagcgtagacttcgacgtgctcgccggagatcttggcgaactggccgaccttgacgtgctcaccgaacagggcggcggcctcctcgacagccagcttgacggtggtgtcgccggccttggcctcgagcagctcgtcagcggagttggcgtcggcgtccacggcgtagccgagaacttcctcggtgaactcgacgaacttcggggtcttggccacgaagtcggtctcggagttcagctcgacggcgtagccggtctcgccattggcggtctcgacgaccttggaggcgatggtgccttcctgagccttgcggccttcacgcttgccggctgcggcgatacccttggctcggatgatttccttggcgcgggcgacgtcgccttcggcttcggtcagagccttcttgacgtcgagcatgccggcgccggtgtcttcacgaacctgcttgatcagtgcggcggtaattgctgccattgattattctccttgagaaattttgcttacccatgaacgatgggaagcgcttattcaggcacttcccatcgtagagcatcactcggccttgggggcctcggcggtttcgccctcggcggcagccggagcggcggcttcagcggaagcctcggcaggagcctcgttggtcaggagttccttctcccaagcggccatcggctgctcggcggcttcgccctcggccttgttggcgccggagcgctccagcagaccttcggcgacggcgtcagccatcaggctggtcagcagttcgatgccgcggatggcgtcatcgttggccgggatcgggtactcaacggtgtccgggtcggcgttggtgtcgacgatggcgacaaccgggatacccagcttgtgagcttcctcaacagccagggcctccttggtgatgtcgacgacgaacatcgcggacggggtgcggttcatgttgcggataccgcccagctgcctgttgagcttgtccttctcgcgctcgagcaggaggagctccttcttggtcaggccggagccgtgcacgtcggtgaagtccatttcctcaagttccttgaggcggttgacgcgcttggagacggtctggaagttggtcagcatgccgccgagccaacgctcggagacgtaaggcatgttcacgcgggtggcctggttggcgatagcttcctgagcctgcttcttggtgccgacgaagagcacggtgccgttgtgggccacggtggtcttgatgaagtcgtacgccttgtcgatcatgtcgagcgacttgaacaggttgatgatgtggatgccgttgcgctgggtgaggatgaactgcttcatcttcgggttccaacgacgggtctggtggccgaagtgcaggccagccttcagcatatcgctcatagtgatctgagccatggtattactacctttcattgtcggttcttgcctggccatgcgcacctgcgtgcagctgctcccccggtttcacgagttgtgcagccgaccgacacaggccgtcgcgagcatgacgcgaatttgttgtgtgccggttgacaatattgggtggttccggacgccagcgactgcgtccgttgccgggtggcacacaagtttcgagaatagcacggagccagtactaagaagacaggttcccctccttgaggggaacctgtcgccataggcgactgaggggagttacgggcggtaccggcagaaccaccctcagtctcactacgttcgacggctcccgccagcgggagccgggtatggactacttcgcctgacgattgcgcatgtagcgcagggcttcgcggcgttcttccttttccaggcgatccaaatacacgtggccgtcgagatggtcgcattcgtgctgaagcatacggcccatcagcccggagccctcgagcacgacctcgttgccgtccaggtcgatgccacgcacgcgcgcgtagtcggcacgacgggtcttgtaccacaagccgggcacggacagacaaccttcatcgccgtactgctcgccggacttttcctcaagtacggggttcagaacgtagccgactttgccgtcgatgttgtaggagaaggccctcaggctcacgccgatctggttggcggacaggcccgctcggcccggatcgtccacggtttccaacaggtcgtcaaccaggcggcgtacggccggggtgatctccttgatctcatcgcagggggtgcgcaggactgggtcaggcacgaccctgatctcacggatggccacttctcgttactcctcgttcttctcgtcagccggctggtccggcttgctgccggtgtcagcggcattgtcgacagcgtcggcattgtcggcggaatcgccggtctcgccctcttcgggttcggccttcgacttcttgatcttctccgacacgctagcaatcgaatcagacacgctggttttcatctgttccgaggcctgtttgacctgttcggacgcctgcttgaccgattcggaggacttcttgacggtctccagcgtgctgtcgatgatcttggcagtggcgggcagcggcttgttggatggcttgggcgcgtacagatcctcttcgatgacggtggcgtagcgctgcaataccttgggacgcaccactttcatgctcggggtgagcgtgccgtgctcctgactgaattcctcatccagcaccgcgaatttgcgcacggactcagcgcgggagacattggcgttggcctggtcgatgtactgctggataaaggcgcgcaccgcgtcgttgtcgctggcctcggcgagtgtcatgtcggcattgaggccctgaccttccagccaggaatgcagcatttcggggtcgagctcgataagtgcggacacgaacggcttgccgtcgccgactactactgcatgagccacgatcgggcaggtgtcgatgacatcctccatcggggcggggctgatgttcttgccgccggcggtgatgatgatgtccttcttgcgtccggtaatgaaggtgaagccgcggtcgtcgatacgacccagatcgccggttttgatccagccgtcggcagtcatcgtctgtgcggtgagttcgggctgcttgtagtagccaaggaacacgttcgggccggtcagctcaatttcatcgtcttcgccaagacgcacgcccatgccaggcccaggcttgccgaccgaaccgacctcgttgtcgtcctcccaattgacgagcatcggagcggcggtttcggtcatgccataaccctggatgaaggtgatgtcatccatgccgttgaagaagtgggccaaatccacgttgagcggcgcaccaccgcaggccagccatttgaggttcggtccgagagcggaacgaatggatttgcccaccgtggccatgtagaacgaatggcgcatgcgctcgatgaacgaatggccgcggccggcctgctcatccttgctccacttgacgaagtgcttgaccgactgggcgaagatatgcccctggatgccggcaccagccttctgcgaggccgcgttatacaccttctcgaacacacgtggcacgcccagcaggtaggtgggcttgaagctgcggatatcggcgagcagtcgcttggcgtcgggaatgtatccgaccacgccgcagccaccgatgcacacatactggatgtagcgggcgaagcagtgcgccagtggcaggaacagcagcagacggttgtcgtcgtacagcatgccacgcagaatctcgtagccgttaagcacgatgtgcgtgtaattgcggttggagagcatcgcgcccttgggcttgccggtggaaccggaggtgtagaccacggtaagcagatcatcggctttgatacgagcgatagccgcatccaacgtctcatcggatacgccatgcccgaagtcagcgacagcgtcaaggccatcggccttgaaattgaacacgtatttcatgcccggatgattgacacggatctgctcaagcgtctgtgcgcgctggaagtcgccggcaaaggcgatggcgggatcgacttcctcgacgatgcccgcggtctgacgggcggaatcggtctcatagacgggcacaaccacagcgccgattgccgcgcaagcgaaatcagccacaccccactcatagcaggtaggcgagtaaatcagcaccatggtgccggctttgacgccaagtcccaacaggcccttggccacctcgcgtacgcgggacagcatttcagtagctgtggcgccgcgccattggtgggtgttgtcatcctgccattccgcgatgatgtcatccggcgtgcgagctgctcgtttggccagcagcgagtagacggtgtcgtcatcggtggtgacatatctgggttcttctacatgttcacgcatggtcactactataggcgaaccagcctatgacacggcagaaccgtcttccgctgccagcgtaggaatcggtgtgagggcggagccgtctggtcagcccagatcggcatagatgcacatccatcgagaaccgatgaacttcagtttgaggttgactcgcagattttcctggccgatggtcatgaataccgccatttccagcgtgtccttgccggtgatcatgccgtcgatcaatgtggggacagtgggcagatagcagaatttcgctttgagctccggatgagtgaccatgtgggtgccgagcaggtattgcatggtttgcagccgttccaggcatgattttgtcatggctctgttgagatgtgcgacgctgagtctgccacgtatcgcgtccgccgatgtgcaggcgatgcggcatgcagccatggccatggaatgacattccttcgcattcagcccgcctatgaatgtgggttggatatgataccgcaccgggcgatccgacagctccacaacgatgaatccgtcataactcggcaacggcccgtactgatatgtgccgtggaaaaatcccgaatactccatgatgaccccttcaagcccccttgcaactcaccatcatcggcgagcgtttgtactacaacatcacgaaaggcgcgccaagtcaaacgacttgagcgcgccttagggcaagctaagcctcctgcatggagggcaaaccccccattttcagggggtaatcgggattatcgtgcggaatacgggttgaccaccatgccgcaacgctggaagttcttcacgtcgacgtagccggtggaggccatagcgcgcttgagggcgccgatgaagttggtcttgccgtccgcctggtggctcggtccgaacagcacctgttcgagcgggccgaccgtgccgaccgtggtgcggtagccgcgcggcagcgtctggtggcgggcttcggaaccccagtgggtgcccttgccgggggcctcggtggcgcgggccagcggcgcgccgagcatgaccgcgtcggcgccgagggccagggccttgacgaagctgccggagtcgcccatgccgccgtcggcgatgacctgcacgtagcggccgccggattcgtccatgtagtcgcggcgggcctcggccacgtcggcgatggcggtggccatcggggcctgcacgccgatggtctggcgggtggcggagaccgcgccgccgccgaagccgacgagcacgccggccgcgccggtgcgcatcaggtgcagggcagcggtgtagttggatgcgccgccgacgatgacgggcacgtcaaggtcgtagatgaacttcttgaggttcagcggttcctgaccggaggagacgtgctcggcggagaccacagtgccgcggatcacgaacaggtccacgcccgcgtccaccacggtggagtagaactgctgggtgcgctgcggggagagcgcgccggccacggtgacaccggcggcgcgaatctcgtgcagacgttgcgtgatgagctccggcttgaccggctcggcatagatctgctggatacgctcggtggcctgatcggccggcaacccggcgatttcgtccaacagcggggtcgggtcctcgtaacgggtccacagaccttccaaatcgagcacgccgagcgcgcccatcttgcccatggcgatggcggtggccgggctggtcaccgaatccataggggcgccgatcaccggcacatcgaactcataggcgtcgatctgccaagaggtggagacgtcctcggggtcgcgggtgcgacgggaggggacgatcgccacatcgtcgagtgcgtagccgagacggccctttttgcccaaaccgatttcaatttcctgagacatggttgtaagcctattgcccgggtgggacgccaacaaggtcgtttcccacggaccggacgattgcttcaagtcgttacaaacatgcgctatgactaaatcatcttcacaccatctatcaggaggaagcatggccaaaatcaaggtcgaaggcactgtcgtcgaactcgacggcgacgagatgacccgcgtgatctggaaggacatcaaggatcgcctgatcctgccgtacctcgacgtgaacctcgactactacgatctgggcatcgagcaccgcgacgagaccgatgaccaggtgaccatcgacgccgcccgcgccatccagaagcaccatgtcggcgtcaagtgcgccaccatcacccccgatgaggcccgagtcaaggaattcggtctcaagaagatgtggaagtcccccaacggcaccattcgcaacatcctgggcggcacgatcttccgcgagcctatcgtgatgagcaacgtgcctcgtctggtgcccggctggaccaagccgatcgtcgtggcccgtcacgcattcggcgaccagtacaaggccaccgatttcaaggttccgggcgccggccagctgaccgtcaccttcactccggacgatggctccgagccgattcagcacgtggtctacaactacggcgaagacggcggcgtggcccaggtgcagtacaacgtcaacgattcgatccgcggtttcgctcgtgcctgcttcaactacggcctgatgcgtcattacccggtgtacctgtccaccaagaacacgattttgaaggcctacgacggccaattcaaggacatcttcgctgaggtgttcgagaccgaatacaaggacaagtacgccgaggccggcctgacttacgagcaccgcctgatcgacgacatggtggccagctccctgaagtggcacggcggttacatctgggcctgcaagaactacgatggcgatgtgcagtccgactccgtggcccagggcttcggttcgctgggcctcatgacctccgtgctcatgaccccggacggccagaccgtcgaggccgaagcggcgcacggcaccgtgacccgtcactaccgccgctggaagaagggcgagaagacctccaccaacccgatcgcctccatcttcgcgtggaccggcggcctcaagcaccgcgccgatctggacggcacgcccgaagtccgtcacttcgccgagacgctggaaaaggtcatcgtcgacaccgttgaaggtggtcagatgaccaaggatctggccatgctcatcggcccggacgaaccgtggctcgacaccgacggcttcatgaacgcgctggacgagaacctggccaaggctctggccgagtaaatcatcgaacacatcgtgcggacctacatgggtcatgtcatgtcgccaactgtcatgattgtcgtgcttcatctggaatgttcctcagcacgacaatcatgacagttgttcgatacacgcgcgaaatacccctaattgttcccggatatgtggcgatttgtccactggtccgggactttttcgtatacggcctactagaatcgtgattcagtttgttttcacgcccgcttgaggaggtttcgccgcttatggtgttcgcacgccgctcaaccaccctgctcgccgccattgtcgcatcctgcgcgatggtgctgtcactgaccgcgtgcacctcagacaataagaccgttgtagatggtcaaaccacggtgacgtccaattctgccggcggcgtggccgtgttcacgccttcggacggcattacgctgaatcagcagacgccactgaacaaatgggcgaagctggtgcccgacctaaccaaggccctggtcgacgccggtttcaagaaaggcgatatcgatcatacgacgtccgactcgttggacaagcaaagccgcgccatccaagactttgtggtcgatcatctttcgaataacaccacggacgattccggcattgccatcgcgcccgacaacatgacattgctcgtggctccagtagtcgaggccgacgcttccactcgccaatacggcgattacgtcagccagaacctgagcaccaacgatgccacggatgagggagctacttctgacggtgattcttccgaagacagctcttccaaagatgactcgtccaacactgagagcgacggcactgcatcggacgagcaggcgcaggccgtggaccggctggtctcatcgctcaagctggccaaggaatccggcatgcatgtggtattgctcggcaacagcatcgaggggtacaggccggacgccttcgtcaagttctcggacgcccagaccatcggcaagctacaggcggaaaagatggtgtccaaactcaagttggataaggccagtaaagacaaccccaaatacattgaggtgctgctgccatacaccgccgtggacgaaaaaggcaacgccaacgattccacgttcgcccaagaggcgttccgtggtatctggcaggtactgggcccctactatcagaagggcgttgtggaaagcccttcaggcaccttggacggcaaatccacggaaaacgattggcaagccgtggcctacgatgccgccaaggaaggctccactgcgaaagtgcttgacaagcgtctggcaaaaaccgacgggcagtccacactcacccgtattgacggcatcatcacgatgaacgactatatcgcctccgaggtcgtcaaggaattggacgatctgggatacaccggctctgccgccgatatcaatccgcagatcaccatctcgggcattgtcggcaatatcaccggcaagaaggatctcagccgcgacgcagtgccggacccgatcaaatcccctgaaaacgacaacgcaaacgactcatccagttccgatgacgatgcggataaggacacctccgcttccgacaaggaccgtgactcgcaatggcctctggtgaccggatacggcgcgtacgtctcgaacatcccatccatcgtcaatggcaagcaatggatgaccggcatggaagacagacagaccatcgccacggatatcgctcaggcctgcgccaggctcaacaagaacgaagcgctgaattccatgccttcaatcaggaactccgaggtaggcggcgtgaagaagatcccgaccatcaacgaaccgttgctggctgtcagcgccagcaatctcaagtccgcgctgatcgcccccggatatatctccttggccgatgccggtctgtgattcatactcgtcacgccgctagccgcctgcgatgcctcttccgtacggccctgttccggccgacaaacattgctgaatcatgacggcttcagtacgatttttcgactccccgcatattgctgtgggtcaagatagtcggccgttcctcgcttgaggccccaatgcaggcaacggtcttcgcaatggtccgagttgccctcaacgatgcctacgggctgtctgcgggagatcgtatcccccaccgagagctcggtaacagccggttcgaatgtcgacgtgacacctccacgatgccgtacactcaccacatctttgccagctactttgccagcaaaactcacggtccctgcctgtggtgacagaatcacggtaccttgctccgcagcaagatccacgccacgatgacctggtgcccacgggttgatcggccgctcgaactgttgttcgacctgtggatcgtcgaccggccagtcgaaccgggattcgcactgattgccattgcgccacgccagatcagacatatcggtgaaatcctccaccgtgtatgccgcatctccggtcaccgcagtatccgcatgcgcaacatgctgaggcgtggatgccagtcccactcccaaggcaagcagcaggccgataacggcggccaacgcgattatggcatccatacgccgttgccgttcctgagcccgctgacgcgcctgctgacgtcgcctgctggcacgtcgggcttcgtcgcgacgccaatcaaacaacagtggtgcattcatgagattcctccccatagtgtgagtgtgatgcgattccggcttctttgccggtgatacccaccttgaggggtccgaaacaggatgtccagccagaacgacctatgtggttctagcttccgaagttatccacaatgaaatttcgcgtgacagtatcgccgcatcgtcatcatgttgtatgagtgggtattcgatgagtccgattctgcggaattcggcgcgacatgccctacacgcatgtaatttgctttttcgtggcaagcatgtaggatctgtgacttgtgcgcgagagaaatctcaaacacagcagacattcctgcgtagctcagttggcagagcatccgactgttaatcggacggtcgctggttcaagcccagccgcaggagctcacctgaagccatcggcgtgtcgccggtggcttttctgttactcattccctgaagctgcttcattcacgtgagaaaataccggtcggcggtaccacgatgcgcgccgatcgccattcaaacgaggacagtcatggaccgtcacgggttcgcccgctacgagcccttcacgattcagaaaccctacattattctacggaatctgtcacttctgcagattcggcattccggccttataccagagcaccgcgataccaacacgttctttgacatcgagcttggcaag

SEQ ID NO: 1299 - DNA, 10351 bp, Unknown
  R157_18m  MAG No. k141_7893
aagtagtccaaatcagcgggcttgcgggacgtgatgagcttgaagccgttggcgtcgtccacgtgcagctgctcgtcgacgtaatggccgcccgcgttctcgatatcggcggcgatataacggcagggcgcggcggtcttgagatcgcgcagcgggcgcgtcagctcggattctcatattccagaaacgggtgcggcgcatgtaacgggcggtaggtagtctgaaggactgtaatgcaaagccgaacaggggagtgaagcatgtcgttggcggtacgagtcatcccgtgcctggacgttgacgccggtcgcgtggtgaagggtgtgcatttcgaaaacctcaaggatgcgggcgacccggtggagctggcggccgaatactatcgtcagggcgccgacgagatcaccttcctggatgtgaccgcatccagctcccaccgcaacacgatgattgacgtggtctcccgcaccgccgaacaggtgttcattccgatgaccgtgggcggcggcgtacgcacgcccgaggacgtcgactcgctgctgcgctgcggtgcagacaaggtcggtgtcaacacggcggccatcaatgacccgtcgcttatcagccgcgtggccgaccgtttcggcaaccaggtgctggtgctctccgtggacgcccgccgcgaaaagggcgagcaacacacgcaatccggcttcgaggtcaccacgatgggcggccgcaaatccaccggcattgatgccatctggtgggtcaagcgcgccgagcagcttggcgccggcgagattctgcttaactcgatggacgccgacggtaccaaggaaggctttgatctcgagatgattcgcgccgtgcgcaaggaagtcaagattccgatcatcgcctccggcggtgccggcaaggtcgaggacttcccgcccgccatcgaagcaggtgccgacgcggtgctggccgcatccgtattccattacggcatcctgaccatcgccgatgtcaaggcggaactcaagaagcacggctacaccgttcgctaaacgaatacaccttgctcccgctggacgaacaatccagtggattgttcgtagcagtgcgctatgcacatgtcgcacataatccgggagctgtcagcgaagctgactgagggtggtccacataaggaagataggtatgacagacactacatacgacaattccactgaactcgatccccgtattgccgcacgcctgaagcgtgacgccaagggcctggtcgctgccgtcatccagcagtacgacacacacgaggtgctgatggtcggctacatgaacgacgaggcattacgccgcacgctgaccaccggccgcgtgaccttctggtcccggtcccgtcaggaatactggcgcaagggtgatacatccggccatgtgcaatacgtcaagggcgtgtccctggattgcgacggagacgcactgctcgtcgaagtagaccaagtcggtgccgcctgccacaccggcaagcgcagctgcttcctcgaaggcggccccctgtccgtggtcgaaggccatcgcccggccgagcagtagaacgggcttccctgactgggggaagccgaacgaccgcgtactacgaaacaagacatcgagttgtaagtaaaggagcgaatatgagcgaatgcagcgtcaaacacctgaagtggggcgccacctggcccagtcgcggccacttccaccaactggccgacgccggctaccgtgtgattccgatcgtgcgccgtctgctcgccgactcgctcaccccggtcggcttctacgagcgtctcgccggcggccgatccggcaccttcatcctcgaatcggcggaatacggcggcacgtggagccgttacagcttcatcggcgtcaactcgatggcccagctgcgctccaacaacggtcaggccgactggctgggcaaggtcccggttggtgtgccagtcaccggtgacgtggtcgaagtcgctcacgccacgttgaagactctgaaggccccgcatgtggaaggcctgccgaacctgaccagcggtctggtcggcacggtcggctgggatgccatccgccactgggaaccgaccctgcgcgccgaagctccggacgagaccggccagcctgagaccgtgctcgccctggccaccgatatcgccgtggtcgaccacgtatccggttcggtgtggctcatcgccaacgcggtgaacgtggatgataaatccacccgcgccgacgtcgcctacaacgaggccgtcgctcgactcgaccagatgcagcacgatgccgccaccccggctccgggcgagtcccgcgtcaacatcttggacgaaacggtcgcccagcctgagctgcgcttccgcaccgagaaaagccactacgagcaggccgtcgaacgcgccaagcagcacatcgtcgacggcgacgtgttccaggtggtcatctcccagcgtctcgacatcgattcgcctgccgacccgttcgacgtgtaccgtgtgttgcgcacgctgaacccgagcccgtacatgtatttcatggcgttgaccgatgctcggggccgcgacttcaacgtgatcggctccagcccggaaaccctcatcaaggtggacaacggccacgcgatgaccttcccgattgccggatcccgccctcgcggcgccacccctgaggaagacgaaaaattcgccaaggaattgcttgccgatccgaaggaacgcagcgagcacatcatgctcgtcgacctgtcccgcaacgacctgagcaaggtgtgcgtgccgcagtccgtggaagtcgtgcagctcatggacatcaagcgtttcagccacatcatgcacatctgctcgacggtcaccggcaaggtcgacccctcgctgaccgcattcgatgtgttcaagtccgcgttcccggccggcacgctttccggcgcgccaaagccgcgcgcagtcgaaatcatcgacgagttggaaccggccgaccgcggcatctacggcggcaccgtcggctacttcgatctctctggcaacatggacatggccatcgccatccgcaccgcgttcctgcgcgaccatgaggcgagcgtgcaggccggtgccggcattgtgctcgactccgtgcccgctaccgaatggcaggagacgcgcaacaaggccgaggccagcgtcgaatccatccagatcgccgcccagctgcgcgaactgtaacgttcaacgcataacgatgcccctgctgacaactgctgtcagcaggggcataacaatatgcgtatcagtgggtttcgcccatgatgtcggtggcgtcggttccggtgcccacagcggcctcgatggcggcttcgatgccgcgcgccatggtcgcgatttccatggtcggcgtgccgttcggcttgcccacgccctgcgcggtcgcatacggcacatgaatgaagccgcccttgacgccggggaatttgcggtcaatcagatacaacacgttatacatgatgctgttgcacacatacgtgcctgccgtatacgacatgaatgcgggaatcccgtggtcattgatgttcctgaccatggccttgaccggcaacgtggcgaaatacgcggtgtcgccgtcctcacgcaacggcgtatcgaacggctgctcgccatcattatcgggaatacgcgcctcggccaaattaatggccactttctccacggtcagagccgaacggccaccagcctgaccaatgcacagcacatagtcaggctgctcgcgcaccatggcttcctcaaccacggtcgcactgcgcgtgaacaccgtcggaatctccagtttcaccactgtcgcaccggcgatttcatccggcaacagcttgactgcctcgaatgcggggttaaccggctcgccgccgaacggatcgaatccggtcaccagaatcttgctcatcattagctccttatttcacggattgttgtggtatctggacaacgaggttattgcgcgatcagcatatagacgatctgcaccacaatcatcaccaatgcgggcagcacctgcttcttaatcacgcccatgcggtccttcatatcgagcatcgcgacgggcacgatgttgaagttggcggccatcggcgtgcacagcgtgccgcagtagccacaggtcagcgccagaatgccaatcaccgtcgggtccgcaccgtaggcgagcacgaatggcgcgccaatgcccacggtcattacggtaatcgcggcgaaggcattgcccatgatcatcgtgaacagcatcatgcccacactgaatacgatgatgcccagcgtgacgttgcccttcggaataatgccgccgaccagcgtggcgatcacgtcgccgacacctgcggctgtgaaaatcgcgccgagactggccagcagcatcggcagcatgcagagcgcacccatggcagacaacaggcgttccgaatcgttgaggaatacgaccggcttgttgtcatgcgagaacgcgaacagaatcacggcggcaatcatcacaccgatgcagcagccggtcagggcgctgacgctgggaatcagggcgccgataatggcgaacacgcccagacacagggcgggaataaagatgcgcatgccgatgcgctggaagttcgcggccacttcggcggtgctgggagcgctcgaatcggatgccgagcccttacgcacttggcggaagatggcgggaatgaccatgatgataatgagcacaccgtccgcaatggccggaatccaacggccgaacgcgatgacgataccgagcgccgtccagaacacgaaagtgccgtagcgggccttgttggttttatcgagtaggttgcgtacgcccgcatacacggacatgaaacccatgaaaatatagaagagctcgaggatcttggtgccaacggtcacgctggggtccatgaagaacgacatatcaggcctccttgccggtggtggtagcggtagcggcctgagcggcggcttcggcaccgtagtacttcttacgcagtcgtgtgtccttgatgatgtaatagacggcggtgaccgccacggcaatcaccgcgaccgggatctcgataatggccatgcgcaacagttcgacgtcataacccagcggcttcaacgtggactgcacgagcagcgcaccggccgtacccacgaacagcacctggccaaagaaccatgcgacgttctccatgccggaagccatgcccttgagctcttccacatactcgtcgttcggctcgtgaccggacgcttcaatcgcacctaccgccatcggcatgatgaccggacgcacgaacccggccacgccaccaaaactcacgttgaacgcggcgaacacgagacgcatcacaccatacagggcgatcaccataccgggcgtcgcattcttcactttgccgatcagctgcgcggctgcggttttcagaccgttgcgctccaatgtaccggtgaccagcaacacgatgatgaaaatcgccatgctgcggttcgagacgaacgacgtacccaacgtggtcaggaagccgtcgacgccaatgccgccgaccagcgcagtcaccacagccgccacgataatgatcagaatcgcatcaagtttgagggcgaaacccacaatcacgatcacgattcccaataacacgagataatttggttccatgcgggaaatccttcctatactgcacacgcattgcgccgcaagcgtgcccggatatggatagtgtacgacggaaatcacgattcaactgtcttatcgcgcacattgcaggtattgcatgagcctacgggcatataagcgtatggacgcatgagcgtcggctgagcccggtcggcatggtgttcgctatgatggacagtcggactttggtaagagacagtattcgtaacaggcaagtaggttattcatggctattgaggtgcagggacttgaaattcagatcggcgcgcgcacgctgcttcaccccaccaacttccatgtggccaagggagacaagatcggtctggtgggccgcaacggtgccggcaagaccacgctgacccgcgtgatcaccggcgacatgctgcccaccgccggcaaggtgcgcgtctccggcaagctcggctacctgccgcaagacacgcacgcctccgatcccacgcagaccgcgctcgaccgcatgatgagcgcgcgtgacatcgccaccatcatcagccgcattcgcaaggccgaaaaggatatgaccgacccggatccggacgtgatgagcaaggccatgacccggtacgacaaggccatgcaggacttcgacaaggctggcggctacgcggcccagtccgaggcgatttccatggccgcctcgctcggcctgccgcaggaggtcatggagcagcagctcggcacgctctccggtggccagcgccgccgcatcgagctggcgcgcatcctgttctccaacgccgacacccttattctcgacgagccgaccaaccacttggatgccgattccatcgaatggctgcgcggctacttgaagaagtacgagggtggcttcctggtcatctcccactccaccgaactgctggacgaagtggtgaacaaggtctggcatctggatgcgcagctcggccagatcgacatgtattcgctcggctggaaggcctacctgcaccagcgcgtggtggacgaggagcgccgccgccgcgaacgcgaagtggccgagaagaaggccgaccgtctcatgaagcaaggcattcggctgcacgccaaggccaccaaggccgtggcagcgcagaacatgatgcgccgtgccgagaagctgctggaaaacacctccgaggcgcagaaggccgagaaggtggcggacatccgtttccccgagcccgcgccctgcggccgcacgccgatcatggccaaggacatctccaaggcctacggttccaacatcgtgttcgccggcgtgaacctggccatcgacaagggctcgcgtgtggtgatcctcggctacaacggtgccggcaagaccaccacgctgcgcctgctggcccacatcgaggagccggacaccggttccgtggaatacggtcacggctgcaagatcggctacttcgcgcaggagcacgacaccttggatctgaacgccaccgtgttggagaacctgcagcatgtggcgcccgagctcgacaacacgcaggcccgttcgattctcggctcgttcctgttctccggcgatgacgcgatgaaaccggcccatgtgctttccggcggtgagaagacccgtctggccttggccacgctggtcacctcgcgagccaatgtgctgctgctcgacgagcccaccaacaacctcgaccccgcttcccgtgaggagattctgaaggccattgccaagtatgagggcgccatcgtgctcgtcacccacgatgagggcgccgtcgaggcgctcaaccccgagcgcgtgctcctcatgcccgacggcgacgaagacctctggaatgattcgtacctcgaactcgtagccgaagaatagtcctacctcttggctcccctaccgggagctgtcagcaaagaacgggttaaccctaggttcccctcgctgaggggagctggccgccgtaggcggtctgaggggagtctcgcaagcatgcaaaggaatcaaccatgccaaccacaacaggccagaagatcgccatcgtcaccggcagcgcgctgggtttgggctacgagctcgccagccaactcatcgccaagggctggctggtggccggcatcgacttcaacgccgaacgtcaggccgagctgagcgcgcagtggccagccgaatcctaccgcgccttcgtaggcgacatcaccgacgaagcgtttgtcaaggaatccgtggcgagcatcgccgcgctcggccacatcgacctgctcatcaacaacgccggccagccttcgttcaaggtgcccaccgcctatgaagccgctgacattgacaaatgcctcaaggggctcaaaggcatgattctgtggacggtggaaaccctcaaggcctgtggagagcgcgacgtgaaaatcgcccagatcatgagcaccgccgccacgcgcggcaacgcgaacgaaagcgtgtactgcgccaccaagtggggcgagaagggctataccaagagtctgcaggccgcatacaagggcaccagcgtcaaggtggtcgccgtctatccgggcggcatcgacaccgccttctaccgtgatagccacgactacgtctccgaagccaagcagcacaccttcatgcagcccggtccgctggccgaagtcatcctcttcaacctgatcaacgaggccaacctcaccgtcaccgacatcgagatcaaccgcaacagctgagctggcaggttatacacatatccaccgattcggccgagctggttgcgcgcagaagttggttatgccatcgtgagttgtatccgtgaataacgcggttcacggatacaaccattgggggatggcatggagtcctatgcatacaacacgttcttcacacttgatgaggcgcgagacctcgcccagaaaacactggaacaatgccgtgccagatcgatgcgcacttcacaggagctttgcttcagccatggcaccaggctacagcttgctggcatgacggccacgctgaattacaagcccaactatgaccccaacaaactgcacgttacggtgtccggggctgaaagattgtcgaatcttaccgaaacgcaatgccattattggggccatggcattgaccagacgatgattgatgatcttatcgccgtggtttcagtggaacaggcgctgtgtcagatcgcacagttcgtcgatgtggaaagtatggtcattgccttggattgggccacctgccgtaatgagcatttgaaacagacaacgaaagacaagatatcgttgttcctcaccgatataggtaggttccccggtatcagattatttcgcaaagcgctctcgttgtgcagagagaacaccgattcgccgcaggaaagcatccttcgccttgaatcggtaaaacgtggattacccgaattggaggtgaatgctccgatatacctcccattgcagaacaaagaagtgattgtggacatggtgtatccgaatgatcatgtgattctggaatacgacggacggtaccactatgaccgaaaccgatgggaaggagatatcgagaaaaggaacaacctctccttcgcgggctataagacttttcccgccacaagaagaacgttcgctaccacgcagaatctggatgaatacttcagaatcgttggaagtgcaattgcggaataccgcaataccgggtcattttcacaatgagatatgaccggacgcattcattaggtcgattcttcattcattaggtcggtgagctctgacagtcaccactggaatggtgccattccaacaccgacaatcgcagcctcatgacctaatgaatgaagaatcgacctaatgaatgattggaagcgttccgcgcaacgttatggcacccgcaagaagccggaacccggaatatgtctgttatcgtgggggccaagcaacaggtgaaggattgagtatgcacatcggtgacgatgagtttgaacgggccattgaacaggtgttggatgatttgcctgaacggtttgcgcgggtgctggagaatgtcggcatcgtcgttgcggacgagcccaatgagcgcgaactggccacaatgagcaatccgtgcggtgagctgctcggactgtatgagggcatacccatcacgaagcgaaccacgggctacagcggcgtgatgccggacgtcatcaccctgttcaaggggtcgcatgaacgcgtatgctcaacacgggccgagctacgccaacagattcgcaaaaccgtgttgcacgagatcggccattatttcgacttcgatgacgagtatctgcactcgcacggctactgaagcgctgctgtttcactagcggggagccgtcataccgccgtatgttgccagatctactgcaagtggtgcaacgcacggatgatggcgcaacggtcctcggtggttccctcgttggcgcacatggtgtgcgtaccaacgcggattgcgcaaggtctcggtgccggtggcctcatccgtggcgacgagcgtgtgcagatcgttggcgtactggaaatgcaggtggctgagcagcccgccctcggcgaacgccttgcgcgaaggcagagggttgatggccagcagccagcggaacgggctgtcttcggcggccgggcttgaagccagggccgcaatccggtgccgatacggttccaagtcaaacgcccgcaatcccatggcggccacgcagccgggggagagggacaggaattcatcggcctcgtaatcctgcacgatatgtcc

SEQ ID NO: 1300 - DNA, 4038 bp, Unknown
  R157_18m  MAG No. k141_8217
gattctacacgaaaacaacggtataaggacgcaagccgaaccggctcaccccccccaatgtctcccccatcacaccggcggcctgttcgattgtgcggttttgtgcgaatggctcacacggttcttggtgagaaccgttcgctgcgcacctgaccctagaaccggatcagcgccttgatgactttgcgctggtccatcgcctcgtaggcgtcctggatatggtcgaggtcgtactcggcggtgaacacgcgaccggggttgatctcgcccttgagcaccgcatccagcagaccgtcatcgaggtcatagtggcgcacgggagccgggccgcccttgatgccgatgttgccgtagaacgtgccttcggcgctgatctccacgtcgtgcggcaggcccacacgaccaatcacgccaccgcggcgaatcaggccaatcgccgtgtcgaaggactgcttggagcccacgcattcgagaactgcgtccgcaccatagccaccggtcatctccagcaccttgtcaatagcctcttggccacgctcgggcacgatatcagtcgcaccgaattcgcgggcgagcgccgcgcgatcctcgtgacggctcatggcaataacgcgcgtggcaccgcgcattttggcggcaatcacaccgcacaggccaactgcgccatcgcctatgaccacggcggtgtcaccgggcttgacctcggcagaaaccgccgcgtgataaccggtggacatcacatcggaaacggtcagcagcgaagcgagcgtcgcgtcatcgtagtcttccggcgaaccgggcaccttggccacggtgccgtccgcctccggtacgcgcaggtattcggcctgacaggcggagaagtagccgccgtgagggcatacggattcgaagccggccttgcataccgggcacttgccgcagctgtacgggaatggcacgaccacgaaatcacctggcttaacggattcgaccgccgcgccaacctcttcgaccacaccgatggactcgtgacccacctggctgtgcgcggcctgtccgctcagcccacggaagaaccacaaatcagagccacacacgcacgtgcgcaccacgcggatcacgatgtcatcatcctgttcaagcgtcgccttcggcacttcttccacggccatcttgccaggctccacgaaaatcgcagctttcatggtttcagacatacgttcataactccttgttttccggcatcgagcgcttaaggcccgttatcctcgtgttctattagacaataatcgccttgcattaaccaatagccataaaccatgtttcgccatacccatgaggtatggcaacaaccgagcaattcactgcgataggccaatatccgagatacgctcactgttcgattcgtcgccatgagtaatctggagaaccggcgatgggacccgcctgaacttgtttcgaaccgcacactgctgatagttcctacacacgatttgacattgcatggaatcgttgtgtcttcagtaggattcagcggtttcaggaaaggctattatgggctcgcaatccccatccgcagatgcccggccgggcacgcgcacggccactcctccggcgcacaaactccccgatatccatcttgatattgtgttggtcgtcttctgcggcggtgccatcggcaccgcgattcgctatgcgttcgcgcagattcccgcagccggcagcttccataccggcacgtttgtggccaacatgctggcctgcttctgctatgcgggtctgaccgcctatttggccggctcttcccggttcgacacgcgtgccaaggagctcaccagccgtgggctcggcatgggcgtatgcggcggtttgtctacgatgtcgacgttggcattggaaggcttcaccgcgattcgcgacggtcaggtggcggccggcattgcctatctactggtgacgttcgcgctgggtctggtttgtgcgtctgccggcgtgtgggcaggaacgcatctggccggctcctcgaacgcatccgccgaagcgtccgctgatacgaatgccgctacgaccagcaagggaggtaaggcgtgatgaccgtattcctaccaatcttggtctgcctgtgcggcggcgtaggcgcctcctgccgctatctgcttgacgcgaccatcaaaacgtattggcaacacgcattcccgctgtccacattcaccatcaatctcatcgccggattcctgaccggtctggttgcggcgctggcactgggcgggacacttgatgaaccgtggcggctggtgctggccaccggtttcctcggcggattctccacgttctcgaccgcgatcaacgaaatggtgacgctcttccacaaacgccgctaccccacggcaacggcctatctggtgctgtcgctgggtgtgccggtcgttgctgcggcctgcggttttctcgtctgaccgccacgacgattcccgacgcggtcagcggtatcattgcgaggtcgaacgtcacaggtacatccgggaggtatatgggcatggcgaacaatggagcggatgtgaagcacaatcagggcgcggacgtcacgaatgcctcggccacgacgaacactgcggaaaataccgtgggcacggcaaccccgaagcaaaatggactcgccgtgttgggcaagtatatgggtgtttccgccacgcagaccattgtggagtatgcgacgttcgccatcctgcacttgatcggcgtgccctcgcagatctccaacggtatcgccgtggtgtgttcggcgacctacaacttcgtgatgaaccgcaacgtgacgttcaaatcgtcaagcaacttcacccgttccgtgatgcttttcgtgctgctgtggatctggaacttcacgttcagcacactgctgatcggctggatgccgggcgcgacggacctgagcccgtatgtggtgaagttcattgcgatggcctgccagttcggctggggttatccgttgtgcaagtacgtgatttttaggtgacgcattccaattgctcactgtcgttcgccttcgcctatttgtatttggagcgcttatcagaagaacagcatcgcaacgcctgcggcgaagcacatgagcagaatcgatgtcaggaagctggcgagcatcggcttcttgcccttggaagcgatggccttgaagttcacgttgatgccgagcgcggccatggccatgccgagcacgatgtacgcaaagtccacgagctgcggggtgatggaggcgatgagcggcacgaaggtgccgatgatcgaagcgccgatgaagccgagcatgaaccacgggaaggccacggtcttcttgccggtgttctccacctcggagtgcttcttctcccaccagatagcgatgatgatggccgcgaacacgagcatgagcacgcgggaaagcttcatgatggtggcgatgtccaccgcgccgaaagcgtcgccggcggcgaccgcgtgggcgatttcgtgcagggaagcaccggcggtgatgcccagctggtccttggtcatgccggccagcgggccgagcgcgatctccagcaacgcgaacacagtacccataatggctacgatggccacggccatggtcacgtcgttgtccttctcgtcctgcttgtcctcaggcaccttgatggaaccggccaggcccatgacggcggccgcaccgcagatgccggtgccaccggcggtcaggatggcgagcatcgggtcgacaccgagcttgcgggcgatggcatagcacacgatgatggtcagcgtgacgaccacagctgcgatcggcagacacttgatgccctgcgtgaacagcacggcgaggttgagcttgaaaccgagcaggatgatgccgaggcgcagcagcttgttggaaatcaggccagcggcgtccttgacgcctgccttgcggccatcattggaaccgacgtaggcactgcggatcgggaactggatgatcataccgatgagcagcgcgatgataagcgcgccgaacaggctgaatccggggaactgcttgagccaggaggcgaacagcga

SEQ ID NO: 1301 - DNA, 22458 bp, Unknown
  R157_18m  MAG No. k141_8318
cgcgccacctgtgccatatacggtttgagatatttgccgacgcgagcgatgtcgtggaggttgatggactcctccagctcctcatcctcgcggaatgtattgcgttgtgccataagtcctcttctaaaacccctgtgcggcgccggactggagtccgagctgcttgtggtagatgtcccagtagcggccgtgtgcggccacgagttcggcgtgcgtgccgcgttcgacgatacgtccgtgctcgagcaccagaatcaggtcggaatccttgaccgacgagatgcggtgggcgatggcgacgatggtcttgccgccgtccatctccttgaggtgcttctggatctccgcctcggtctccatatcgacggccgaagtcgtatcgtccataatcaggatcgacggattgtccgcgagcgcgcgggccagcgacaggcgctgcttctgcccgccggacaggcccacgccgcgttcgcccacgacggtgtcataaccctgcggcatcgacctgatgaaattgtccgcgccggcgatctgggccattttccggatatatcggtcgtcgctatcatcgctggcaccaaaaccgatgttgccgccgatggtgtcggagaacaggaaggtatcctgcgccacgatgcacacctgcgagcgcaaggtggtcagcggccagtcgcgtgcgtcgatgccgtcgatgagcacatggcccacggtcgggtcgtagaagcgggagataaggctgacgagcgtggacttgcccgcgccggtttcgccgaggatgccgagcttggagccggcgggcacggtgaagtcgaggtccttgaggatcggggtctccgggtcgtccgggaaggcgaagctgacgtggtcgaagcggatgtcgcccttgatgtgcagcgggcaggacttgcgttcggcggactgctgggcaccggatgttccggaagccccgggcgctccggtagcctcatcatcgtgcttgacttgctcgacgatcgtgaccgcctgcttgacggcttcggccgcatcgggcttctccacgatgcgcggctgttcggtgagcagcttacgaatcttgatgcagctggcgttgaatcgctgccagtcgttgatgagccagccggactggcgcaccgggccgtcgatcatccacaggaaggagttgaaactcaccagattgccgagggtcatgtagcccttgatgacaagaaagccgccgaggccgagcgtgatgagctgcagcgagaagccgaggccgtccagccaaggcatgtacttgcgcgagttgtaggccagggccatgttgcgctgcatgtaatcgtcgttgtgctcgtcgaacttttcggtctcgtacggttcgcgcacgaatgccttgaccacacggttgccctcgatgttctcctcgaccatggagttgagggaggccagcgagttgcggatggcgaagaacagcgggtgagcgtgcgtggacaggccgcgcgtgagcacaaaaatgaacggcgtgacgcaggccaggacgagtgcgagtcgccaatcgatggcgaacatcacgcacagggcgcccacgaacatgaccacgcagtcggcaatctgatagctcacccagctcaggcagtggcggatcgcgtcggtgtcggaggtcaggcggctcatgatgtcgccggtgcgcgtgtggttgaagtacgtgaagtcgagctcgtgcagcttctcgtattcgtcggagacgaggcggtagaccgagttctggccgaaacgctccatccacatctggtagccgtatcgcgcgcccacgcggatgatggtcatgaggatcatcagtccacacagacgtggcagttcgtcggtatgtccgccgacgatgacgcggtccacgatgataccggacagaatcgggatggtcagggccatcgtgttgttggcgatgaacagtagaagcgcgcctgccacgcggggcaggtctggtttgcagtatggcagcacccatttgaggttgcttgcgctggtattgattcccggatcgacgtacatgtgaggaggtcaccgtttcttggggattgtttgcttgtggtatggtgcggcatgctcctgcgccgcacgcggcaatcgctgccgccgcgattcacgatcagccgtgcttcgcactgcgcctgtcattggccgcacgaccggagctctccttcatcggtcgaagcacgttcgactttcgcaaacgcgtactagtctagacggcctgcgtccaatcgcaacagcccgcaactctgcgtgttccccgcattagcaacgcggcacggcccgctaagcgcaacattccccggaatgcgtcgcggcacacctccgaacaggtccaattcgcaacgcattcccgggaaagtggcgcatgtcatatcacgctcaaacaacccagcatatatatgggcaggtattcggttcggccaacagtctccacgttgccatcatggaacacgtaggcatgggcaaaccgataattgtcggtatccagcaggttgttcatggcccgatgccgcgtatagtccttgcctgatttgatttcaaccagtgaaatatcatccagaccttgctgcactacaaaatcaacttcaccaatacggttctggttgaagtaatgcagttccaatccccgtgcaaacagttcctgagccgctgcattctcgaaaatcgacccgtaattcatactggatcggtgattcacaatctctaagtccacactgcgcatcaaacgggaggtcagcaaaccgacatcgttcatgtacagtttaaacgtgttctcgtcggcatgctccgtcagcgggtattcagggtcctgcacgcgcgaagtaggcaaggcgatacctgcgttcgccaaccaatcgaacgccgtctgcatatgagcgaacctgatattcttgcccaacttggagaacttgaatcgcttgttttccgcattgagctgacttggaatcgcctcgtaaatgctcttgatatggcgacgttccaccaaatcggagacgtatttggtgatgtcgtattcataggtatcgaatatggcctgctgagtattgcggaccttgacaatatcggcaaaatccacgaatgactgcactgcgtcgggcatgccgccaatcagcagatacttgtaccacaggtcggtgagccgttcatgtagataatcgggaacctcccgtcgatccgcataacattcacgcagcgtatcgagagcggactgaggcagccggcatgcagcgcagaactcatagaaattgagcggatacatacgcatcgtctgcaggaatcccaccgggatcgagcgcacattgaacacatcaatgcccagcagggagccagaaacgatgacatccaatcctttggcgccagacaggaatttggtccacgtgagcatgtcctcacacgcttgtatctcgtcaagaaacagcagagtcttgcccggcgtaatttccgtgccggaaagtaccgataaccgcagtatcaggtcttcggtgtccttggccttgcttaccgtttcgaccgcctgaggcatttcgatgaaattcacctcagccacatgctcataatggtctgcaccgaactgctcaatcagcgtggtcttgcccacctgccgggcacccgtgaccaacaagccctgcttggttttacggttcttccaattcagcaactggtcatatgcatggcgcttgagcatatttccctcctcttttgtggagaatgactgaaaacacgcaggtcatcacacaatcacatactgatatcatcttagcattcacgattttacatatgcaaaacgcactttgaatcacaaaaaacacaagaatagtgagtggttcattcacgttttacgtattgtgagacggaatcggcatctcccgcaacacgtgagataggcggattgtaggcgaaccggcgatacgcgataacccattcgtcggtgccgggaacgttcacgatgttgtggtgaccggtggcatacagcttgtgcgccgggtcctgttcgagcagcacgcgcggtccgcatgacggcgccaccaccaccgatttccgcaccttctccgacccggtcaagtggattgaccgcaagaacagcgtcatcgattcgaccatgctgcgagacgatgacggctggtggtaccgcgcttccaaggacgccgaaatcaccatcgaacgcacgcgcaatccgtacacctccgcctacgaggtgctgcgtaccgacgacgaccagcagtggtcgtacgtggggtcgctgaccgacattctcggcaatggccgttactcctggatgtacctggaaggaccgggattgttccgctacaacgataccgatgtcaagaccatcaacggccgcaagatgcgcttcggtctgatgtgcgatcagtacgccgaggccgccttcaagctgtaacccttaaggcttcaccactacaggccggtcgcggaccatatcccaagtcagcaaccggccgaaccatatctcgcggcttcagtcatccttcatcatcagtattcggtagcggtcctaaatcagctccgccatccggctcataatcactcgccaaccacgggcggaagcagctcccgactatccacagtgggacattggtcagccaatcctgctccttgtaattccgcatcgacgtacggtaaccgcaaatcccgtatttgtcgcacagccacttcaagctacgcttatgacgctcggtaccagctttggcctccaacggaatgattgcgccattacctgcaaagacaaaatcaacttctcccgtactgttcgcattcgaccagtacatcggtgtgatgccggcggccactaattgctggcaaacatactgttccgttaacgcaccacggaattcggtcagcccgtcatcaccaaggatcacgcttgcgggagtcagatccagggccgctgccagcagcccaacatcatggagatacagtttgaacgcggaatcatcacggtatgacggcaatggtgccgcaggtttttcgacgcgatacacccgcaacgcaagaccagaatcgacaatctgctgaatcgcggattcatattgcgccgcccgagcgccacgagcgatgtggccaaaaataaatttataccgcaatacacacttttcctagggttgcaattcgcgtattctacatttttcctagggttgcaattgtccaaaattgcatttttcctagggttagtaatgcagaatactgcacttttcccagggttagtaccctgaccttccctaatcacacggtgttgtaaaggcgggcggggaaggcgtcgcggtattggccgggggtgagtccggtgcggcgcttgaagacgaacataatagaatatctcaagcatcgatgaatacggagatgatcacaatggctgattacatcggaacagtcaacaaccaatcttcaacacagcccaacggtcacaattcacatagcaacaccaccgagtcgctatggcgcggcacggattatggcaaatggttcgtagcggattcatgcacgtcgctgtcatcaagtatccaaggtttcgcaatgccactcatcgcgcagaccgtcacgggctcaccggcacaggcgacgctgctggattcaatcatgaccatgatatcgtcggtattgcggctgccaggtggcgtggtacaagataagtacgaccgcaaaaaacttatgattgcgtttggcctgattggtttcgcactgttcggcatatgcgcggccctaggatgggcgggattactcatatacccggtgctgatggtacttgcgatatgcctcggcatacgctcaggcctcctaggaaccacgagcaacacgatgctacgaggcatcgttcccgatcaattgctgcccaaggcgtcaagcctcaatgatggccgcgatgccgccctcgaactcgccggcgcaccagtaggtggcgtattgatcggcggcggtctatggctgccattcgcagtcagcgcgctgctgaatctattggaaaccgcggcggcgatgcggatcacaaaatactggcatcgtggcgggcggaccaatacggagggccgcgcccttgccgacgatgaggccgatgagaatggcgatgcggccaacatcactcaggccgctgacgagcaggcaacgaccacgacatcatccgcgtcacagtattggcgtgagatgttttccggattccgctggcttcttagcgagcgattcgaacgtcgcctgattttgtcgagcgcgctggcgttcgcgtgcttcaactcgttcctgctgattacggtgctctcgatcggctccgacccatcacatgtggtgtcagccagtttcatgaacgtttctgtgtctgtgggcgtcatcgttggctcgctcatctcttccgtgctggttcagcatgtgcgcggcggcatagtcgccgtatcgttctacgtgctgatgagcatcggcgcgctcggcgcagcgctggctccgtggattcttgcgcgtatggcgtttctggcaatttcgctgctggccctaccggccggcaatgcggtaatcaacggattccaatcattgctcatcaacaaggagcatatgggccgcgtattcgccggcatgggcatgattgagacgattgctgccccggtgatcacatttctgtccggcatcgccatgcaacactggggttactcagtcacgtccgtggctttgggcttgtgcatcgtggcggccgcgatccctgccgtgacaatgagggaactggtcacactgcctaagccggatggctgggaggaccatatccgcaaatccgggctcaccaagttctgacaacaagtaagggcgactatctcccggatttgtgacgctcggcaaccgtcagcgtcacaaatccgggaagaggaaggtggatacggtttcagccgcgcgggcagcaaggtggacaaatcgttgccgggatggaatcgcggcaagtatgcaaaagcctcccattcgcgcgcgacgcataagcgcgcaaatgggaggcttcccaaccgcagcatcatatgcagaaataaggagagtaaggcatatgctgccgcggtcacaccccgccgggaacctgccgcaggccgcgtccggcatcgaaagccttgcagtcgatgcgtgcggccggccgttcccggcgcggtggccatgtcagacgtcagtcagacgtcatcacttctgccagccgatgtcctgcggcaggttgccggcgaagccggacgggccgtagttggccagacccttcttcgcaccgaggtacgaagccgggttggagaccgggatggtgccgtacagcttgagggcttccttctcggcggcgttgacggccttggtctgctcgtcatagtcggagaggctgccagccttcttgacgagctcgtcgatcttcttgctgcccacgtaggagaagttggacgggccgtcggaggtgtacagctgcggggcggacaccacgaaggtcatggcgctcggagcctgccaagccatcggcagcacctggtagttgccggaagacacggtgtcggagaacttggactcggccacgttcacgaccttgaccttgatgccggccttcttcatcatcgcctggtaggcgttggcgagggcctgctgggtggcgttgtcaccgaagaaagtgaaggagatctcaagggtcttgccgcccttggcgtagtagccgtccttgcccatcttgtagccgtcggcctcaagggttttcttggcgttgtccacgttgtacttggcctcggcgggcaggttgttctcgtagcccttctggaacggcagcagcagctcggagcccggctgctcggccttccagttcaggccctggaactgcacgttgttgtaggtgttcacgtcgaaggcctgagtgatggccttacgcacctgcaggtcgtcaagcggcttggacttgctgttgtactccagcacgcgggtcttggtgctgtagccgatgcgcagctgggcgtccttgacggaacggatggccttgatgtcgtccttggtgttggcctccacggcgtcgatctcgccgttctggaaggcgttgagggaggcggtgtcggccatctgcttgtagacgatcttgtccagcttcggcttgttgccccaccacttctcgttcggcacgaaggtgacctgggagtcggagaaggagtcgaccttgtacggaccggcggcccactcgttgtgcgggttcttcacccagccctgggtgaaggtcttcgggtcggcggccttcgggttcaccagagcgccgaagacttcctgccacgggtagtacggggtcttgtaggtcaccttgacctgcttcgggctgtcgccctgctcaacgctagcgatacggtcgaagccgtcggtgctcggcgggttgtagtccgggttggagccgttgttggcttcccacgtggccttgaaggcggtccagtcgatgtcggagccgtcgttccacttggccttcgggttgatgtcgtactgcacgaccatcgggtccttgctcacgagcttcatgtcggtcaggaagtccgggttcaccttaatcggggagccattgacctggtcggtcatgagcaggctgggctggtaccagctccacagctcggacatgtagccggtgttgccgtcggaagacaggtagttccagttcgggccgacttcgacgatggacagggtcagcgtgccgccgtccttgacgttgtcacggctctggtggttgtcgtaacgctcggtgaccttcggcatgggcaggtcgccggtgtacgacgaatcgatgccggccggcggttcggtggcgctcgaggcattgctggaaccgttgccattgcccgcgccgcagccggcaagcagcatggcaagcgccgcagtggccgcggcgagcgcggtcagcttacgtgtcttgttcattgttatttcctcctctatatggttccgaccgtcatgcgaaatggcatgcaacctgatggccgctcggtcgggaagtgtcatacggccgcagcgccgggcgttcgccgcggcagcgggcctgttgttcggcgctcagcttgggcatgagcgggcagcggcccatgaacgggcagccttcgaacgtctcggtggggctgggcacctcgccctgcagcacgatgcgctggcgggtgcgttccgccttcgggtccggcaccggcacggcgctgatgagcgcctgggtgtacgggtgcaacgggtgctcgaacacgtcttcggtgtcgccggattccacgatgcggcccaggtacatcaccgccacgcggctggagatatggcgcaccaccgacaggttatgggccacgaacaggtaggccacgcccagcttgttctgcaggtcctcaagcaggttgatcacgccggcctggatggacacgtccagtgcggagaccggctcgtcgagcagcacgagcttcgggttgaccgacagcgcacgcgcgatggcgatgcgctggcgctgaccgccggagaactgcgtggggaagcggtccacctggtcggggttcagctccaccagacgcatgagttcaccgatgcgttcgcggatctgctctttggagtagtgctggaccttcatcggctcggccaggatgtcgtagatcggcaggcgcgggtcgagcgaactcatcgggtcctggaagacatactgcacggccgaacgcagctcgcggcgcttctcgcgcggaatcttgtgttcgagcttggtgccgaacatctcgatctcgccgtcctgcggctgcttgaactccatgatctccatgagcgtggtggacttgcccgagccggactcgcccacgagcgccacggtctcgccttcgcgcacgtccagcgtcacgtcgtccacggccttgacctcgccgatcttacggcgcaggaatccgccggcggtcagcgggaaggtcttgcgcatgtgcttgacgtcgagcaccatcttgcgttcgtcgcgcgggatgccggcgaacttcgacttggcggcctcggccaccgtgtacacgtcgtggaaggtcaggcccttgtccacgatctcctgggtgcggtggcaggccacgaactggcccgggcggcccggcaccggctccatggccggctcggtggtgtggcatatgtcggtggccagcgggcagcgcggcgcgaacgggcagcccttgggcatgttgaccaggttcatcggggagccaggaatcggcaccaggcggctgttgcgttcgcggtcggaacgcggcacggcacccagcaggcccatggtgtacggcatggccgggtggtcgaagatggagtcgacgtccgccttctcgaccgggcggccggcgtacatgacgacgatgtcgtcggccacgccggcgatcacgcccagatcgtgggtgatgaagatgacggccgcgccggtttcacgctgggccttgcgcagcacttcgagcacctgggcctggatcgtcacgtccagtgcggtggtcggttcgtcggcgatgatcacgtccgggtcgttggcaatggccatggcgatcatcacgcgctggcgcatgccgccggagaactcgtgcgggaaggacttcaggcggtcctccgggtccgggatgccgaccaggttcatgagctcgatggagcggtcgtgaatctgctgttcggtcatcttcggattgtgggtgaccagcgcttccttgatctggtcgccgatggagaacaccggggtcagagcggagagcgggtcctggaagaccatggcgatgcccttgccacggatctcgctcatctcaagatcggacttgctgagcaattcctcgccgtggtaggtgatggagcccttgacgctggcgttcttgtccagcaggcccatgatggccatggaggtcacggacttgccggagccggactcgcccacgatgccgagggtcttgccggggtacaggtcgaagttcatgccgcgcaccgcgtgcacggtgccggcttcggaggcgaagctgacggtgaggtcgcgtactgaaatcaccggttcggatgccatgccttgcgctcctgtggtgttggggttggtgttggttgttacgttgcttgcgttgcgttcgtcgctcatgatgcccgtctcccctctcactcggccttgccgccagaacgggagtacgggtcgatggcgtcacgcagtccgtcgccgatcagctgcacggagaaggtcaggacgaccagcaccacggacgggaagatcagcacccatggcgaggtctgcaccacggactggccggcgttgagcagcgtaccgagcgaggtgtcgggcgccttgatgcccaggcccaggaagctcagcgaggtttcgctgttgaccgcaccgatcacgccgagcacggtgttgatgaccagcaccgaacccaggttcggcaccagatgacgcacgatgatggtgaaggacggcacacccatgaacttcgccgcgcggatgtattcgcgatcgcgcaggctcagggtcagcgtgcgcagcgtacgggcgtagccgatccaaccgaatgcggtcaggccgatggccagccacagccagtcgctgccgccggccgccatgccgacgatcagggcgatgagcaggaaggacggcacgacgagcagcatatccagcagccacatgcccacgcgctcgaaccagccttcgaagaacgccacggccgtgcccaccagggcggcgatgatcgtggtgccgaacgagctgaagataccgatggtcaacgaacggccgaggccgcggatgatcatcgcgtacatatccgagccaccgaccgtggtgcccagccagtgctgggcggacggcggcgaggcgagggcggcgaaatcgggctcatcgtagctccactgggagaatttcgagccgaaaatcgccaaaagaatcagcagaatcagcaccaccagacccaccacggccgaggggcggcgcatgaagcggcgcacgtacagctgcatgcggccggtgcggtggaagtcgtcggcgctggaagcctcctgggcgttcctggcgtcggcggactgcggttcgctgccctgcggatcggtgagttccatatcctgggcggcggcgtcggagaccatgttttcgttgtcgttcatcatgttagatcgtcctttgcgcggggctcagctcagtcggatacgcgggtcaagccaggcggagaagatatccgccagcagcgcgccggacagcgtgcacacgccaccgaacgcggccacggccacggcaccgttgatgtcgttgttggcgatggtctgggtgaagtacatgcccaggccgttgatggcgaacacgttttcggtgatcaccgcgccggtgaacacgccggcgatggagaaggccacatccacggcggtcggaatcagcgaggtgcgcagtgcgtggcgtcgaatggccgcgttgagcgtcaggcccttggcgcgggcggtgcgtacgtagtcggcgttcatggtgtcgagcagatacgtacgctgggtgaggtggtagcccaccatgcccggaatcgtcatcacgatggtgggcaggatcaggtgctgcagatagtcaaacacccaaagcaccgggttggagccttggtaggagtgcaggccggtcacgtagaacgcgcggctgcccacgatgttgttgaagttgatggccagcagcaccaccatcaggcccatgacggcggccgggaccaccaggaagaacgttgcggtggtgttgagcacgcggtcctgccacttgtactggcgaatggccgtgtacacgccgatgctcacgccgaagaggatggagagcacggtggcgagcgtcaccagctgcagcgaagcggagatacgggaggcgatggccggcgccaccggcgactggtccgggctcaggccccagttccactgggtgaggatgcccttgagccagcggaaatagcggatgacgaccggcgtctggtcgttgatgttggccagatcgagcgaccggttaatcgacgcgatcggcggatgcggattgcgcgacatgtagttcgaacgcggatccatgaatgcgctggccaggaaatacgtcatcgatactgccacgaacagcatgatcacgtagttcacaatgcgcttgatgatgtacttgaacacccaaccacctcccagataactgaagaagtgatacccccccccgctcaaaaccacaaattgagttcaatatatggaatatgggtattgacttttccgactttttcctgtacggaaaaccgcgaaaacacttactgtatattgggcaaacatccgtttgttaattttgtatttcctgagcctttgctggacatgccttatactttcgtgtcagcagtccgccggcccggatggtgacagtccccgccgccggcaacggattatccatcagcatcatcagcatcagacaggggcatcatgacgacagacgccagcgcacgggccatcaaacccgaacttctacgcacgtacaccgaagacttcaacaaggaccgcgccaacctgatcgcggcggacgcggcggtttcggccggcgtactcaaggcggccaccgactatcgcggcgtgcgtgcgctgccgcgcgacttctccatcgaactcaagcagggttcgatcaccaatcaggagcgttccggccgctgctggatgttcgcctccctgaacacgctgcgctacgagcttatgcatcgctggaaccttgaggacttcgagttctccgagacctacctcttcttctgggatgcgatggagaagtcgaacacctacctggagaatgtgctgcgcacgctcgacgagcccaccgactcacgcctgttcgaggccatcaactggggcccgtccgatgacggcggctggtggcagatgttcgccgcgctggtgaacaagtacggtctggtgcccaagagcgcctacccggagtccgagaactcccgtaattccgatgatttcaagcagtacctcaactccaagctgcgcgagttcgcggctgagctgcgccgccgttcggctgcgggcgctggcgaggacgagctgcgcgcgctgaaggacgagtacatgggcaccgtgtaccgcatctgcgccgtgtcgcttggcgagccgccggagaagttcgacttcttcgcgcgcaccaaggatgacgccgaggataagaagggcgaggcctgcaagtgcaaggccgaggccgacgcagacggcaaggccgaatcctgcaagtgcggcgactcctgcaaatgcgagggcaaatccgacgccaaggcctgcaagtgcgataaggacaagtccgacaagccgaaaaccggcaaggacgagcgcccgcagattcgcgagatcggtatcaccccgctcgagttctacaagaagtacgtgccggtggacgtcaacgatttcgtgacgctggccaacgccccgctcaagaaccgcccgttcaaccggcgctaccgcatccgcttcagcgcgaacgtggccgaggctggcgatatggaattcgtcaacgtgccgctggacgtgttcaagaaggccgcgcttgaccagctcaccgccggtcacccgatctggttcgcctgcgactgcacgcagttcgcgctgcgcaaggatggcttcttcgaccagtccgtggtgcgcgtcgaccagctgttcggcactgaattcactggcgacaaggcccacggcctcgaatacggcgacagcccgagcaaccacgccatgaccttcaccggcgtgaacctcggcgaggacggcaagccgaaccgctggaaggtggagaatagctggggcaaggacgccggcaaggacggctactacgtcatgtccgacgcctggttcgaccgctacgttaccgagctcatcatccgcaaggaatacctcgacgacgccacccgcgccctgctcgccgccgaaccggtcgaaatcgacccctggcagcctctcacccgccgctgccgctgacgttccgctggcgggagcatatatttcgaatgccccttctctctgttcagagagaaggggcattacgttatgcgagtacgcccggccgcacctattcgagactatcgcggctgagctgagcaaaagtgccgtcatcatcggccaattgccggtaggttccggcctcgctaattgttccgaactagttatccacagagttatccacatctcccgcaagctagagccacataccccggttttcatggcgagcatgtgaccgctgcgctacggtggcgtcatgaacgacatattgcccactccaccgcccggcgtattcgacgacgaaccgtccggctggccccggccccacacaccgggcgttgcgtctgcgcgcaccatcaatcctgagctacgttcatcaccacgtatggcgagttccgcgccaactgtgattacaggccctgtgccgccagcaatgagcgaaaccctcacccaacgtaagcgggaaatgcttaaacgatgcacggacgccgcgcaacagctcgggcaaccggtgctcttcggcatggccacatcgctgatactgcaatccgtgccgcttcccaaggattgcgatatcgaccccgccgagctccataccgtctccgactcacaccgcacacgaatacgtgccatcgtgccgccaacgacaccacacatctggaagccgctgagcgatgcgcacaatgtgcgtatcaacaaacatgtgtacgcactggatctgatacacacttgggcacaactcgccgctcatatatcgctcgaatcgctggtcatacttggcgacgcaatccttacggcaatcgcccgcaagccgggtctggcgaacggccgcactgctgacggcatttatcaggacttcgtgcggcaagtcactggactcccgaaattcaacgcaaaatccaagtgcatgatcgctcttgcattcattacgccccgcgtggactctccgatggaatcaaagacccgcatcgctacgacgaaatacgggcttccgccagccgtgacaaattacacggtgcccggcgcgacattcagcaacggtgcgccgataacgctcgatctcgcttggcccgaatttcgcgtcgccatcgaatatgacggcgatcatcatcgcaccgacaaaaaccagtggcggcgggacaacgacaagcgcgaactgctgcgacatcatcattggatcatcatcatcgccactgccgcgaacatggccgatgagccatcccaagccgaactcgcctaccgggtcgggcgacagttggcattgcgaggtgccgtattcgatttcactttgacggcaacgccactcgatgagctcgcccggcggaggcgacgaagaatataacgtttatcgcgaaagtcgtacagtatccatgttgcgccgacgctgcgcgactcggtgtccgtgtccgatgtcccggtagcgatgtcaatcgatttatgtgtggaccgggccagatttcgctgtcccggttctccatttcgcccctttttgagcaaccaagacaaaatttcattcacctatcaccccaccgtgcaatattcgccatcgtacatcggcggaattccggggttttgggattacggataatgggcgtttacaaggggggctgtcccggttcccaaaaagaagccgaaatcacgaaccgggacagcgaaatctgtcccggtaatcgcgtcaatcggttgccgtcatcaccggaacatcaactgcgcataggtcgaacgcttcaatgcgcaacaggcatgcgaccatatcgcgatagcgatattccgacggaagtatgggactcaccacgcgaccaatattatttgccgagctttggagcctcgtgcttggcgtggcggatcacggcatcggggaaaccggcgtggatgtagtcggacagcatccgcaatagcctctcgtcaaaggtgtgccgctcatcgctgctggcatcgaccaggatgaaatcccatgagtattcggtgtcaccgtcgttgatgatgagtccgcggccagtgatttttgcggccagcaacgcggcgatctgtatggcgcctcgcttgaccacggccgattccgcttgagtcaggttgcccgaaaatgtgacggtatacatcatcagtccccccttctttgttattttctagaacagcaatgccttattgtaaacagacagcactctgccataatccttttttcaatatgcggcccatggcattcccagcattaaaaaaaaaagaaacccggcggagggggccgccgggtgagagagaagagagaagaagggttcagttatggggttcgaagaacctcgccaccggtatgaacttcattccgttgacatcttctatataaccgctccatgcttggcgaattgatgtgcttgtctgggaaaagtcttggcggagtgtgacgaatttgtgacgcccgccgacaaccggcctcgcattgtcggggcttgaccgcacatacggcaacgggccacctcgcaacacttcatgtgcgaggtggcccgtcagctacgagctagcaatgccgaatcactcggcggcgagcttggccttctcggcggccagacgctcggcttcggcggcacggcgagcagccagcgcttcatcgaagcgagccagctcctcttccacggcctcggtcggaatcttggcgaagatcggtgcgggcttgggcaccacggcgccgacctcgattgcctcgctcttccacgggtgcacgttcacaccgagctcgtaatcgccggtgataatcggatacgtgaagccgggcttgtcgagatcctcgacttccttgagctcaggcagcggcgagaaggtaccggtgccgccgagcgcctcccacaccttctgtgcggagtgcggcaggaacggcgcgagcaggtggttcgcgtcagacacggcctgggcggccacgtgcagcacggtgccgagacgagcctggtcgtccttaatcttccacggttcggtggcggaaatgtacttgttgatgtcgccgaccacacgcatcgcctcggacagggcgtgcttctggtggtgggtttcgatggaggagccgaccacgtcgaacgcggcggaagcctcttccagaaggccacggtcttcgttggtcatcgaatcctcgtccagcggcggaatctcgccgaagttcttgttgatgaggttggccacgcggttcaccaggttgccccacgaggaggcgagctcctcgttgttgtggcgcacgaactcggcccaggtgaagtcggaatcagaggattcggggccggccacggaaatgtagtagcgcacggcgtccacggggtagcgggcgaggatgtccttgacgtagatcacgatgccgcgggaggagctgaacttcttgccttccatggtcatgaactcgctggccaccacctgctcaggcaggttgagcggacccatcgggccggtttcgccgcccttggagcccttgccgttgtacgccagcatttcggacggccagatctgggagtggaaggtgatgttgtccttgcccatgaagtagtaggccgggcacgccggatcgttccaccattcacgccacttctccgggtcgccctggcggcgggcccattcgatggaggccgacaggtagccgatcacggcgtcgaaccacacgtacagcttcttgttcgggttgtcgatccagcccttcaccggcaccgggataccccagtcgatgtcacgggtgatggcgcgcggcttgacctccttgaacaggcccagcgagaagttgatgacgttggtgcgccagcccttgcgggtctccagccatgccttgttggcttcggcgagcgccggcaggtcgaggaagtagtgctcggtctgctcgaagcgcggggtttcgccgttaatcttggagacggggttgatgagctcgtccgggtcgagctcgttgccgcaggcgtcgcactggtcgccacgcgcaccttcggcgtggcaaatcgggcactcgccctcgatgtagcggtcgggcagggtacggccggtggacgggctaatcgccacctgctgggtgcccttgtagatgtagccgttctccaagcactgcttgaacatctcctgcaccacgtgctcgtggttaccggtggtggtgcgggtgaacaggtcgtagctcaggccgaggtcgcacagatccttggcgatcacgcggttgtaacggttggccagttcctgggcagtgaggccttccttctccgcctcgacgagaatcggggtgccgtgctcgtcggtgccggacaccatgagcacgtcattgcccttcatgcgctcgtagcgcgcgtagacgtcggagggcacaccaaatcctgcaacgtgaccgatatgacgggggccgtttgcatacggccaagcaacattcaccaaaacatgactcataaggcttgattatccggcgcggcggggacacgcccggatagctgccgcgccgccatcctcatcccactcacctatccgcccgtaacttcccccacatacttatccgtacaccgcttgcgcgcttatccgcatacgcattcgcacacgtatccgtacatgcatccgtacacacgtccacgcacccatccgtacgcacgtccacgcacatccgcacacacttccgcctgtcgatatccaccgagttatccacatcattcgcgcacctagtgaagttatgcacttatccaccgttttcgcttatccggtggcgcgcaagccgcatttctgcatattgttcggtcatggatatcacagcaggtccgatgacggacatcacaacagtcacctcgccggcaaccgcgcagcccgcggtgccgccgatactgtttaccaaggatctgccgggaccgctcagccttaaccgtctggccgccttcggcgcgttacgtaagctcgacgattccgccggctactggatcgagcattcgggcacactgtatggtcgcgcaaaaatcgtcgcggaggtcgccccgtttggcactgtggtgtgttcgatgaccgccgcttgggtatggctgggaggccccgactttccgagcaccatagacgtgatctccacatcgcacttccgctcggcatccgtcagccgccgcatccgcgtattcaaaagattgacgttgccggagcaaatcatcaagctcggcgggctgcctgtcaccacgccagcccgtacggcttgcgacctggtgatgagtcctgaagacatccccgatccttccaccgtcaacgcgctggtgtgccaactgatgtccgcgtaccagtttcggccaaacgactgtctgcaaatcgtcaaggagcatcggcatcacaagtatgccggacgcgcacgcatgttttttgaatcggtgcagaaggagattgacgaaccggctttggagcaatgcgcatgacgaggggattcatcgccaaaggacatcgcagaggccgccatgccgctcaccgtttacggcatttgcggcaggcgcaacggttgcctcgccacgcggcggcggcacactcatccgaatccgcatcgcgcgcaatctcggatatgaccgcgccgcctgaaccacccatcagacttacgcccgcggtggcatgttcgcccgatacggatgttgccgtgctctggcacatcgcatatcacgtgcccgaactgcgtaaatggctggttgccaatcccaaagccgacgcgcctttgctggaattggtctcgcagcgtggtgggcccggggtccggcaggcgttggaaatattgttcgagtcgatggaagcgtaacggggagataatcgccggctgctgcgctatcccttgattttcagcacagccgcatacacctgcttgcgattggccaacgatccgtcagccagtggatgctcctgcaccacttgcgcgatggcgtccttgatacgcaggccgtcctccaaagcacggtcgatggagagcacggccatgtcatccacgctcaacgtactgggcgcggccgcttcggcctcctcgttggacgcgccgccgatgaccagcaccatctcgccacggggcggatcatcaatcacactttggcgaatctcgccaatcgggccgcgacgaatctgctcataatccttggtgagttcgcggcacagggccatcgggcgattcgggccgaacgcgtccagcagatcgtccatcgaatcggcaatgcgatgaggcgtctcgtagaacacgatggtgcggcgttcgggcaacagcgtgcgcagatactgcacgcgctcggaatgctttcgcggtaggaagccctcgtagcagaagcggtcggtgggcaggccggagagggcgagcgcgtcgagcacagcggaggggccgggcgcgcaggtgacgggcaggccgcgttcgatggcacggcgcacgatggccaagccggggtcgttgatggtgggcatgccggcatcggacacgacgagcacggtggcgccggtttcgacctggtcgagcaggccgtcggccttgtcgcgctcgttgtggtcgtgataggcgatgacgcgaccgttcacatagacgccgaggcgacgggcgagatcgtagaggcggcgcgtgtcttcggcggccacgatatcggcccgctccaagagggccaccagacgggcggaggcgtcgccaacgttgccgatcggggttgcggcgagcaccacggtgccggcggggacggtcacggccgattcgcgggattgggtggcggcggattcgccggcatgaacttcatcattgcgttcaggcacttgcgtcacgctaccgtcagcgtcatactgctcattcaactcatctgcgcttgtcatactcccagtattgcccataccacagagcaatccacgacaatccatggcggaatcgaggcattctccctttgcaggggctgatttcacatgttccggaagtctacttccgtttcaaggggctcctcatccggtgaagcaccagtacaaacggctttgacgcaacgctattccgccattttggcggcatatctacttgaccatcagcccctcgaaacgcaagtagacctccggtaaaccccaaatcagccccttgaaacgcgagatggcacaataccaacgaagacaaatgaaaagaccctctgcggtggaatgaatgcagagggtctcgtggagctgacggtagtcgaaaccgcgacctcttcgatgcgaacgaagcgctctaccaactgagctacagccccttggatgttactttgctccgcaaagcaactcgcaacaatatagtacggagtgcggtcaaacgcaattcgtcatttgccgtgtcggcgtcgcaccgcattgccgcgaatggtgactgtgccgacgcagtactgtcaccccgcccccccaccagctccgcctattctcctgcggagaggtatccagcgctatttcaatttgcggcctgcgcaccacacctgttcgaccgtccaatcggtcggatcggcaaggttgaaatcggcggcgaagccgggggcgatgaggccgataggcaccccggtgaccgggttcggccggtcgaagccgaacgccttggcc

SEQ ID NO: 1302 - DNA, 6536 bp, Unknown
  R157_18m  MAG No. k141_8464
aggaacgatttccccgaaaccgtgcgagccctgctcgaccgcatggacgcacgcacgcgctccgatctgctcgacgacatccgagccgttgccgccgactgcgggttcgccgccacggtcaaagcggtggaaaccgtcatcaacgcgggacggaccgtcgaccgcgcggcgatcggcacatgtgccaaacgcatcctcgagggtgcgggaaccgaaggcgggcaggatttgaagcgttacgacaaatacatgaaggaggccgaatgagccggcaaaaaccgcggcagcgcggcggccgcgttcttgacaaggccacgccggaacaggtcatgggcctcgcccgcaacctgccgttgacgcacggcgtgcccgggaaggccctggaggacgccacgcccggccagctcggcttcctggccaacctgttcgagaaggagaacgcgagccgggccgaatccaaacggcggcggctgcccggacagctacgagacccgcggcgtcgtctccgcctcgaacctcgagtccggcagatggggcgacgtgttcggcgacggggacatggccgccgcggtcatcgaccgcatcgtccaccacggcgggatcctccgcttccatggcgaatcctaccggaacgaacactccctcatgaaataaaccagacaaacaacaaaacaaggaaccaaccgccgacggtgttcagattaagtgccgaacacgtccacctcaatttgacgaaatacagccttcagccgtttcggcctgtagggccggtaggactcgttctcgtcggacgcgaaccacgggccgcgtcccggctcgcggctgacggtggacttgtcgcggccgatcctcaacgcgatctggcacacgccgagcccctcgcggttcctcagctcgtcgatccggatgcgttcctgtgccgacaggtgggaataggctttcatatcgagtgcaacgctttctcttcggttgtggacttgaacacttccaaccatagacaggcgttgcacttctacctagaacccggggacgttgagaagttggttgaatatgctgttcatcaggcgctttgcggttgtttgtttatcttggtcgaaaacatcctacccggaaagcgctcttctcttactccctcaacaactcaacggagaaaccccacccacgaaaacagcaatagcgccataatttacgttttccaaccaaatttgagccctgttcttacgttttataaccagaataaggtgcactgggctacgttttccaactttggtgtctagctgagctcgaaccagctatggttctgaaactattctgatggatttaccgcagttcgcctgccaagtatggctccacgaatgcgaggttgctaccgcgttcgagtgagtggaggtcttgcatggcatattgccaagattcctcccacgttgtcggattgccgtgtattcgccgaagagattgaagggttgtagagaacaggttcgggttgcgggtaaagcggtctgctagtttgatggcgctgctctgcttgtgctgtgcgtctagattgtcaatcctaccgcgaaatgcgtgttcgaggttgcggctgacgtagaacaggcggtacgggaccatgagcgtggcgcggccgttcttcttcctgaacccatcgagtttcagcaaggcatccacgccgtttcgcttggtcgtgcgatccgcaatcaggatagtgcggtttggcgtgatgatgtcggtcgttgaatattgcgttccatccaccaatgggtcttcccgcacttggtcgtcagatgtgaacgccccgtctaggtcgcagatctggatgacatggccgagctggccccaggtgcggtcgtggtctctgaggtagtactccacgagttcgcgcaccgtctggacaggattgtccgctggatagaacccgttacgacgtcggaactcctcacggtggtttggcgcagtcaacacgtcgcagtggaattcctgcccttggaataggcggttctcgattaacgacgagaatgccggcacgagcaggctggcgtcgcttgctccttctacgaccagcaggacgatcttgcgtttagccacggttcaccttcgttccggaggtgttgagtgctgccagatcgtcgtcgatgtcatcgtcctcatcgggatggccggcggcatagagactgttgccgaacatgcgtggtatgggcgaatcatagatgtcggggccgctccatccgagctcgctggccgtcaggtaccgtcggcgctggttgttcgtggaggacttgcgggggatgatcgcgaaccggttattgggatcggtcactgtagtgcgaatgcagccgttcggcagcacttccaacgcacgcaggttatgggcggtgaacaccagctgccctgcgcacccgtccgccaactggtacagcatgtcaccgagcagcaactcgaacacgccggagtcgaactcatccacggcaaccagcgcgttctcgtcgttatacgcgtgcttgagatagccaagcagcgcggtgatgcgtatgatgccttcgctctcacagcggaatgggaccgtgatatcgccacgacgcgagaacagctccgcggtgacccgatcctcgccatctttgccggaaggcgcggttccgatcttcagcaggacatgcagaccaggcacgagggtgggcaggatgcggtcgaaggactccacggtctgtccaagtcgtttcgcctggcccggggtcagcgggttcggttgcaacaggtcgaacagaaactctgtgttgcgacctgcggaatcctcctccatgatggggatgaacgcatatgcggcataggagccacgacgggtagtggatacgaagacatcattggtcgcgtaatcgcataaggccttgcgtaggcgtacgaactcatcgaaacgttcgttgatgtatgtcagtgatctggcggacacaccattcgcttcccgcacgcgggagaccacccagtcgatgaggaactcggcatcgggtcggtcttcaagcgcggcacaccgcgagaacaggaatgagcgcccctccatgtacgcacgatcagcggtgcgtgagaccacggttttcaccgaggtgaccgcctcgatggagcgccacacatataccggagttgacacgaaaccatcggtctcagaatcctccatccgatgccccaacgcctccctgcctaggcgtgagagatcgtcgccgatgcgaaccgactcggaaacgacgcgcgctcgcgtcgaatccgggttcgctctacgcagggacaccttgtattcaaggtagctgggcttctgttttcctccgatgaggagcgtcgccgtcaaggttgcaagaccggtgctgacgctaatggcatcgccggcggtgtccggcagcatattcccggatagcagcgcgcgcagtatcccgatggcatcgataacggtggtcttgcctgatccattctgtccatagatacccgttacgctgccgccagcgggcagatcgtcaaaatccaagacgccgtgcgatatgttcctcatgttgtctagaacaagtctttgtaaacgaatcatcgcattaccgttctttaaaagtcataataatcaatttataattgaaatatatgattattgtacaacataagatatattttcgccatcaaatctcgcaatcggtattcattgattgcgctgtcagtgacctatcggcggcctgtcaatggctatcagtgcccttgcttccggtacttttcctcagtcccggctttatcaggcatccaccagttttcgtgtgctcggtaccagtcgatggtcgcggccagaccttcctcgaaatcggtgtactttggcacccagccgagctcggtctgaagtttggtggcgtcgatggcatagcgcttatcgccaccggggcggtcgttcacatggtcgaagtcgttggcgtcacgacccatgagcttcaaaatcatgcgcagcacatcaatgttgttgtattcgccattggctcccacgaggtaggtttccccgatgcggcctcgggtgagaatcgtccagatggcactgcagtgatcttccacgctgatccagtcgcgcacagccagaccttgcccgtagagtttcgggcgaatgccggcaagaatgttcgtgatctggcgggggatgaacttctccacgtgctgataggggccgtagttattgctgcaattgctgatggtggttttgagtccgtgcgtgcggtgccaggcgcgcaccaagtggtcgctggcggccttggacgccgaatacgggctggacggtttgtaagggctgagctcggtgaatttgcgcggttcgtccagagccagatcgccatacacttcgtcggtgctgatgtggtggaatcgaatatcgtggcggcgggcggcctcgagcaacacgtacgtgccggtcacgttcgtgttgaggaatggggaggcatcgagaatcgaattatcgttatgcgattcggcggcgaagtgcacaatggcgtcaatcgggggtactgcggctgcagagcgttggttcagcccagaaaacagggattccacaagctcggcatcgcaaatattgccatgcacaaaggtcaggttcgcggccggcacgccatcgagattctcgcgtttgccggcatacgtgagcgcatccagaacagtcatgtggacctgcggatggttgcgcgccacccagtgcacgaagttcgcgccgatgaaccctgcgccaccggtaaccagaatgtgttgcggcacgaatgatgggttggttgcttcgttggatgctttgttgactgcttcgttggttgagtcgagggcctgttcggaattgctcatatctaccaatcgtaacctgaggtttgcctgagtgcgggggcttgtattggtggttgcgttgttctgtgctctgtctttgtggcggcgaacgggtccaggcaaagacgcagaaatgtaagaacatgccatcgttttgccttgagtctgtcgtctggtcttggattgtgtccagtctgctggtaagtctaggaagattgccgatttgcaattgggtgagtaagatattttctcggaaatcgaacataataattgatatattgactttatgaaagggaatgcgcgcatgccggaaactactcaatacccagacctagtcattgtcggcgcgggcctgttcggtctgacggtggcgcagcaggcggtggagcatgcgggtgcccgtgtgcatatcatcgacgtgcgtgatcacatcggcggcaacgcgtactcgtacttcgatgaggagaccggcgcggagatccacaagtatggcgcgcacctgttccacacgtccaataagcgtgtgtgggactacgtcaatcgtttcacgagcttcacgaactatgtgcatcgcgtgtatgccacgcatgacggcgaggtctatccgctgccgatcaacctgggcaccatcaaccagttcttccacgcgcgttacacgccggccgaggcgcagaagcttatcgccgggcaggcgggtgagctggccggcaccgatccgcagaacctcaacgacaagggcatccagctcatcggccgtcccctgtacgaggcgttcatcaagaactacacgggcaagcagtggcagaccgaccctgccgagctgccggcggccatcatcaagcgcctgccggtgcgcttcaactacgacaaccgctacttcaaggacacgtgggagggcctgcccgcggacggctacaccaagtggatggagcgcatgatcgacgatccgcgcatcacggtttcgctgggcgtggacttcttcgacgagtcccagccgtacaacaaggaggcgctgaaggccgcgggcgtgccggtggtgtacacgggtccggtggaccgttacttcggttacgagcttggcgacctgaagtggcgcacggtggacttcaaggaggtccgttacgacgagggcgaccacttcggttgcccggtgatgaacttctccgacgctgacgtgccgtacacgcgcgcgatcgagttcaagaacttcaacccggagcgccgcgatgcccagaacccggacaagaccgtggtgtgggaggagtacagccgtttcgccgagcgcggcgacgaaccgtactacccggtgaacacggacgcggacaaggccctgtacgcgcggtacgaggccaaggccgcggccgagccgaacaccgtgttcggcggccgcttgggcacctacaagtactatgacatgcaccaggtgatcgacaccgccctgaccgcctacgaggaacaagtcgcgccgctgctgaagaagtagaccgtcgtttcaccagaggattaacgatttagcttgaaaccgactgaatattgctgaggcaatagccggtttcaggcttctgtgttttttgggaagccaaatttcctggggtacttaaggctcgccacgaggagtacagttgtctgtaacgcacaatgtggcgcgtaagacgaggggcgtatctcgcaagtggggtgcgatgcagttgaaggagtgcatgtcatgactgatccgaatg

SEQ ID NO: 1303 - DNA, 3695 bp, Unknown
  R157_18m  MAG No. k141_8483
accagaccggagccggccagacctgcgaccacaccaaggtagatccacttggcgaaacgcttgttgccggacttcaccaggtaggcgatcactgcggccaccaccagcagcgcttcgaggccctcacggatcagaatgaggaacgcctggccggcggagctggtgacgagtttggtgaagccgttgacattgccggacgcgccaccgtcgaggacggccgcgtctttcacgagccagctcttcaaatcgtcgacgagctgcttgatttccttgtcggaaccgccgtcgcgcatggtcttacgagtcatcttgaactggtattcgacctgcgaaacacggtcgccggaaatcgcgttcatcacgttcttttcgaagccgagcttctcgtagtactggtagtacgcgttgttgaccagcgtggcaccttcgtcgcccttgccggcagcggcagcctcgtatgcctggtcgagaatgacggtcatttcgctggcaacctcactccacgtgcggtcgcctttgcctttggatgaattcttcttggccgcgtcgagcttcttgcgctcttccgcggtttgcgcggcacgctgcttcgcgtattccttaggattggcaaggtctgcgttcgcgtcaagcgtttgcgcggttgcgttgatttcggcagtcagcgcgtcgattttggctgcgatgacgtcgccttggtcctgctggtaggcaagaccttcaagatcggtgaattgctgcagcagttccttctgcttgtcggcactgatggtgtcgttgacgactttcgagaagttggatgcgtcgtaaccgatccaatgcgcggtctggaaatcggtgccggcctgaccgtaattgccgtcattgtagtctttttcggcagtcgcaagctggtcttcgatgttcttcgcagcggcagtccaggaatcaaaattcgtttgaccgtcatcggcggcggacgcctgctgcggcatcacggtgccaacaaacagcatggcgagcgcaatcattagcgcggcgacgagcgtgacgagacggccggaagccgaaactcgcggatcgcacggatcgtaggaaccggctgcgtgacgctgcgcaacgcgagatgacatgttccgaaccttccttctcaaaacttttcagtgtgcgatgtgcgcaccaaaggccaagataaaacgaaatttttttaaagaacagtcttgatttttaatttgtcttgatgtatcgcgtatggagaatcggcgaaattccgccattcctgtttttaccatcttcggcgtgtcatctcacatagtggcacactcgcagcatgcttgttgaattcgacgcgccggaatccggtacttccggcaaagcctgttgcatccaccgccatctgtatgggaccagtcgaaacggagcgtcatacgataatcgagatacgctatatgtggcagatttccggtctcacgaaaaacaatatgcgctatatgtggcacttacccccacccaaccatacctaagggggtgcaaatgacaccctccaaaaccggttgcccaatgaaatctgccacatatagcgcagatcactttttcaagaccggaaaaactgccacatatagcgcaaatcaaacaggtcaacaggcatcccctctacaaggggccgccacccataagcgagatacacgcgtcagacgttccgcagtcaggcgcccgtattgacgaaacgggcacatcaggcctcactctcaacgaacgaacgcgctagcatcaggagtatggatgcttccgtttcgctcgcgcagcgcatgccctacaccaccgcgtttcccaaagcgctcggcaccggcttgctgatttcgaccgcccgcccggtttccacgggcctgcgtgccaaaatggaacgactcatcgacggatacgagcatgtgctttcgcgattccgcgctgattcgctggttacgcgcatcgggaacgcggagcatggcggacatttcgattttcccaattggaccggcccactgtttgatttgtacgacgcactacacgacgtcacacgcggtgcaatcgatccgtgcgtcggagaggatttgattcgactcggttacgatcccatgctgagcttcaccgtcgcagccgacgccgtcgagcgcttgggcgctttgcgcggacgccctgtatgggggcacgacgtagtacgttcagatggtacgacgttggtcacgcatggctcggttcatttggatttcggcgcgtgcggcaaaggctatctggttgatttgttgggtggtttgttgggtggtttggaaccgtcatgcgtgcctcgtgaaccgcacccacagcacgccatgtggaaggattcggcgcacactgctggggcaacagatttcaatcgagagaacaccttcccggaatttgtgattgatgctggaggcgacctgctagtacacacgtccatcccgattcgtgtggcgcttgaggatccggacgattcgtcccgtgcggtgggtgtggcaaagatttgcgatggcgcgctctgtgcgagcgcgcccagtcgccgccattgggaggtggcggttgacgaacggacacatctggctattcatcatctgatcaacgccgtcgacggcctgcccgcgcagcagatggaagccacgtggattactgtgcaatccacgtcggtcgccgactatccgactgcggtggcagatggtttggctacggcgctgttcgttgccgatccgaacgagctgagcaacacttttgccttcgattgcgccacgttggacgccgaccgtcacgccaccatcagcgccggttttcccggccgcttcttctgatcgtcagccggccgcagccgtagttgggcgaacaagtatcgtgccacgctgattaaagacaagatcatccgaccggcagggcaaaagttcccgaaacgcaagaatccggtggggtggcccatccggattctttagtatgcgaggtttagcggatcagcgaaccagcataagccagtcggctcaagcaagccaaccaaagcaccccacttaagccagccactcagccgctcagtcgatcagcgtgaactggctgttgtagatgccggcgtagaagccgtttctagcgagcagctcctcatgggtgccgcgttccacaatgtcaccgccgttcatcaccaaaatcatatcggcgtcgcggatggtggacagccggtgcgcgatcacgaagctcgtacgtcccaccgtcagtgcgtccatggccctctggatcaactcctcggtgcgggtatccacggaggacgtggcctcgtcgagaatcagaatcggcgcgtcctcaaccatggcgcgggcgattgtcagcagctgcttctgaccttgcgaaagcgacgccttgtcgtcgagcacagtgtcgtagccattcggcagagacatgatgtagcggtgcagaccgacggctttacaggcggccacaatctgctcgtcagtgacgcccggcttcgagtatgcgatgttttcacgcaccgttccacggaacacccacgtgtcctgcaataccatcgagaactggtcgtgcacattccagcgcggaaccgacttagtgtcgacgccgtcaatcgaaatcgtgccgccggaaatctcgtagaaccgcatcagcaggttgaccatcgtggtcttgccggcaccggtcggaccgacgatggccaccttctggccggc

SEQ ID NO: 1304 - DNA, 46984 bp, Unknown
  R157_18m  MAG No. k141_9072
cgacctgatggacgtggcccgtctgctcgatgccgccgtgcaggtggagacgggcgtggaagaatgtgggcaaaatgtgggcaaaaacgttttggaacatgcttgaaaccctcagaaacgttggaatcacgccattcctgcgaatggtggttcttcagcaagttgaaggacgcgctgagctgagagtggatgcgttcttggctcccctcagagaggggagccaagtctgttacttcagcagggagcggcacatggagcggtattcgttgacgtagccgccgccgaagaagacacagtgaccggcgatggggtagagctgccagagcgtgatacgctcctgccatccggccttcaacggatgcacggactggtagccctcggtgatttcgctcagatagctcatgccgaacaggtgcagcatagccagatcctcctcgcgatgaccgccatgtgccgccgggtcgatgagcacagcctcgggctgcccggaatcggcggtccacatcacattgccgctccacagatcaccgtggatgcgcgccggcttgtcggacgcggctcggcccatcagatccggcaacgcttcaatcacgcgctcggtcagttcgacatcgcgcttatccagctcgccacgcctcacaccaaggttgaccatcgggcgcagacgtccatcagcgaaatagctgatcgggtcggtccactcgccggtatccattttcactgggtcctgcaatggtccgaaatagcatgtgccgttatatccgtcaggcgcagacccgaaatattcggcacccacatcatgcatatgggccagagccgcaccaaaagctcgtgccgcctgaggcgtgggggacgcgctgcccacacgttcgatatccagataatccttgccccagccgtatacctgcaccacgcgcgggccgccctgcgcatgagccgctcccaaccattcgagtcctcgaccctcgcattcgaagaatccttccggtgcgaatgccctgcttttgcgatacgtggccataatgctcccttcgtcgcttacgtactatatccactttcattgtagaagccgtggatgttaccgattcttagtgttgttctacacccccttgggtagggtgttcatcgtcataacacatcaaatacttagaaatcacgaggggttatgaattttttccaagcgatcattctcggcatcgttcaggcgctgaccgagtatctcccggtatcctccagcgcgcatatccgtattttcggcgatttgatgctgggctctgatcccggtgcggcgtttaccgccatcatccaaatcggcaccgaacttgcggtgattctgtatttccgtcacgacatcatcaatatccttactcactggttcagctgcctgttcggcaagaacggcaaggattggaaggcccgcatgggccgcggcgacaattacgccacactcggctggaacattatcgtcggctcgattccgattatcatcctcggcttcactctgcagaacgtcatcgagacctcgttgcgcaacctgtggattacggtaaccgtgctgttggtattcggcattctgctgtggatggtggatgccaaggctcgccagaacaaaaccatgaatgatatgacgtatcgtgatgcgttcctcttcggtttgggccagtccatggcgctgattcctggtgtgtcccgctccggcggcaccatcaccgtcggtcgcgcactgggctacacgcgtgaggccgctgtacgtctgagcttcctgatggccatccccgcggtgttcggctcaggtttgctcgaagccatcaaggccgtgaagaactacaaaaccgatgcgatgttccccggctgggggccgaccctcgtggccatggtcatcagcttcgtactcggctacatcgtgatcatcggattcctgaagttcgtatcgaacttctcctataaggccttcgccatctaccgcatcggtttggctgtggtcgtcgccttgctgctgattgtgggcgtgctgccggccatcgatccctccgtggcggctgcggcataagacgggtcgatagacgactccaatataatggtgctcccgctggcgggagccgtcagcgaagctgactgggggtggtcactggaatatgccagcagaaccaccctcagtctcgctacgcgagccagctcccgacattttgtgcgacgtgcacatggtgcactgctatgaacagcccacagggctgttcatccagcgggagcacaccatatatgggctaattgcccatctggcgcagaaacgcttctgcttctttgactagttgttcggcctggggcgctcccaaggaagcctccgcctcggctttctgctgcaagtcgtagtcgtgctccaaatgctccacgtaatcgtgaagctggtcattacaacgaaccagtatcgaggcttgcgccttccactgttcggctttctgcttcagatctgccgtatcgaaggtgaagccgatatgcttgcccaacgcatccagcaatcgcatagtgccggcagaacattcgtcgctgcccaaatattgggggatggacacccacatcgaggaatgagcaaaaccttgctgcgcggcggccacatccaaaacggtaggaatgcctaccgggccgttatatgaccggtctccttcgcattgacagtctccgtcgctgacggcgatgggcaacgggcgggtatgcgggcaatcggagaacatcgaacctaacgtaatgatccgattgacatccagctcatcggcaatggccagactctggctacagtattccttccaccgatagttcggttcgggggcgatctgcgcatagatatgcttgcctgcgtccaacgtgatgtcgtagaacgtggtctgcggccagataagattggtgcgtcccgcaacatggcacagcataggacgggcaacctgatagtcatagaaatcatcacatctaatatgacgaatctcgcgggactcatatcgcttgaccagatggcgcaccgcgttcgtcgccacctgacaggcatcattccatccctcgaatgcggcgatcaatactgcgccggtgtccttcgctgcttcactcatacctctagagtaactggaattcattgcccgaagcgcacgctttagccataagcgagagtatgcaattacaggcgacacgccgcagctggacgaactacacgcatgtgagtatagtaaacactcgtgcttcggcagggagacctcgccaaggaaacacacgcggacatagcttagttggtaaagcgcaaccttgccaaggttgagaccgcgggttcgagtcccgttgtccgctctaggtccgtgagttgacagaccttacggtgggttagccaagcggttaggcagcggcctgcaaagccgtatagacgagttcgactctcgtacccacctctcagaccagcgaagcaattcaatgggatgaaatatgacccgggcggttggcgcagtggtagcgcacttccctgacacggaaggggtcacaagttcgaatcttgtatcgcccacgaaagtcgaagcaattcgactggatataactgaagaaccgagtattcgggcgattggcgcagcggctagcgcacttcgttcacaccgaaggggtcgtaggttcgattcctacatcgcccactggattccgcttctcacggcggattcctttgcggacatagcttagttggtaaagcgcaaccttgccaaggttgagaccgcgggttcgagtcccgttgtccgctccacaacgaaacctcgcttcggcgaggttttttcgtattggttcagatgctggtggtatttgtcgcacgcccaacctatcgtgtcctacgttgattaaccagtccaggcctgcacattagtaccgtgggccccgatagcaaaggacaaatcatggcgcaagctaccatctccataaccgtcaacggcgaagcgaaggaggtggaagcaaccaccaccggcgtagaactgttcgcggaagacaagaacatcatcgcggtcaagatcaacggcgagaaccgtgacctgtacacgccgctgaacgatggcgataccgtcgaccccatcgccctcgactccgaagacggcctcgcaatcatgcgtcactcggccacccacgtcatggcccaggccgtgcaggaagtctacccgaacgccaagctcggcgtcggccccgtcatcaaggacggcttctactacgacttccaggtcgaccagcccttcaccccggacgacctcaaggacatcgagaagcgcatgcagcgcatcatcaagtcctcccagtccttccgccgccgttccgtgactgaggaagaggctctgaaggaagaggccgaccagccctttaagatcgaactgatcgaagacaaggaagcacacctcgacccggccgccgccaccgagatctccgaaaaggaactcagcttctacgacaacgtagaccgtgatggcaatgtggtttggaaggacctgtgccgcggtccgcacctgccgaacacccgctacatcaaggccttcaagatcgagcgttccgccgccgcctactggcgtggttccgagaagaacccgaccatgcagcgcatctacggcaccgcgtgggccaccaaggaagacctcaaggcctaccagacccgtctcgaggaggccgccaagcgcgatcaccgcaagctcggcgccgagatggacctgttctccttcccggatgaaattggccccggcctggccgtgttccacccgaagggcgccgccgtgatcaacgcgatggaggactactcccgtgagatgcaccgcaagcaccactacagcttcgtgcagaccccgcacatcaccaagggcggcctgtacgagacctccggccacctgcactggtacaaggacggcatgtacccgcccatgcacctcgacgaggagaaggacgcggacggcaacatcaccaagccgggcgccgactactacctgaagccgatgaactgcccgatgcacaacctgatcttcaagtcccgtcagcgctcctaccgcgagctgccgctgcgcctcttcgagttcggcaccgtgtaccgctacgagaagtccggcgaggtccacggcctgacccgcgtgcgcggcctcacccaggacgactcccacatctactgcacccgcgagcagatgaaagacgagctcaccagcctgctgaccttcgtgctgaacctgctcaaggactttggcctgaccgacttctacctcgagctgtccaccaaggacccgaacaagtacgtcggctccgacgagatctgggaggaggccaccaacacgctcgccgaggtcgccaaggaatccaacctcgagctcgtcgacgatccgtgcggcgccgccttctacggcccgaagatctccgtgcaggcccgcgacgccatcggccgcacctggcaggtctcgaccatccagctcgacttcaacctgcccgagcgtttccagctcgagtacatcgcgcaggacggtacccaccagcgtccggtgatgattcaccgcgccctgttcggctccatcgaacgcttcttcgccgtgctgctcgagcactacgcaggcgccttcccggcgtggctggcccccgtgcaggtgctcggcgtgccggttgccgacgagttcgccccgcatctggccggtttcgtcaagtcccttgaggacgagatggtccgttgcgagatcgactactccgacgatcgcttcggcaagaagattcgcaacgcctccaagtccaaggtgccgttcatcctcatcgtcggtgaggaagacatgaacaacaacgcggtcagcttccgcttccgtgacggcagccagctcaacggcgttccggtggacaaggcccgcgagcagatcctcaccgtcatcaagaagcgcgtccaggtgaactccgccgacgacttcaacgccgctgtggctgagtgatgtgaatggtactggctcccctctctgaggggagctggctccgtaggcgactgaggggagtcctgcatggctcgcactcccctcagtccgtttcacggacagctcccctcagagaggggagccaagaaagggtgcgaaaatgactgacgtgcgtgtcgataatccggcggactttccgcctcaggaggacacggtcgaacgactgtggactccgcagcgcatgacctatgtgctgcgcaacagcgaggatcgcccaaccaagcccaagacgaaggaatgcccgttctgcgccggacccaagaaatccgacgaagacggcctcatcgcctggcgtggcacgcacgtgttcgccatcatgaacctctacccatacaatgtcgggcatctcatgatctgcccgtaccgtcacgtcggattcatcaccgaactcgacgatgccgaactgttcgaattcgagaaggccaccaccctcgccatgaaggtgatggaaaccgtctcccgtccgcacggttacaatatcggcattaatcagggcgaagtagcaggcgcaggagtcgccgctcacctccatcagcatgtagtgcctcgctggaatggtgacgcgaacttcatgcccatcgtcgcccagacacgcaccatgcctattctgctgtccgaccagcgagaagcctatgcccaggcattcgaacagctggctccgcagtatcatctgccgcttgcctaacacaggtgcggcaccccgcgtgaccggtcttatcggtacgcataacaagacaatcatcggaaacatcacgggtatgtctgattaacggcctacaatcgtttcgtttgacatcatccgtttcaataattgctaggagcattatgtcaggtcattccaagtgggcgaccaccaagcacaagaaggccgccatcgacgccaagcgcggcaagctcttcgccaagctcatcaagaacatcgaaatcgccgcccgcctcggcggtggcgacccggacggcaacccgtccctgtacgatgccatctacaaggccaagaaggcctccatgccggccgacaacatcgctcgtgccgtcaagcgtggtgccggtgctgaagacggcgccgccaactacgaagacatcgtctacgagggctacgctcctgccggcgttggcctcatcatcgaatgccttaccgacaaccgcaaccgtgcggccgccgaagtccgttccaccctgaccaagggcaacggctccctggccacctccggctccgtgtccttcaacttcgagcgcaagggccagatcgtggtgccgtccgagggcgtggacttcgacaagctgttcgaaaccgccgccgaagccggtgccgaggacgttaccgatgacggtgaggtgttcaccgttgtgaccggtccgtccgacctgttcaccgtgcgcaaggctctgcaggacgccggcttcgactacgattccgccgaccaggtcatgcagccgaagaacgaggtcgagttgagcctcgacgatgcccgcaaggtgtccaagctcatcgacaacctcgatgatctcgacgatgtgcagaacatctactccaactggaccgcttccgacgaggtgatggcccagctcgacgaggagtaatcctcgtgattatccttggcgtcgaccccgggctcacacgttgcggggtcggcgtgatcgaagccggcgagcaccgccggctttcgtttattcacgtggacgtggtgcggtcctcaccggatatcacccaggatctgcgtctactggccatctacaacggcctgtccgagaaaatggatcgcttcgcacccgatgccgtatccatcgaacgagtgttcgcacaatccaaccgcaacaccgtactcggtaccgcacaggccgccggcctcgccatgctcgccgccgcgcaacgcaatattcccgtggcgttgcatacgcctaccgaagccaagctggctatcaccggtaacgggcaggcgcagaagattcaggtggagcgtatggtgacacgtattttgaacctcaccaaaatgccgactcccgccgatgccgccgatgccttggctttggccatttgccatgcgctgcgcccggcaggcgcattgcagggcggcgaacgcgaacaacatctgaccgccgcgcaacgccagtgggctgaggccgcacagaaatccacgcgccgccgcatcaaccacgaccgaggcatgtagtatactttcgaacagttgttcgagtcttgaatcctggagccctgaaggagtacctgtatgatcggcatgctgaccgggcgggttgaatcggtcgaaaccgataccgcattgattgatgttgggggagtgggctacgaagtgcgcatgtccgccaccgacctgagccgtctgcacgccgggcaagacacccgcgtcttcacctatatgaacctctctcaggatgccattaccctgcatggattcctggatcgggacgccaagaaaacctttctgcaactcatcaaggtctccggcattggacctaaagtggcccaatcgttactctccacactgacgccgagtcagctggcccacgccatcgccgacaacgacgccaccgcgctggccaaggctccggggctgggcaagaagggcgcacagaaaatcatcctcgagcttaagggctctattgatttgagtcagatcgagggtgcttccgctcaggcggcaatatccaagtctccggtggataccggtacggaacaggttgtcgaaggactgatttcacttggctggcgtcagcaggacgcccagcaggccgttgccgaggcttgcgccgaaaacgatattcccacgccgcttgccaccgacgatgtgccgcgtgtgctacgtctggctttggcgctgatggataggggccgctgatgagcgagacaacggattacggtacctcaaacaccggtgccaacgaagagtcgttgcgcatggtctcctcccagccgatcggcaacgagccggtcagcgacgaggagctgcgcccccatgttctcgaaggctttatcggacagccacggctcaaggcccagctgcaactgttcctggacgcggcccgcaaacgcgatgtgccaccggaccatattctgcttgccggccctcctggcttgggcaaaaccacgttggccatgatcgttgccaatgagcttgaagtgccgattcgcgtgacttccggccctgcggttcaacatgccggtgatcttgcttcgattctgagctccctcgacgtcggcgaagtgctgttcatcgacgagatccatcgtctgccgcgcgccgccgaagagctgctgtatatcgcgatggaggacttccgcgtcgatgtgatggtcggcaaaggcccgggcgcaagctccatcccgctgaccctgccgcgattcaccgtcatcggtgccaccacgcgcgaaggtatgctgccaagcccgttgcgcgcacgctttggcttcaccgcacatctcgacttctatccgcatgaggagttggaaaagctcatcgaacgttcggccaacgtactgggcgtaaaccttgatgcgggttccgctcatgagcttgcgttgcgttcgcgcggcacgccgcgtatcgccaaccgattgctacgccgtgtacgcgactgggccatcgtccacgacctgatcgtggtgcggccggacgacgtcaaggaggcgctggccctgtaccagatcgactccgaaggcctcgaccggctggacatcgccgtgctcaatgccatcgtgcgcaacttcaacggtggacccgtgggcctgaacaatctggcggccatggtgggcgaggaatcggaaaccgtggaaaccgtgtgcgagccgtatcttgtgcgcgaaggttttatgattcgcacgcccaaaggccgcgtggctaccgagaaggcatggcagcatttgggaattacgcccaaagatgatgtcagcaagctcttctagactttctcctgtttgcacacttggcggcgtttcgtcaatgtcgctcgtttgaaggagttgtttcgtggaacaacagtacattatgctcatcgtgatcgtcgtcgtgttcggcggcatgatgtggtggcagtccaagaaggccaagcagcaacagcaggagaagcaggacttccgtcgcaacctgcagcccggcaccgaggtcatcaccatcggccaggtgatcggcaaggtcgtcgaagtcgacgagcagtatgaggagatcgtcatcgactccgaaggctccaagctgcgtttcggcttcaacgccatcgcccgtgagtacacccgcccggcctatgtgtccgatgatgaggtcgacgagaacggcaacccgctgcccgacgaagacaccgaggctccggctaacgatgaggctggtcaggttccgatcgaggcgtccgtcgtgtccgaggaagacaccgctgacgagaccggtgacgacaacgaaaccaagacgaagtaagctgttcgattcggtagcaccatccgagtatcgcatcgcaaaggcataaaaggggcgagcactatggcacagtcggacatcaccatcgacgcattgagcaaggtagggcaacaggacgccgaatatctggtgtccttggtgcgttccataccggggtttcccaaggaaggcattatcttccgtgatttcatgccagtgctcgccgaccccaagggcttgaagattctgctcaaggcgcttgaaacggctctgccggtgtccccgagcgaattcgactccattgccggtctcgaatcgcgcgggttcctgttcggcccggccatggccgcccatctgggcaagggtttcatcgccgtgcgcaaggccggtaaattgccgcccgaaaccatcggtgaatcctatgacctcgaatacggcacggccagcgtcgaaatcgaaaccgacgccgtacaggcgggggagcgagtgctcattgtcgatgatctcatcgccacaggcggcaccgccaaagccggcgccgaccttatcgaaaaggcgggcggcactgtggtgggcttcagttttgtgatgcggctcgatggtctcgacggtctggataagctcggcggcaagcccagcagctcgctgatcgcgatgccggcctgagattccgtctcacccaacgtacagttagttttcaaggtccggcatgtactgtgtacagttatatgccggaccaattacatagtcagggaaggatcgatggatctttacgaataccaggcgcgtcagctgctcgaggaacaggacattcccaccccggacgccatctttgcccagaactcccatgaagtcgccgaagcggcggacaaaatcggctatccctgcgtaatcaaggcgcaggtcaagatcggtcatcgtggtcaggccggcggcgtcaagatcgcccataaccgcgacgaggcgattcttgaatccgagtccatcctgccgatgaccatccacgggcacaaggtttccggcgtgcttgtggccgaagccaagaacatcctgcacgaatattacgtgtccatctccgtggaccgcacctcgcgcgacttcgacgtgctggccaccgccaacggcggcaccgaagtcgaggaaatcgccaaggaacatccggaggccgtcaagcgcctgcacatcgatgcgctcggcgacttcgacctggccgctgccaccgaaatggcacagagcatcggcttctaccacgcggacgtcgatcaggccgcgcagattctgctcaagatgtggcgctgcttcaaagacaacgatgccacgctcgtggaaatcaatccgctcgccaagatcggcgacccggatgacgaatccaccaagcagctgagcgccttggacgccaagatctccttggatgacaacgcctccttccgccatgatggctgggcgcgtttcgtggatctcatcgttcccgaccccttcgaacagcgcgcccgcgaacacggcctgcactacgtgcacctgcacggcgaggtcggtgtgatcggcaacggcgcaggactcgtcatgagttccctggatgccgtctccggcgctggcgaggaacagggcaccaacatcaagcccgccaacttcctggacatcggcggcggcgcctccgcagccgtcatggccgaaagcctggagatcgtactgtccgaccctcaggtcgaatccgtgttcatcaatgtctatggcggcatcacctcctgcgtggaagtcgccaacggcatcctcgaagcggtcgccaagctcggcggttccaagccgatcgtcgtgcgtttcgatggcaacgccgccgccgagggtctgcatatcctcgcttccgccaacaatccgaatatccatgtgtccgaaaccatggaaggcgcggcagccaaggccgcgcagctcgccggtgaggcgacccagtccaaggaggttcgctgatgctgttcatcgaagacggcgctcccgttatcgtccagggcatgaccggccatcagggcatgacccacacggctcgcatgctcaaggccggcaccaatatcgtcggcggcgtgaacccgcgcaaggccggcacatccgtcaccttccccggtgccaagaacggtgccgacgtggacatccccgtgttcgccacctgcggtgaagcacgtgaagccaccggcgccaaggccagcgtggtgttcgtgccgccgaagttcgccaagtccgccgtggtcgaagccgtcgaagccggcatcgaactcatcgtggtcatcactgaaggcattccggtggccgattccgcatacttcgtcgaactggcgctcaagaagggcgtgcgcatcatcggaccgaactgccccggtttcatcacgctcggcaaccctggcgtcaacttgggcatcatccccgacggcatcgtcggccgcggcccgctcggactggtctccaaatccggcaccctcacctaccagctcatgggcgaactgtccgatatcggcttcaccgcatgtctcggcgccggcggcgatccgatcgtcggcacgacgctgctggaagccctgcaggcattcgaagccgaccccgacaccaaggctgtcatgatgatcggcgagatcggcggcttcgccgaacaggacgccgccgcatgggccaaggagcacatgaccaagccggttgtcgcctacatcgccggtttcaccgcccccgaaggcaagcagatgggccacgccggcgccatcgtctccggaggcaagggcaccgcccaggacaagaagaacgcgctcgaagcggcgggtatccccgtgggcaagaccccgggccaggccgctgaaatcatgcgcgacatactcgccaaggccaacatcgactgatcggttccaaccaatcgtgatgaaagccgtgattcgccaatgggtgcggggagccatagtcgccctcgcatccatggccatctatgccgttgcattaggttgctatacagcgctgatgttattggttgtctccatggaagagggcggcgacaatctcaccgtcggcacaacctcgctgacacaggccgttgtgcttctgagtgagggatcgggctctagaaccgattcgttcaccctcaccatcacgccattgatgttgaccatactgctgatatggctgatcaatgcagtcaccatgcgaatcaaagcatacgggccgcatgcgtatgttgccggattgaatgtttggctcgggttgaacgaggcattccggcaatccgtacacctaggtcttgtcgatgaccagtggctggtgttgctgaaagcagccatcgtattctcgatcggtttcctatgcgcagccgtaccggaatcagccaagatgcgagcattcagggactggactcgcaagcaggtgccggcggacatacgccactgcctgaaaatcggcgtcgtcttggccgtcgcgatactgggcatatacctggcaattggattgattaccgtcatcgtatgggcggtacgtaaccatgccgctgtcgtatcgttgttcgaattgtccgggatggaaaccggttcacgaattctcaccaccgtcgccatgctgatctggctacccaacgtcatgctctgggctgtttcctggctcttcggcggcggattcgccatcggtgatttggccagtttcacgttatggctcggccaatccaaagagcttcctgcaataccggcattcggtattctgcccgaaccggtcagcagcgaactatggcgtaccgttgccttgaacgcgcctctcgccatcgctgcgctcgtgggcctgctggctgtattcctaccgcaaggattcgcctgcagaccgttgaatatacggaatgcgtccacccgcggcccagtactggtttcgctgatctactccgccgggtcattctgcctgagcgcgatgctgatctcacttgcatccacattgctgttcgctctgtccaatggatcgcttggcgatcatcgtctcgctcacattggcgtcgacgtcatggcctctaccagagtcgtcggtcattcgaccgcattgggatttaccgcggcatggctgctcgcgctgattggcacagcgctcgttttttcgataggctggttggttgggaggatcaatgattcccgcaccaccgccgcgaccccgaagaccgtcatcgtccgtcaggcgcggtccctggcgtcacaaccacaagaatccaaggaggaacaggatgacaaacacgaaccgaccgatccgtcgggcactggtctcggtctttcataaggaaggcatcgaagtactcgcggaagcgttcgtgaaggccggcaccgaagtcgtttccaccggttcgaccgccaggaagctcgccgagctgggcgtcaaggtaaccgaggtgtccgatgtcaccggattccccgaatgcctcgacggccgcgtcaagacgctgcatccgtacattcacgccggcattctggctgatatgaccaaccccgagcatgccaagcagctcgaggagttcggcatcaagccgttcgacttggtggtcgtcaacctgtacccgttcgccgacaccgtgcgctccggcgccaacgaggccgataccatcgagaagatcgacatcggcggcccctccatggtgcgcggcgcggccaagaaccacgccaccgtggccatcgtcaccgacccggccgattatgcactggtcgcctcccgcgtggccgatggcaccggcttctccctcgacgagcgcaagtggcttgcagccaaggccttcgcgcacaccgccgcctatgacgccaccatcaacgagtggaccgccaagcactggcccaagccggcctctctggacgccgtcgaggtggacaaggacgatcagggcactgaagtcgattccgccaagttcccggcccagttcacccgcacctgggaccgcgcccacacccttcgctacggcgagaactcccaccagcaggccgccctctacattgacccgctcaaccagaccggtttcgcccacgccgagcagctcggcggcaagccgatgagctacaacaactacgtggacgcggacgccgcctggcgcaccgtatgggatatggctcccgccattgccgtggccgtagtcaagcacaacaatccgtgcggtctggccatcggcgcgaccgcggccgaggcccacaagaaggctcacgcctgcgacccgatgagcgcctacggcggtgtgatcgcctgcaactccaaggtcactcttgagatggccgaaagcgtgcgcccgattttcaccgaagtcatcgtcgcccccgactatgagccggccgcgctcgaactgctgcagaccaagaagaagaacctgcgcatcctcaaggtggccgagccgccgaagggccacgaggccatccgccagatcgatggcggcctgcttgtgcaggacaccgatctgatcaacgccgtcggcgacgatccggacgcctggaagctcgtggccggcgatgccgccgacgccgacacgctgaaggacctcgtgttcgcatggcgtgcaatccgctgcgtgaagtccaacgccatcctgctggcccacgaccaggccacggtcggcatcggcatgggccaagtcaaccgcgtggactcctgccatttggccgtcgagcgcgccaacacgctggccgatggtgccgatcgcgccaccggtgcggtcgcggcatccgatgcgttcttcccgttcgccgatggtgcccaggtgcttatcgacgcgggcgtcaaggccatcgtgcagcccggcggatccatccgcgatgaggaggtcatcgaagcggccaagaaggccggcgtgaccatgtacctcaccggcacccgccacttcttccactgatcgggactctctgaggggagcagctcagccaaaacgcacaaaggtgggattccgcctgacccgtcaacgggtccaagcggaatcccacctttgctattcgcctgctattgtggtcacgtaaccgttcgacagaaggaatcgcaacatgcacaaccatccctatgtatccgaagcgcatgagggcaagccatggtttgaatggtgcgtactcggcgtcgtcgccgtcatcacactgctggttgctttcggatatacgatggccgccacggtcatacttgccgtgacggccatcatcaccgggcttgttcacctgattcttcaggacaaaagcccatggaaagtgcgctcagtggcgttcgactccttcatcggcatcgccttgggaatcggcctgctgattacctacttcagcttctttggactcttcggcaacatctttttccgctgaatcgccatcagacgaggcggcctgatcgaagaattcgccatcgtcgagcgtgtccgcgttcgcatcggcatccgtctgtggaagatcggcggcagccggcactttgggagtggtcatcatctgcgcgatgatcatgaccaacgccaccacagcggcggccaagaccgggctaatccagaacacccacagctgttgcagcggattttgcgtaagaccctcattcatcgcggccagtgcgataccggtggaacgggcgggattgagaccggcaccggtaaccgggtagctgatggcggcggccagaccataggcaagacccatggcaatgacatgacggtccgaggactcgccgtgatcacccagagaagacatggcggtggcaacgacaatcagagaggcaacgacctcgacgacaatcgccagcgtaatcgagaacgtaatgccatactgggtcagcagcgagtaagacacggagccgttctcgaaaccgttaacggccggagtcagccacactttggcagctacctgctcggatgtgggcagcagcttgaccacggcgaagccggcggcgatggcaccgatgacctgagcgatcacatagaggatgccatccaggattttcgtcttggaaaccagcacggaggctacggtgatggccggattcagctggccaccggacacgcgggagaagatggcggtgactgcggcatatgccaagccggtagccaacgcgaagaacacgatattgatgccatacacggccgaaccccatgtggagaaggcgtaaatggcaaagcacagcaggaagctgccggccaattcggcgcacacgcgcagggccagcggctgttgcttggtttcttccatgattgttcattccttttcatctgttggaagacgggcgaacccgcacaaacggttgccagtctagcagcagtcctacgttgcggtatgatatataggttggaattggctgggattccagtccgccaactctgaagtatgtatacaaatcgacagtctctgcgatgacagagtctgtccggccacgttgggagaacgatgccaaacgcatattcccgcgctgcgaaagcgcaagacgattccaattccattcgactccagaagctgcttgcccaagcgggattcggttcccgccgcaagtgcgaggacatgattaccgaaggccgtgtcgaggtcgacggtgaactggtcaccgagctcggaactcgcgtcgacccccataagcagcaggtgcgcgtagacggttcgcgcgtacgcgtcaatccgaaccacgtcactctggcactgaacaagccccgcaaggtgctctccgccatggacgacccgaagggccgctacacgttgcgcgacatcgtgggcgacaagtacgagcgcatcttccacatgggccgtctcgactacgattccgagggtcttatcctcatgacgaacgacggcgaactctcgcagcacgtcatgcaccccaagtacgaggtcgaaaagacctacgtcgccacactggaaggcaagatctccggcaccgtatgccgtcgactcgtgaccaccggcgtacagctcgacgacggctggatcaagctcgaccactgcgcgatcatcgactcctcacgcgaccacacgatggtcaaggtcgtgctgcactccggcaagaaccgcatcgtgcgccgtatcttcggctcaatcggcttcccggtcaagcgcttggtgcgcacccagatcggcccgatcaaactcggtgatttgaagcccggttcctaccgcgtgctgtcccagacggaagtccgttcgctgtccaaggaggttggcctgtgattcgcgttgccatcgacggccccgccggcgtgggcaagtcgtccacgtccaaggcgctggccaagtatttcggatacgcctaccttgacacgggcgcgatgtatcgtgcctgcgcttggtggtgcctgaagcagggcatcgatctggacgccgaaaccgtggatgagcgtgtcatcaccgaagcggtgggcgagttcttcaccggcgaccatttcgatatctccgtggacccggacaacccctgcgtattcgccgacgacgaggacatctccgaggccattcgttcctccgaagtctccagccatgtctccaaggtgtcgaacgtcatcccggtgcgcaacgtgctcatcgccgcccagcgcgcctacatcgcccgcgaggcgtcggccgactccttctccggggggttgggcatcgtggccgagggccgcgatatcaccaccgtggtgtccccggacgccgaggtgcgcgtgctgctgaccgcccgtgaggaggtccgtcaggcccgtcgcaccggccaggctgtcaagggcgtgggcgctgaggatgtggccgcgcgcgacaaggccgattccaaggtcaccagcttcctgaccgccgccgatggcgttaccaccatcgacaattccgatctggacttcgcccacacgctcgatctgctcatcggtgtggtcgaggacgccatcgagaaccaagaatacgagcagtatgccgccaatctcgaaggctatgagctggacgaaggcgatgaggatctgatttccggccgtggtttcacggaaggcgcgcgcaaggccggtcccaagccggtgggcgtgctggctgttgtaggccgtccgaacgtgggcaaatcatccctggtcaaccgtatcctcggccgccgtgccgccgttgtggaagacacgccgggcgttacacgagaccgtgtgagctatgacgcggaatgggccggcaccgacttcaagctggtggacacaggaggctgggaagccgacgtggaaggcattgaatccgccatcgcctcacaggcacagattgccgtgaccttggccgatgccgtggtattcgtggtcgatgggcaagtgggcatgaccaccaccgatgagcgcatcgtcaagatgctgcgtgccgccggcaagcctgtcgtgctggccgtcaacaagatcgacgaccaggccagcgaataccttgccgccgaattctggaaactcggcctcggcgaaccatactcgatttccgccatgcacggcaggggagtgggcgacctgctggacgtcgcgctcgacaagctcaagcaggccgagaagacttccggctacctcacgccttccggcctgcgccgcgtggctctggtgggccgcccgaacgtgggcaagtcgtctctgctcaatcagctggcgcgcgaagaacgtgccgtcgtcaacgatttggccggcaccacgcgcgaccccgtcgacgaaatcgtcaacatcgatggcgaggactggctgttcatcgacaccgccggcatcaagcgacgccagcacaagctcacaggcgcggaatattattcctctctgcgcacgcaggccgccatcgagcgctgtgaattggcgctgattctgtttgatgcctcgcagccggtatccgatcaggatttgaaggtcatgtccaccgccgtggatgcgggccgtgcaatcgtgctcgtattcaacaagtgggatgcgatggacgagttcgacaagcagcgtctcgaacgcctgtggaacaccgaattcgaccgtgtgatgtgggccgagcgtgtgaacctgtccgccaagaccggctggcataccaaccgtctgacgcgagccatggataaggccttggaatcctgggatcagcgtattcctacaggcaagctcaacgccttcctcggcaagatccaggccgcccacccgcacccgttgcgtggtggcaagcagccgcgaatcctcttcgccacgcaggcgtccacgcgcccgccgcgtttcgtgatcttcgccaccggcttcctcgagcacggctaccgccgctacatcgaacgctccctgcgcgaggaattcggcttcgaaggcacgccgattcagatctccgtgaacatccgcgagaagaagaagcggaagtgacacgcgcgtaatttgccagatttcatatatctggtagattatctactcggtgcttttgcaccatcgggccgtagcgcagtttggtagcgcacttgactgggggtcaaggggtcgcgggttcaaatcccgccggcccgaccgattagccccggaattccgccacttctgagtggttgccttccggggcttttccgttttcagacaacatgagacaacatgacgacggacttacctttgtaagccattcgtaatggattaaacacggacttcatcttggcgtgttattggaattatcaccgacaattcaccgcctccgccccccgtcgtatgtgtttgccccaaacaggggctagactggttcctattgatttgatgaaagggacccgaattgaccgaaataaacgataaggcccaactggatatcgccgccgctgacgacaccgacgccgtcacctcggatatccccgaagaaaccgtaaacacccccgaagtggatgagactttcgagctttcggccgccaagatgcgcgagcacggcatgagcgaaaccgccatcaaccagttccgccatttgtatgacgtatggcgccatgaagaagcctccagctggattcgtgaggacgacatcgagccgcttggccacgtgcccagcttccacgacgtctatgagaccatcaaccacgacaaggccgtggacgccttcgccaagaccgcattcctcaagctcaatggcggtctgggcacctccatgggattggacaaggccaagtcgctgttgccggtgcgtaggcacaaggccaagcagatgcgcttcatcgacatcatcatcggtcaggtgcttaccgctcgcacccgcctgaacgtcgaactgccgctgacgttcatgaattctttccgcacttcggcggacacgatgaaggcgctcaagcatcatcgcaagttcagccagcatgacgtgccgatggaaatcatccagcatcaggaacccaaactcgtggccgccaccggcgaaccggtgagctaccccatgaacccggagctggaatggtgcccgcccggccacggcgacctgttctccaccatctgggagtccggcctgcttgacgtattggaggagcgcggcttcaagtacctgttcatctccaattccgacaatctcggtgcacgcccctcgcgtacgttggcccagcacttcgaaaacacaggtgccccgttcatggccgaagtggctatccgcaccaaggccgatcgcaagggaggccatatcgtgcgagacaaggccactggtcgcctgatactgcgtgaaatgagccaggtccatccggatgataaggaagcggcccaagacatcgccaagcatccttacttcaacaccaactcgatctggattcgcatcgacgctttgaaagacaagctcgccgaatgcgatggtgtgttgccgttgccggtgattcgtaacaaaaagaccgtgaatcccacggacccgaactccgaacaggtgattcagctggaaaccgccatgggtgccgcaatcggtctgttcaacggttctatctgcgtccaagtggatcgtatgcgcttccttccggtgaaaaccaccaatgatttgttcattatgcgttccgatcgcttccacctgacggacacgtatgagatggaagatggcaattacatcttcccgaacgtcgaacttgatccgcgatactacaagaacatccgcgatttcgacgaacggttcccctacgccgtgccatctttggccgcagccaactcggtttccattcagggcgactggacattcggacgtgacgtcatgatgttcgccgacgccaaacttgaagataagggtgagccgagctacgtgccgaacggcgaatacgttggcccgcaaggcatcgaaccggacgattgggtgtgatttacaacacggtcgaacgataaaaaagatattatttttgtgaaatggcgctcaactgtggaaaaagcctctaagatagagtgagtgtggggaaactcatacgcacttataacgaaacaataactatacgtgaggactaatggcagagggcacaagcggacgtcggcgtttttccgacaaatggggcaagcacgagctggacgtactggctgtgttgtcatccgcgttcccgcaatggctcacatcccgccaaattgcgcagcgcgtcaaggcttacgccgactcgtatggagagctggcagatcaggccgccaaggccgcgttcgccaagcagttccagcgtgatcgcgccaagctcgctgcgatgggcattgccatcgaatcacggcagcctgagtactcgtccaagtcggaaggccaggacttcgcgtcctatcgtctgcagttgggcgacgaaccgcgcatccgcctgatgttcgagccggaagatatgccggtgcttgccgccgccaactatctggctcgttcgatgtcgatttcttccgagccggatcagtcccagctcacccagcatgtgtcgcgcactacgccgcgtgtgccgcagaccccgattcccgggcttggcttggattcgattgcgcctggcttggggacgcagcccattccggattcactggtcaaggttattgattcgcgtcgtttcgccgccaccgttgacgtggatggcgaacacctgaacgtggcatacaccgattccgacgatttggccatgtttgtgcttgagcatccgggggccacgattgtcagcccgcaagaggctgtggacgcttatcatcgccgtttgcacgccgccagccggttcactctggccgacgaatccgccagtcctgtgagcgcttcggtggtttccccgtcgattagtcgcgatgtgcgagagccgggtgatcccgagtctatcaaggctcagaacaagaagaacggctccgctttccaaacgggcagtgaggttgatcgtcgcctgcgtctgatgctgttcctctccgctcatctgggtgaggaattctcgatgagcgagctgggcgaacgctttatcggcaagccaaagaacgatgatgaactcaagaaattcgtcaacatcatccataaggacatcaacaccctgaccaccgtttccgacgatggtgagatggccggcagccagttcttcgatattgactggccgctgctggatgccgagggtattgtttccgccaccaattcgctgggccttgaacgtcttgccggcatttcgccgcaatacctcagcatgctcaccgcctcggtcagctacctggcgcattcgccgttgctgccggacaagcagcgtgggcaggccgaatccctgtatgagcgtttgcgccgtcatgtcagtcccggtcagaccccgtggctgagcctgaccggctatgagctggagccccgaagcttctccatcgtcaagcgtgcgatcaacaccgattcgctgttggacatggagtacaccgacggtacaggtcgtacccgccgcaagctggtggcccccgccaagatcttcattgacgaaggcgtgtattatgccgccgtctacacggacgttggttccgccgcacccaaggacaaaaaggcctacgtctccaaagacaagaccctcgacaaggccaacggcaagccgcgcatctggcaggtactgcgattggcccgtatcgaaaaggcggaactggtcaagcccaccaagcagatcaacatcccgaacatgccggtgagcgaactgcgcaagtggagtttcgacaacggtaccgacgcggtgttcatcaccgatcagcgcgatctggcattcatcaagacattgccgggcgctaccgtcgaacaatgcggtgccggtgaaaaggtgcatctgaccgtttcctccgattcctggttcgtggccttctgcatcgcccacgcgcgtcatatcacggcggtcgccccggaaacgttgcgcaccatgatcgtggcacgcgccgaacgcgaactgagcatcagcgagaacaagtaaggagcctttcatgccttggtggatatggctgattctggccctgttcatgctggccatgattgttgccggactcatctatgcagcccttcatggactccgtgccttgaaagacatgtccgacatcggcggccaactcggtgaacgcgtggccgcgatgggggagcccggcacctctgccgacaccagcgagccgcctctgttcactcagccgctcagcgtggcacagaatcgttatgccgaggcccatgcgaacgtgattcgcggcaaggccgccaagcgcgaacgccacacccaggcatgggcccgctggaagcgattcaacaactaacggaaagcagcaatggcacgtcaccaacaccataagggcaatgccgattcccagacgctgagcccttcgcagcggtacgcatcattccaaaaggtccaacgccatcgggcgtccgcagcagcgcgattcgccgaatccctgcctttcgaactggacgacttccagaccgaagccaatgacgcgctcgaagccggcagcaacgtactggtcgcggccccaaccggtgccggcaaaaccgtagtggcggattttgccatttacctcgcccaggaacgcaacgtcaaagccttctacaccacaccgatcaaggcgttgagcaatcagaaataccatgatctggtcgacgtgtacggcccggacaaggtaggcctgctcaccggcgacacctcgatcaattccgaggcggacatcgtggtcatgaccaccgaagtgctgcgcaacatgctctacgagcgttccaccacgctgaacgcactgcgctacgtgattctcgacgaagtgcactatctggccgaccgattccgcgggcccgtgtgggaggaagtcatcatccacctgcccaagacggtcaagatcgtcggcctgtccgccaccgtgtccaacgtggaggatttctccaactggattgcctcggtgcgaggcgacacaaaactggtgatcagcgaacaccgccccgtgcctttggaacagcacgtcatcgtgcaggcggacgaacacaccgagcccgaggtgctggacctctatcgccgcgacggcaacggcgagcagaccaccaaactcaacgccgaactcatcaaccggctcgaccagttggaccgcaaggccgcacgccggcgcggcgaggaacgccccgataagcgcaagggcttcggcagaggccgcggcggcaaaggcgccaaagaccgtgccccgaaagcggaacgccacaccccgcgccgctgggccgtggtggacgagcttaacttcctgggaatgttgcccggcatctacttcatcttctcgcgcaacggctgtgaccaggccgtggaacagtgtatcaacgctggactggagctcaccaccgatgaggaagtgaccaggattcgccgcatcgtggatgagatggtggaggggcaactcactcaggaagacctgaaagccctgcagttctccaagttccgctttgcattggaagaaggcttcgcttcgcatcatgccggcatgattgccctgttccgtcagatagtcgaacgattgttcgaagaaggtctggtcaaaatggtgttcgccacggaaacactggcattgggcatcaatatgccggcccgctgcgtggtggtagagaaactcgaaaagttcgacggtaccggtcatgtgggcctgacgcccggcgaattcacgcagctcaccggtcgtgccggtcggcgcggcatcgacaccatcggccacgccatcgtggtcgaccatcacggttttgtgcccgccacggccgcctcgctgtcatccaagcgtgtctacccgctgcactcgagcttccgacccacgttcaacatggccgtgaacctgctcaactccagcgactacgagaccgcgcgcgtcaccctggaccagtcgtttgcccagtgggaggccaacgaatcggcctggcagctggaatcgcagattaacacactgaagaacgcgctggccggatacgaacaggcgctcgcatgcgaacacggcgacttcaaacagttcatgaccctgcgtatggagctgagcgacatcgaaaaggaaggccgccgcaaactgaagcacgaagtgttcctgaccgatcaggagcgttcacgcgctttccagaacctcgaccagcgcattcgcgatttgcgcaaggcggaacacgagcatccatgccgcaactgcccggacctccagcaacacctcaaatggggccaccgctgggcccgcgagactcgagaactgcagcgcgtcaccgatcgctacgactcccgcaccgggtccgtggcacgccagttcgattgcatctgcgatattctcaccgggcttggttacctcgaacgtcatgtcaatgcggccggccacattgacatgacgttgactgaaaaaggtctgctgctgcgccgcatctacagtgaacatgacctggaactgtgcgaggcgctgctcgccggcacgttcgacaagctcaacgccaacggactggccgctgtgctctcttcactggtatacgaggccagacgcgggggagacggcgaaccgaggcactacccgggcggcatctccgggcccatcgccatcgcttcgtccaagctcaagggcatttgtgaagacatcgatatcctgtgcgaggatcacggtctggacgagatgcagcggccggatttcggcattctcgacatcatgtatgaatgggcggatggcggttcgctgggatcgtgcctgtacggcaccgacatgaccggcggcgacttcgtgcgcactgccaaacgactggctgacgtgctgcagcagattgctgtcgcccagccgctgccgttcgacgggggagagcggctggcaggcctcgcccacgaagcggccgaccgggtcaatcgtggcgtggtggcctactccggcgtggactgacggggctgtttgacgggagtttgtcagccgacgtcggaagcttggaatagcggccaagtccgaactgttgcgtaaattagtagggttaaagatctttcaaggaggatgccgatatggcagaacgtagcctcaggggcatgagcatcggagcgaaatcgctggagtccgacgacaacgtcgatttcgccgcgcgaaacgatgtggcgtatgtatgcccgaagggccaccgcaccatcctgccgtttgccgagggtgccgaaatcccggacgagtgggagtgccgttgtggttccgtggcccaccgtgagggcgacgccgaccgtgagggcgacgaaatcagcaaacccacccgcacccactgggacatgctgctggaacgccgtagcgaagaggaactggccaccctgctcgaaaagcgcctgcaaatgcaccgtgacggttggattcccgactacgagtgatctcctactgaacaacacgtgaacttgatgcccagtcatcccgactgggcataatcattgttggaacaagtcgcattgtttgacgaccattcaaagcagtcgacatgaacaagggggagtggaatctcaatggcacagcatccgatgaaagtggtcctgttggatctcgacggcacgcttaccaagtccgacggcggcattatcggctccgtcatcaagaccttcgaagagatcggtcgaccggttccggacgccgccgaactgcgacgcttcatcggaccggcgattattgaatctctgcgtcgcaatcatgtgcctgcggaagatctggatcgggccgtggacatctaccgcagctactacggagaccgtgccgtgttcgacgatccgaacgagcccggcaacaaggtgcccggacgactggtgaacgtcgtattcccaggcatccgtgaacagctgctcaaactgcatgccgacggttactacctggcactggccagctgcaagcccgaataccagtgcatgcctatctgcgaccatttccacctgaccgaactgttggacggcatctatggtgcttccaaagacaattcccgtctggacaaagatcaggtgattcggtactgcttcgacaaaatcggttttgatgctgcagcgggggacagggccgtgatgatcggcgaccgctacaccgacattgacggcgcccacgcctgcaatttggacgccatcggctgccgctggggctacgctccggccggtgagatggaggaacacggcgcgtacgagatcctcgagaagcccgagcagatcgaagaagccgtgaaccgttatttccaaacgcactgaaacacaacggcgaggacttcttcatgatgggatgcgatggagcctgcgccgcgggcttcgacctggttttcatcggtttgccattgttgtcgctgtatgagattcccatgctgatatggttcatttggcgagcattccactggaaacgagatgacaaggattggctgaaaggcacggcgattcttgcaattgcggtggtcgctccggtgctcctttggctgtcggccttttggctgtcggcctggtatgcgtggactagttgatacaggcgactgaatcctcgtcaaggataactaatctgacataacgtacgttatcggttaatagtatgtggtgattttagccgaaccagtagtatctagctgcggattagcctcgccgcagagaatcggctacttcgcaacatcatccttattccggtgagaagcaacgcccaaacgcttgtccatttcggtttctgaggcgttgcgtgcctgcagatacatggcgatgagttccagcagcaccagcacgaatatgatgattgctccgggcaattgcgcgtggtcgtagaacgcgagcatgcgagcatccatcaaatccgctgtaaacgtcaatacgggaaacggaatcagcgccgccgcaaacgacatgaaatgcgttttcaccatcggccagtcgaccggatcgaccggcggtcgccggcgtttcggcgtgaacagatggcctcggctgaccgttatagtgatgatggacacagcaaagatgacggcgaccatccacagaacgcccggcaacaatccaacaacaatcccgttcacccggtcctccaatcagtcataataatcaccgcaacatataaaaacataagatggcaggcaacaaaagcaacacatacaacaaagcgacctgccgaccaaagccggcaagtcgccaacaaccatacatgtatcaggcggttgcgcgttgcaagcgctgtgcctcgagcttcttgcgcatcctcatggcagtcagttcatcaatcggacggcccgtggcaatcgtcagcggcttggcctcaagatcaatatattcttcctgttccaaggccgtctcaatctggtgccacaacgaacccaccgacacggcgaacactgccttaccgctttgcaacagttcgagcatctgttcgctggtagtgcattcgtgcacgttttgaccatcgcacatgatggtcacattggccagctgatcggtgctgcgttgagtcaagaatccgatggccgccgtcacgttctgcagattcacaccggcatcaagcagcttcttggatacagcgagaatcaccacatccttaaacgagtacagtcggcgtgaaccggagccatgagacggcgtgatggacggctcaacaatctgcttgcgtgcccaataatcgagctgtcggtacgtgatgccggccaccttggaggccacagtgccacggtagccgcgcttgatctcctcagtatcgacattggagaacaactccccctgaatcgcgtcagcgttcagattctgacggtcctcaagcgaaacatgaagatgcagccctgtctgtcccatggcactcccctaactcatgcgtgtctcgcatgtgactcacactggtgtaatcacatgattgcaatttctgcaatcagtctaaccccgtgctgggtgtggactattgggaaataatggcggatttcgtgaagaacacgagacggaatttaccgatcatgatttcgtcgccgttcttcagcgacgcctgatcaacacgctgacggttcacgtaggtgccgttcagacttcctgcgtcaaccacaaagaactgaccgttgaccctgcggaacacggcatgctgacgggatacggtggagtcgtcgagcagaatatcagctcgcggatcacgaccgacggtgatttcatcctcgtcaagcaagtaacgagaacctgagaccgctcccctggcggaaatcagcaatgccgttccctcggacaatctggtgatggtgtccagatcctcttgagtcagcggtcgatcgccggtggtggtaatgggcagtacattaatcgcgggcaggccgataatggtggtttcgcctgcgctaggaatcgggttggtcataatcccctattctaccgtctttgcatactggttttgcgtagcttcgcgtacttcgtcgataatgatgctgtcagaaggctgcacgttgacgttggatccgtatttcacctggagctgagcgcccacaccgccggcgatatcgactgcgttggacagctcctgcggattgccgatggccttcaccgtgtatgtgggcttgatggtggtgccatccacgatcaagccttcctcggcgtcctgaatgtaggtggaggtgatgacgcgcacgttattgatggcgattacctcggcgccggcattgcggagttcctcgatgaggttgaacatgattgaggcgtccactttagtcgtcgagcctcgtccgatccggatggtcacgccttggcccttcgccgggagtctgccggagatcaagccgctggtctcttcgttttgcttggcgatcttacgcgcctgctcctgctcgttagccgccgatttcagtgagttgagctggctgttcaactgggttttacgctgctcgagattcgagatttgcgtattcgactcgttcagcagccttaccagttcgctctcgtccatcgtttcgtacgtggatttagtgttattgatctggctcatgtaggcgaaacccagcagcgcgcacatcagagcaatgagaatcgaggatagtagccgtgatttgttgctggcccggttgagatccttccggggcttcttgcgcaccgtggggaacgacccggtttccatccggtcgttgaccttgtcttgtgcatgctggtcgcgcattttctccagcatgttgtctgattgtgctttacgtgccatacgtcagtacccttgtcagcctcggaagatgaagcgtctgatcgcggacacgttggagaagatgcggatgccgagtacgacgatgacggccgtctgcagctgcgaaccgacgccgagctggttgccgaggaacacgagcagtgttgccgtcaccacgttggcgaggaaggagatcacgaacacgcggtcggagaagctgcgctcgaaataggctcgcgcggcacccagcagggcgtcaagagcagcgaccaccataatcggcagatatggctgcacgatgatcggaatgtccggcttgacgaacacgccgatgacgacgccgatgatcagtcccagaacggctgccattattcattcctttccgcgtacttcacttctccagtgactgctgcctcaagtgtaatcgaattggatttgctcacctgcgggtagataccggcttccttgaaggaatcgtaaagacttgcaagtctcttctcccccatcgcttcggccaaggcgctcttatcgcctatggcttcaatggtataggggctttgtatcgcggtcatgccgatgagaatatgcccgccggccttgcgtatcgaggtttgcgcgccgagcctattaccgttgatggcaatggcttcggctccgttttgaaacatcagggagaccagttgttgcagatccagatcggtgatgactcggatgttcgtggaggtgccgactctcgtcgaggaggattgatccgactggcttgccgcgattggatcggccagcgtcatggtgattccttcgccttcgaccaccgtggcaccattgaccatttcgtcttggataagcgtgtcgcttttcacgctgccggagattttcttggactgttcgtcaacttgggatcgcaaattattgacgtccgtggtgagttcgtctatctgcgagttgcgattctccaattgcgtggccaaagtctgccgtacctgcttacgcggatcggattgcaactgttgcacgaataggctgcaggcaaagccaacgccgacgcagatgatgaatacgacgatgcgattaaaccagatggagaaggtcgaacgatgctcatggaccagtcgtgagtcggagaacatcggatccatcggacgattgacaagatcatcgatgagctgaagcgaatcgtcgttggttttacggcgacgtctggtgcggatggcggcggcgtcatccggggaaagcgcatgatgcgattccgcgcctcggactgagtgggagaacacggcgcggcgtcgtaccggctcattctccttgggtatggggaacgagaccggggccatggcctcaagcgccatacttctcccccagttccttgcgtagcaatccgacgccctgcttggtatagatatatccggcgagccaatacatggcgatgccccagatgccggcggccagcgcggcgatgtagagcaagtggaagaacgtactggtgcccaaatcggcgaaaataagactgacgatggaaatcatcagcagcgcggtaccagccttgcccacgaaatgcacgggcagcggaccataaccgtactgggcaagccatagcacctgaatcgccatccacagatccctcagtcccacgataatcagcatccaccatgggatgatgccggcgacgctgagggccagaatcgagcagaaaatgagcagtcggtcggcgatcggatcaagaatctgaccgatcttgctcacttggttgaatctgcgcgcgatgatgccgtcgagtccgtccgaagccgaggaaatggcgatcagggctagcgccgcaatcacctcatgcttggagatcagcacgctgatgaaaggaatcgagatgattcgcagcgcgctgatcaaattgggcacggtgaaatagatgtcacgtgcttccggactgtatctggcgttgactttctggttggtcatatcgactaacagtctacatgcgggaggcttgcagagcggtaacgatgatgccgcgtgcgccgacttcgtacaaatcatccatcagctgattgaccttggccttgggaaccatgactcgcacggcgttccactgtttgtcgtgcagcggggagatcgtcgggctttcaaagccgggggtcacggccacggcggcggcgaccttgctgatcggaatgtcatagtccatcagcacatactgatgcgcagtgagcacgccttgcagacggcgggtcagcacggccagacgcggatcctgctcgttcagacgcggcgaacgaatcaggcaggcttcggagtgcatgagcggttcggcaaacacgcgcaggccggcgttgcgcagggtggtaccggtggagaccacgtcggcgatgaggtcggccacgcccagctgcacggaggattcgaccgcaccgtccagatggatggtctcggcctggatgccgtgctcgaccagatagtcgtgtacgagcttatcgaatgtggtggccacgcgcttgccctgaacatcctccagagtggtgatcggggattcgttcggtgcggcgaaacggaaggtcgaggcaccaaagccgagcggcatgtgctcgagcgcggcggtaccggagttcttgagcaaatcctggccggtgatgccgacgtcgatggcgccgcggcccacgtatacggcgatatcgagcggacgcaggtagaacagctcgatgccattgtcgggatcttgcacgaccagctggcgagggttggtgcgcagacggtagccggcctcggccagcatgttccacgcgggttcggatagcatgcccttgttgggcactgcgattctcagcatttgcgttcctctcacaggtgcttgtagacgtcctcaagcgtcaggccgtgcttgatcatcatgacctggacgtggtagagcagctggctcatttcctcggcggtgcggtccgcaccctcgtattcggcggccatccaggtctcgccggcctcttcgatgatcttcttgccgatgaagtgggtgcccttgtcgagctcgtcgacggtcagggagccttcggggcgggtctgggccttttcggacagttcggcgaacagggattcaaacgtcttcatgtgattcagattcttttcttgcggttatggatgaaaggtggattgcggttcaggcttggagctcaggccttgaacgcggcctcggccttggtgcggatgtcgtcgatggcctgggcgggattctcggcgccgtacacggcggaaccggcaacgagcacgtcggcgccggcttcggccacgatgtgcgcggtcttggggctcacgccgccatcgacctggatgcgggtcttcaagccacggcgggtgatctcatcgcgcaggcggcggaccttggccatctggttgtcgaggaacttctggccgccgaagccgggctcaacggtcatgatgaggaccatgtcgaactcgtcgaggatatcgaagatcggctcgaccggttcggccggacgcacggcgaagcaggccttgcagcccatctcgcgcagctgtcgggccagacgcacgggggcgtgggtggcacccatgtggaaggagatggaggcggcgccgagcttggcgtattcgggagcccaacggtccgggtcctcgatcatgaggtgcacgtcgaccggcagatcggtgacctgacagatgcggccgacgatcggctcgcccagggtcaggttcggcacgaaatgatgatccatgacatcgacgtggaccaggtcggcgttggcgatggccttgagatcacgttcgaggttgcagaagtcagcggacaggatgctgggtgcgattgcgatattgctcatggtttcctaccttatctgtgcaatgggacttggggtcccgtgtttcgcgctgtttcggcgctgtttattgtggtgtcacttagtgcgcttggcctgcttcttctggcgaagctgttcctcttcgatgctctggcgttcgagctcgtcggcggtgaccgccgcaagcccgcgcgcctgcgccttggggtccggaccgtactggtagagcacgacgaacaggatacagccgagcacgaagacgatgatcgcggtccacacgttggtcctcaggcccaggatcaccgtggagtagttgatgcgcacgttctcgatccaggtgcggcccaggccgtaccacatcaggtacatggcgaactgctggccggccttgagccggtcggcgagcttgtggccgaggtagatgatgagcgcggcgccgatgaggttccagatcatctcgtagaggaacgtcgggtggaacagcgtggtcctgtagtccgggcattgcgcgccggaatagcagatttcggatttgccgatggcgtccgcgtcgttgagcttcaggccccacggcaacgtggtgggccagccgtagagttcctggttgaaccagttgccgagtcgtccgatggcctgggccacgggcagcgcgggggcgatggcatcggcgaagatcgcgaacggatagtgcttgtggcggcaccacaggaacgccaccaaggtgccgacggagatgccgccgaagatggccatgccgccttcccacaccttgaggatgttgaccaagttgccggtgggcgggaagtagtcggccggcgtggtgatgcagtggtagaggcgcgcgcccaccagcgcgcagggcacggtgacgagcgtggtgtcgagaatctggtcgaaggtgccgccgtaccgcttccaacgtgtggtgaggatccatacggccacgcagatgccgatcaggatgcagatcgcgtacatgtggatggtgaacgggccgatctcgaacttggagaaggtcggcgagggaatataagccagattcatcgtgcctctacttgctggtgctcatggtgtgtccacgcgcgggttgtgcttgatgctctgtgactaccctaccgtgtcacggcacaacccgcgtgaggcgcaccgggtgttcaccgggcgttgtggatgccttcggccagttcctcgctcttggcggcgagcagcttcaagccttccttcgggtcgcgtgcggtcttgttgtcgtccgcgagcagggtgtgcacgagcgcggagccgacgatgacgccgtccgcgtaggagccgaccttggcgccctgttcggcggtggacacgccgatgcccacgcacacgttctcggcaccggcctgacgggtgcgctccacgagcagttcgggcgaggcgtcgatggtggcgcgttcgccggtgacgcccatgcgggcggccgcatacacgaagccgcgcgcgttgcgggccacggtttcgaggcgctcggtggacgagtccggggagaccaggaagatgcggtcgagtccgtgacggtcggaggcttcgatccactcccccgcctcgtccgggatgaggtccggggtgatgaggccggcgccgccggcgttctcgaagtcgcgggcgaaacgctcgacgccgtagtggtacacgaggttccagtagctcatgatgagcggcacgccgccggtgttggccacggtttcgacggcctcgaacacgcgcttgatggtctcgccgttgttcagggcgatggaggcggcagcctggatgaccgggccgtccatgaccgggtcggagtacggcaggccgatttccacggcgtcgacgccgtgctcgaccatcgtcttgaaggcgtcaagcgagacgtccgggttggggaagccgtagggcaggtagccgatgaaggcaggcttgttctcggccttgaacttggtgaacatagcgaccgacttgctgggcttgtggctgatgcccagcggctggccggacggcgtggttgcttcgttggtcataatcaacaatctcctcttcttgttcaggcgacagtattgccgtgggcgccggtcacatcgagcgcggcggcctgatcgtcggtcaggtagccgaaccacttgccggcggtggccatgtccttgtcgcctcggccggagatgttcacgatcatcacggccttgtcatagcccttggctttcagatcggcggcggccttgtacgcgccggccacggcgtgcgagctttcgatggcggggatgatgccctcggtctggctcaggtcgcggaaggcgttcatggcctcctcgtcggtggcccagctgtagttcacgcggccgatatccttgagccatgcgtgctcggggcccacggacgcatagtcgaggcctgcggagatcgagtaggtgtcgagcgtctggccttcgtcggtttccagcaggtagctcttggcgccctggaacatgccgagctggccggtgccgggggcgaagcggatggcgtgcttgccggattcggggccgttgccgccggcttcgtagccgtagaggttcacgcgctcgtcgtccaggaaggcgttcatcacgccgatggcgttggatccgccgcccacgcaggcgcagatcgcgtccggatggtcgatgccgtaccagtcctggagctgctgcttggcttcctcgccgatgatcttctggaagtcgcgcaccatggccgggaacgggtgcgggcccgcgacggtgccgagcaggtagtgcgtgtccttgacgttggtgacccagtcgcgcagggcttcgttgatggcgtccttcaggatcttgtcgccgagggtcacctcgaccacttcggcgccgagcatacgcatgcgggccacgttcagggcctgacggcgggcgtcgatctggcccatgtagatgcggcacttgaggccgagcatggcgcacacggtggcggtggccacgccgtgctggccggcgccggtctccgcgatcacgcgggtcttgcccatccgcttgacgagcagggcctggccgagcgcgttgttgatcttgtgcgcgccggtgtggttcaagtcctcgcgcttgaggaagatacgggcgtcgagaccggtcttctgcttgaccagtgcggcgaagcgcggggcttcggtcagcgggctcgggcggcccacgtaacgctgctggagcgtcatgaactccttgtggaattcggggtcggccttggcttgcgtgtacacgcgctccagctcgtcgagggcggtgatgagggcctcgggcacatagcggccaccgaactggccccaatacggtccctgatgttcgctgagcggggtggtttcggatgctttcacttgtgctcctgcctttactagtcgttccactgcaagttcatgatcatcggcggtggccacgccctcgccgaccagtaccgcatccgctcccgcgcgggcgtagtcttcgacctcgaccgcgccgaatacgccggattccgccaccttgatgacgttatcgggcagatcggccgcgagttcgttgtatttgttcacgtccaccttgaggttcttcaggttgcgcgcattgatgccgatcaccttggctccggcctggcgtgcgcgttcgatctcctcgcgggtatgcgtctccatcagcacggtcatgttcaactcgtgcgccaggtcgagcaggtgcttgagctgggcgtcgtccaatgcggcgacgatgagcagcaccaggtcggcgccgtgggcgcgggcctcgaagatctggtagtcggtgacgatgaagtccttgcgcagcaccggaatgtgcacggcggcgcggaccttgtcgaaatcgtcaaggccgccgaggaatctgcggccttcggtgagcacggagatggcgcttgcgccgcccctctcgtactcgcgggccagcgcggccgggtccgggatgtcggacaggtggcccttggacggagacgcgcgcttgatttcggcgatcacggggatgccgtcggcgcgcttaagccatcgtgtcgcgtcaatcggagccggggccgccagcgcggccttcttcacgtcctcaagcgatacggtgagctcacgggcgcgctgatcctccagcgctcccgccaccagttcgtccaaaaccgacatggtcctccctttgttggtgttcggtcatgcgccactctaggtcacgccccgtcccgattgccgaacccgtcctacattctgggctattcctcgttggttcgtatcgctacggaaccagagcggccaacaaaaaggaaaatcgccatgaatatcggtcatacggcctgggattgattccattgatggcatagactgggcgcatgtgcaggagattcgcgcttgatttggattgggatgccgtggcctcacagttcgcggtagacgaggatgacgtgcgcgttgacactctgccacagccttcctacaacatcgcacccatgcagaacattggcgtggtggcacagggcaaggatggccgccgtcatctgaccggtgcctattggtcgctggtgccgcgatggagcgccagcaaagtgctgagctaccccacatataatgcgcgtgtggagtctgcgcatgtcaagccggcgttcgccgaatccacaaaatccatgcgagccatcatccccgcttccggctactacgaatggaaaggtcgcaggccgttctattttcacgcaccacatgatgaactattgtctttggccggcctgtactcatggtggaggccgtctcccgcatcgccatggcagctgaccgcaaccatcatcacctgccctgccgcggacgagttcgtcaaggtgcatgatcgcatgcccctgctggcgcctcggaatatggttgcctcatggctggaccgctccgttgacggagccgcactgttagattccatgcgggaagcgggtaccatgctttctcggcatctgcaatttcacgaagtcgcgccactgaacagcgacggcaaacgtcttattcagccattggattccgccgaacccatgcgtctgttttgagctcttgcagctggaaccggctatgcagctgtatatgaagacgggtcaatcaacgccccgctgatagctaacctcgtatagccatcagtcaaaaacaggtctcttctgctcgacattggtcgactacgactacttttgcaccaatccgcgcaacaactcgatctcgtcgcgatgcgtggcgggcgtctgctccttggtttcgagaatcatcgggagcttggccatggttgggtcgttgaccagtcgcgtgaagaacgggatgccgagctggccctccccgatattggcgtgacggtccttgtgcgagccgaggccgaactgcgaaccgttcacatgaatcgccttgaccttggccaagccgatcgcctcatccaactggcgcatcacgccgtcgtagtcgtgcaccaaatcgtagccggcatccaacacatggcaggtgtcgaacgtgacgccgacgttcgccttattctccacgccatccatgatcgtggcgagctcatcgaaattgcggccacattccgtgcctttgccggccatggtctccagaagcaccatgacgccggtcgtacgctcgaacacctgattcagtccctcgctgatcagccggcagccggtctcggagccttggcccacatgcgcgccgggatgaatattgatatacacctcctggccggcctcgcggatggcggtcagcagctcgatgtcctcggccaacgcctcgatcgcgaatgtgcgcttggcctcatccttgccggccagattgtagacgtacggcgcatggacgaccaacggcccatagccctcagccttcagacgcgcaccgaacgccgccgcgccggccgggtcgagcgccttcgaacgcttgccgtacggggaacgcgggaagaacgcgaacgcggtaccgccctcctcatgggaacgttccagcagcgcattccatccgccggccgtcgacagatgcgatccgatatacagttccatcattccaaactcctcgtgttccactcgctgttcgtgttaccgctatcatatggtaggcggcatcgagcgccgcccgcacaaccgacacgagacacaactgttcacccgaccaaaggagacccgagcatggcggcagccggcacacccaaggacgataccggccttgaacggaagatggagtcgcgtcacctgacgatgatctccctgggcggcgtgatcggcaccggtctgttcgtcagctccggctacgcgattcatcaggcgggaccgttgggcgcgatcctcgcttacgcggccggctctctgctcgtatactgcgtgatggtgtcgttgggcgagctgtccgtggccatgccgtacgccggcagcttccacatgtatgcgaagcggttcatcggccccggcaccgcgttcaccatcgccatcctgtattggctgaactgggcggtggcgctcgcctccgaattcacggccgcagggctgttgatgcagcgatggttcccgcattcgccgtcctgggtgtggtcggccgtgttcattgtggtggtgttcgcgctcaacatcatgtccgtgcggctgtacggcgaggcggaattctggttcgcgtcaatcaaggtgttcgccatcatcgcgttcattgtgatcggcctgctggcgatcttcggcgccataccgattgccggtcatgattccgcgccgttgctgggcaacttcgtggccgacggctggttcccgagcggcatcgcgccgattttctcgactctgctgaccgtggtgttcgcgttctccggcaccgaagtggtgggcgtggcggccggcgaaaccaaggatccctcgcgtgcgattcccaaggccgtgcacaccacggtgctgcgcctggcgattttcttcatcggctcgattctggtgatggcggccttgatcccctggcatcaggccggcgtggatacgagcccgttcgtgctggtgttccagtcaatcggtatgccgttcgccggcgacatcatgaacttcgtggtgttgacggccgtgctttccgccgcgaactccggcctgtacgtgtgttcgcgcatggtgtggtcgctggccaaggagcggctgattcccgaacgttttgctaggacgaatttccgtggtgtgccggtgtgggccgtgctgttcagcatggcgggctcactgctggcgttgctgtcttccgtgatcgccgcctcgaccgtgtatctggtgttggtcgccgtgtcaggtttggcgacgctggtggtgtggttctccgtatgcgtgtgccatatccgtttccggcgcgaatgggcgcgggatgggcacagcgccgatgagctcggctatcgtgcgcccggtttcccggtgctgccgtggctggccatcgtgatgtgcatcggcgcgctggtgctcgtggtgctcgatgatacgcagcgttcgaccctgtattgcatgatcccgttcgtcgcctgctgctacgcggcctattacgcactcgaacggcagcgcaaacgcgaaaacaacgcctaactcgatttcgaggggctgatttggcacttgccggagatctatctccgtttcaaggggctgatgcccgagtagacaaggctccacaatggcgtaatggcgttgccgcaaagccgtttatactcgtggtttggcgtttgagcagcccctcgaaagccaagtagatgtccccaccggacgaaatcagcccctcgaagccgagaaaccattgatggccgattatgttgagcccagtgacgtgcctggtcccgtgctcgaactggtacaacaattggagtttggtttttgcaaagggcattgttatggacaaggtgttggtgtcgttcgcagacagctaatgcgcgttgactcgtcgcgctaagccgtggtcaccgtttgggcccacggcacttctgttgtgccatttcccacgcacttggtcgaaggctggcgatgggccctgaccaagcgcgtcttcctatccgcgatcatactcgggggcaattgtgaacatcgcctgcgtagtcagtatcaccggcgcgcagatcatgttggccgcccgtggcgccaacgcggtcatgatcggactgctcggcacggcaatgggcgtgagtactttggtcggctcgctgttggccaacaagctagtcgatatggttcccacagggaaactgattgcgggcgcgctggcgttgttcgtggtcagccagatgccactgctattcctgcacagctacgcggccattctgatctgccagattctggccggcctgccgttccccgcgttgaacgctggtctgctgggctttctctacggcaagacacccgacaacatgcaggggcgggcttctgccgtatttgaaaccacggtcggcatactgggcgcagcatgcccggcgatggtcggctggctgttgcaacagccagatctcggtttcacggcggtgatggccgtagccgtggtctgttccgtagcgggattggccgtatcgttggccggcccgctgcgcagcattccgaatcccgaccagtggtcggaggttttcctgtaacgccaagcagcggagcgccggtttatatcaggtcgtacggcatctgacgcttgaccagccagaagatgccgaggccgatgaacaccagcagattgaatccgccactatgccaccacaccacggcgatcagcgtcgccatgcgcgccacatagaacgccacgcgaagccacccttcgcgcggccgggtctctatcgtcatgtgcgtgaagctgccgccgaacgtgcagccgccgcgcaaccatggcaccacgccctcgaagaggatgagcgccgccaggaagaggatcgagccggtccagtcgaacggttccatcgactgccatgagccgttggagcccgagggcaggtttgggcggacgatcatgacgaacagatgcgtcggcatcacggcgaacccgatcagcgtcatgtcgatgatgaacgtgatcagccgcctcatgaagccaggtgtggtggtcggcgtcatatcggcgacccgcgccggaatcaggcgcagcgaaagcatggccagcgcgaatccgatcagcgcgccggtcgtgttccacaggagatcgtccacgtcgaacagacggtaggcgcacgggaacacgcccatgaggccggtcagctgcatcgtctccagaaacagcgacgtggcgaatgacagtactgcggtaaccggcagcggccaacgccagatacggcccatgatgaagcccaacggcaggaagaacacgatattaaacgcgatttgcagtacggcggtgagaccatcggtacggatgtcaccgatgaactgcaatggattgagctgtggcgtcagatggtgcgcggcgcaataggctgccgcatcggccggcatcggatacagtgtgaagcacagcaggccgagcaggtacagcaccgtgccatacgccactatggccgacgacagtcggatgcgattgtcgcggtgatacagcaacgccagcaccggcacggtcagcagcatggacacaaacggccacaatgccagcgcgaacgcaaacggttcggaaaagttcttgagaaatcccatcttcaatgctccctgcttcggtccgctccattcggttttggaccatgactctcgacttctgattccaaggtacggaacatgacggcatgcgggtatcagccatgagagcgaaatcattgggatgaaaggcgattcgtctcattcgcatggatgaggaagatgcaccagttaccattgacgccgacgaggatggcgtggtcggcgccgtgaccgcgcagatgagcgagcgtacgtcgttcatcgtgttggaccagattacttccgccaccgctatgctgtttacggcccagcgcatcgccgccgaagcccatcgccgcggcatccgcattttggttgatggcgcgcacgctcccgcccaactggccgatccggccggcggactgcagtccgattggtgggtcggcaattttcataagttcccgtgtgcgccgcgtggcacggcattgctggtgattccgcccgaaggcggtcaggatggtcaggatttgtggccactgatcgactcgtggggtttcgctgacccgttcccggagcgattcgatgagcaaggcacccaggatttatgcggtccgatcgccgcgcccgagtccctgcgcgagatcgagcgactgtggggctgtgatgccgtgcgccggtacatgcccgatcttgccgattacgcggagcgtcgggtatccgaggcggccagcgcggtcggcggcgaactgtacctgcgcctcaccgcccacgcctacgtcaccgccgacgccatagaccgcttcgccgaacaatctatcccaaccatcgtcggatggctgcgtaagcgaatcgtatgttgcgtggtgccttaactatggatgattaaggcgccaatgcaacattcatgaagccatgtctttgaacagtgagcaacgcgcggcgactatccgcgaatttcaggagaacatgagccggctgggtctgaccgccgaacggcggcagggattttggcgtcagcggcagcagagtggagcaaatcatcaccctcaagtcgggcgtgctggagtatccgtggattatccgcgcctatctgctgagcagagctgagacacagggcgtggaactcacgccgttcatggcgttacgcggaaatccgcacgattattggttcctcgacggcgactttatcgaccgaggcgaaatcgattaaaaccgattgataatcggccatttacacgcaagaggcgccgtcaatcgcctcgcgcatagaggccatcgctctccgtgcaggtggcgatgcgtgtgtagtattccgtcttgtcctcatggtcgatacgtgcgccgcaatgctgctgcaccgcaagacttgccggattggttttgtggacactcaggtaagcctccttgatgccgagctcgcgggccttggcaagcgtgagcttgagcccggcggtcgcgtagccgtgaccgcggtattcgcgggcgacaccgtagccgatgtggcccggaccgttgcgcaggaagtcggtgagccggtgacgcaggttgaagatgcccacatagtcgccctcatcgttgacgagaatgtacttggtggccggcacccagccgtcaggcaggccgatgcccatcgactcgtcacgcaaccctcgcacatatgcggcgaaccgttcacgattcatgccggccgctgggttttcgaatcccgtctcctccgccgggaatttcgcgaacaagtcaaacgcgcgttcctggtccgccagccatgtctcaatcagccgcattggtcacactcctcctgttgacacagcagaccacactactactgtgctcggccaa

SEQ ID NO: 1305 - DNA, 2958 bp, Unknown
  R157_18m  MAG No. k141_9479
cacgctcaaactcggggatgtaatcagcgatgatggcgtccacaagacgccgagctcgttcttcatcatagatatgagcagaatcattgcgatcgcgcagcatgcgcagccacaacgattcgtccatgaaatcatagtattgaaaagcggttttgagcacatctcgcggagagccggaagcggaaacagggtctccctcataagccagcagcgccttgaacagtttccaaccaagctcgaactgcaacccgaacttgtcaataatgccgctctggatgaaatcattgccgagatcctgttcgggagccttgcgcagcgaattcaatgcggaaacgtaattctcatactttttcatacagcacctttccgctacgctcaatctccgccctcagcgatgaagaaatcggctcatccagattgatgacatcaactttaagcagtgaccacagattgtcctgaaggttctgctccaagcgattgaaatcgggacaaccggccacggcaagatcgatatcgcttttaggccggttcacgccctttgcgcgagaaccgaacagcacgaccttgcgagcgccggcatcagcggcaaacgcgcgaatctggtcgtacacgtgctcgataggaaccatgacacctcccgccgcatccaacagtcccggaccaatcccggaccacccgcgcttccatcatacggccgcggcccactcaccgcacggagcccgaaccacccgaacgcggcgacgtagttgcgggaggcgggctggcgctgtagggcgtgcgggaagttcctgacgtctacttttcaggaggtgaatcctcatgttcaccacgttttctctggccatcattctcgactgcaccgtacgcattgtgctcggcacggcattgggcgcgctgatagggctcgaacgccagttgcgcgcccgaagtgctcggcgtgcgctgggatgtggagcacatcaccacgtccgactgaaacgtccgactgacgctgaccagcaacatcgcaacagtacaacaagccaacaagtgggatggggcatcgagcctcatcccactttgttattatccggcgattgtcagactcactcacgccacggtgaacgtggtgcgcttcaggtcctcacggcgcgaggagtggccgatgagcagttcgaattcgccgggctcgacgatgcggttggcgtccgggtccacgatcgtgcagttcgccaccgggatctcgaaggtgacggtcttggtctcgccgggttccagtgcgacgcgctggaacgccttcaattcgcggtcggtccagctgtaggaggtcacgatgtcgccgatgtaggcctgcacgatctccacgccggcgcgctcgccggtgttggtgagggtgatttcggcacgtacggtgtcggtttcggcgaatgtgccgtcggcgttgcttgcgccgcccgtaatggtcggttcgccgtatgcgaacgtcgtgtagctcaggccttcgccgaacgcgaacgccggatcctgggtgaggtcggcgtaccggtcgccgtgctggccgcgaatctggttgtagtagactggcagctggcccgcgtggcgcgggaaggtgatcggcagtcggcccgacgggctggtcaggcccaggattatttcggcgatggcctgaccgccgcgcatgcccgggttcggcgcccacaggatggagccggtgccggtttcagggtcgctgacgcgcttggcgaacacgccgtactcccccacgatggaggcgggcagcacctgcggcttggagctgatgagcacggtgaccatcggcttgccggtttcgcgcgagacggcggcgagcgcgtcgatcagggcgttctggccaccgagcagttcgagcgtggcggtggagcaggtttcgccgaccagctggaccacgtcgccgaccacggccacgatcagatcggactggcgggcgttggccacggcttcgtcgatcattgctcgatcgacggcggcggaaacgccgattttcgggcgaggctggccgtccgggtagaactcgccggcagggtcaggcacgaggtcgatgacgttcgcgccgcgcgagtagaccacttcgcaatcgtcggaggtgagctgggtcaggccgtcgagcacggtggtaatcatgcctcgaggctggccatccggcatccaagagacctgaccggagttgccggtccagtcgccgagctggttctgggcgtcgtcggcaagcgggcctaccacagcgatgcgcttggccttgtttgcggcgaacggcagggcgccgtcgttgcgcagcagggcgacggattcgcgggcgagttccaggttggtctgctggtgttcggcggagccgatgaccgccttgatgcgttcggcatccggcaggcgcgggtcttcgaacaggccgaggcggaatttcagggccaggatgcgggctaccgcatcgtcaatcagggattcgtcgagcagaccggtttttacggcttcgatggctccctcatagaactgtggggtggtcatgaccaggtcgttgccggccttgaccgcatcggctgcggcgtgcacgtaatcgggcttgacatgctgttcccataccgagcggccgacgttgtcccagtcggtgatcagcgtgccattgtattgccatgcgccgcgcagcttgtcggtcagcagccatttgttgaacgtgaccggcacgccttcgatggactcgtagccgagcatgaacgtgccgcagccttccttggccacgcgttcgaacggcggcaggaaccaggattcgagcttgcggtgggagaggtcggcttcggaggcgtcacggccgccctgggtctcggagtaaccggcgaaatgcttggcgcaggccaggatcgcgttcttcggcagggcctcgccggccttggcgccgccttgatagcccttgaccatggcggaggcgagttcgccgatcagcatcgggtc

SEQ ID NO: 1306 - DNA, 25235 bp, Unknown
  R157_18m  MAG No. k141_9841
atggcaaactccttcgttcgaatcaaatgggacaagacgaacataacccggaacgttaagccgggaaaccacatgggacacggccagccaccaagaccccgaaccgttccccggcttaacaacaaacccggcttaatcggagttaaaccgacatcagtttaacagtgaccgcggctgccactaccggtggcccgaatggatccgcatctgcacggacaacaacctgacgcgttcgatgagcgcgaagggatgcagtccggacaacgccgccgcggaggggttcttcggccgtctcaagcaggagttcttccataaacggagcttcgcaggtgtcaccatggacgagttcatcggcatgctggacgagtacatggtctggtatcgggacaggaggatcaagacggagttcggcatgagcatcatggatcgtcgacgcgggctcggtcttgtggcatgattggtggtgatggaatcaatgacgagtccaacaaaacggcaccagccccattgaaataagaacagattcgtaggacactgcgaaaaacaaatagggtgctttccgccatcaacagcggaaagcaccctattcttatggtattcttatgatttctctgtcctaattagagcacctcactccgcagcaatcgcggccttgagctcctcgaccttgttggtcttttcccacgggaactcaacgtcggtacggccgaagtggccgtaagcggcggtcttcaggtagatcgggcgcttcaggtcgagcttgtcgatgattgcggcggggcgcaggtcgaagaccttgcgtacggcggcggcgatctggccgcgcgtcacgccttgctcggtgccgaaggtctccacgttgacggacaccgggtcggcaacgccaatagcgtaggcgatctggatctcgactttgtgagccaagccggcagctacgatgttcttcgcaacccaacgggtggcgtacgcggcggaacgatcgaccttggacgggtccttgccggagaacgcgccaccgccgtggtgggcggcgccaccgtaggtgtcgacgatgatcttgcggccggtcagaccggcgtcggccgccgggccgcccaggatgaacgaaccggtcgggttgaccagctggcggtagttgtcatgcggcaccttggaacccagcacctcatcaagcaccgggtcaatcacgtgcttcttcagctcaacagcaagccaatcctgcgtaacctcaggatcatgctgggtggagatcagcacggtgtccagacgaacgggcttatcgttatcgtcatactcaatggttacctgggtcttgccgtccgggcgcaggtgcggcacttcaccggacttgcggacctcggtcagacggaaggcgaggcgatgtgccaaatagatcggaagcggcatcagcgtcggagtctcgtcggtggcgtagccgaacatcacgccctgatcgccggcaccctgtgcttcgtaacgttcttcgcggctggcggcggtctcctgatcgccagtcagacgggcaacgccctggttgatttcggcgctttgctcggtgatggccaccacaacgccgcaggaatcggcgtcaaggccgacttcggaggaggtatagccgatgttgcgcagggtttcgcggaccttggactgcacgtcgcagtaccccttggacgtgacttcgccgaagaccaggaacacgccggtggcggcggaggtctccacggccacatggctggacggatcctgggccagcagatcatcaagaatggcgtcggagatttgatcgcagaccttgtcagggtggccttcggtcacggattcggcggaaataagccgatgttcttctgtcatatcatccctttcttcaggacttatcgccccgcgggatgcgaggcacaatgatacggtgtcaatttttacttgtcactgcggaagcgggcatagataaaggctcgtgccaaccagcgcggtggctcgagccttacgtcttgttcgctcctgatgatgagttatagctgattgcgataactcaggcaagcgtgtcgctcaaaatcagttgtgagagaactctcacaccatcattcggcgacgaactgtccaaacaatccaaacgaatcgtctgaatcgatcagttgccctcgttggcgtcgtcctcgcccaaggtctcctcaagcagaccctcgtcgatctcgcggaaggcgatggacagaggcttctcgttgttctggtattcgaccagtgggccgacgttctgcagcaggccctcgttgagctgcgtgaagtaggagttgatctggcgtgcgcgcttagcggcgaaaatggccagcgcgtacttggaatcggcgtgcttcatcagatcgtcgatcggcgggttcgcaagaccgtcgggtgtcgggtcagtaccaaaagccattgttcttatctccaaacattggaaaatctatctcaaccgaagcaagtgtagccgtttggggggacttctgtcagccctataccggactctcgccagaggaatgtattccaaaaaaatgtgtgagaaacattacgtttttgcaaattccattattcgactcttgacaaatggcgtgtccctcgcaaaggcttgaatagaaccatgactgaaatgcgatctgcaaaaataatgtcagggcgcgtctttgcaggcgcccgagccctctaccgtgctgcgggcgtcagcggagacgacatgggcaagaagcccatcatcgccatcgccaactcgttcgatgagttcctgcccggccatgtccacctcaacaaggtcggccgcatcgtttccgaggctatcaaggaagccggcggcattccgcgcgagttcaacacgatggccgtggatgacggcatcgccatgggccacactggcatgctctactccctgccttcccgcgacatcatcgccgacaccgtcgaatatcagtgcaacgcgcactgcgccgacgccctcatctgcatcccgaactgcgacaaggtcgtgccgggcatgctgatggcagccctgcgcctcaacattccgaccgtgttcgtctccggtggcccgatggaggccggcaccacggtgctcgccgacggcacagtcaagagcaccgaccttatcgacgtgatgtacgccaccgctgacgacagcgtctccgatgaggaactgctcaactatgagaagaccgtctgcccgacctgcggctcctgcgccggcatgttcaccgccaactcgatgaactgcctgaccgaggccatcggcctggctctgcccggcaacggcaccatcctcgcctcccactcctaccgcaaggacctgttcaagcgtgccgccaagcaagtcgtcaagatcgctcaccagtactacgacgattccgacgattccgtgctgccgcgctccatcgccaccaaggaagccttcgagaacgccatgaccatggatgtggccatgggcggttccaccaacaccgtgctgcacatcctcgccatggcccagtccgccgacgtggacttcaccctggacgacatcgagcgtatttcccacaccgtgccgtgcatctgcaaggcctcgccgtccggcaagtgggagatttccgacgtgcatcgcgccggcggcatcaccggcatcctcggcgagctcgaccgcgccggcaagctgcacaccaacgtgcattccatcgactacccgacgctggaagccaagctggccgattgggacatcatgcgcccgacctgcaccgaggaagcccagcagatgtacaaggccgctcctggccacatcatctccccggagccgtggacgcacaccaccctgttcgactcgctcgaccgcgaccgcgccaacggcgccatccacgacatcaaccacccggagattcacgaaggcggcctcgccgtgctgcgcggcaacctggcccccgacggctgcgtggtcaagaccgccggtgttccgccggagatctggaagttccgtggaccggctctggtggtcgactcccaggagcaggccatcgaggtcattctgaacgacaccctgaagcctggcatggcgcttgtgattcgttacgagggtccgaagggcggcccgggtatgcaggaaatgctgtacccgacctccttcgtcaagggcaagggcatcggcaaacaggtcgccatgctcaccgacggtcgctactccggcggttcctccggtctggccatcggccacatggcgcctgaggctgccaacaagggcccggtggcgctcatcaagaacggcgacatcatcgatatcgatatcgaagcccgttccgtgaacgtcgaactgactgacgagcagctggacgagcgtcgtcgcgagcttgaggctggcgacggctacgtggctcaccgcaaccgccacgtctcccaggcgctgaaggcgtacgccgccttcgcccgctcggccgacaagggtgcgacgcgtgacccggagctgatcaacaagctctccggtctcaactgatcgccgattgcatagctgaaaggcccggcatcttctttatgaagatgccgggcctttactgtgcttccgaaggcgggagcgatattgcttgttatcgcacgcaggcggcgggggagaggcgtgcgcctcgggcccagtcggcggcgcgcatggccttcttgccttgcgccttgacttgggtgagttccagcggcgtgctgccggtaccaacccacacgttcttcttgcccaccttcagctcgccgggctgaagctcggccggagtgttgggattggactggtcggccggttgtgcggcgagaatatgcagggcgagggatttagcggttgactcgtcattatcggcgattggcccttcctcaaacagttcggtccatgccccgggatgtggcgtgcaggcgcgaatctgacggtcgatggcctcggcctcgtccgtccaactgatgcgggcgtccttcaccgtgatcttgtgcgcgtattccaggctctcggccggctgcgcggtgaatgtggcggtgccttcacctacggcggccagcgcatccacatacatgggcgcgccttcctcggccagacggtcaagcagttcgccggaagtctcacggccagtcagttcgatggtcagggaagcgacgatcgggccatcatccaaaccctcgcccaccttgaacacgtcggcgccggtggtcgggtcgcccgcccaaatcgcacgctgggcgggagcggcgccacgccacttcggcaggttggagaaatgcaggttgtaccagcccatgggcaccgcatcaagcacgttcttgggcaggatattgccataggcgatgacagcggcgatatccgcatgcaggtcgttcaacgcctccatgaattcgggggagcggggtttgagatcgatgacgggcaacccgagctccagagccgtcgccttgaccgggctgggcgtgagcttgcggccgcgaccggtaggcgcatcggggcgggtaatgacgccgaccacatcaaaacgtggatcggtggcaaaggccttgagcgagggcaccgccacgtcgggggtgccggcgaacacgagtttgagcatggtcctccttgaaatgtcgatgctcactgcacggccggaatgttcacgccattggcgatgagcagttcacgcagcttgaccggatcctggaaacgtacgccacggatgccggccgcattcgagccgacgatgttcatggccttgtcgtcgatgaacaacgcgccatcggccttgatgccgaactggttcaacgcggcctcgtagatttccttgtgtggcttgcgcagcttgacaaaaccggagacgagcttgccatcaagctgctgcagaatatcgcactgttcctcggccacgtggaacagactggattcccagttgctcaggccccacacgccgatgccggcagccttcaggtcattgaccagcacgcgcgcgcccggcacgatgccggtcagggagtcgcggaagttcttgatgtagtagtcgaggatgtccgcccacttatcgcccttgtcacggcgcatgatggcgatggcctcgtcggtgctggtgccgccgtccatcaggtcgttgacatcgtagaagccggagatgtcgttgtcgaggaattcgtcgatggtcttctggctgtagcgggggatgagtacggcgaccggatcccagtaaatcagcacgttgccgaaatcgaagatcacgtcggtgatcggcttgccggcgttcgcagcggcctcgccatccgcgaccagcacgtcgtaatccatatccggctctccaggccaacccttcatagtgtcctccttctagcgatgttcattctgtaattatcgtttcacgtgttgaagacgattagatcaggtccttgggatctactcggaagcgaagctcgccgggttcgcgggacgccacatgacgagcggtttcccggtgcagtcgggccgccagctcggctcgccgactctgcggcacacggattactgccttcacccggtcggccgtggcttcgagctcccgggcgtcgaccgtgtccggttgcgcgatcggcaccgggcccaacatgccgggcagctcgccgcaggccgtccaatcgccgcccagggcgccgatacgctgcatcagcatcatcaccgcatcacggcggccccacacgcaggcggcggccacggccggcggcataccggtctccacacgctcctcaagatccttggctgcaagaatcctcgaatcccagagcatcagcgattgggcgatggccgggtcggtttcgccgagaatcaacgcctggccgccacgggaacgcggcgcgcacaacgacaccgcacgcatccacgcggtcaatgtatccaagcgagcatccacgcccaacgcatacaagctggtccaagcgtcgagcacggccacggcacgatactcatggccagccgatccctgctcggcactgaccggacgcacgcgcggttcgaaaccgggagtggcgatgacgatcatcggctgacaagccacatcgcgcaccaggccctgcgtcttgctggacaaaactactggcacgccgcggaacaacccggccagttcagccgcagtgcctgcagcacccacgcgcaccacgcgcatacgttcatgcccacagcccgggcacttccaattgatggcggcagccccacaccagcggcatcgcggtgtggaatcccggcggtcggccggtagttgcaatggtccggaacacttggcacaacgcgcctgacgatggcatttcgcacaactcagagtctcactgacgctgtcttgcggaatggacagcagcacggggccgctctccaaagccttagatagcacgcggacggccgtatgcggcacgcgcgccccgatggacgggtcggcaagacgcgcaagttcatcgcgattgagccaacgcacccaaggagtggcgtccttcagcggcgaggcgagcggatgaattgtggtggaatagccgctcactggggtctccactgtacctggaccggtgttttcccactggctttgcggggtgcgcgcattggccatggccacgaacacgccgccatgggacttggcgcgcagccgcatcacgccacgggcctgtggatatggcatcataccgtccatgttctgataggcggcatcctccagaatggcgaacagcgccgggccttcaaccggcgcatacatcaccgcacgggtgccgatcaccaccttcacctgtcccaacgccacagccagataggtgcgataccggtcggccgcgggcatggtctccgcgttaagcacggcgacgtcgcccacccagccgccggccggagcaggggcgaacggtttgagcccataattgcgcagcataggcatcaggtcttcgacctcgcgcatggtgggcaattcaaccacggcagctttaccggcactcagcgcagtggccaccatccatgccatgttccgttgccactcctgtgcaccgggcagcgaatcaaacacaaaagattggaaacgctgaccggtaagcgcatcatgaagcacattgacgtcggcgtaattggcggtcagacgacgatacccctgcgcagccccctccgaaacggtactggcaacggcaaaggtagagccagcaggcatggtcccatcgggattggtgccacgcccggcaaaaccgccttgcgtattatctggtagggagccgccgaccggtcggcggaacgacgcggctaaccgctgttcggcctccaccttggccacgcgcggtggcacggcgaaacgcagaatattggcccgtgtgccgccataggctttggcaatcagaccgatatcctcacgcatcgaagcgggaaccagtacatcggggcttagcacccgttcgatatagcgaatcgaagagcgcggcgtatcgctggtatcggtgcgtgcccagatcacgccgctgaccctctgaccgccaaaccgcacgcgcaccagcacacccggttgtgcggcctcgctgtctttttcatcaatgaagtaatcgaatgtctggccgaggtggagcgcctgcacatccagcacgacttgcgctatgggatgctgctcggccggcgtatgctccgcaggcgcacgtttacgccgcttgcggggagccagccccgcaagcgtcaactgttctgcgcctgaagtagtcatggctcaactataagtgccggagccgaggtcggtaaaattttaccggcgcaggtaatcgagtacgtgggttaggtcgcggtcgttgatggctttgtcggcggcgagctgggtctttggcttggcacagaacgcgagacccaggccggcggcctgaatcatcggaatatcgttggcgccatcgcccacagccacggtctggctcatcggaatacccaaacggtccgcccatgtctgcaaggcgtgcaacttcacggtcttgctcacgatttcgccgagcaccttgccggtcaagcacccatcggcaacctcaagccggttggcaatccaatagtcgatatggccctcggccgccagcatatcgaccacttcatggaagccgccggacaccacgccgaccttccaaccgcgttcatgcagcgtgtcgataagctccagcacacccttggtgaaatgcagcttgtcatgcaccgtatcgaacgcggaaaccggcagccccttcagcagcgccacacgagcgcgcaaggcgtcgcagaactccagttcgccgcgcatggcgcgtgcggtcactccggcaatctcctcaccgcagccagccaccacgcccaactcgtcgataacctcttcgtcaatgagcgtggagtccacatccataaccagcaggccgggcttgctcagcgtcggcacagaaaccgcagaatcagccgggctcccaacttcgctctcggcggacttgtcaacaaaatgcacatcttcttgcgtcatgcttctgattctgggaaaaccttgggacaatgccctctatgagtttttccatggcagccgccactattcttgcgaccgaccccacacccatctgcaccaccaccgaacccggcctgatcggcaccatcaccgactggctgatcatgctgatggaaaccatcggcggtatcggcgtggccttggccatcgccctcgaatccatcttcccgcccatcccgtccgaagtcatccttccgctctccggcttcaccgccgcacgcggcaccctgagtctgccgggcgcaatcatctgggccaccatcggctccgtactgggtgcctggaccttgtacggcatctcccgctgggtgggcctgcatcgcatcaatctcgcggcagacaaaatccccggcgtcagccgcaaagacgtgagcaaagccaacgactggttcaccaaatacggcacatggtcggtgctcatcggccgcgtgattcccgtggtacgctcgctgatttcgattcccgccggattcaaccgcatgaacttcctgcacttcaccggctggaccctgctcggctcggccgtgtggaacaccatcctcgtttccgccggttacctgctcggcgaccagtggtgctcgattcaaggcgcgctcggcgtgttcgaggacgtggtcatcgcggccgtgattgtggtcatcgtatggttcgtggtgcgaaaagtgcgtactgttatacgtaacaggaaatccgccgacggcaacgaatagggtctgccgactgccataagttgccgaaaatcccggatagaagggaagcgaagaacccgcatgagcgacaccgaagatctcgccgcgctgaacgatcgcctgatggccaagaaccatgcgctcgccgaagcgctgagccgcgccggcaaggaactgaccaaggcgaagtcacagctcgcccagctcgctcagccgccgctcaccttcgccaccatggtcaaggtcgattccacccgcaccgatgaagacggcatccagcacgcgtcggccgaagtcatttccggcacccgccgcatggtggtgcctgtggcctccaacgtcaacgccgcccgcctgaccgccggggccaccgtgatgctcaacgagaagctcgtgctggtcgagcagcgcgatgctgacaccgtgggccagattcgcagtgtcaagcaggtacttgacgacggtcgactgatcgttaccgacgcctccggcaatcccgtgctcatccgccgttccggcgcgctcgcgtatgcgggcatcaatcagggcgaccgtattatcgtcgatccgtccgtccgcctcgccatcgaagtgctgcccgccgagggcgacaaggatctggtgctggaggagaccccggatgtcacgttcgccgacatcggcggcttggatagtgagatcggtcgtatcagggacgccgtccaactgccgttccagcatcgtgcgctgtttgagcgctacgatttgaagccgccaaagggcgtgctgctgtacggtccgcccggcaacggcaagacgatgattgccaaggccgtggcgaacgccctatgcgagggtggttacgattcgaatggcgacggcgcaatcagtccggccgaaacccatgtcaagggcgtgttcctgtccgtcaagggcccggaactgctcaacaaatacgtcggtgaatccgaacgactgattcgcctgattttccagcgcgcccgtgaacgcgccgcggacggcaatccggtggtcgtgttcatcgatgagatggattcgctgctacgcacccgcggctccggcgtctcctccgatgtggagaccacgattgtgccccagttcctctccgaactcgacggcgtggaatcactcgacaatgtgatggtaatcggtgcctccaaccgcgtggacatgatcgatccggctgtgttgcgaccggggcgtctcgacgtcaagattcgcgtcggccggcccaaaaccaatcaggccatcgccatcgtggaccattacctcaccgacgacctgcctctggaagatggcgtcgacgcgcacgccttgtccgccgtgctggtgcatgacatctacggaacctccgaacgccgccatctatgcgacgtgcaggaggagaacggccagtggcatgcgttgttcctggccgacgtggtctccggcgcgatgctcaagaacatcgtggaccgggccaagacccgagcggtcaaggaatccatcgaaaccggcttggacgtggcactcaccgtgccgctgctcgctgccgccgtggaagacgaataccgcgagacccgcgattccatggccgacgtggaccccgaacaatggtcgcgcatcaacggcatggacccgatccgccgcatccgcaccgccgaatagctcaagctcaaggagcactacatgaccgttaaacgagtgatgggcaccgaaaccgaatacgcggtatccctgaacactccggaccgctacaatccggtgcaactgtccttcgacgtggtgaacggcgccgcggacagccacagcaaatccatccgctgggactaccggcaggaggacccggtcaacgacgcgcgcggcacccgtctcgaacgcgccgccgcccgcccggacatgctcaccgacgccccgcagctcaacatcaccaacgtgatcgcccccaacggcggccgcgtctatgtggaccacgcccaccccgaatactcggcgccggaaaccaccgacccgttcgaagcggtccgatacgaccacgccggagacctcatcatgcaggccgccaccgaacgcgcctgcacacagaccggcacccccatcgccctgcatcgcaacaatgtggatggcaagggctcctgctggggcacgcacgagaactatatgatggcccgcgcggtgccattcgacttggtcacacgcctgatgaccctccacttcgtcacccgccagatctacgccggctccggccgcgtagggattggcgagaacagcgagatcccgggctaccagctcagccagcgcgccgactacatccacgccaaagtcggcctgcaaaccaccttcgaacgcccgatcatcaatacgcgcgacgaatcccactccaccgatgcataccgccgtctgcacgtcatcgtcggcgacgccaatcgcatggaggtgccgcaggcactgaaactcggcaccacgagcatgctgctgtggctgctcgaacatgcggacgaggccggattcgacctgaacgccttcctcgacgaactcgaactgtctgacccagtcgaggccatacacaccgtttcccgcgacctgacgctgggggcaatcttgccgctggccaacggcggcgaaaccaacgcatggcttatccagctcaaactgcgccaagccgtctaccaggttgccgcactggtcgaaggtaccgacaccgccggcgaacccgcctggccggacaaatccaccacatccattatggcgatgtggcagcaggcgctcatcgactgcgcctccatccgccatgccgccgacgatgacgaacgtctggccatgaccggcgaggccagccgcatcgaatggctgctcaaatggcagctgctcgaaaaactgcgccgcaaaatcaccacaacgtccgcacccggcgtggccaacggatggaatgatccgcgactgaaggtcatcgacctgaaatgggcggcgctcgaccccgcggacagcatcttcaccaaactcgaaccccgcaccgaacgggtggtgagcgccgccgacatcgcacgcgccaccaccgaaccgccggaagacacccgcgcctggctcagggcaaaactcgtggcgcaattcggcgatgaggtggccgccgccagctggtcccgactcactgttcgcgacccgcgcgccgcagacgagggcgaggcggtcgaattctacggcaatgccggccatatggccgctaccgaccatcacctgttctccctcgacatctccgatccgctcgccttcaccaaggcgcactgcgaaaccgaactcaattcagccggacacgccatcgatctgctgaagtcgctggccatcaacgccgaacgatagacttggtagctatggaagaaacacgcgaagagaccccacaggacctgcgcaaccttgcgctcaaagtcgccggcctgctcgaagaagccggccagcatgccctccacgaccaactcaatccgcgtaacctcgcccagccgagcaccgagaacgcggaccgtggcccccgctacaagcttgaagtggacaacaagatcatgcgcttcatgagcgccagaatcgccgacatcgcccacttcgacggcttctggaccacccgccccgccgaaagccgccctggccagcgttactggtacatcggcaagatcgacggtgtgatcaactacgtacgtcgcatgagcgaatggacggtgaccgccgccctgttcgaattcggcccggacaacgagcccaagccgatcatcggcatcgtgcacgccccggccctcggcctgacctacctggccgccaggggagcgggtgccgtgcgcatccacaaaaccgcggtcggcgagaagcgcgacaaggtcgtgccgtcgatgacctcctcgctggatggttctgtgctgagctacggcatgtccttcatccccagcgaatcgcagcgtgcgctcgacgtggcctcctcgctcgccggacgcccggccgacatcaagcgcgtgggccccgtctcgctcgacctgtgcaaagtggccgacggcacctatgacgcctacttcgagccgatgctgcacgtgtgggatatcgcgggcatcgccgccggcaccgtagtggtctgggaggcacagggcacgctgagccgttgggacggcgaacgcatccactggcgtcacgataacgatgtagtggcctccaatggactcatcatccgcgaactgcagcattacctgcagcagtatccgtggctcgactccatcaaccagcgataattttttgactcctccggctcccctcgggtgaggggagccgtcggccgaaggctgactgaggggagtttgacagcccaaaaagaagacaacatgccacaacaattcgaacaacctcaagcacagcaggccgcgacccaggaagacgacaccctcgccaccacgcaggccgccgcccaaaccgagtccaccgaccaagccgacgtgttggacgacatcctcgacgacatcgaatccgccttggaaaccaacgccgaggaatacgtcaacagcttcgtgcaaaaaggcggcgagtgatgccccaactgcgtgacagcggcacccgctccctgcacgccacggaacccgtaccatccgccgagatggacgggttctgccgtattttcggcgtcgaaaccgaatacggcgtggcggtcaccggtgccgaacgccccgtggacgccggccaggtggcgatgaccatgttccagcccatcgtctcccgttcccgctccaccaacacgtatctggccaatggctcacgtctgtatctggacgtcggatcccaccccgaatacgccaccgccgaagcgcgcgacccgcgcgaggccctggcccaggacctcgccggcgaacacgtgatgcgcaacctagccctgaaggcccagcgcaagctgcgcgaatcctacggcgcacacgccacgatccatgtgttcaaaaacaacgtcgactccgccggccacgccttcggctgccacgaaaactacctggtccgccgcttcgtgccgttggagaccatcgaacaccagctgctgccgttcctcatcacccgccagctgtacaccggtgccggccgcatgaccccggacggcttccagatcacccagcgcgcggacttcctggacgaggccgtctcctcggccaccacccgctcccgcccgatggtcaacacgcgcgacgaaccgcacgccgaccccgactccttccgccggctgcatgtgatcatcggcgactcgaaccgttcgcaatggtccacatggatgaagcttgccgtcacgcaccttgtgctgtgcgcgatcgaagacgccttccgccatggcgttccgtccggattcgagcagtatgcctttgctgatccggctgccgccaatcgcacggtcagtcgattccttgacgatccgcgcgccgaactgacgctcgaatcaggcgaatccgtgtccgcactgggtctgcagcgccggtattatgcggcggtcaaggccttcatcgaaacccatggcgatgcgctggcaagttcgctgccggccaccacgatcgacacgattatgggggagtggagccgcgttctggacgcgctggagcgtggtgcatacgatgcgctcgccgaccgcgtggactgggccgccaagaagcgtctgttcgacgcgctcaaacgccgtcgcccggacgtcaccttcgcccagatggaacagcttgagctcgactaccacgacatcgccaacggtcgcctgtacggttcgctcgtagcccgcaaccagatgcgtgagctgctgacaggagacaacgtggaatacgccgtgcacaatccgccgaccgacacccgtgccgccctgcgtggccggttcgtggacgcggccctgaacgtcggagcccagttctccgccgactggacccacctgaccctgaccgcccccgaacgccgggaagccatactcctcgatcccttcgaggccgagcccaccctgggattcgagcagcttatggaagcgctgaactagtccggaataatacggttggacaacacgtcacagcaccacaacaaaaagaccccgaccatctcggtcggggtctttgtcgtcagtaatgctcgaagtaatcgctacgagcagaaggtcactcggtgacggccttcttcagcagggagccagcggagatacgaacgccgtaggaagccggaatgtcaatctgctcgccagtgcgcgggttgcggccggtgcgagcggcgcgcttgacgcgctcagcggagaacaggccggtgagcttcaggccttcaccggacttcatagcctcgacgaacacatcctggaaggcgttaacagcagcctcggcctgagccttggtcaggttggacttctgggcgatcttcgaaacgaggtcagacttgttgtatgccataaagcatccttcttgggtcaggggacaagcacttttgcttagtccatgttgtcatcaatgatactagcgcatgtttctgcgaaaacccgcgttttataagggttttcacatctatttccccgaagggggtatgaaaatagacgaatcagacaagattatgcttgtcaagccacttcatggccgccgcgcccagcggaatgcgcagccagtagaacaccacgcggtgcagcaaagtggcggaaagcgccacgccctgcggcactccgaccgccacgaacgcgaatgtcagcgccgcttccacaccgcccagaccgcctggagtgggcactgcggaacccaatgcataggccagcaggaagacgaacgtcgtttcaatcggattcgatgaatggccgaacgcttgcagggccgcccagaaagcgagcccagtggtggcgttctggaacagcgcgcccaggcagctgactgtgagctgtcggggctgggaaagcacgtccagcagctggttgatatacgtcttggccagcggcataagacgacgggtcacccagtggcgcaacggcggaatcatcatcgcaatggacagcaccacgaccacaacgcccagcacgataaccaacgtgtttgtcgggattgcgccggagaacatgttgcggccggtgaacaggccgatgatgaccagcatggagaagtacacggcgtaatacaccacgagcacggcgctcataattgcggtcgcctgggtgttgcgatagccggatttgcgcaggaactgcaggttgacgaacgaggggcccacgccggctggcatggatacggtggcgaagccgcctgccacctggctcatgaagacgcccatattgtcacgcttgtgccgcgccatcagggaaccgagcgaaatcgacgagccgatccagccgcagacaccgaacgcgagcgtcaccaccgccatcaacgggttggcgttggtcagcgcggtgatgatctcctcgggcttcagttgggtgaagatcacgaccacggccacgatgaccagcagcatggtgatcatcgaacgccaggagaatcgggccagcgtcaccggttcggcggattccaccgtctcctcgtcagccagcgcggtgatacgactcctcaggcccttgagcagctgcttgtcccaggattccagcgcgcgcgtgggggaggggaccgcgaccttctgaatgaacggggccaaggccgtcagagtcgtgtctccccacgcctcgcgggcggcctccaccgccggttccacgccgatcagcgcggcgaacagcactagcagctgaactttgtcgagcgcggtgttggccggaccggaagcgttgtcgccgttgagccagccggcaatcacggcggtgccgtcttcaagccgggcgagcgtgtccggcgtgatgcgccggtgcgtatagccgcgccggctcgccacggacaggtagcgcatgtaggccacggcatccgccttggtaagcgtgttcaggttggcgggcagttcgatggtgtgtgcatccagcaccagaatcgcggattcgtcggtatcggcgatgccgtagggtgcgggcgcgggcagtttgatattgtgcagacccagcagcatggcgaaatgatgctggacggcgtcacgcacggaacggtcacgtcggatggacacactggtgaaacgcacccagtcccacaactgcttcagatagccgacggtatgggtctgcgcgtcgatgacggaaacgatgaaacgacggttgtccgtggtatccagatcgtagatgcgcgagccttcggccagatcgtcgtccagcgtgacggccagtgaaccgtggccgacgccgggctcctgatgccgaatcagcgaggcggtgtccagtccgatgcctttcagggcggcgaccagatcttggccccacacgcccttgttctgcgtgccgaccacgaatcggatcagcatgcccactgtgcggccggcggccatcgacaccagcatgccggtgaccgaatgccacgacagcaccaccatcaccgcagcgatggcatacaggatattccagctccatttgaccgtggagcgggtgcggcgtggcccggcggcggtcaggaaggacgccatgccggcgtagatgtcgggcaacagcccggagccgtatgaggtggcggctgagactagtgccattggcagggtgaaatcgttcagactgctgattgccgtcgatacgacccacaccatgccgtagccggcgaacatggccagcgcggacaccgcggcctgcagccattcccgggccagtagcaattgagcgagcacgatgatcacgatgacgatggtggccagctgcgtcagcacggtggaggggaagtcagccaaccagttgatgacctgggctgcggtgtgtgcgtcggattcgacgccgcgcgtcatgccgcccagatacacggcgaacaccatgaccacggcggccatcaacagcgacagaccggcccgggtcagatcgccgaagtcgcgcgtgcggcgcggagcgatgtcgtcgatgtacggtccggaatcattgctgtcgtcggttgccgggctgtccggtccgctgacagcaaaattggccgaccggccgtcaccagaggcgatcggccggtcggtagtggaggaggtcgccttgtccgggcgatcttccgtagtggactgctcctgttcagtagtcatgaaatggttacctgacgcctgtccttgttcggttcagtttgcggtttggtttgtgactcagcgcagtagtgtggtggatgcgatgggctcgagggactcgcatcgcacctatttcagcggtcgaaagcgacgagctggctggccacaccggtgtaggtggcgggggtcagagccttcaagcgagcggcggtttccgggtcgaaggactgctggtcgatgaactgctcgacctgttccttgttgatggtgtggccgcgcataagctccttgaccttctcgtacggcttgtccatgcccggcaggcccttgagctcgcaggcgcgcatggcggtttggatcggctcgccaagcacctcccagttctcatcaagctcacgctcgatgacgtgggtgttcgggtggatggactcaaggccgcccatgaggttggtcagggcgagcaaggagtagccgagcgcggaaccgatgttgcgctgggtggtcgaatcggtcagatcgcgctgccaacgggattccaccagcgtggcggagagggtgtcgagcagcgagcagctgatttcgaagttggcttcggcgttctcgaaacgaatcgggttgaccttgtgcggcatggtggaggaaccagtggcacccttgaccggcacctgggcgaacactccacgggagatgtacatccacacgtccacacacaggttgtgcatgatgcggttggcgtgggagacggtggagtacagctcggcctgccagtcgtggctttcgatctgcgtggtcagcgggttccaggtcaggcccatgcggttggtgacgaattcgcgggagacggcgacccagtcgacatccgggcatgcggccaggtgggcgccgaacgtgccggtcgcgccgttgatcttgcccaagtactcctggttttcgatgtgcttgagctgacggttcagacggtagacgtagacggcgagctccttgccgagcgtggtcggcgtggccggctggccgtgggtgagggagagcagcggcatatccttgaattcctcggccttgccggcgaggtggtcgatgatgcgcttgaactccggggtccacacgttttccatcgcgttcttgacgcaacgggcgatggagaggttgttaatgtcttcggacgtgcaggcgaagtgcacgagggtcttcagctcgtcgttgatgttggccagctcggccggagccttgtcgatctgatcatcgatgtagtactccacggccttcacatcgtggtgggtgatggcctcatgagcggcgtgctgcttgatgccttcggcgccgaagtcctcgggaatggcgcgcaggaaggcctgctcttcggcagtgaacggcttgacgccgtcaacgattggctggttgccgttgccctcaaagccgttggccagaagaatcatccattcgacttcgacacgcatgcgttcgcggttcagggcaggttcgctcatgtattcgacgagcggggcggtggccttgtggtaacggccgtcgagcggggtcaatgcgattgcaggggaaatatcggtaagcttcataacctccaagggtacttccagccgtgaaccgagcggctacactgtggtgtggcgttcccgcccgagccgcacaggtcaaggaacgcccgtgattcgattactgtgtgcggcctttaaggctaggagatcaccatgcctgcaaccaccattcatactcttccgaaacgttcggtcgccgtatcgtcgctgaaatggcagccgttggacatcgcggtcggtgccacactgggcgcggcctgcggcgtgatcttctggggattcaacttcgcgtacatgccgatctcttcggtgtttggtgcgattctgcccggtttcgccagcatcgtgcacgccgtctggtatttctccggtacgctggcggtgctgattctgcgcaaacccggagcggcgctgtacgtgaaccttatcggcacgctggtcgaaacggtgattggtagccagttcgatttgggcttcgtgattatctcggcgctgctgcagggtgttttcgctgagattccgttcgctttgacccgttaccgcatgttcaatctgccgatttccattgcatccggtgcgttggtcgccttggaatacggcacatatctgatgctgtttcgctacgtgggtgtgtcattcgtcagcccgcgtggcatcgtgcacatgatttccgaggtcaccggcggcgtgcttatcagcggcgtgatggcctggtatctgatgctggccatcgccaaaaccggtgtgctcgaccgcctcgcatccggccgcgcactcatcgagcgacgcgcctgacactctttgcgcgccactttcccgggaatgttgtgctggcggagaggaacccaagcgcattagcgcaacattcccgggaatgttgcgctaatggaagggaatacgggtgcgtcggcgctgccttcatgggactattcgagaacagtcatcttagctacttcactttgctgagatgccctatccgcactcattctggcaccagttcaggcatcgacaggttgaatgcctgctgtcatctgcgttatgtattcgtggatgagttccgccatttctgggtctttcatggcctcattgaacatgtcgtcaaatcgttccgtaggcatgatattcctccttgcagcaattctcgaaaatagtgaagagccttctgcgggacgtacgtactttgaattcaaccattgagcccttacgttatgggagtgctttgccgctgaaaatcaataggattatgaagtgagctgattgtcatgggcagcagattgatgaggtctatgtaatgatgcgacacgcccattaaaaataacactaaagtaacaaataagaacatagtgctgttgtatatgatataccgatatatccaatactgatggcaggccgtgcgttgtgtcgcagagaaggcagcggttaagccatttcttgaacgtgagacgaagataccttgcaaacgttgatgtttcaggaatgttcggatgtgggatgatgtgatgttcgattgcgtattgtaaaaacgacgcattgctaatgtcgatttgatgtattgatatatcaatgatttaatagttttcgtcagataaatgaacatctgacttgtctcttcaaaggtgaaaggaacaatgatgaagacttggatgaaaaccgtagctatgggagctagcattgcaatgctgattggcgctgggggttgtggatcaagtcgtggtggttcggcgacctcgtctgaggcgagcggtaaagatccgtcctcgatatccgttgggatttcaatgccggaacagcagctggaacggtggaagaaggacggcagcaatcttaagcaaatacttgaaaagcgcggctacaaagtcgttctacagtatgctgatggcaaggtggaccaacagacgtcacaaatccagaacatggccaaccaaggggccgacattgttgttatcgcttctcttgatggtgtggcaaccggtgctgcggcagaaacagcaaaggacaatggggcgacagtcattgcatatgatcgcatgattatgaatacagatgcggttgattattacacaagtttcgacaatacaaaaattggtgaaatgcaaggagagtatatagttaagaaactcggccttgaccagggcaagaaaggccccttcaatgtggaattgatgtcgggttctcctgacgacaacaatgcaaaatactattttgaaggctcatggagcaaactgggacagtattttgagtccggagtgttgcaatcccggtcgggcaaagttccgaaatcagttgacgattggcaaaccattggtatccaaaactgggatcgacaaaaagcccaggctgaaatggagaatcgtatcaactcattctatggtgatggcgaacggttggacgcggtgctggctcccaatgatgcactggctttgggcacagtcaatgccgtggaatctgctggttgggattactacccgattatcaccggtcaggatgctgagaaggccaacgtacaggccatcgtgcaagggcgccagaccatgagtgtatacaaggacttccgtaagcttgccgatattacggccggcattattgacgacgttgttgcaggtaaaactccgaagactcaagaaacatatcctaatggcaacaaagacgtgccttcgatcatggctgttcctgaagctgttgacaaggataatgtcaagtcattgcttgttgattccgggtacatctcagcagaagatgccggcttgaaatgacaccgaatggcaatgaatagggaagagctgaattatgacaccaattactgagtcccaatatcaaattgataccaaagataatcgagatttgctcaatcgggaagcgcaagaattagtggatttcggcaagcgcttcgcgtggccgggcggtggtgcctcatatctcgatgatgaaggcaatccggttccgtcggaaggcctatatgcatatgagtcgggacgatatgctcatgcctacacgcttgggcttctagccggatatgtgcctgaagatgaggctttgccgttaattaagcaggcgttggacggattcactactgggctgttacttgaccgcgaacacgggggctggtatacccgcgttggaaaagaaggaaccccggatcccaataaaggatgttatgcccatgcctttgtgattttgggtgcggcttcagcaagtcttgtgcatattccggaatccagagcattgctagataaggcgttgaaagtatatgatcgctatttctgggatgaacagtatggcatgccgagagatacttgggatacctcttttactcattgcgagcagtatcgtggcattaattcctccatgcactcggtggaggctttcctcgcagcaagcgatgctttggaagagcctaaatataggttgcgtgctggccgaatgattcagcgaacagtcggttttgcatcagactgtaactggcacatccccgaacactttactgaagagtggaaacctgtatacgaatacaatgctgagaaaaaagatgatcaatttaagccatatgggaccactccaggtcatagcttggaatggggaagactgattacacaatgggccgtaagctcctatgatcatggggaaatcgacgagtcgactcgtgatcgatatattgaggcggcggaaaatctgtttgccgtagcggtcgaaaccgggtggaacgtagatggtcaaattggcttagtgtacaccgttgactgggagggccgaccggtagtgcatgatcgtatgcactggactctggctgaaggcattgataccgcttcggtgctgtaccggattaccgggaaatcgatatatgccgagtggtatgcgcgtttttggcaatacgttgatgaatatatgattgaccatcaacgtggcagttggttccatcagcttgatgccaacaatcaagtgattggcacagtatggccggggaagcctgatatttaccatgcgcttcaagctacgctcattccgtgcgtggcaaaagatcgaattggtctgtctattgcgaaggcgctaacagactaattatacaagggggcgccgcgctgcgtggttgcggtacggtgccttcatcatgcacaggggcattactatcggaggaggtagctgtggctatgaacggtgacgtgattttggagatgcgtcatatcgtgaagcgtttcggcccggtcaccgcgttgaacgatgtgaatatcatggtcaagaggggccagatgttctcgatctgcggtgagaatggtgcgggcaagtcgactttgatgaacgtgttgtcgggtgtgtacccgtatggcacgtacgagggcgacatcgtgtacaacggcgagacgtgcaagttcaggacgattcgcgattccgaggagaagggcatcgtgatcatccaccaggagcttgcgctggtgccgtacatgtcgatccaggagaacatcttc

SEQ ID NO: 1307 - DNA, 6313 bp, Unknown
  R157_18m  MAG No. k141_10259
caaggactcgcttgacaagctgcgcaagtttgcacagcgtgatcatctcacgttcccgctgctgtctgatcccgacctgaccgtgcacaagctgtacggcgcatacggcgaaaagaagctctacggcaaggtgcacgtaggcgtgatccgctcgacgctcgtcatcaatcccgatggctccgtggcgattgcgcgctacaacgtgcgtgccaaagggcatgtcgaatcgctgctgaaggcgctggacaagctggagaagccggagaagtagtgcgttctcgttgttcggacacggtggttcgtgcatagcagctccgcgcggtatgtgccgtatgaaccactgccgtatgaaccaccggttgacttctcggactcaccggcaaatagtgagaccgtgggcgcgcagtacgtctatggctggcatgtaatcgagcgatgttgcggtgggattgagcatcagttcgcggatggcggcggatgctgaggactcgcttgtcttcgaggattctgcggccgggaagagagcgtcggcgattagggagatgatacggtaacgcgcatcgccggcattggcattgttgctgctgttgccggcgtcggtagtggcggagttgccaatagtagcggagctgttttgtagagtcgtatccaacgctgtgacaagcggctccaggttgttctttgtcgcctcggcaatgtcatcgagctgatcgaataaggcgaacagccatgcacgactttgctcctcatcgttgccggtcgcaagcctttcattggtgacgcgcacgagttcgtcaatcggtactgctggcgtctttgccggatcgcgatgctcacggttgtcttcgatatcgcccataagatgctggatttcgcactcgtcctgcaatacggtggtctcggcaaatgcggtggcgatggcgtccgcatcgatgaacttgccaccttcggactggaagcgcacgcgcttgggctcactgtaataatgcgacatgccgaatgtgatgtactgcggcatctcatcctgcaattgcttgaccgcatccgccaccttgcgcatgtcagcaagctgctgatgcaccacaataaaggcaagtattgctttggcatcggcgagagtgagcggttgcccgatgccgcctccatgatggtgctcgtgatgcgcgaacacgttcttcagcgaatcaaacaatcccataatgtcctccttcggactggggcacaatcggctacatctgccgcttactgtagtcctgaatatgtgggaatggtccatggaacgccgaaagcgaatattggttccgggcgatgctcgcagcaactgaaaatatcgcaggacatgacaaaaagcgggtgacaagcgttatcctgaaatacatagggcaaggaggccgtatgacagcagaagtggatgacggtttctttcaattgtttgaacgcaggatttttgtgcgtggagaagcttattacgatgccggcaaggttgatccgccggtcatgattgctgagaatctttggcataccgtggttcgcgggaatgacgactatcaagtggacattcgtttgcgccatggcaaagtgatttctgccgcctgcgcatgccaatattcccaacgtgcaacgtactgcaagcatgtggctgcggtgcttatcttcatgcgtgagagccgacgtcgggaattagatgaatcgcaagaccaagtttcagagtttcctcatgaagcattgaattgtgtgaggtggtatacgatgcatgaattcccgaaatatcgcggattgacagagggagattggcatgctgtcaagcgaatatttgaggtgttgtactgtatccccgaccttgatattacatatacacatgaggtaatggataccgtttggtgacatccatctcgtaggtaaacagttcgctgtggccaagacgctgagtctcagggatattctcgtccgcaccgagtcccactgcaatcacacgccaaccccgcacagcgagcatccgcgcagtcgccttgccgatgccgctcgtgccgccggtgaccaatgccaccggccgtccgtcatccttgattggttccgtgtgtaccattatcgcgtggtggtgtcggaatcacggcatggtgatagcagccgcatggaacaagctacttgctaggcgaagattgagcatcgtcatccgtcttacgagcattcagatgccggtgctcgtattcctcgaagtcatcacggacggcttccgcgggatacttgctcttggtctttgcgagcttgcccatgacgatgtcatccatatccacaccaagcgcatcggccatcatgatgcaatacgtaagcacatccgctagttcttccctgacatgtccctcatccatggatggcgactgcggcgtccactggtagcattccagcaattccgacgcctcgatactgatggacttcgccaggttctcaggagtgtggtattggccccagccacgctccgacacaaaatcacgaatcgactgaatggtactgtcactgatcatgactgacattataggacttgctgaatgttggtcatgtaccagagctcatgatggaccataatatgattatgaacagtgagagcttggcgccgtttgtcatcaacctgccatatggtcaatacagtagggaagcttttgaaaaggcttttgacgaatccctcgagaagcagatggggcgcagtgttaatgattccgatctggaacatttcatgctgcgatatgtgttggcatatccaacggtttatgtcgtgtattcaggaaagaccaatcgctattcgatgaagaacgaatatacggtgtacgtcggtgagaccaacgatatacggcatcgtacattccagcatcttgaaagagatgctaaagaacgcgaggactggaaagctgtagctgatgctgtctcgcggaatgatgatgcatatcggcaatatgttatttcacatcccaaattcaataagtcgttaaccctggatgtcgaaaaccgtcttatgcactatatgtccagtaccgattcggtgaaaaggctcaacaatcgacggaccaatgcgcaaggcgattattacaccgcagaccagtttgatcggattttctcgcaaatctggttgagattacacaaggaagattctgacctgttcccggcggaggagatcatccgagattccgcgttgttcaaggcatcgccttttcataaactcagcgatagccagctcgaagccgaagaatctattttggtgcaacttgccgccttggttgccgatagccggcaacagaagaaagccgatgagcaatcttcagaccgccatccgaaattaatctttgttcaaggtgctgcagggacaggcaaaacggtcctgttaagccacctgttctacagaatcgcggctgaaatcggcatccaaggcgacacctattccgaagacgaagattatcctgagctgtcacaaacggcgaacggccggctttcctcatacattcttgtcaatcataaggaacaggtgcacgtatataatcagattgccacgaaactgggtttgcagaagaaatctgatgaagtggtcatgctgcccagtcagttcatcaatcgattcagcttacgcaatgagcatggtcgaggcattccagaccaaccgcaaggcctggcggacatcgtgctcatcgacgaggcccatttgttgatgacgcaaggaaatcagggatattccgggaagaaccagctgtatgacattctgcgcagagcccgggtggtgattgcggtctttgatcacaatcagattatgcagtccagccagcagtgggacccagcgatgctggaaaaacttcagctggactctgattcgactcagatcgcatgtgcgaccgggaaaatcggcgcattcaaagcggttgatttgggcgccgaatatcatctgccgtccatttccgtggacattgcgcatgtccatttgaaaaagcaattccgtattgccgcgagtaagtcgatgattcagtggattgaccgattcgcttcggggaaaggtatcggtcctatgcccgctgatacgggcgagtatgccgcagatggtgaagtgattcgagaaccttatgacgttaaggtgttcgattcgccggttgatttgtttaatgccattcacgcgaaagcccagctgaatcccgatggttgggatggggctggactgtcccgtttgttggccacctatgactggaagtattcggcgaaatctgagaatcagaatgatccgcatggcttttggaatgtggaactgcatcgcgatacttccggcgtatggcgtatgggacttgcggatgaccatggattcgatcattccgcaataagttctgaccaattctgtaagccttggaactatcagctcgaagattccgctccgaaaagcaggaaaggcatcgacaaagaactgtcttgggcggagaagccgtacaccatagatgagattggctccatcttcaccatccaagggtttgatttgaactatgccggtgtgatcattggaccctcggtgacgtatcgtaacgggggaatcgtgttcgatgcaaaggccagccaaaactatctggcaaccaataagcgcaaagatttaggagattttgccgaagaaaatttgaagcatgagttgaatgtcctgctcaagcgcggcgtccacggtctgtaccttttcgcggtggacgaaggcctgcagcagcgtttgaaggagtgctgcatccattaaggtatgtgacggatattgtgctgaaaatgcacgcgaagcgcacgcagatgatgttgaatgcgctgaaaatgcactcaacatgccgggtgtcgtcgttcgctatgccaaaggcaagggattcctcatggacgagcatttggccaaggtctgggtttgcagccagctgaccaatatcatcaggaatctcagcgaagaacaggctggcatttctctgcatagtcaatggatatgtgccgaatgccgtaccgcgttgccaatgtcgtcactacaacgcaaacgccagctcttcccgcaacgcagtacgattcggataacgctcaacaatctcgtgtgccagcacacgggtctcctcatcgccgaacactgcggcgaaacgacgtagctgtttggcgatctgctggtatgtggtgcggcgcgccgtcaatgtattgtcgacgccacgttccaccgtaaaccggaacacgggcgcgcccatggtgccgtatggcatcgcttcgaggattatcgattttgccgattcggggtgttcgatggcgatggtgcgtagcaatggcagcggcgggtaatctacgatgggacaataggtcagggccgcgtccgaaagccgctcatccacgatgagcttctcgtaagcgggattgcgccagctgttgtggcgctgtgtgccgcctttggtggtcatttccggctgatacttgatgcggtcgatgatgtttcgtacgcaatctttggccagttcaatagccacgtcgtgccattcttccgcgctgagaccgccgtatatgcgcaacagattgcgcagcttacccacgtaatgggtgtcggatttgtcgttgcagaaaagaagtcggtctcgccatcgacctcgttcgtatcctcgtcgtcctcgtcgctttcttcgctctcttcgttgaacgagtattccagattacgcgttatcgcgttctcgattacgtcataggcccacatgcgtttgtcgtcatattgggcgaaggcgagcgcgctggaaatcagcaacatgttgttcaatggttcgcattgccgcatgttcttgtcattcgttgcctgtgcattggtgttcaatgctttgccggcggtaggggagtcggcgaattccgccacattctccatatagcatcgcacgcgcatcgccagaccgtccataagcgtgagcaaaggctcggaatcatcatcgttttcggacgagagcagaagcgcgtggacttcgtgtatgcacaatcgtaagttttcgcatgcgcttgcgtaatcactggattgcagggcattgcccgcgatagcctgcacggttttgatgaattcagtgtaatcgaaggatttgctatatgcatttcctggcttattgacatgaataatgaagcgttcatggcatcggtggattgcgtcggagagcatggcttgcgcgtcggtgcgcgaaatcagcggtcgttcttcgcttggttgggcgcggaaagtatctgcggcttcgcgcagttgggtggactacaggaacagcagatgaccgttgccttgctctgcacgagcgttgcacttacaaattgaatccgggcg

SEQ ID NO: 1308 - DNA, 22006 bp, Unknown
  R157_18m  MAG No. k141_10340
gccagtcatgtgacggtgaacgaggcgctgattcccaccggcaccgaaccggttaccggcatctacgacctgaacgatggcccgacgctcgaaggccgcgcctttgatgatgcctgggtcgacgtggagcgtgccgccgatggtacgaccaccaccacattcacccgcccggacggtattgaagtgaagctcattggcgatgagacgatcaatgcttggcagtgctacaccgccactggcgcgccgttcgccgagcatccgtatggtatcgccgtcgaaccgatgaccgccccggccaatgccttccgcactggtgaccacttggtgacgctcgcccccaatggcgactacaccactgtggtccgctacgaagtagtccagaagtagttccgttacgctggctcccctccagaggggagccaattttttatccttatgtgccgccgcgtcttgggacttatgcgatacgattgtgagcggtaacaatctgtttcacaaaggagtgtgcactatggctttgaagcctcgcactggtaaccaatatgtcatctcgtccggcgaatggagtgccgtcgtcaccgaactgggtgccagcctgcgcgagctgaagtggcgcggcgaagacctcatcgtccccttcgacccgaacaaggtcatcccctgctgcaacggctgggtgctggcaccgtacccgaaccgcgtgaccaatggtcagtattctttcgatggcgaagactaccagatgccaatcgacgagttcgaccgccaatcctccctgcacggctacgcctaccgctacatgtgggagctcgttgatttgcaggaatcacatgtgacgctctcctggcgttcccccgacatcgccggctacccgtttgatatcaccatcaccgccacttatgcacttgacgagaacggtctcacggaaaccttcaccgtgcacaacaacgacagcgtgaaggcaccgtgggcatttggcatccacccgtggctggccaacggcaagcacgccaccggtcaggccattaccgccgacaacgagccctgccgtcttgagctgcactgcgacacccacgtgaccgtagacgaacacctgctgcccaccggtgaagagccggtttccggcatcttcgacctgcgcgataaccccacgctggagggacgtggcttcgacgatgcctggaccgatatcaccaaccgcggcgaagacggcagcacttccgccgtgttcacccgccccgacggcatcaaggtcacgctgaccggcgacaagaccatcaactcctggcaggtgtgcaccggcaacgaaatcggcgggaaggctcgtcaggccggcgtggccgtcgaaccgatgaccgcctacgccgacgccttccgcaccggcaaggatctggttgtgctcgagccgggcgatgactacaccaccgtagtcaccttccacgccgaacaaatctgaaaaaccgaatagccaagcctgacgctcatcgccacatggacacccgtgttgcatcacgtcgtgctcatgtggcataattccgaaggcttatttttttactgcagcaaaggagtccatcatgggcatgcgcggacgtaagcgcaaggatcgtcgtaagaaggccgccaaccacggcaagcgtcctaacgcctgattcttcgcgtttcttatagaacgctcaaggcccgtctgatgatacatcagacgggccttgttgtatatgtcgttacttatcttcgccgcagcagtgatcaagcgtggccttgagccgggccatcagacattcgggtgccacatccgggcgcaagtaggcacgcaacgcggtaatcaacgcctgttcacgctcgtcgcagcaggtacgggggtcaaaacagtcgccctccgtaacgatatgcacgtctgtctggaccgacgcagcggccgagccggtatctactgaacgatgatgcaccgccgtgatatgcacttcggtctggctgaccatgccatcggcccccgtacgggttatggagatatggcgagtacgctctaccggctgatcgttcatcagatctcctttcccgaaagcttgcttgactgttgtggcgtgtgggcgtgagtcgcatgactatgtctcactacggcttgcgtgtcgccattgctgccaacagtctgttcactactttcattatggccggaatcggcgattcgaccaacgttttcacccaacttcgcggatggtgaaccagccgacgaaccagtcacgtacccgcgctctttcgcatacgaggcgagctcacgcttgagttgcgtgcgggcgcgattcaggcggctcatcaccgtgccgattttcacgccctgctcatcggccacctgttggtaggacttgccgtcgatggcggcgtcgatgaacacctgccggcgttccggcgagagtttggcgagcgcggccatgatttcctcgggcgcgaaggcgtccaaatattcctcttcagcggacttgagcccgtccgacgtatgttcggcggcatcgtaaatgtcccaatcgtcgtattcgccggtggagtcgttggcacgctgcgggcgccgcttggccttggcatactggttgaagtaggcattgcgctcgatggtggtcatccacgcctcgaagttggagcccggctggaatgagtcgaaggccttgaacccgcgttcgaaggtgtcctggaccagatcctgcgcgtcatcgggattgttggtcagcctcatcgcctgccggtacagtgcattgacggcgggcatggcgagctgctcgaatctggcgcgcttggctgccatggactcgcccgatccggctgactgcccggattgcatagttgcttcgcttgtcgtcacggttcaccattctaatcaaatcatgtgcccatatcgtggtcgatgacgtatgagtcacaacacgctacaccccacctgtagaatggcgtatcggctagataatagggagtaacaattatggctttgactttggcttcggccgctgacctgctcaaggaacaccatctgctgcgtgaaatcatccaaggggatgtctggaccgacgacccggcccgtatcgcttcggcggatgaaccgttcgccggcatcacctacgacacccgcaaggtcacgccgggcaccctgctgtgctgcaagggccgattcaaggccgagtatctgaacggcatcgacgaagccggcctggccgcatacgtggccgaaaccgagtactcagccgcaaccgccacccccggcctgatcgtcaacgacgcacgcaaggcgatgagcctgctgtccgccgcgttctacggatatccgcagaacgcgctcacggtcatcggcgtcaccggcaccaagggcaagacgaccacctcgtacttcacgcaggcgcttatcaacgccgtctccggcggcaaggccgcattgttctcctcggtcgataattgccttgacggccacacctacgtcgaatccgatctgaccacgcccgaatcgatggacgccttccgcatgatgcgcgaggcggccgataacggcatggagtatctggtgatggaggtctcctcccaagcgtacaaggtggaccgcgtctatggcctgactttcgatgtggccgcgttcctgaacatctcccccgaccacatcagcccgatcgaacaccccacgttcgaggattacctgtattgcaagcgccagatcatcgccaacgcgaagtcgctggtactcggcgcggacagtctgcacgccgatctgttgcgggaggacgcggcggcagccggcatcggcgcaaccaccttcgccctgcatgacgcggataatgccggcaccagtgcggacgtcgtcgcctggcccgccgacacggcgcacgcctccttccacatcgccgacggagatcagacccttggcgactaccatctgtccatcgatggcgacttcaactacctcaatgcggcggcagccatcgccatcgcccatgcggctggcgtatcgctcgatgacgccggcgcactgcacgccatcgaatccgtacgtatcgccggccgtatggaacagttccgcgatccgcagtcgaacacgctcgccatcgtcgattatgcgcacaactacgcatccgtcaccgcgctgcttgacttcgtctacgagcgttggggcgaggaaaacccgcgtatcacgctggtgaccggatcggccggcaacaaggcctacgatcgtcgtaaggaaatcgtcgaggctgccgagaaccgtatcgcgaacttcattttcaccgccgaagatacggacaccgaaccgttcatcgacatctgcatggaaatgcaaggctacatcacgaacaaggatgtggtctccacggtgatttccgaccgtctgacggccatcaccaacgccatttacgatgcccgtgcgcacgccgaccgattcaacatcctgctgattatcggcaagggcaacgagcgctggatcaaggaccatcacaagcatgtgccgttcgacggcgacgatcacgtcgtcgaacgcatgtttggcttgtgacgggattccggccaatcagatcctgatcggatcccgattggcccacatcagatcacgcgcaatacgaccaaaccagaaacacgacatacggatacgaacgaaaaaggatagctgaatcgtaatgaccacgttggagaaagttgacggagccacactggaagccgaagccgagaaggccggcatcacgttgcctatcgaacagaccaaggtttggtctggttttcaggcggatatcgacggacgcacaccatggggcgattatctgatcaagcgtgatggtgaattggtcgccgtgatctcctttatcgattttgagacgcacggttatcattatctgcgctcgatgcatgggccggcgtgggtcgccaagcccaccgaggctgaggagcgcgaggtcgtcgacgccatcgtggacaccgtcaagaaggccgacaagaacatcgcgttcctgcgtatcgacacctggttcgccgatggtacggagaaggtgctgtccacagtgccgtacgaccagaccgtggtcatcgacgtcaccggtggtgatgatgagattctggctcggatgaagcgtcgtggacgccgtgacgtgcgcaagtctctgcgcgagtgcccggccgaggttgccgatgagacggataaggcgctggccgatttctccgaatattacgatgtgatggtcgagaccggccagcgcgatggattcacgcctgctccgatgagcgactattccgatatgatcggcgcgttgggtgccgatcattgccgtgtgttcgccgcacgtattgaagaccgtgtggtggcatggtcgattgtcaccgtgaacggcacgcatgcggtgcgctactatgccggcatgcgcaacgaggttatgcgtctgcatgtgaccgacaagctgctgtattccgaatgctgcatcctaggatcgcagggtattactgaatacgatctcatgggcattggctccgacttcgcgccgtctctcaagggccttaacgagttcaagtgcaagttcaccgaggaaatcaccccggtggcccccgcccgcgacgtacccatcaagaaggtcttctacaagacgctgcagactgtacagggcgtgcgcaaggcattgcgctaataccgccccgctcccgctggcgggagctgtcgaacgaagcgagactgagggcggtctttcgatatggaccgccctctgtcacctgtggtaccagttcctgtcagcgggaaccattcgtttatcgttcgagtttttgactcaccacggctgttacgccatcggctctcatggttacgccgtaaagcgcgtcggcaatcgacatggtgcgttgctggtgcgtaatgatgatgagctgcgcatgggcgcgtagctcattgaacgcattaatcaaacgggtcaggttcacgtcgtccaacgcggcctcgacctcgtccatcacatagaacgggctggggcgggcggtgaaaatcgcgaacagcagcgccagcgcggtcagcgaacgttcgccgccggacaggaggctcagctgtttgacgcgcttgccggccgggctggcctcgaccagtacgccggtggtgagcatgtcttccgggttttccaggcgcagtcgtccggtgccgcctgggaacagcgtggcgaacatctgctcgaatgcctcggcggtatcgtcgaacgcggatttgaacacctggaccatcgtggaatcgagatccttgatgagctgcatcaaatcgtcacgtgatttgaccacatcgttgcgctgatcattgagatacttgttccgctcctcaagcgcttcgaattcctcggtggccaaagggttgatcttaccgagtgcggccagatcgcggcgagccttatcgagacgcttcttctgctcctgacggttatacggcacggtcttaaagagggcggaatcgccgttggtgccggtctctcccccggtttctccctcttcggtcccagcctcagcttccgtctcatccaacggcacagggttgccctcatcatccagcacgggcaccggctgttcggggccgtaaccactaaccaattcctccaaagtgagaccgagttcgtcggacactttttgcatgagctgcccggattcggcggccaaccgttcgcggtttacatccaaggcatgttcgcgcccggtcagatcggtgaccttgggctcgatctggttgcgctgcgcgcgcagggccttgagttcctcgtcatggctggaggcggcggcctgcagctcgtctcgtttggcggccacgtcatgcagcgtatgttccaccatggcggccactgctcgcgcgtcatcggccacgccttgcaggtgtgcggcctgctcgcgtctgcgatcgttcaacgcctcgatgcgggcgcggcgttcggcggcttctctggcgttgtcccgcagcagcccggcctgtcggctcagtgactcccctttgcggcttgcttcggtccacgcgattttcgcggcgacctcatgctcgcgagtcaggttcagtccgcgctccagcgtgcgttcacgttcatcaagttcgtcgaaatcggcatgttccgctgtggattgccgggccgatgccaaagcgcgattgagatcgtcgagcttgcgctgatgctcgttgcgattctcttgggtctcggtgattttcctatccagctgctcaagctgacgggtgaacgatgcgatgcgatccgtggcggatttcagagatttctccgcctgttgggctttgagccgggcttcggtgcgtttggcggattcctggtcgacgagtcgggccgcttcatcgcgtttggctttggcctcggccacttgctcagccattccgccgtcttgggcggccaactgtttgacctgtgccaatgctttgtctcgacgggcggccagagacaggtccgattgagagatggaagagccgccgaccgccgccacgccgtgtgtgaaggtctcgccgttcttggtgacggcccgcatggcttcgccggatgccacgatgtgctgtgcttcgtcggcggtgccggccatggctacatcagccagcaggagacgcacggtgtgcacgacagcttcggcctgtgccgggttctttgcatccgggttcgcggtgacgagtgctgccagcgcgttgcccgattgcggggcggccgccgtgttctcggcgctactctcctccgactccgtgcctggctctgtggcgggatcgccggcaatgctcgcggtcagcaccacggctttgccgagcttatcttcccgagcgcgttcgagggcgtgcaacatgttgcctgcctcgggtaccacgatggcgctggcatactggtcgagcgcgtgggccacggcttcttcccagccttcggccacatggatgaagtcggtgagtcggccaagcgaggccacgtccgtgtcgcgttccaatgatccggaggcattgcggctgcctagcgtgtcggcaagcgcatcggccttggatttgagcgagatgatcttggactgtatctcgcgctgcttatcggcgagttcgttcagtcgttcgcggcattcggcgagcgttgcacgcgcggcgtccaatgcggcaccatcatcgtcggcaatggagtctgcttcgctgcgcaatgcgtccagctgttgctgggcatcgtcgcgctgggaagtcagcaagtcgcgttgggaggcataatccttggcgcggctggtcgccagttgcacggcggattcctcgcgggcgatgagttcgcgcagtcgggcgatctgcgcatcgcgctcctgtgcggttttgcgcagttcagtcaatgtctggcggactgaggcaagcttcttctcgtcgtcggcgcgttcctcggtggccttgtcgagtgcgatgcgtgcatcggccacggccttggtttgtgccgcggcctgagactccagttcctcggctcgtttgacgagcatgccgggatcctcaccgaagttggtgacgatctggccggtgagtgaccggctgcgctcttcggccaactgggcgagcgcgttcagtcgttcacgggtctgtgagaattcatgccagtattggttggccttggcgatggccggactggattcagagctcaacgcctcgacctgttcgatgcgtactttgacttgggcgagttcacgctgggcgacggccagctggttgcgcacatcgccaagctcttgacgtaccgtgtcgcggcggttcatcgagcgttgggcgtcttcggcatacaggcgtgcttgggcgtcgcgtacggatatctgaatcgcgtcggcgcgccgggagatgcgtgcctggcgtccgagggggccgagctggcggtgaatctcccccagcaaatcgtcaagtcgactcaggttcgtttcggtattggccaacttgcgcaacgcgcgttccttgcgcttgcggtgcttcaggatgccggcggcctcttcgatgaacgcacggtgaccggacgggtcggccttcagaatcgcatccaatcgtccctgacccacaatcacgtgcatctgctggccaagaccggtatcggagaggagttcctgaatgtcgagcagacggcattgcgagccgttgatcgcgtattcggagcctccgttgcggaagatggtgcgggatatggtgacttccgtgtaatcgatatcgagcgtgtgatcggaattatcgatggtcaggctcacctgtgcacggcccaatggcgggcgggaggacgtgcctgcgaaaatcacgtcctccatcgaagtgccgcgaaggtttttggcaccttgctcacccatcacccaggtcagggcgtcgacgatgttcgacttgcccgaaccgttggggccgacgaccgccgtgatgccgggctcgaagcgcagcgtggtggcggaggcgaaggatttgaatccgcggagggtgagttccttgagatacatggcgtgagactgttttccgtatgtcgggcgtccgggtatccgatgtgccttggatgcgggttaccggacgtcggcggaatcgtcggtgcctgtgtcggcactggccgtgccggtgccggcgttaccggcgtcactggcctgttccttgccgaggccgaggacgtcgaacacgtcgaagtcgtccgggctcaccgaatcctcgaggttgtcggcggcctcatcctcggccttgtctgccggccgatccgaatcgtccgggtcgaccgccggctgatggacggccatggcctgcctcatcgtggggctggcatgctcctcaagcatcaggcgtgcgtcgccggcggtgacgaagctgccgcagataagcacgccgtggccgtagcccacgcccagctcgtcctcggcatcgaccatgttgacggcagtctgaatcgcgtcgggcaggttcgcttccttgatcacacggtcacggccgaacacgtccacggcaatcttctcgagctcatcggccggcatcacacgctcgcgccacgagttctcggtgaccaccacggagctcaggatcggctccagaacacccagatattcctcgacctgcttgtcgcgcatcatggcgaccacgccgaccagttgcttgaagtcgtagctttcctctatggccttgcgtagggcttcggcggcattcacgttgtgtccgccatccagaatgatggtcggtgaggtgcggatctgttcgatgcgtccgggaatcttgaccgagctcaacgcctcgcccaccaagtcgccgtccagcgggccattgaccggaatcaccacttcggcggcgacgagcgcggcaagtgcgttatgggcctgatgctcgccgaacttggcaatcggcacgccctcgtaagtgccgttgggcgtggtcagggtggcgacctggccgccgactgcggccatgcggtcggacacggtcatttcgtagccgtcgcgcacgagcatggcgtggttgcgttcggcggcttcggtgagaatcggcatgacggcttcctcatgcggctgcgggccgatgatggcggtgcagttcggcttgatgatgccggccttctcggtggcgatctgttcgacggtgtcgcccagccactgcatgtggtccatgtccaccggaccgatgatggccgcatccgcgttgagcacgttggtggcgtcccacaggcctcccatgccgacctcgacgatggccacgtccacgggcgtgtcggcgaacttccagatggccatggcggtgagcacctcgaagaagctcatcttcggcttgccttgctcctccatcttggcgtccaccagggccacgagatccttggtctggtcccagatgtcgatgaaatcgtcgtcggacagctgctggccgtcgatggcgatacgctcgttgatcttctccagatgcggcgacgtgtacaggccggtgcgcatgccgtaggcgcggcagatggcctcggccatgcgtgcggtggagcctttgccgttggtaccggtgatatgaatcacgcggaacgactgctccgggtggcccaggatgtcgagcatcaggttcatccggtcgagatccagattggtggtgttatgctccggcgggcggctcatgatgtccagttcgacgtcccgcatgctctcgttgttccgattcggatgctcgaatgacatatcctcttctgacctctgctcgtgttgctgttgaaccgttcggagtgcgtatgccacttacgtgttcgtgccattctcgtcatgtctacgcatgcccgcatatattccgcttccgcatgcgcaggaagctcccctcgcacaggtttgccctgcatggttcgggattcttgccttcacgcgtggagccgcactccctcaattccctctatcctagccgccggggtggtttatcgtgcgcgcacagtgaaaccgtctcatatgtcgccgccgcgcgggcggccttttcctgcagcgcgcacagtgaagccatctcatatagttgcaatgcggctcttgccgtcggcatcccattcttagtcggctgcaatccaaaacttgtatgtccggcgacgctgatgctattcagcgtcggtacagtgccagcttctggcggtacaccgacgctatgatgctcttgcgagtcggtagctggccaaaacctggattaatcccgactccatcgcctctcagtgtcgtctcctcgccaaggcatgccattctgccgtcgttgagaaatttcaacgtcgtcaatcgaccatgtcttgccccggaaacgactctcacaaacgtccgctacatcatcttttgaactcgcagaggctcattcactgttatgactgctctcaccgtcggcagccgtccaagccctggatctatgccgccaataaattgcagcaaatcgtcagccacgatacaaccattggactcacgccgacgctagattccacactcagacagaagccagccaatatctgaaccagcaccgacggcgtacaaagcataagcaccgttaaccgtcaattcgccgccctctaccagctacatccgtcttcgccgatgatatcttgttcgaatccccaaagcacgttgttcgaatgacattactgatggtggataagttttgtatgttatccactattccgaattagcggcctaataccttgaaattatcgggaatatctcactccaagacagccaagctccgaggctagaaccacaatggctgaaattcatacttacgctgcttcgttccggctacgctcgacgtcatgaagacacacaaagcagtggcctcgctcatatcagccgcgcagaatgagctgagatgcgtctattcaagaaatgaagcggaacagaccgctctacgccgccgtgcccagagtggcgagttgttgaaagtgtatgacggcattcccagtctttatgcaaataccgcatactgggatggtttgacgccgccggagcgaacgttgcatatggcccgcgctcttgcgcaagagcatcctcagtgggtttttggcggcttggtggcagtaagtgcttatggattcgaacatcaatggcatttgcatgatggctgcataaccatcgtgacttccgatcatggatctcgtcaatgccatcagcgcttacgacatgtctatatgcccgatatgaacaatccgaagacacattacgaggcctccggcctatccctgatatcaccggctagaaccttggtcgaggccgctatagaccttgattttcggtttgcgttgccgatctttgactcggcccttgccaagggaataaccaaggaagagatagccgccgactgcgttcaatggagaatcgattatgcccgagtattccgcctgctgcgctatgcaaacgaaaggagcgagaatggtggagaatccctcgcgcgaggcaccatcatcgaggatcgcttcctcacgccgcgtattcaggtaacggtgaccgacccgcagacgaataccgagcaccgcgttgatttcgtatggaagctcgatgacgggcgcgtgatagtggccgaatacgacggcacacaaaaatacgtggacccagccatgaccgataaccgcagcattcaggaggtggtggccaaggaacgagcacgcgacgagggactgaaacgagccggtgccaccgaaatcgtccatttcacatacgccgacgtcatcgaacgcactccgctgcgggtaaaactgctcaaagccagagtgccccagatggaggcatccgcagagcagcgggtcccgtgatgcgatgaaccttcatcgcatgggttcacatggattcagcccgcaaaatatgccaatatcaatcggcaagctccagcccatgcccctccttccctaccgagaacaataaacgggcccgcattccagcccgatgcactcgccatatgggcatgtccggaagaccgtccaaattccgtacttggttttaccgtcagccgtcaatcgtggcacatcgcataaagccgactagtatgaggtgggaatcgatgattcgacaacaactacatacaggagagtggcaatgggtgaagtgatcaccgccaaggacaaggaatatgaggccgaggagcgcgctacggcgccgggcgcgaaccagtcgatgagcgaccgtgtgaacaaccgctcgctgcgcccgcagtcggctgcattcaaggagtttatgaagtccggctgggccgacgatgatccggagatcaagcctctcgaatcctccaagttcacgccagcccgccttgaggcgctgggcaaagccttcccgggcgagcgtctggtcattccggccggccagccgaaggtgcgcaacaatgattgcgattacatgttccgcccggacaccacgttcgcctactacaccggtctgggttccgattacgaggccggcgccgtgctggtcctgaacccggtcgaccccgactcccccgaagccgccgccggcaagacgcacactccggaactgttcgtggcacctcgcgccgacaactccaccgaggacttcttcatgtccgcccactacggcgaatactgggttggcccgcgtgctggcctccaggagatgcaggcgatgaccggcatcgagacccacgacatcgcccagctggccgacgccctgtccaaggacgtgggtgccgaggccggcgccgtgcgtgtgcgcgtggtcagcgagaccgatcccgaaatcacctcgatggtcgagtccatccgcgaggccaacggtttcgccgatccggacaagaactccgcatccgacgacaagctgcacgagttcgccgccgaggcacgcatggtcaaagacggctacgaaatcaacgagatgcgcaaggccgtggacgccaccaagcacggcttcgaccgtctgctctccgcactgccggccgcgctcgacaagccgcgttccgagcgtatcctcgaaggcgcgttcaacgccgtgtcccgtgagctgggcaacgccatcggttacgactccatcgtggcctccggcccccacgccccgattctgcactggatgcgcaataccggtgtggtgaagaccggcgacatgctgctggtggatgccggcgttgaggtcgattccctgtacacggccgacatcacccgcaccttcccgaccaacggcaagttcaccgacttccagaagcgtctgtaccaggccgtgctggactcgcagcaggccggtttcgaagccgccaagccgggtgccacctattccgacatccaccacgcctgcatgcgtgtgatcgccgagcgtctgcacgattggggtctgctgccggtgagcgtcgaggagtcactgtccccgcaaggccagcagcaccgccgttggctcgcctgcggcgtggcccaccacctaggtcttgatgtgcatgattgcgcgcaggcccgctatgagtcctatcagggcgcgaagatcacgcccggcatgatcttcaccatcgagcccggtctgtacttccgcgaggatgatctgctgattccgccggaataccgcggcatcggcatccgtatcgaggacgacgtgctcatgaccgagaacggccccgaatggatttccgccggcatcccgaagcagatcgacgacgtcgaagcgtggatgcggagccgtaaagcaatcagtccggtggactgattgtaggcgacgccgaacgctgacaagcgcgaggaaaatgaaatcatgcgcgaagcgcaccatattaagcaggctgcccaagccaagtaacccttaagctccctcatcagagggagctcctttttttctactaaggaggcaatgtgcctactccggaatttgtgttggaattgcgtaagaagatcggccatgatctgctatggctcaatggcgtgaccggttgtgtactgaacgaacatggtcaactgctgttgggccgtcgttcggacacgggagaatgggcgatggtctacggcatcaacgagccgggcgaacagccggcggacacggtggtgcgcgaaatcaaggaggagacgggcatcgatgccatcgtcaccgatttggtggccgtcacctcgtcaaacaaggtgctgacctacgccaatggcgacaacaccatgtacatggatcattcgttcctgtgcgccctgaagcccggcggcaatgccgagccgttcgtgggcgacgaggaaagcctcagcgtcggctggttcgatctggatgacctgcccactcccctggcggccagcacgagcgagcggctggagctgttccatacttacatcgagaacaaaaagcacggcgacgcccacgccctgttccagttcgatgggcagcagtactagcggatataaagttagctccctctgacgagggagctccaatgctatgcgattacgcctcttgggctaggagctcgtggaggtgggcgcggtgctgctgctgttcgcgcgggtcgggcacgggcagggaggccagcagcttcttggtgtacgggttctccgggtgctgcataatctggtcggcatcgccgtgctccacgatctggcccttatgcatcaccatgatgcggtcggcgagcatatcgaccaccgccaaatcatgggtgatgaacaggcacgcgaagccgatttccgcctgcagtcgcttgaacagctccaacaccttggcctgcaccgacacgtccaatgcagaagtcggctcatcggcgatcagcagcgacggcttcaacgccaaaccacgcgccaaagacgccctctggcgctggccgccggacagctcatgcgggaaacggttcatgtaggcgcgcggcagctggaccatctccagcaggtcgcccacatagttcttggcctcggccacggaaccgtacttgtggtgcacgagcagcggctcggccacattctccgcgatggtcatcagcgggttgaacgaggagcccggatcctggaacacgaaaccaatgtccgcgcgcttgggcttgaagtcacgctccttgacgccgttcatctcgatgccaagcacgttcagggagccgccggacaccttctgcaggccggcgatggcacggccggtggtggacttgccggaaccggactcgcccaccaggcccagcacttcggagcggtggatggtgaagttcgcgccgtccacggccttgaagtcgggctgcatgagatggcccgggtacgtgatggtcaggttcttggcctcaacggcgatcggctgttcgcgccaatcggccttgcgctcgatcggcttgccctcgcggtcgcgcacgaccagcttctgaccgatgcgcggcacggcacccagcagtcgcttggtgtagtcgtccttcggatggtagaagatctgctccacgtcgccctgctcgaccacgtggccgcggtacatgacgaccacctggtcggcgatgtccgcgatcacgcccatgttgtgggtgatgatgagcacggaggcgtcgaactcgtcacgggcgaggcgcagcaggtcgagaatttcggcctgcacggtcacgtcgagggcggtggtgggctcgtcggccagaatcaggccggggttcagcaccaacgccatggcgatgacgatgcgctgcttctggccgccggagaactggtgcgggtagtagtccacgcgggtttcggcatccgggatgccgaccttcttcaggatgtcgatggccttggcgcgcagttccttcttgtccttcatgccgtgggcgcgcaggccctcttcaatctgccagccgatggtgtacaccgggttcagcaccgaattgggctcctggaacaccatcgcggcctcggaaccacgcacttcgcgcagctgttcgccgctcagggagagcacgtccagcgaatcggagccatcacgcttggacaggtagacggcaccggaggtggtggccgtctccggaagcagcttgatgatggagcgcgcggtcacggacttgccggaaccggattcgccgaccacgccgaccacggtcttgcgcggaatggtgaagttcacgtcctcgacggccttgatggaaccggcgtcggtcatgaaggagacggacaggtccttgatatcggcgagattcttgttgtcttcgctcatctctcactccttgccttccggcttgccttcgccggtccattcggaggcgacgatggtcgggtcatggtcggtgacggtggccggcgggtcgacgttcgcgtcgagttcggcgatcacctcgttgcgtgcggacggcttctcgtttgggtcgacggacgtgtcttcgatcgatccgaccacttcgccggcggacttgcgggcgcgcagacgcgggtcggccagatcgttgagcgattcgcccacgagcgtgatgccgagcacgataagcacgatggcgatgcccgggaacacggcggtccaccagatgccggcggtcacgtcggaaaccgaacggttcaggtcgtagccccattcggcggcggcggtcggctcgatgccgaagccgaggaagcccaggccggcgagggtcaggatggcttcggacgagttcagcgtcaggatcaccggcagcgtgcgggtggagttcttgaacaggtgcttggtcatgatgcgccaggtggaggcgccgaccacgcgcgcggactcgacatacgcggattccttgatgcggatcacttcggcgcgaattgtgcggaaatactgcgggatgtacaccacggtgatggagatgccggaggccaggatgccgctccacaggccggactggccgtgggagatcatgatggccatcagaatggcgagcagcagcgaggggaaggagtagacggcgtcggcgatcatcaccaggatgcggtccacccagccaccgtagtagccggacaccagaccaagcagcacgccggcgaagatggagagcagcacggccacgacgatggcgatgacggcggtgcgggcaccccacaccacacgggagaacacatcgaatccggcggcggtggtgccccagatgtgttcggcggagggcgcggcctgcgccgggaaggacgtgccgtcggcggccttgatctgggcgtggccgtagggggcgatcagcggggcgaagagggccacgagcaggaagaacgcggtgatcgcgagaccggtgatcagcatgcccttctgccagccgaccgccacgcgcagttccttgatgattggaatcttggtccagaacggcgtcttggtgctgacgttgagcttggtgaggcggtcgtcaccggggacggtgatcttgtcggaggatgcggtggtcatctcagtacctcactctcgggtcgataagcgcggcgatgacgtcgacgaggaagttgacgacggccacgatgatggcgataaggatcacgatgccctgcacggccacgaagtcacgggccttcaggtactgggacagcatgaagcccaggcccttccattcgaaggtggtttcggtcaggaccgcaccggcgagcatcagggcgatctgcatgcccatgacggtgatgatcgggatcagggccggccgccaggcgtgcttgttgagcaggcgcttttcggagacgccgcgcgagcgggcggcctcgacgtagccggaattgtaggtggagatgacgttggtgcgcaccagacggatgaacacgccggcggtcagcaggcctagggcgacggccggcagcacggcgtggcgcagcacgtcgacgagcacgttcatgtcgccgagctggatggcgtcgatgatgtagaagccggtcggcgataccagacgggtgaactgcatttcggagttcaggtcggagcggccggaggctggcaggatgttgagccagacggcgaagatgagcttcagcacgaggccgaggaagaacaccggggtggcgtagcacaggatggcgaagatgcggatgccggcgtcggcggcacggtcgcgtttgcgggcggcaagtcggcccaggccgatgccgacgatcagcgccacgatcagggcgaggaaggccagttcgaatgtggcggcgccgtagtgcgtaaggatgctgatcaccggctggttatcggtcagcgtcgtgccgaggtcgccgtgcagcaggccgccaagatagtcgacgtattgcacgatcagcgggcggtcatagccggccgcgtggatgcgctgctggagttcggcgggtgtcaggcggccgcccagggcggcggaaatcgggtcgccggtggcgcgcatcacgaagaacacgatggtgaccagaatgaaaacggtggggataatgaggaggaacctcgtcagcacgaagcggaagaaactacctgacagtcggttcttcttcgtcttggctttcgccggagtggtgctggaggtcgctgtggcgctgtctgacacgcgatgctccttggtgttggtaatcggtatataaagcaataaaggctcccctctccgaggggagctggcggcgaagccgactgaggggagtcatacgagttgggctcccctcagtctgccgtcgccagacagctcccccctcaaagaggggagctcatgctggatcagcccttggtgacggaggcatagcggaagcggaaggaagcgtcgagggtgacacccttcacggaggtgccggtgacggcgacctgggcaccctgcagcagcgggatggtggagaggtcttcggtctcgagtttctggacctgcttgaggatgtcctcacgggcggaggcatccttctcgccggcctgcttgacgatcaggtcgttgacttccttgttggagtagccgttgttcacgaagttgccgtcgcggaagaacggggacaggtagttgtccgggtcggagtagtccgggaaccagccgagctggtagaccgggtacacaccgtcggaatcgtcggtgaccacgcggtccttggagtactgggtccattcggtggactgcaggtcgaccttgaacaggccgccttcctcaagctgggacttcaaggccgcgtactcgtcggcggaggcggagccatagtggtcgctgttgtactggagcttgaggtcgaccggggtggtgacgccggcatcggcgaggaccttcttggccttctcggtgctcggcttgccgttgccgtcgccgtaggcggacttcagcgtgtcatcgtgaccggccaggccgtccgggatgaaggagtacatcggggtgtaggtgcccttgtagaccttggtggagagctcttcgcggtcgatgaggttggcgacggcctggcgcacggccttggccttgttagcgtcggcgtcgggctgggattcaccgtagggctgaatcttgaagttgaaggcgatgaagcgctcctcaccgcccgggcccttgacgaccttgaccttggagtccttggagaggtcctcgatgtcggtcgggctcagggagcggtaggccacgtcgacctggccctgctggacggccatcttcaggttggaggcgtcggcgaagtacttgacctgcacggcggagttcttggccggggtcaggcccttgtaggagtcgttcttagcgtaggcggcggactcgttgatcttgaaggcggtcagcgtgtacgggccggcgaaggccttcttggagacgatggtgtcggcgtcggtgagcttgtcggcgtcgaaggtatcctcatcgacgatcgggccggcggggctggacatgacctgcttcaaagtcacgtcgaaaggcacggaatccttgaacaccacggtggtgtcgtccttagcggtcacggattcgacgttggcgagcagggagctcgggccgttcgggtcgttgatcttcttgatgcggtcgtaggagaacttgacgtcggaagcggtcaggtcgttgccgttggcaaacttcaggccgtccttgagcttgacggtgaattcggtgccgtcatcgttccaggtaccgtcatcggcggcgatgtccgggctcagctcggaggtgttgtagtcctgggcatacaggaacgggaacacctggatctgcacggcgtaggagccgttgtcgtaggagccggcggggtccaggctggtgatcttatcggtggtgccgatggtgatggcgttgccggaatcggcgcctgcggtggtgtcatccttcacaccgccgcaggcggtcagggatgcgatggcggccacggagacggcggcggccagaatcttcttggaattcaacaggaatcctctctcataacttgtttccacgccatcactgcgggcgtggattaccgcctgactatggtgaggatgtgttacccctgcgtttccacagccatcgacttatgtttcgcttgtggcgaccatggccggttttatgcggtatcgagcagtattacggattcttgtattacgacgtgaataacgttcaaatggtgagatgaacatgctatcatgtcaccatttgaacatgcttgtagacgaatgctttccattcgtcaaccggtcggcctactgctacttgagcttgcggcctgcgcaccacacctgttcgaccgtccaatcggtcggatcggcaaggttgaaatcggcggcgaagccgggggcgatgaggccgataggcaccccggtgaccgggttcggccggtcgaagccgaacgccttggcc

SEQ ID NO: 1309 - DNA, 45008 bp, Unknown
  R157_18m  MAG No. k141_10348
ggggagccagtagcgcaccggatctcggctcccctctttgaggggagctcccgcgaagcgggtgaggggagtttcccctggagctttctcgctggcacaaactcagtgagagaaatatgcagaacatacgaaagcccctccttcaaaggaggggctttctgcgttcaaagaggtacatttgcctgattgcggaatactatctgctttcaaaggggtatcgaaactctgacatcgcgagtatgagcgttgatattccaacgaccatactcgcagttttgcagtctaggtactcctttgaaagcagatagcattccgcaagaccccgaatgtacctctttgaacgcagatagatgtctggggcgctgatcacgcccctcgactgagatatgggttatgttttagcgggtgctgcgcagctcgtggacggtgatagtcccgctgagctccgtgacggtcagctcggtggtgaaatccggggcgttgacagtgtcgcaatcgaagagaatcgcgcctgcgtcttcgccgttgttgacgaacacttcggccacaccgtgatcgtagaagacctcgacccgttcgatctgcttggtggcggacacatagtcgaatctgtcagtcggtaggccggtggaggtcaggtgcacggcagcgccgtcgctgaccaatcgcagcgagacctcggccgtggctccatccggctgagtgcgtgtgcccgaaaccagtgtcgcagagaacgcggagccgagttcggggcggatatccgcgtaataagcgtgattgggcacttggaacgtattgctattgcctgctggcgttgcagtaagaacatcgcccaccaacaggtcgtagacctcttggatcgggcgagagataagccgaccatcgaccacgtgcagttcgcgtggcaggctcatcacgccattggcatagtcaggccgttcgatgcgtacgccgaaccagtcgcacaaccagccgatggcaatacgacggtccacgtcggtgccgttcaccgacgtatgacgatcgaggaaggattgcaccgcgtaatagcatgagccgaaatcgcaccaaccggtgtgctgcacgtccagacgcggagcgtcgagcgaatccgcgataacgcctgtgtaccagcgaattggctggaaacgaccggtcgaatcatgcagtttcatcatcgatccgaccgccaccgccgagccgtccagcgagaaggcatccgggcactcgtaggtataggtttcggcgagtcccgtctcgaacagcagtggaccggcatactcccatgcggccttgcctaaattggtgtcggtggcacggaacaatgccaatgcaggcgtgcgggttgggtcaggctcttgctccccggcggcggcgaacgcaccatcgccgtaccagtattcgccttccggccgcggcgtggagccggagtctcctgcggctggtgcctcgccggatggtagatttgtggccaccacaatagtgggagtgcccgcaagcgcggtaccatcgaacaacgtgttatcagctttcgggtcgcggaaatcaaggccgaaatcttcgttcgggcggcgaatcaccgtggtctccgggctgaaggacaggccgtcggtgctgatggctgtggtctgcgtttccaccacagagccggggtcgccgcggcactcccagtgacgggtcaggaagatgcgaatggcgctcgcctcatcgccgggcacgatatgcccggtctcgtccacggttacggccgaaccggagaatgccccgccgctcagcgagccgtcacggctcagatcttcttgcgggagcagcgtgatcggcagatctgtccagtgcaccaaatcgcggctgaccgcgtggccccaatgcatactgtcccactgccagccgtacgggttgaactgatagaacatgtggtagcgcccttggaaacggcacagtccattcgggtcgttcatccagtgctgggccggttcgaaatgtgcgctcggccggtgcgcggtggcgcgcgtatccggggtgatgatgcggatgcctcgatccagcagattcgcgcctccagtcaggtacgcaaagcccagcgtcaggccttcgcaacgtagtgcgtattgctcgccgggcttgattggcagggtgagtcgcatgcgacggtcggcggcagtcaggtgggcttcgatcggtggtgtgttcggatttgccggggtcaagcgcagggttgccggggcagcattggcacctccggaatattcggcaaacgcctcgaacgcggtgtagtcatcggcattgatgatggtcataagaggactccttgagttttcgataccgggaattgctggatataaaggcgccggatgggcaaaaagggaaatcccacccagcacgtattgattcgccttcggccctgcaattgtgggttcgctttcagcgaggctcagtgttgccttcgcttggctttcgcctcgctcaggctgacgctacaaacagtccacaggactgtttgcttaacgcgtcagccctttactcccgaagaggcgattgagctgacgaattgcttttgaaagatcacgaacacgatgatgatcggcacggtgatcagtgaactgtatgccatgatctgaccccacgacgtggtcatctgctggaagtactgcacgccgatcatcacgggcctcaggctctcggactgcactaccatcagcggccagacgtactggttccacatgggcaggaagctcaaaatcaccacggtggcggtggccgggcccgacagcggcatcacgatacgcgagtagatgcggaaccagccggcaccgtccacgcgggcggcctcgtcgagatccttaggaatcgtctcgaaatactgcatgtacaggtacacggagaaggcgttggcgatgaacggcacgatctgcacgggcagcgtgtcgatccatccgcgcgtgaagtacaggccgaactggtccaccaccgggcgcggcagctggttgacccaccacagcagcggaatcgcgtaggtctcgaacggcaccatcaatgtggccagaatgaacgtgaagatgatcttcttgccgcgcacctgcagacgttggatggcgaaggcggccatcgagttgacgattacgccaagcaccacggtcaccagcgtgatgatcaccgagttcatgaggaaggtggaggccggcacgcgggtgaatacctgcgcgtagttgtcgagcgaaatgtgccccaccggcaggaacgccttgaacgagccgaggtccgccataatctcatcgtccggtttgaacgagctgacaaccatgaagatcagtgggaaagcgaacaggcaggcgaacaggatgcgtacgatccacccgcccacggacagccggttgtgcttgtaggcgactttcttggcttctttcgacgtgcgcttgtcgtgcgcggtttggtcggcctgcggggatgcggccatagttgttgcgttgctcatcgtcagtccctttccttacttctctcgagtcagataacgctggatgccggtgatcaccatgatgatgcagaagaacacaagtgtgatcgcggaggcgtagcccatctcctgctgctggaagccggagcgcacagcctcgaacaccacggtggtggtggcgtcgcgcgggccgccttgcgtcatcacgttgatctgagtgaacaggctcatcgcggcgatggtgatggtgatgaggatcatgttgcgcgtggagcgcaggcacggccaggtcacgttcttgaactgctcccaggcgttgcagccgtccagttcggcggcctcgtacagttcgccggggatggtctgcaggccggacagccagatcagcatgtgctggcccaccgcttgccagatggacatgacgatgatcgcgcccattgcggtgcgcgggtcgttcagccagtcgactgcctgccagtgcccgaaggtgagtttggccatgacctggttgagcatgccgtcgttctggtagatgaacatccacagcagggagacgaccaccatcgaggtgacgacgggcaggaagtagaccgtgcggaagaacacggaggagcgcacctgcttgttgatcagcacggcgagcagcaggccgagcccggcttggacgggcaccacgacgaccgcgaacacggccacgttacgcagcgcgtaccagaacgtcgggtcggagaacagtcgggtgaaattgtcgatgccgatgaaccgggtagggttcgggctgattgtgcgcgcgttggtgaatgccagtccgaaggccagaatcaccggaatgccgatgaacagcagcagtaggatggatgcgggcagaagcatcgcccagccgacggcgttctcgtggcgctgttcggcggtggacttccggcgcgtggcgacggtgccggttttgccggcgctggttccgggggtgccggttttgtcggcaccgactccggtaccggacgtaccgcgagtggttgcggttgatgttgcagtggtcatggttggtccctctcagttcttccggtagccgtcggcgccttggatgttgccgtcgatatggttgactgctttgtcgagccaggtgtccacgtcggcaccgttcatgatgtcgccgatggtcttgcggaactcggtggagatgaaattgtatgccggggtttcggggcgcattttgacgtacttcttcgaaatctcggtgaagatctgcatgtcgccgccgtcggagaactcgggcacgagcttctgtgcgccttcggtggtcgggatgttcataccggccttggctatgttggcgatgtacttgtcttgcagggagaatcggatgtagtcctgcgcggcttcaggtgcggggcaggattgggtcatgccgaccgtccacgagccgccgccggtcaccgagccgtggccgaagtcggtcatcggcataaccacgatgtcgtcgtaatccttggcgtacttctggaaagtgctcatcgaccaaatgccgccgtacagcagtccggacttattgttcacgaagtcgagcgcggtgtcggagccgcccttggacgagatgtagcccttggccacgaggtcgcgcatccagtgggcgaattccttgccttccttgccgttgagcacgccgtccgacgactggtagtccgtgcggttcaccaggtcgccgccgaaggactgcaaaatcggtgcgtaagcgtaggcataccattcgcttttgttatcggccgtgccgatttcaaacgggtaggtccattcgccgcttgccttgagcttggccaatgcgtcatccatttcggccttggtccacggctcgtcgaccgtagccacgcggacgccgagcttgtccagcaccgacttgcgggcgaacagggcgatggtggcatcgaaatagccgacggtgtacaggtcgtcgttccacgtgcccttggccgattccatcaggtcgtcggcgcgggacaacaggtccttgtcggtgagcggggcgaggatgccggcccacgcccagtacggggtgttcggctggtccacgtcgatcagacagggcaggttgttggcggatgaggcggagatgatcgagtcgttgtacgagctttgcgggaaggactgtagtttgacggtggccttcttgtctgggctggcgttgtagtcattgatgatctgctgcacgccggcaagctcggcttcgctgcctgccgtgtgcgtccagatggtgatttcattggcgttggctttcgccgccgcgcgttccgcctcaccgcagccgcccacggtcacaaggcttgcgatggcaagcgttgcggccagagctttgacggctgagcgtcggatggtatggggcatgatgctcctccttatctcttgtttctttcttccttgaataatggggtcgaaccggttcgacatacagtcgaaaccggatcaagtaggatagatgcgtgatttttgggcaggctatcgctgggggtggggccggacccaggattgcttgatgcgcagctggcattcaatctggggtgactgctcgctcagtggcggcggctgaaccttctcgaccgggtatccggcacgaggaaagggatcgggtgcctcgccttcgatgagcgaggccagcttacctactgcccagtagcccatctcgtaatgcggcagttccacagtggaaagcggcggatccagcgcttcggccacaacctggtggttgtcgacgccaaccaccgcgatatctttgccgataatcagcccgcgacgggtggcctcggtgtagatggcccaagcgcgggtgtcgttgaagcagaagaagccgtcgacatccgggtgtttgtcgaagaacgcgggcatgcgggcggcggcgtcgctgccggtgtccatgttgatcatgagttctgggtcgaacgagatgccgtgctcggagagggcgtcgatgtagccggacactcgcccgggctgagcgaccatattgtgcatggtgcccacgtaggcgatgcgggtgcagccggcgtcgatgagatggcttgtggccttgaatccaatgctgtgctcgtcgggcacgatgctgggcgctacttcggcggcatcggtcgaatcggcgagcaccactttgcagccctgcaacgattgaggcagcatcgtcttctgattaaacatgcgtgcgtagatgaagccgtccacgccgaactgccgcagcgtgagaatttcgcgatcggagcttttggctccgctgttgatgcccacggtgagcagcagatatccgagtgtgcgggcggcgtcttgcgcgccctcaatcatgcggccggcaaacggcgtggtggccacttcgtcgctgaggaatccgatggtgcggctactgctggtgcgtagcccgctggccagacggttggtcaggtaaccgagttcggcggcgatggcgcggactcgctcggcgacatcggggctgacgcggccgatatcgcggttgttgagcaccagagagacggtggagatggaaacgccggcgcgattggcgatttgcttcattgtgaccacggttctacctccttgctggcttcattggctggttgtggttggttgttgtgaagttgtccttcattggatcgttatgttaaccacgttaaaaagtcaaacgtttgacgtcaatcgatttacgtatcggagtgtcggttggaatatcaccattttacgctgtgccaaccgttggtcaaaagtttgacttggtgttgactttcagagttcagcttgcggggtggccgagggttttcgtttgtggatgccgcgttccgtgtgaacctcgttattctggatgtgttgtaaacgtgttgaatggctgataatgggtgctatgggcacatttggtttgggtcatgacgtggttgacgtcgccgcattcgccgagcagctgtctgaatccggctcgcgcatgcgctcgctgttttccgttcgtgaggtacgtcaggcggcggatcgtgcacggctgaagaacgatgacgaggccgtccatctggccgccaaatgggcgggcaaggaggcgttcctcaaagcgtggtgcgattatcttggcaatgccccctatccgttcacgcttgataatttcccgtggcctgaaatcgagatcttggatgattcccgtggtgtgccgcatgtgtctctgggtaagggggcggcgtcagtcttccaaactgattacgcgaattcggctgccggcgctcgctattcctctgcttgttcccctgcttccgataacgggccttatgcagtgatgcaggagcggcggaatgcgcgttcggcgcagcgctcggctctcggtgcggggttgatgccgcatatccatatttctctgagccacgatggtccgattgcttccgcggtggtgacgatttctgtggaatagcgccggtggctcggcgagtcttgggttgtgattatcgaaccggtttgatgtattgtaatacaatacgtcaaacgattgatgcgggcaacggatagagacaaaggagtttccggtggctcaaagcaaccagtcggcacaggcaggatccggactggtgcaagcgcggcgatatgttcggcatgaccatgtacaccgacctgttcgccggcgacctcaagaaacttgccgacaagattccgtacttgaaggagcagaagctcacttacctgcacttgatgccgttgattgacatgccgcacccgaacaacgacggtggctatgcggtccaggacttcgacaccgtggacccgaagctcggcaccaacgaagacctcgccgcctacttcggcacgcccgaggcccccgagtgccacatgctatacaacgtctccatcatggtcaacctgtggagcgcgctcgccagccgcgacgtgcgtctgctcaagaaccagatcgacaagctcgactcgctgcccgaaaactgctggttcgtgattctggacgcgatggacgccgacctccaaccatacgagtctcagctcacccatttgtgatttcgacggtttctagctcccctctctgaggggagctgtcgccgtaggcgactgaggggagtcctcggcaaagccgcaatccatcaactagattggctggtcctgctgcaaccacacgcgtttgccatcctcgaagaaatatgtataataactcaagtcgccaaaagcgacgcttaacgcggatgtagctcaatggtagagcctcagtcttccaaactgattacgcgggttcgattcccgtcatccgctccactgaaagaggccgcaaacccttggaattgcttggggttgcggccttcggtgttttcggtgcggaaaacatgccgatgcaagttttccgcccaagtccaccaatttccgcccgaaatgtttgacctaatgtttgacctcgaccgcacgaaaaggaagaggcctgaagcccatgacacagcagaagaacacccgccgacccaacggaagcggaagcgaatggcgcgacgacaacggagtctggcacgcgaagaagagcgccggcgtcaatccacgaaccggacgacgccgctggatcgaggcgcaggcgcagaccaagaccgccgcccgacaaaaactccagaccaagctcgacaaacttcaacgagaaggcgacctgcccctcgcagacgtcccaaccctcgacgtgtggatagaccgatggctcaacaccatcgcgcccaacgtcaaaccccgcaccctcgaaacctaccgatccgactgcaacaccatccgcagcgtcatcggcggaatgcgactcgacagaataacccccgccaccatcgacggaatgtgcgccaaactcgccaaggaacaccgaagcaaaaccgtccacaaccactatctcagactcaggcaggtgctcgacgcagcggtccgcgaacgcctcatcccatcgaacccggcgctcgccgcaacgccgccgcgctacgagtcgcaggccacccagatcctcgaacccggacagccggcccgggcggcgcaggccgcactcgaccccaagcgtcgcaaatacagccacctggcagataccgacgacgaccgcgaaatgtggagcctcatgtggaacatcatgttcgagaccggcatgagagaggccgaaagattcgccatcctgcccgaagagctcgccaccgtcgacggtgtgcacggaatccagatcatgtgggagctccaacgcttcagatccgatgcagaagtgcccaactggctccgctcccgccattacgagggatgcttctggctcgtcgaaccgaaaagcaagcagggcaaccggtttgtgcccgtcagcaaccagacgtggctcggactctgggcgctcgtcggacgcaggcaatgccagcccggccagctcatattcacgcgcgagggacacccgctcaccaacaccgtggaacgccggcgctggaaacgctctctcgaagacgcgggactgccctacgtcaccatccgaagcgcccgccacttcttctccacgcacctcgccgaagccggagccccggaagacgcgagaaaagcgatgatgggccacgcaaaaatcagcacgacggccggatacacccactggtccgccgcaagccttgcggcacttgccgacaaggctcgtcaggcggtgggggaatcggcctgattgcgattcttgcgcggccttcccccgcccgcaccgcgaccgggacgagcggcgttccaagcatcgatggtctcaggcagccagccgcgagtcgtgccgatcagcgcgtccggctccggcagatgataccccctcgcggccggattgctcgtgccgatgcgctcgccgacctccttgaggctgagatatcttgcggtgctcatttccggcctcccgacagatagccgaacaccccggcggccatgccgaaggttccggccgcgatggcctgaccgccgatggcgagaatgaggcacatcgcgccacatatcagcgagacgagcctgtatgcgtttgttgtgttcatgatgttccatggattagtctggggatagggagccgcagctccggatactaggactattcggaatctgcggctcttgtactaccggcgaggccttcgccgtatatgcggcggcttgggcttcggtacgggtgacggctcatcgcctttggatttcaccgccgcgatgactgcggcgattccgacaagcagggagccgatggcttctatcgccttccagacctcatccatgtctcacctccttccactgttccgtttttgtttacataataattatagcccaactaagtaagttatgcaagtcagaacggcaaagatctggatgtgcctattcgaatgttctccattactcgcacatggtgtaacaagtgcatgtaaaaccggtagaaaatcaggataatgataagacgacaaggaagcgtctggccgttgtttttgcgtcggacgccagccggaaaaagtggagatgaattttagaataataaccagtcgaattgttaactatgagtcaatttcgcgtgggagcctatatagatggctttaatctgtattacggaatgcgttcgcatatggggcgttcgacgcctgaatggcgatggcttgacatacgtggaatgctacagccgtatgcgcagtattgggatcccaacgcctctctgacggtggtctattgcaccgctcgtgtgaacgcctcttcctcgcagtcggcggcgattgaccagaatttctatctgaaagcattgcgtgcgtctggttcggtagatgaaatcgttttggggcattacgtagttcgcagcaattatgccttcatggttgataagttatcacgcagccgagtgcctcaactgctgagcgtaacggcgcagcagttcagcaggataatgccacgcggtccacagaattggcccatctcactccggaatggccatgtcggagtggatatacaacgaattgaggagaagggctccgatgtaaatgtggcttcaagactgttgcgcgacatgtacgagaacacaatcgatgcagctctcgttctgactaacgactccgatctgtcggaacccatacgcattgcgcgagaacgtatacctgttggagtgttgaatccccataaagggccgatcgcgggcagtctgaaaccattccgtaatgcgcagaacagaattggcagctggaacaaagctctctctccagccgattttaaagctcaccaactgcccgatgaagtcaacggaatggtcgacggaaaatacgtgtttgcgcgtaagccagcagaatggtgacatgctggaatacttgacgacatacgcctaccaaggtatatttaccactgtacccaccccgattgccactggcgacggggttttttcatgcccgatcgatcggcagacaaaggcgaaccatcggtatggtcatgttccgtattctggcaatcggagtatggatattcgccctgctgattttcgttggcggattgagcaccgatttcctgacatgcacaatagtcgcgctgatcatcgcattgaataccctgattccgtcaagccaaagccccggcgcccgcagagagcgatcggggcgattccgtatatacggcggtagaatctaatcaagccgcatcgagacggccgagagaacaacgaggttgggggcatgatgccggaacgagagaacggaaaaatgggcaaaatcgtgaaatgggtcaaagacaatggtctggccttcgcacgcgaaatggccggtcggcatgacgccgatatgagcaacgaaggggcgagtcgccaatttcgccgtgatatggaacgagccaccgcggcattcgccgagcttggcgcagacaagcagaaaatgtacgaactgctccgtaaatggttcggagtggacagcatggaagaagcggactcctacatcagggacggagcccagttcgaataccccatgacactgctcgaagaatacctgaaacatgaaggatacgagacaatggacataatcagattcaagagagaccacaacgtagcggagagactcagacgagacccgtcactgtcaagcctcaccccagaacaactcaaacaacgaatggagcagaacaaataaaaacgtctccagcgctcgcctgtcgaacggtagaatctaaatatgtcgcatagaggcgggtgagagaacgaggggcgttgagctcggcagccatctggtggagttcaccgtcatacatgcgttactcatggtgccacatccgtatcattttgcgacacgcgcgggcgacctgaatgagccgaacttatgcacattttggccgaaaatgtgcataagttcatcaaaagtgtgtaaattgagcatacggagacgtgatgacaagccgaaaggagactgacatgactgcagtggcggtggctccaaaggcccataaaatcggcaggccggtcatgctggacagcgaggaaatccgaaagcgcaggaatgtcctcgaaggcaagtacggcactcgtgaacagctttctcagaagcgcgacctcatcggacttactctcgaggagcgcatcgcattgtacgacctcgaggatctcgacttcctagagggccgatgagcacggaatccgaccagaccgaggaacaggccatcgatttcgcccagagactcgagaacatgctcactgaggttctcggccaaccgtcggacgggcaatacaccgccgacccgcagggcgcacgcaaaaaacgcagcgccagctatctgatcaagacgcgggatccgcaaggcatttctctcaccgtgggcggcagcaccatactccgcctctcgtaccgttaccaatgctcctgccgcgactcgaattcatacctccaagtggatgagtctgcgatcacgctgcgagccgaaagcgaccccgcacccatcatccactacgatttcgtgcgcgacccccatagcgccattcccgcggcccacatcaacattcacgccagcaacgacagcgccacgaaagcgatgctcgcatgcggcagcaaaagccagggcaagaacagacgaaaagcgttccttgaaaaaggaaccttccccacattctcctccctccacttcccggtaggaggagaccgattccgccccggactcgaagacgtcctacaaatggcaatctacgaattcggcatcgacgcacagccgcaatggcagcaagccatcgaacagagccgggccgaataccgcacccgccaaatcagcgcccttgtatgcgaattcccggacatcgcataccaagccctctcgcaaaacggatacctcgacagcggcacaccgccacaacgacccgaacgagaagacaccaaaagtcgactcaccaaatactgacgccaaaccgccccggcgctcgcaaagagcggccggggcgattccgtatatacggcgcttgaacctaatcaagccgcatcgagtcggccgaacgaacaacgaggttggaggcatgatacccagagaacacaaaggggccagcgtactggccgacagaaaagattacgtagccttggacctcgaaaccacgggatatgacccacgattggacgaaataatcgaaatcggtgccatcaaagtccgaaacgggcaacccatcgaccggtacggacaactcatcaaccctggtcgccatatcccgaatatcgttaccgaaatccatggaatcgacgacggcatggtaaaaaaacgcgccaacgctcgccgacgtgctctccgaattccttgactggatgggcgacggcctgattctcggccacaacgtcaacttcgacatcaatttcctctatgacaacgccgaagatatctgtggcaagtatgtcggcaacgacttcatcgacaccctccggctcgccagatacctctaccccgaagaacgtcacaaccgactgcaagacctcatcgtcagattcgatatcgccgaagaccaagagcatagagcgctcgccgatgtggaacagaccatcgcgtgctatcggtggatgattcggcacatgaatgagaacggtattcccttcccggccggagatggccgcagccgcagaggcttatcttcgctattccgtggcggagatcaactgctgcagatagccccacaggacgaagtcacccctgatcccgcattcgaaaacctcacattcgtattcaccggcgcactcaagaaaatgacccgcgccaacgcacaacaggccgtcaccaacctcggtggcatcaacggtaaaaccgtcaccaaagacaccaactacctcatcaccggcagcaccgactacaatgccgccctcaaaggctccaaaagcagcaaatggctcaaggccgaaaaactccaactcgccggacaagacctcaacatcatcagcgaagacgtgttctacgacatgctgggggacagcatcgcccaagcaccaacgcaaagccaactgaaattcaaaatcacgcaaccagcttgcaaaaagattctggaaatacccagcggaaacctagatgcggaagaagtcagcgtattggccgtcgatgacagaactaagcccagcatcgttttgaaaactcaggacggcgaaattctcgcagaattcagctccagaatgaaagcgtatgaaaccatcgccgccctgaacggtagaacaatagaattaaccgcaaccaagcacgatgaattcgggtctgccccatacttcaacgcaaaagcaaaaatcattcgatagggcaaacagtcacaaacgccccggcgctcgcagatgagcgaccggggtgttttttgtttattcttacaagaattctagtttctgatatgaaaagccctggcgctcgcagatgtgtggcaggagacgccacggttacggccaaggcggcggcgtgcgtcgctggcgtcatcaggatttcggctgctggcgggtcggactggtcgcctcgatgccgcgcgtggattgtccggaatgcggcgtcgtggtcgcccgggtgccgtgggcggaaccgggcagccggttcacgagggatttcgaggcggagtgcgcgtggctgatgggcgtcgcgaaccggaagaccgtcagcgggttcctgcacgtggcgtggcgcgccgcgggcgacatcgcccgcagggtcgcggatcggctcaggacggcgatgccgtcgccgttcgacgggctgacggcgatcggcgtggacgggaccagccaccgcaaaggccatacgtacatcacggtggtcgtcggccacgagcgtcaccgcgtggtctgggcgcacgacgggtacggcggggacgtgttcgacctgttcttccggcggctcgccgaggagcggaaggcgtccatccgcgtggtcgccggcgacggggcccgctggatcgactcatgcgtcgccgcgcactgcccgaacgccgaacgcgtgctcgacgggttccacatcgtctcctggatgaccggcgcgctcgaccaggtccgcagacgcctgtggcaccaggcgagacgcgccggcaacgaggaggtgaccaagcgcatgcgcggcgtcaagcacgccgtcctgaagaagccggacgacccgaccgaccggcagaacgacgcgctcggcgccatcaggaacacggacccgaagggccggctctaccgcgcctggcagctcaaggaactcctgcgcaccctgctcagacacccccctcgaccaggcgcgcggcgaactcgaccactgggtgttccgggcctcgcgcagccgcatacccgagatcgtcgaactctccgaaaagatccgacgccgacgccccgacatcctcaggaccatccggccgggctaccccaacgccagactcgaagcatccgacaaccggatcaaggccgccatccgcatggcctacggcttccaccacgtcgacaacctcatcgccctgaccatgctccgatgcggcggactcgacatgcacctaccacaacccgcaatctaacccacgaaaacagcagaagcctccgttattacgaatacacgctataccgcgctagcgtaacggtaatgcctgacgcctggcgtttcactgagttccatgttggtgccaaggactgccgctggatgactcttgatgagatgcttgccgaccccggcatcaacaaaatcaatcatgatgtcgttgcgatggtgcgggataacttgtaattgttgccacttcgggcatatgacgattgagccaaagcatgttctatgtttcgataatcatcaaaagcagagcatagtatgctctacggggatttttctatactctgaaaacaccgaaaatcaggatatagggcagtagcacgaattagccaacagcggtataccaaggaataaggccttttccgcccgcgatgtaacgtagatccgtaccttacgaacctcatatataggatcgcgaccaaagcgtcgctcgcaacaccgcccgcgccatcatcgccagccatcaccagcatcacacaccgctcggtgagtcgtatgtttgcgttcacaaaaattacatgtagtgtgtctccgcgtatgcgtagcggtgtgtgatggtgtgtgatactgcacgcacacggagcagtggcatactgacggtcgttggtaactccgtaccccacgtagcggtggcaaatccgcctccgttcccggatggtgggaacgacacgccccgtcgagaagaaaaggtgcgttatcgcggggggggcgggggtgccgctttccgaaaattccaaggtctttaccaatatcggataagaatcttcccctatccggggggacgcattcgcactttttgattaatagcataacgccttgtacgtgtaacgccaggttctggcgtacgcgattgtaagagagacggacaaggctatgaagagaattgcagaatggttcgcagcggtaggagccgcagcgggcaggagaggcaagcggttagtggccgtcgttgccgccgtggcgatgctcggcggcgtcgccggcgtggctggggtaagcgccaccgccatggcggacgatgggaatgcctccacaacacaatcgcagaccaccgatgagaaggcggccgccagcgtgcctgttcctctttccgctgagggaacaaacggtgtgccagatgatccgacgttgtctgctccggcccgcgagaagaccgttaccgccaatggagacggcacatacaaggtggcattgaacgtcaccggtgcgaagagcgcgggtacgggcgagattgtgacgaaccagccgctcgacatcgtgctggtgctggatgtgtccggctcgatggccgaaaagattgcttggaaccagcctacgaaaattgactcgctcaagaccgcggtcaataacttcatcaaggcgacggccgacgagaacgcgaagattaccgaccagagccagcagaaccgcatcgcgttggtgaagtttgccggtactgcttccgataatgtgggtaacgacacttattgggatcatcgttggggacagcgctataacaactcccagattgtgacaaatctgacgtcgaatcttaatggtctgacaagtacagtcgactcgctgaacgctgcgggagccacgcaggctgactacggttttcagaaagctcgagtcgcactgcagaacgcgcgcaccgatgcgaaaaaggttattatcttcttcacggacggacaaccgacgagtagtaatgagttcgagaagtcggttgcaaatgatgcggtgagaaacgcgaaggcgcttaaggatgcgggagcaaccgtctactccatcggagtgttcggcgacgcgaacccgaacaacacgtcaaccaactggaacaatcgctttaacgcctatatgcacgctgtctccagtaactatccgaatgccacggcgtggaacaggcttggcaatcgcgccgacaacagcagctactacaaggccgccacggatgccgaccagctgaacaacatcttcgagtccatccgccaggagatcaccaagacggcagagtacgccgacgtgacgattcacgacaagctgtccagctgggtcgtgagctccgacggcgcctccgcgaatggaaagcccgcgggcttcacgtacacgaagacccagcacggccagaccacggcgtgggctggcgccccggaggcgacggttgcggctgatggcaccgtgtcttggccggtcacgtccaacggcggcaagcttgaggacggcgtcacctacacggtgagcttcaatgtcaagccgacgcaggctgcgttcgacaacgctgcctcggcaacccctgagaaggacgccgcgagtgatgaggcgaacacggacgatccaaacaagggtaacgcgaacagctacttcacgaacaacaaccccggggctactgtcggctacaggaccgtggtgacctcctcgcagggcggcacgacgacgagcaatccgcagaccgccctctacccgcagaagccgaccatcacccttccggtctccaagatcacggtgacgaagacttggtccgacggcagcgagaatcacgcggatgattccgtgcaggtccagctcaagcaggacggcagggattatgccaatggttcagcaacgctgaatgccgccggcaactggactcacgagtttacggtgtctgccggccctgaggggcacgcatactcggtttccgaggtcaaggttgaaggctatgactccaaggtcgataagactgacctcaagctacaaggtctgaccgcacaatccggtgccttcacggtaaccaacacaccttcttacgtggccttgcccgcttcggatgtcaaggtgacgaaggttgtgcagggacatgctgctaattcggacttcagcttcaacctgaagtgcgtggatagcacggatgcgaatgctggtaagtgtgctgacgttaccggcttggtcaacaatggactgactacgactgtgtccaagggcgaattgactgctagcggcgcgagcgcgacggttggcttcggcaatggggacctgaagttcagggttccgaccggtaacgccacgcagctcgtctacaagttcaatgtgacggaggaccgtaccaatgtcccagctggctggcgttacgacggcagcacgaagacggtgacggtgaccattgccaagaacgatgacggccagtgggcggcgactgtgaacgacaacaacccgacgttcatgaacaagtacatcgctgtgtcttccctgccgttgaccggtggtcgttcggcccgtgactggctggtgtatggcggtggcctgggtctgatggccttgttggctgctgcgggttacacggtgtggcgcaagcgtcaactcgtctagcccgttcctggctcccctccctgaggggagctggccggcggagccggactgggggcgcaggagacttccctcagaccgaaaagagcaattaaagatttgcggattgcgaagccccttgtgaaaaagggttcttagcctccgtgattgcagaaaacaagtagtaaacaagttaaggaagagagggtttctcatgaagttgaggaagcttttcgcgggcgtcgctgctgcggcgaccctgttgggtggcatggcgttcggtgccgccaccgccaacgcggcggatactgaccaggccacgattacggtgaacaatgcccaggcgggttacacgtacacgggttacaagttcgccacgttcgataacgtccagggcacggccccgaatgccacgtccgtcgaagtgaacaccgtcgccgcgtggaaggacgccgtgtaccaggcggccgacgcggccaacggcggccagcagaacgatgttcccgccgagtacgccgagaacccggccgcgtacgtggccacgttcgatgccgccaccgcccgtaggttcaccgacgagctgacgaagcgcatccccgcgggcgagcagggcactgccgccgtgaacggcgtgatcaccgccaccgagggctggttcctcgtgaccagcacggcaaagacggccggcaagtccgctttggttgccacccagatcaccaacggtggcaagacctacacgaagatcacgctgaacaccgaggacggccagcacaacatcgacacgctgggccagttcaacgccaaggacgagaacgtcccgacgccgccgaccaagacggctgacggcaagggcaccgtgaacgtgggcgacaccgtgaactacacgatcaccgccgtcgtcccgcccgcagcagccggctacgacacctacaagtacaccatcaccgatgccgcatccaagggcctcaacgtggccgaggacaacgccaacttcacggtcgtcgtcaagaaaggcaacaccgacggcaccgacaagaccctggccaaggacaccgactacacgctgacccagaacggttccgcctccgacgagaacggcaccgtgacgaccatcgcgttcccgaacgtgaaggactacgccggcaagaccatccaggtgacctacaagggcgtcgtgacctctgacgccgtcgaccaggtgaccaacacggccaccgtgaagaacaataacgaccagaccggcgaaggcacgactgtcgtcaagaagctcggcaagttcgacttcaccaagatcggtgtcggcaacgacgccacgggcctggccggtgccgagttcaaggtttccgccgataaaggcaagaccttcatcaagttctcccaggacgccaacggcgtctactacccggacgccaccaacggtagcgagaccctgacctcagccgacggcaagggagcacagaagacccttggcaaggtcgctgtccgcggcctcgccgaaggcgtctacaccgttcaggagaccaaggccccgaccggttacgccgagaacttcaaggtcaccttcaccgtgaccatcggcgagaacggcggcgagggcactctgaccgttgacaatctccatcaggtcaacacgaccgacaagacggtcttgaacgtcaagtccatcacccagctgccgctcaccggtgccgccggtaccatgctgttcaccgtggttgccgtgctcctcgccggtgttgccgcgaccgtgttcgccaagtcccgctccaccaagcgcgccctcaacgcgtgaatcgagagcaatgaacgcgtggtctaattcatcagtgaattgaccccaattggaagcgagtgaagtgccaacttcgctcgcctcctttttcttagactttcaaattcgacataaccagaatcaaaggtgcaatatggcaatggatgatatagatattgtgattattacagccctagctgaggagggggttgccgtcgagaaaataggacaagatttttatgatataaattgggaaaccaattgtgatagccaaattggcgttgttcgtattggtgttttaaaaacggattcatcacatttgctgaaaattatgttagcttcagctgccaatgagggaagttcagttgcgccggtaattaatcatatcaatgatacttatcacccttcgatgttgaccatgtgtggtgtatgtgcgggagatcctgaacgtacccatttgtgtgatgttattgttgcagattcggtatattcacttgattcaggaaaaaaagagaacggagaatttctaccggaaataaatacatctccagtgtacaaaaagcttaatcaggttgtcaatgattttgtggtgcatgcaagaattgatcaacttcccactcagccagaagttattgaaatgatgcaacagcaaaatactatgccgggcggttcgttcaatgtgcatatcggccctgtagcttgtggcgagcagattgcagattatgacgctttttgggagaatgttgctcgcagaggcaaatataagacgattggctatgagatggaaggcaatcatcttggatatgcctcgcaatgggggcaaatcccctacctgttcttcaaaggtgtgatggatttcgcttcaggaaagactgatggctgtaagaagattgcggaacgtacggctgctgatgcgttattagcatttcttaagtcgaaacaatttgggattttcttcggaagcctgccgaagaaaaaatcttataaaaaaaaacagttgatgatttcaatgtgctcttggaaaaattgacggctgatgcatgggatgaatataaaaatgcattagtaacgggtcgtaatacatcgaagcgtgataagatcctcaatgactataagaaaagagtggcagatatcggtaataattgtccctcgactattcctgcagctacgaggatattcccgtacatgaattattatggatacctgtatctcgactgtcttatgagaccgaatcatcgactttgtcctcatatgttggcaggggatccctatgcggatttagtagaaagtctgctgggggatgacaatgcaactattggccttcaggatgtgctaactttgcataatcgatctcgaacagattttatggttgccagtgaattgattcattcgagtgacgaataatcgtttaaatcgatatcgtgatatcttaaaaaggtgaccgtcactccttgggactgacagtcacctactatttgatcgagtcgatcttgattagattaaggcttgatgaggctgaaaatcaccgttcaataaagagcttcaaatctggaatagccctttcataactctttcggaacaggggttcataggcagttagaggcactctttccattataagagtttttttactgcatataagtggttgattctttgtagaatagtaatccgaaacacgtgagatactattcaatcttttgtattattcctcgacgaaagcgatgtcgtagtatcagaaatttgagttattcgttgttcattgagaaaggtaacttacggagattgcggccatggaactgtgacggacaggcgaaaggccctgattcccaattcactccgtagccatcgcctcgcaccacagtcctccaacacaaacagtgaaaaaccagaatttgtgttatcggcttgaagcgtacgttattttacgtgaaaagcatgctatcgggacgaaactcgtgtcatatgacacagaaatctatgtcatagtacctaaaacttgtgttattgacgcagaaacttgtgtcaatgggtactagaaatgccgtgtttgaggggaaacttgtgttattgacgcaaaaacttgttccatccgaaatttcggagccaccgtcatctaccggccaccggttcacgtaagaaaagcggcatatgttgcacctccccgcaagggtgataatagggggagtgccggcaatgaggcaaggagcagtttatcggggatgaaacctaccctactaggggttagaaaagcccgtataacaagtactatcatcccaagctatgacatgcccccatattcaagggggtgcgaacgaaccttccagagagtgcaggagatgaaaatgactgtcggtggagggagctttagccccgaagagatcaagtacctgaagtcattgccggcggtggcggaagccacttcgaaacgcattacctacactgacgacttcaaacggtatttcttgacccgttataacaaaggtgcctcgccggtgcgattgttccgtgaggccgggctcgatcccgccctgatcgggtacaagcgcatcgaacgttgtcttgcccgctggcgcgaggcacaggatgagatcctgggtgccgaagcgtcggaacccgcccagccttggggggggggtatctcattcggggctttatcgatcgggaaccgctggaacgtcagatacttcgaacgagtggcgcgaggcggagagtgccgcgattacggcgaaagccggcagcgaatccgatttctacgtatcccccgaacgccgcgccatcatcttccccatctcccgcaaagagcagaacaacgatctgcgtgacctgttgatcgcacagcaagtacgtcgtatcgatgagctggagcggcaggtcgatatgcttgaggctttgctgcatagcgggcgacgggggagcagggcatcatctttcttgcttctgaaacgcgaatcgggcgagcggggcttgtctgcgggcaataatgacgttgctcccgcggattcggataaggagaatcgtagcgaggatcatggtgagggccatggcgagtaatcgatcgtattggagacttgcctaacacacacgctaagatgggcatcgcaataatcggcaatgagcaggtaatcggcgaggcggtgcatggagcaggaatccaacgagcaagaacctaacgaggcgacggaaatcgtaggcggcaaagtagagaccgtcgaggtttccaagcaccccgaggcttccatacccgagaccgatttgtctctggcggatatcgagcgccgtcgttcgcatccgttgcgttgggcgctgattattcttgccgtactgtgcgccatcatcgcgccgtactggttcggccgttcgttggcggtaaataatactgactccattgtggccgtgctcgggggagtgtctccgcaaggcatcgcactggtcggttgggtgaccgtggtgattgcgtacgtcggattggcgatggcggtggtcgtctcgccgtcctggccgtggctgatcgtgttcgtgatcgggttggccggcgagcagttcatcgcgggactcagcatgctcaatctcaatttctggtattccacgtacgtggtctacggtaagcaggccggcctggcgaatgccgcgaatctgggcattatgggtgcggcgatcggcatcgccgtatatgccctgatgttcgtgggtctgctggtgattatccggaagacctcgccgctgaacgtgctgaccaaaagctgggcgagcttcattctgtacttcgtgattgaaaccatcgccctgctcgtggtgttgtttggcggattgctcaccactgtgtgagcgcgtgtgccccagtccggcccctgccgtatagttttcatttggcgtaatttcgcccgcggatagagagcgtttcgagcgaacctgcacgaaacaccgcgcaacgacacaataaggaggacgccgtggcactgacggctgacgagaagacccagattatcaacgagtacgcgacgcacgaaggtgacaccggttcccccgaggtccaggtggctctgctgtccaagcgtatcgccgacctgaccgagcacctcaaggagcacaagcacgaccaccactcccgtcgtggtatgcagctgatgatcggtgaccgtcgtcgcctgcttgactacctcaagcgcgtcgacatcgagcgttaccgttccctcatcgagcgtctgggtctgcgtcgataattgaagacttccgcccgagcacctaggatggtgcccgggcgtttacatatcgccagccaacggcaacaacggcaagagggttagaggataggccagcaggtgaggccgacaggagaacccgaatgaagaggttgacacgaggaacggcggccaaggggccagtcgaaacaaggtatgtgacgtccgctgaagaggacagttgcggttcaagcgagtcgccaaaccgcagcacagtatgtaggaataattagaaaattaaagaaggaggaaccctatggagggtcccgaaatcaaggccgttgaggccgtgatcgacaatggatcgttcggcaagcgcacgctgcgctttgagaccggccgtctcgcccagcaggccgatggcgccgtggccgcctacctcgacgacgattccatgattctgtccaccaccaccgccggttccagcccgaaggagaactacgacttcttcccgctgactgtcgacgttgaagagaagatgtacgccgccggcaagatcccgggctcgttcttccgtcgtgaaggccgcccgagctccgaggccatcctcgcctgccgcatcatcgaccgcccgctgcgcccgctgttcccgcacaccctgcgcaacgaagtgcaggtcgtcgagaccgtgctcgccgtgaaccctgatgacgcttacgatgtcatcgccctgaacgccgcttccgcctccaccatgatctccggcctgccgttcgaaggcccggtctccggtgtgcgtctggcgctgatcgacggccagtgggtcgccttcccgcgttggagcgagcgtgagcgcgccgtgttcgagattgtggtcgctggccgcgtgatcgagaacggtgatgttgccatcgccatgatcgaggccggtgccggcaagaacgcctggcacctcatctacgacgagggccagaccaagcccgatgaggaagtcgttgccggtggtcttgaggccgccaagccgttcatcaaggtgatttgcgaggctcaggacgagctcaagaagatcgccgccaaggagaccaaggaattccagctcttcccggagtacaccgacgagctgtacgcccgcatcgacgagattgcccacaaggatctggacgaggctctctccatcgccgagaagctgccgcgccaggaccgcgtccacgagatcaaggagcacgtgcgcgaggtgctcgcggacgagttcaccgatatggacgatgccgagaaggacaaggaactcggtaacgccttcaaggaactgcagcgccagatcgtgcgccgccgcatcctgaccgaggactaccgcatcgacggccgtggcctgcgcgacatccgcaccctgtccgccgaggtggacattgtgcctcgcgtgcacggttccgccctgttccagcgtggcgagacccagattctgggcgtcaccaccctgaacatgctcaagatggagcagcagatcgacgcgctgtccggtccgcagtccaagcgttacatgcacaactacgagatgccgccgtactccactggtgagaccggccgcgtcggctccccgaagcgccgcgaaatcggccatggtgccctcgccgagaaggctctcgtgccggtgctgccgagccgcgaagagttcccctacgccatccgccaggtctccgaggccatcggttccaacggttccacttcgatgggttccgtgtgcgcctccacgctgagccttttggctgccggcgtgccgctgaaggctccggttgccggcatcgccatgggcctcgtgtccggcgacgttgatggcaagcacatcttcaagaccctcaccgatatcctgggtgccgaggatgccttcggcgacatggacttcaaggtggccggtacttccgagttcatcaccgccctgcagctcgacaccaagctcgacggcattccggccgacatcctggccgccgctctgcagcaggccaaggaagcccgcgccacgatcctcgaggtcatcaacgagtgcatcgacggcccggccgagatgagcgagttcgctccgcgcatcatcaccacctccgtcccggtggagaagatcggcgaagtcatcggcccgaagggcaagatgatcaaccagattcaggaagacaccggcgctgaaatcgccatcgaggatgacggtaccgtcttcatctcctccgagggtggagaggccgctgagaaggccaagtccatcatcgattccattgccaacccgcacgtgcctgaggccggcgaaacctacagcggcaaggtcgtcaagaccacgtcgttcggtgctttcgtgaacctcacccccggcaccgacggtctgctgcacatctcccagatccgcaacctggccaacggcgagcgtatcgacgccgtcgaagacgtgctcaaggaaggcgacaccgttgaggtgatcgttcagggcgtcgatgatcgcggcaagatctccctggccatccccggtttcgaggatcaggagaacaatgcccgcccgagccgtggcgaccgtgatgaccgccgtggtggtggccgtggccgtggtgaccgtgacgatcgccgtggcagccgtggccgtcgctccgatcgcgatgaccgtgacttcgacgatcgtgacgaccgtccgcgtcgccgtcgctccgatgacttcgaggatgattacgacgaccgtccgcgtcgccgtcgctccgatgaccgtgacttcgatcgcgatgatcgcgatgatgatcgtccgcgtcgccgtcgttctgccgaccgtgacttcgacgatcgcgatgaccgtgatgctcgcgactcccgagatgatgatcgtccgcgtcgccgtcgctcttccgatcgcgatgaccgtggcgatcgtgatgaccgccgtggcggtttccgtggcggccgtggccgtggctcggaccgcaacccgcgctacgccaccgacgacaactacgacgactaccgcgccgaccgcgaagagcgcactgagcgcccgcgtcgccgcgtccgtcgcgactttgatccgttcgaggactaaagccctctcacggatcggtcgcggcatagccgccccccctcacctacgggaagcccgcagggcttcccgcttaacggttcggcattcgaggactgatcgttctctagcttctctcgggtgagaagagcttaatcgcaaaccaaaaggcttctataccgtttcattcggtatagaagccttttggtttttcggcttcttcgcgctacatatttcgatgttgaatagggcactcgtgctgctgccatgtacattcagttgtcagttgacaactattctcatgcatcaagaatggcggaaaacagccattaagatgattggagccacgctaaaaagcgttgacaactgacaacagtttgtacacggcaccgcatggcacctatcctgttgctcacgaccggatctattctctcgtctgttgttatgcccaacagcaaaatccgcttgacgtgccgcgccatgtccgagtcatggccagccgttgattgaatggcggatgatcatcgaaggtactcatgggcgttgatcactgtggcaacaacaaaggccgggcccttgtgagagcccggcctttatgccgtatggcggcggattaatccttaaaggctaatccgttgtcaatcagcgttacagaatcgccatgcacacgaagtccagaatgaacagcgcggccacaatccagatgatcgggtgaacctccttggccttgcccttgcaggtcttcacgatgcagtacatgatgaagccgccggcgatgccgtaggagatggagtaggagaaggccatgaacacggctgcgaagaacgccgggatggcttcggcgatgtcgtcccacttgacttccttcagggaagcggccatcatgcagccgacgatcaccagcacgccggcggttgcggcggacggcacggcggagacgaccggggccaggaacgcggacagggcgaagcagatcgccacaaccacggaggtcaggccggtgcggccgcctgcggcgatgccggcggaagactcgacgtaggtggtggtgttcgaggtgccgcagatagcgccaatggaggtggcgatggagtcggcgaacagggccttgtccatcttggaggagaagccgtggccgttctccagagccttctcatcctcggcggagaagatgccggtgcggcggccggtgccgatgaaagtgcccagggtgtcgaacgtatcggacatggagaaggcgaagatggtcacgatgaccagaggcagcttggagacgtcggagaacagcgccgggaagccctcagctgagaagatcgcgccgaaggtctgcggcagctgggagaaggtttcgctgatggactgcgagttggaccaggtggtaacgccgaacgggatgccgatcacggtggtgatggcgatggccagcagcatgccgcccttaaccttcatcacggtgaacacaatggccagtacgaggccgatcaggaagacccacagcaccttgtcgttgaagtcggccagactcggggtcgccgccacggcgcctcccttggccgcggctttcgggtcgccgggggtgaacttgatcagtccgacgttcagcatgcccacataggccacgaacaggccgatgccgccgccgatggcgtgttgcagggactccgggatggccatgatgatcatcttgcggatcttggtgacggtgatgaggatgttgatcaggccgcacaggaacaccatgcacatggtctgctgccagctgaagccgaggccgaagcacacggtgtaggtgaagaacgcgttgaggcccatgccggcggcctgggcgtacggcacattggcgaacaggcccatgaccagggtgccgatgatggccgcgatgatggtggccaggaacacgccgccccacggcatacccgtctgcgacaggatctgcgggttgacgacgatgatgtaggccatcgcgaagaacgtgatcaggccggccagaatctcagtcgagacggtcgtgccgttttctttcaaatggaagaacttctccatttactctctacttccttggttttatgcggggctgcgcaccgcgcgcataatgctgcggctggccccggcgagaattgcgactcgccctgatcggcctgcccaacgcgcgtcaggcgctgcgcatccaatcagaaccgtggccgattatagcttgtggaggtaacgtgaacgggtccgggagtagactgactgccagaataattcggaacaactcagggacacgcagggcacacccgtggaaggaaggcgcgcgatgaaaccggccgtcgaagtcagcatcacctcttggaagaagaatgtcgtcaagcccggtcaggagtacggccgcgtactgctgatgcctggcaccggctacaactgcgaccgtccgctgctctactggtcggcccaggctctggtcgaggccggctggcgaatcgaccgcatgaacgtacgcaacgcttccgacgacctgtccacggtgattccggtcctcaatcaggcgattgacggctggatggccgccgcgcgcgagtccggcgcgggtaaagccggtgattccggggatggcgttgccgtcgatgattctgctaccgtgctggccgatggcgcagctggctcgccgaaccgtgattccgacaccccgtccggccctcgcctgttgctgatcggcaagtcgctgacgacgatgacctacccacatgtggcctcacactacggtctgccgttcgtgctgctgaccccggtgctgcatcacgccgacttcgatccatccgcccgggtgattccggtgccggctgtcggcgatgatatcgtcgccgaatccgaggctccgagcgtggccgaagcaagggcgatcatccgcgcagaactggccgaccagtcgcacgccgccagctcccgatactccggcccggcaccgctgatctgcgccggcaccgccgacccgttctacgatcgagcccgcgccaacgcgctcaccccgcacgtgcacgaatacccggatgccaaccattcgatcgaggtgcccggccactggcgtcgctcgctcgactatctgaaggaagtcaccgcgtccgtagcccagtacgccgccacgttgtaatgccttgcgacacgcccgaattctgcaatgtcgctgaccatccgtaatctaatcatccgtaaaccacagaccgttggttgaagtgtgcgcgagtgcatttccgaagtttggttcgccaagccagcgcaggttgagagatataagcccgtcaagggccggcgaaggtcgcttcgcgagattatattgctctgcctgtgcgcagggcttttttgttgcccggccgaaagttccgaactccaagtcaacggccgacttaggaaggaacgccatgaagaggcccgaaaaggaagcggtagtcgctcagcttacggaagaattccgtaacgctgacgccgtctacctgaccgagtaccgcgggcttaccgttccgcagatttccgatctgcgtgaaaagctaggccgcgatacttcctacaccgtggcaaagaacacgctggcacgcatcgccgccaaggaagcgggcatcgagggtctcgacgagattctctccggcccgaccgccatcaccttcgtgaagggcgacttcatcgaggctgcgaaggtcatccgtgacttcgccaaggacaacaaggctcttgtcatcaagggtgccgccgctgacggcactgtctacgatgccgagggcgccaagaagctggcagacctcaagtcccgcccgcagctgcttgccgaattcgccggcgacatcaaggcatcgatggccaaggccgcgtacctgttcaacgccctgcctaccaaggctgtgcgtacgatcgacgccctgcgcgaaaagcaggagaaggctgcctgatttacgccctcacggcatgaatcagtcgcttcgataatttaaacaataaggtttattaggcagcggatctaccacttcgtccgccgccaagattgaaaggaagccataatggctaagtacaccaacgatgagctgctggaagccttcggcgagatgaccctggtcgagctctccgagttcgtgaaggccttcgaggagaagttcgacgtcgaggctgccgctccggttgccgctgttgccgctgttgctggcgctgctgctccggctgaggaagagaaggatgagttcgacgtcatcctctccgccgtcggcgacaagaagatccaggtcatcaaggctgtccgcgccatcacctccctcggcctggccgaggccaaggctctcgtcgacggcgctccgaaggccgtcctcgagaaggccaagaaggaagatgccgagaaggccaaggctcagctggaagaggctggtgcctccgtcgagctcaagtgatttgtgcggcataagccgcaatcacagcttttcgaggaaccccgcacctgtgtttcaggctgcggggtttccgcatactgagtagactagttgacgagggcgaggcggagaacgcgatccggcgtggaatcacaaagctggcaatgagcgaaagttgtcaattctgtgcccagtaatccgccaaaagccggtaaaagatgacacaatggcacgtagtgtggtcaaatagtgtgtccaggaaggcggtcacggtgagcgagtggacggtgaagatcaacggtgtcgaccggatcagcgtcaagccgggggagtgcgtggaaatcggccgtaagccgttacgcccccttgccgatgatggcaacacccgccttgacgtcgccgatcagaccaaatcgatgtccaaacggcacgccatgttcacggtaaaaagcaatggtacggcttcggtccgcgatcttggatcgaccaatggatcgtatgtggtgcgggaaaatggtgatttgttgcgcttgccggccaatgtcgagttcctgttgccgacgtctcccatgcgcatgcagttcggtgatgtgcctgcggacttcattcgtatcgacgatccagtggcaaagccactcgaccttaaggtgcctgatttgtttggctatgcggttcacgaagcaccgcaggagccggacgcggcggatatgtctgtcgacgatattcttgatttgcgggccggcgagccgaccgccatcttcagcgcggataatgttcgacgcaaggtcgacgagcttgaacttggctcgctgaatatcacgcagccagtgacgaaaaacgatgagccggccataccccgtgacctgttcgcggatgcgttggcccagcatgccgagcaggagaccgaacgcaaaaaccagcaggccatggactccgtggtactgccgaagcagcagaccgaacctgagtcgacgactgtaacgcccgcatccaagcacagcaggatctccggtattgtcccggtagatgccatcgcccatgccgttgttaagcacgctcccagcacaagcgagccggcagtggcgtcggcggcggttgttgaatccgatgtggtggctggcgcaagcaagtcagccgaaaacgttcagtccgctccgaataccgacgattctcagccggtggacgctgttgcacagcattctgaaggcactcagtccgaagccgcccagtctgaaaacactcagtctgagaccgcccagccgacaaccacccagcctgaaaccgctcaaccggcaaccgacgcacccgaggatcagcagctggcgaccgaaaccgaaaccgcccagcagtcggtctccgaagcgtatgaagcgtctgatatctactccacgggcgtacacactccggtcttcgagcccggctcggtgttcgagcgtgtggccaagggcgagctgaaagcacaggagccggcagtcgaagtcgatggcctgacctctgacgaggcaaaaaccacgcaagatttcaacgttcagttcgaagtcgcccgtcatcccgaattactggcgttcctcgccatgaatccgtacctgtacgacgacatgtattcttggctcgccgcccgtggcgaggccgatattgacgaagccctgtctcacaacaagggctatcaggaataccgcgaagcggttggaaagtgagtcgagagatgacccagagccagactcagaaccagaatctcacggaaggtctgaatcgcatccgtcgctggcgtgaccaataccgcagcatgcagccgccatcgccgctcgaggatgtgaatcaactggccgcgaagctggagatgacccatgcccatccctccggcatcgcccagctgttcgcttccggccatgttcggttggattcgttgttccgtgacacgggtgtgcttaaggccgccgaacgccatatcgggcgcgtactggatgaccaggccgccaagcgcaggatttccggcgtggcggagttgtcgctcgtggtcggtgtggccacgtggaggggcaacgcgctgccggtgctgttgtacccggtgagcgtcacgatcgaggatgatggcttgtcgaccaccattcgattcaccggtcgcgtgaccctgaacgccgcgttcgtcaatgcattgcgtgagcagggggtgttcttggatgaggattccctgtttgacggtgccagctatgacagtggcactcccgaaacttccgcgatgttcgcccgtatttcgtccgaagcatcggagcgtatctccggcttcgccatcgagcgccagattgtgctcggatgcttcatggacccctcgtcgcagatgatcagcgaaagccgacagttcatcgaccagctggagaatggccccaccggcaatgtgctgttggacgcgcttgccggcgacaaatccgcccgcaccgcgctcaaagatgccaatattccgcaatacagtcctttcgacgtagacccgcatgctgagtacgaagtcggcgatgtggacaatacggtgcgatatgccgcgtcacttgctgccaatggccatagcatcgtggtcgacggcaccttcccgaagggcaccgcggagcaggctgtggccatcgcatcgcgctgcctgatgaatggtcgttccgtgctgtacgtgcccggcgtggccgagcagaagcgtctgttcatccagacggcctccgccaatgagatgaaggcgcaggtactggatgtatccgatgaacacgccaacgccgcgcttgataagcagctgattgccgcagtcggattccagcccggagtcgccacccagcgattcgaccagctggccgacgaactcgtgggcgtgcgctcgcgcttgacccgctatctgggcgacctgcacgggggcaacgataagtggaatgtgtccgcatacgagaccattcagaacctggcccgtatctccgtgctcccgacacaccccgccacccacgttcgacttgacgagtcaagtgccctgagcatcgccaacgatattgacacatggatcagcaagatggaacgtgccggcgagctcggcgaatacaccatcggcccggaagacaccgcatggtacaaggcgtccatcaccactgaagaacaagcggtaaccgcttaccagcgcgtggacgatttgctgcgtcgcttcctgcccgccacccgtgagcaggtggcacgcaccgtgcagacctgtggattcccggttcctcccaccactcgcgagtgggagcgtcaggttacggttttgaagaatctgcgacgagtgcttgacgtgttccagccagagattttcgagcgagacatcagctccatgatcgaggccaccaagccgaagagccagcgcaaggccgagggcacgtcgatgggattctgggagcgccgccgccacgtcaaggaagccaaggatctgctgcgcgtcggcgcgcaggtcgaggacttgcacgaagcgttgaaggtagtcgccaagcaaggggagcagtggcatcagttcgtgcctcacggcggttggccggtgctgcccagcaagctcgacgagatcatttccacccaagaggcgttggtcagcaatatgaccgcgctggataccgtgctttccaccacacccgctggcggcaatctggaaaccgccgatttcgagaaggtggaagcacgcctgaaagcactgctggatgatcgcaaggcactggacaccttgccggagcgttgcctgctggagcaggaattcgcttctgccggtctgaacgagttggtcgccgatctcaacgctcgccgggtgggcgtggagcaggtgcgtggcgaagtgcagctggcatggtggaccaccgtgttcgaggacattgtgcgttcttccgccatcatctccaaccaggatggtgctgcgctgcagaccgcatccgaccgcttcgcacaggtcgatgtggagcacgtgcgctccatcggaccgatggtgtcgcaggaatccatgcgccgcctgtgcgacatgctgttctcccgcactcaggaagccaaccagatgcacaccgtgctggcagggcgcgccagtgtgtcgctgagcaggattcgccgtgatcatccggagattctggccgcggccaagccgattctggtggcctcgccgggtacgctcgccgcactcaccgagccgggtgtgctggctgatgtggcgattctcgatgcgtgcgcgcacattcccgctatcgagttgctgtccatcatcggccgcgtgcagcaggtggtggtgatcgcccactgcgcgacggtaaccagcgaaagcgtcaagcagctgatcgacacgttgcctcatatcgaggtggatgctgccccgtctcgccgtgcgccgcgcctgtccgcattccttgaatccgagggatatggtcctgttcgctatgatgtggccaccgagccggctgccggtgaggtgcggttccaccgtgtggaagcgagcggtgtgccggttatgtcttctggcctggtggaatccagccagccggagattgatgaagtggtgcgtctgattacacaacgtgccgccggttttgctgtggttccttccagctatcgacttgtggtcgtgatgttgaccgacgcattccgcacacgcttgggtgccgaattgaagtcgttggcaggcaaatccaaggcgatgggccgattcctgcgccatgtgcggctggtttccttgcgtgacgtggccggaggtcgtgccactgacgtgattctgtcgatgtgctatgcgaaaaccacgcacggacgtctgcttcagcagttcggcccgctcgaaagcacaggcggtcgcggactgttgctggatgccctggcattggcggaccacagcttggatattgtgtcggcctttggttccgaagatttggatgaagaacgactgcaccagtccggtcctcggttcctgaagaccatgttgacgtgggccgaacagcttgacgaccgtccggtgcttccgttgcgtgatgcggcaggcggcaacgtgctgttcgacgatatcgccgacaggttgcgcgcgcgaggactgaacgctgctgttgattatggattcgacaagggcgtgaagattccgctcgtggtgggattgaaggacaagccgtttgccttggccgtgcagaccgatgacgcgaactttatgtccgtgcaatccacgcgcaggcgtcatcgtttgtcggcacaggatctcatttccttgggctggaatgtgatgaccgtttggagtgtcgccgccttcgtgaaccccgataaggaagtcgaccgtatcgtcagccgtatcggcgagatctaccgcgaggttgaataatcatggcggaatactcggctacacggcgcacaccgcgcaagcacaagcgcgtggtgatgaaaggcactgagcagtttgacgctgacggcgtcaaactcgagcccggagacatgcagaccgaccaacaacggcaatccgacgacgacaaacgcatcctcggcgaactgcctccacactgggctgttttcaacgagcgcgagtaggagttgaggcgcactctgtgcgctctgatgttgtgttttccgcagccgtacggctgcggaaaacacaacatcggccgaaggccgattccgcttcctaccgcacaacggccataatcgctccggcctgttgcagctccataaccttggccgcggcctccggcggcattgcgaacgacaccagtcggtcgttgcttcccaatgcgccagtcgtatccggtttgtcgacattcatcaccgtggcgttctcggccagcgtgcaatcggcaccttcgcaaccgacggcggaaaccagtctcacctgatcgccggccaatacatcgtcgacgctactggccaagcggacttcaatcaccgtagtgccggtcggtgctacgggcgcatctctggccatatgcgtggaaatgggatcggctgcttcgatatcgatttgcgccaccttgcccaccacatcctcaatattgcacgcccaagatgggcctatcgcagataccggcatatcagccaactgaacgtcggcggccagaataatgtcaccccgtcgaatcgagcgagcggccaccaccatcggctcggtctccaccacggccaatacggcttcaagcccaaacaacactgcgagtcccacgcacaacgcagcagtgagtcggcgcaaggcatccgccatgcgccgtcgccgcaatgagccgcgcgcaggcggcttaataaacgaaaaggtcaccatgcaaccatggtgacctgaagtttttcgtaagcgcaagctgaatcgacctatgtggttctagcttgccaagttatccacaacgcttcaaacccgtgcaacagacagtgcccgtagtgccaatatccgcggcataccgccgtcgacaccgtcgtttacagaggaaaaacggggagccgaccttacttgccggatttgtcggtgcggtagaatccgtgacccttgaactcaatcggcacggcggaatacaccttgcgcacctgctcctgcgagcacttggggcacacggtaatcgggtcgtcattgaacgactgctgttcggtgaagtcatagccgcagttcttgcaacggtaatgataggtaggcaacggattcctccaacaaagtcatatttctcgcgcatggcgtgcaacaccatgccgtgcaaccgttcatatcctagtcgccgccctgacacattggcgttacggtcttactagccagcctgcttttgccactctggttccatcggccagtgtgcgtggctggttggtcagtctggcttgcgccgagtatcttggccggccggtcaactcagccggcccgattcgccaagccgccggtatccccccggcgtcagcactccgtcggccggcacatcatgtggttcggccggcaaatcggtgtccaacacctcccacggccagcacaccgcaatcagggggcacgcgggcttgcgtcgagccaaggcccggtcataccagccggctccacgccccagacgattgccttgcgggtccactgccaaagccggggcgatgaccagatcggccttctccaacgcttcgggcggtagaactgcgccagttggctcatcgggtctgtgatggacggtgctgggagagctgcagctaccggcattgttcgcgccacccactgcatccatcgagcgcaaggattccaatgaatccagcacactccagccaatttccaacccagatcccaatcgtggcaccaacacgtggcagccatgagccaacagccatcgcaacagtggccgggtttcgatttccgaacccatcgacacatatgccgccactgtggaaccatcctgaatcatgtgtgccgggaaccgtcgcaccagcaattcaccggccgctccacgttcttccgctggaatgcgcttgcgccgagacagtatatggtggcgcagcgtcgctttatccatcttttctgttttctccgtgccgctgtggtcgctgccgatattcatgccattgtccgcttcgctcataccgcacaatctagtgtttccaccgtaaaacgaaagtggccgaggcgaaggcgcaagcccttcatatggctacaataaaggccgtgtcagttttccagtcgattaaagaggcgttcaagctggaccaccagatccgtccgccgcgcctcacccatcccggtttcccgataatcctgcgccccctgaccatggacgatgaggacggctggaacgaagtgcgctggcgcaacaacgactggctggcgccttgggaatccggcgacccgatgcatggcggctccatcaccttcaatcaatgggtgcagcgacagcgccgtaatgagcagcatggcgtcggcgtgattttcgccatcgaataccagatgcgtatcgtcggccagatttcgttgggagccatcgcgtatggtgccatgcgcaccggtgtggtcggatattgggttgaccaacggtacgccggccacggatttgcgccgatggcactggccatgcttgccgattgggcactcggagacccattcgggcccgcgttgcatcggctggaaatcgccattcttccggataacgcgcgctctttggctgtagtgcgtaaggtcggagcccatcatgagggactgcgcgagcggtatatgtatgtcaatggccagtggcgcgaccacgtaacatttgcgctgttggctgaagatatggggcaagggttctctgccagactcgccgccaccggttccagataagcgtcgaccggaagaattccgctccgacacgcccggacggaaagccccagttcgtcggtacgtctcctatccttgactctatgggttatgagtcactgagcactgtcgtcgtgctggtgattgtggcgattattatcgttgtatggctgcccgtacgtacggccaacggcatgaaacgtgtggacgagcaccggcaggatcgttattcgccttccctgcatatcgttgatgcagagaacggcagacgattcggagacatcaagccgcataaggcgaaaggggcagcaatgccagcatcaacaccgtcagcgaggctgacacctgagcacatcgcccatgtgcgggaactgcgccgcgcggccatccgccgccggcagattctcgccgtatgcctgcttgccataaccgtgttggtgtttgccgtatcgttccccctgcatttcagcccgctgcttgctcttattccgttcgtgctgttactgctggtgctggtgctgggagccaatgcctcacgccaggcccggcaatgggaacgcaaggtggtccgctacgagcggactcatagcggtacgggctggtccaagaaaccgtctgccgagtccaaggacagcaagcgtgtgaacaaggccgaaccggttgcggccgtaactgcgcctgccaaggagctttccgagcatgttgaggatgctgccaccgaggtcatggaacagcggcagattcgccgcgcgttacgcgatgccgagattgagcaggccaaggccaaggcgttgcgtcagtccgccgccgcatatcaggccgcggcggagcacgccaaacagtctgagaagtctgatactgcacagtccgccgccgataagcctgccgccgaaccgtctgctatggtcgatgaatccgctgaccgtaagtccgctgccgaaaccagtgaatcttccgccgcgcccgatgcctccgctcgcacggataagtcgactaagtcggataagtccgtcgcccctcgagttgaaccatcgcttacggtgcgtgatgagcgtgatgagcgcgacgatgccgctgccgacgctacgtcggaactggtcagcgtacgccctgcccgagcactggatgtcttcgatatggccacctcgcaggatctcatctccttcactttgggcggggaacataacgccgacaacgctccggaaagcttggagatcaagtcgacccgtcaggtgtccaaggcggaacctgtcgaacccgcagtggcggaaaagttgattgacgaggcccgagccgtcaaggccgcggacgatgccaaggccgccgatgcgggcaaggctgtcagtgccggaaacgctgtagacactgagtcggagcagcgcgatgatgccgatacgaacgccgctacggacgccgatgacgaggctgcaaacgccgcccagcgagccgcattccacgaatccgaggagcgtgccgacgtcgaagcgccagcggcgaccaccgattcgttgggcgcaggcctggactccattcttgcccgccgcggcaactgagcgttgcgattcgccgattttctctcacagcgttagcactcgagttggcagagtgctaataatcgcgctacgatgtgtcctagcgcaaagggacaacgcaagtgatcgtcagcctcttgaggcgttctggcgcggcattatcgaactacaagtagatacgaggtgacccacagtgtcgattaagctcacaccgttggaagacaagatcatcgtcaagcaggccgaggcccagacccagaccgcttccggtctgtatattccggacaacgccaaggagaagccgcagcagggtgaagtcctggccgttggcccgggccgtcgtgacgacaagggcgagcgcatcccgatggatgtcaaggtcggcgacaaggtgctgtactccaagtacggcggcaccgaagtccactacgagggtgaggactacctcatcgtcggcgcgcgcgacattctcgccatcctcggctgattagtcgcctagcgaacttcaacaaccccgactgttcccacgaacagtcggggttttctcttgtcaggcggaaaggggctcccctcagagaggggagccgaaaaccgctcccgccaagcgcccagccatgcctgctatgcataaaggtgcatgcgcgcaacgtagttgagttcggcgttgcaccgcatctacactgggtaacggattggggtccctatggaagaggctcagtcggcgacttggccgagcggcttaagacattttgcacaagacggcagtaggtcgacggtatgttgtttttttccgtgtcgcaggttcgtggtgtcgtcgctgtgccaatggttgtctctctaccgacgctgagtgccgtggcatgaggccagcgtcggcagtgggccacgaaatggcgatgtgccgatgctgagccgcgttggcgtcgttatagggccagtttttggaccattgccgacggcaaatcggcgttttgtgtcggcgacggtccaaaaactggcggtctgccgacgataagtgccgtcatcgtcggcagaccgccaggtattgtccctgtgccgacgtaaaaagccctgccatcgtcgtcaccgagccatcttgtgactcactgacggcggcagcagggcggaagaggccgaaatcatgcgcgcggtgcggtctcacacctcgaatccggcctccaccagcgcgtgatcgatgtcgcgaatcaaatcgtccgtatcctccagacccacggccagacggaagaagccgcggtggaactcaggcgggtacaggtactggcgctcgtcatcctcaccgaggaacacgatcagcgattagtcatggccgagcgagacggcagacgtaatcacattgagcttggaaacgaatcggttgtgcccgtcgtggtcggtgtcgaggccgaacgacagcacgccgccgaacccggagtccgggcgggccagctggctggccgccacctcgtggtgcaggtgcgattccagaccggggtacgccacgaaacgcaccacatccagcgattcgagatgcttggcaatcgccaaggccgaggcgtcgtaggacagcgcgtaggtgttcgccagcgtgatggggcgacggatcgcgccggtttcggcgtcgaccccgttgccgaggtgaatggccagcgtgccgaatccgagcggctggtcgtcgaatgattgtccgtgatgtacaagatcagaagccatgcgcccagtatgccggcatgcgctgtgccgccgcaaggaggcgacgccactcgaaaaccgcgccattgcaaggttctggaacaccatataagaaaaatgattggtagaagtgcggggtgcggccttggtcggggctgtttgcagggccgaagcggaccctgaaaccacgctgtgagacacgccgataaaaccgcagaattccgcggtaaaacaaggttcgcgtagaggtcgatttgcgtacttggaaaatatgtggttatatagccaagttgcctgttgaggtcaaacaccgcggcgggaaacagactggcggatttcccaagcggtcaaagggagctgactgtaaatcagccgcttcgtgcttcagtggttcgaatccactatccgccacgccccgatagctcagtggtagagcacttccttggtaaggaagaggtcgtgagtccaa

SEQ ID NO: 1310 - DNA, 5197 bp, Unknown
  R157_18m  MAG No. k141_10487
acgatgaacaatgcggcgcccagcagcacgataagaacgactaatagaattagcaccaacagcatggttccgcccaacatacttgcgatggtcatataaaactcctctcacaagggtcaagcacggcatatcgttgtgccgcgccccaacaccatccatgctaccatcgcacgcccgggaactgatagctctcacaggcaagtccaagaaagcgaacgtcagatttcatgttccgttcactccggcagccacatcttgtgcactaatgtttgaatcagccaagttgcacgtcagaaacaacaaagtcgggcatttcaaccaaggaaacacccgacctgaatcaagcactgccgccatataaacacatcagaagtgttcgttgagcttcttctcgcagtaatcctgaagccatccaagcaacgtgcagaagagcaagtagatcaagcccacttcaatgtataggaccagcggctcgtagtaaatcgccacaatgcgctgggccgtcatgaacatttccaccacggtgatgttcgccgcgagagacgtgtccttgaccaatgcgatgaaggagttgaacaatgcagggaaggcggagcggaatgcttgcggcagaataatgcggcgcataatcgtcacatacggcatgttcgccgccaagccagcttcaagctgtcccttaggcacggcaagaatcgcaccacgcaatgtttcggcggcataggcgcccacattcagcgagaacgcgattaccgcggaaggcaatgccggaatcgtaatgccagcggacggcaatccaaagaagataacgaacaactgcaccagcaacggcgtaccacgaaacacccaaatgtagaaccacgcgatttgggaggccacaggtactttagccacacgcaccagcgccaccacaatcgccagtatcaaaccgagagcgaaggaaatcagcgtcagcggaatggtcacagtgataccgggaatcagtagcttagcaaaggaatctacgactattccccatactcgtgcgtccattggccatcctttgttgtgtggtatatgttgcgtctgctcgtaatcttcacgaggccagctcatatttcccggctccccctaattacaggagagccgggaaacatgtcactcctgagagaagtcctcgccaaagtacttttcggagatcttggtcaatgtgccatccttctgcagcttgacaatggctttgttgacttccttgaccaagtcatcgctgcccttgcggaacggcaggtaggcggccggagtcttctcggacttggcggcaatcttgatgtccgcatccggcttctgcttcaggtagtcgagcgcagcaaggccatcgttcaatgacacatctgcacgaccggacgtgatggcatcgacctgctgaccgaaatcgttaacctgaacgatagtagcgcccttctcctgagcggtcttgttccagttggaggtaccggtttcagcggcgcgaagccccttgacgtcatcgaacgaagtgacgttcttcgggttctccttggaggtaatgacgacaccgtaggagtaggtgtatggttcggagaaatcatacttggccttgcgctcgtcggtggcggaaatctgatcggcaaccgtatcgtacttcttggcatccacaccggcaagcagggagtcgaagctgccctcggcaaactcggccttgataccgacctccttggcaatggccttggccacctcgacatcgtaaccggtcagctcattggttttggagtcatggtaactgaacggagcataggtgccctcagtggcgaacacgattttgccggcctgcttgacctgctccaatgcactggagttggaagcggaagccgaaccgcatgcggcaaccgaaaccagcacggcgacaccggacagcaaagccgcagccttgcgaatcacttgattattgaacatgacaaacccctctcttgatattgtcacaattaattacaacagccgtgaaacgcctctaccgagtcaccggaatcatcagcacattgttggttgaagacaggaactcgacggtacgctcctcctgcggatgttcgaagatccgcttcggatcaccctgctcgaccacatggcctccttcgatgaacaccacatgattcgatgcctcataggcgaaccgcatctcatgggtgaccatcagcatggtcatgccttcgctaccgagttgcttgatgacccccagcaccccgttgaccatttccggatccaatgccgaagtgggctcgtcaagcaccaacagctcaggattcatagccacggcgcgggcgatgctcacacgctgctgttgcccgccggacagtgtgctcggataccgatcatgaaaatcggcaagtcccacacgatcgagttgctcaatagcgatcttgcgggcttcatcaggcttgattcccttggaatacaccaacggttcggtcacattctgcaatgccgtcttgttcaaaaacaggttgtagttctgaaacacgaacccgattttcgaacgcaccttgtgaatgtcggcagatttggtagtggtcaaatccacaagaccatcaccgaaatcgacggtaccggaatccgcgtgctcaaggaaatccagaatgcgcaacagtgtggatttaccggagcctgaggggccgatgacagtaaccacattttgtcgaggaatgtcaagatcaagcccatccagcacggtggtgtcggcaaagctcttgctcactcccctaatccgaatcatcccgatactcccttttcgctgctgttatgcacgtcaacgctcgttcgcgaagcacaatcccttaccgtagacgcgcttgctcacctgtgtttcggcgtggttatatccagtgcctatggagtgctattcacaccaatgaataacacatcggacgccgacgtattgttcgctcacagatgcagcagatcgtcaaactcgtacaactcttgtctttacttgatattcagctcgttgagcttgttcttgatatccacagccgacggttcgacctggaaagtgccatcaggatagagcaccacgggaatgtgctgctggccgctgatggccaccgcacgatcggccgccccatcctcggtttcgatgttatgccacgtatattcggcgccaagctcctcaagcgtgttcttcgcctgcttgcaatcaccgcaccatgttgcgccatagacgtcaatagccatgtcctgttccttctttcgtaatacaacaacccaaattcacaacgccccaagaataacagcgcaggtttttctcagaacgaacaattatccgcatacgtaagcgatacacgtcagtatgcgttggcaatggcttggtcaaggtccgcaatcaaatcatcgacgttttccaatccgatggaaagtctgatgagattatcgctgactccggcggcgatgcgcgcatccaaaggaacctcgcgatgcgtgatgcgcgcaggatcgacaatcagcgaacgcgcgtctccgatgttcggcacataggagaatacctcggttccgtcgatgattcggcgcacattatcggcgctgccatccaccaggaacgacaggatttgaccgacaccgcgagggaaatacttgcctacaagctcgtattgcggtgtatatcccaatcctgaatagttgaccttcatcacatgcgctgcacgattcaaatgctctgcgatccgttgcgcggaggcaacctgctggctgacgcgctgaggcaatgtttccaaaccaatcaaggaaagatacgcattgaacgggctggccaccgcgccgaacgtgcgcagatatttgatgcggatgcgcttgatgaatgcctcgttgccgtatctttcggcaaaactgtgccattcaccgttgcgatcatcgctgatgacctgctgccgtgtggtgaattgggggaatctgccattcgcccagtcaagatgaccgccatcgataaccgcgccgccaatcgcattgccatggccggtaatacctttggtggtggaatgcacgacgatatccgcaccgaactcgataggccgcaacagatacggcgtgggcacggtgttgtctacgatcagggcgatgccgtgttcatgcgccagctgtgacagcggctcaatatcaaggatttccgtagaaggattggccacggtctccgcgaagatcgctcgcgtatccgggcctatcttcgattccacttcagccaagtcgttgatgtgctttacgaaatcggtatggatgccgaattgtggaagaaaatcaccgagtgcatccacgcttgctccgtacaagttgctgggagcgatgattctgccgccgccttcgcccacgcacatcagcgcataactgacggccgccatacctgagccgaccgccaccgcaccgataccgccctccaatgccgcaagacgcttttcgagcacatcaaccgtggggttggccacacgtgagtattcgaatccgtcgatgagtccgcctgcgagcgcatcaccacgctgcgcattctccaaatcgaatgcggcggaggcgtagatgggcggcaccgccgcatggccatagtccgcggggtcataccccgcatgaattgcccgcgtggcaaactcacctgttccggacgtgatactcataggtgtttccagcccccaattcatgtcggtaatagtcttcgatggagcgtgttgcgagcggtcaggcaaacgcttcttccgttaattgcgcgaacacatcgcagtcgacgtgacgtttgaggtattgttcgtaggcgatgtcgaacgcctggccaagatcctcaatcaggtcggcggcatcctcaatacccaaggaaaggcgcacaagctcgtcggtgatgcccaccttgaggcgttcttcgcgaggcagctcgaaatgggtcatgcggcagggcagctcggccagtgattcgacagcgccaagggagaccgccaatcggaagatgtgcaggttgttgagcacatccgcagggtccacgccaggcactacttcaaagctcagcacgccgccggcgcccttcagtcccttggcggcgagtcgctggtcaccggcccccggcaggcccgggtaatgaacggacttgaccagcggatgcgcgagcaggtaccgcgcgatggcattcgcattctcctgctgccggtccatgcgcagggccaatgtctggatgccgcggcgc

SEQ ID NO: 1311 - DNA, 6448 bp, Unknown
  R157_18m  MAG No. k141_10720
ggccacgtgagtgtggttgtcgatggtctgggcgtcgtccggcaatgcttcaggtgccggggcccagctacggtcgcgatggtggtgcttgctcatggtttctcagtgtaggctgtttctcagtgtaggctaccgtcagcaggcgaacacggcgagcgcaaaaaagcacgatggtgacgatgggattggtgatgagactgaacgcctgacgcgtggtgccgtgggtcatgctttctgttggagtgatgttgaggatgccgccgcagtcatcgtcttttcgcgattgcggcggcaatgtcatctacacactcgccgtaagcgatgtgcgcggtgatagatgctcgcggaagaacgccatcattgcgtcattgagttctccgctgccggaatcccacgtcatcaagggatagtcatgaggaatacgcttgccgttgacagaccgcagatcatgcagttcatgatcgcagttcatcgagcgcagtagcatcgttgcgtacagcgcatcgttttccagaaaatcatcggtactggtggaaagccataccggcggatatgcgattgctcgcatcaacgattcagtacgctcatatggtgttccctccaatcgtgatatcaatgttcggaacgctggccgcagcttctcgaacagctcgccggaatccgggtagaacgcatcgaacagatggtcatacaccagcatgccggaggtgaaaccgactaattggaaccgcacatgattactatcaatccccagaagagaggacagctcctcattggtctcacacgccaacaggaacgttcccagcaatgcgccggcagaatcgctgaccaggaacagttgctcagccgacagctgccacccatcaccattgcttactagccatcgcaaggccgtcgacacatcagtcaacatatcgaggaaatcgcccccgggtgccaacgtatagttggggcacaccacggcaaatcctcggctggcaagctgagcggcatacgcattctgaatttccttgaatgaatagaagaacgcgccaccgtgaatgttgaaaataaccggaatatcaccgtcgccgcgcaagtatgcgtccttcggcaggaaaatatccaacttatgagcacgcccgccatcggtcatatagtcgatatccggaaatttcatcacggtatcaggcaacgcactgcggaagtccagtcggcgtacgtcactgaacgcgtagcttgcccgatgctgccgcacataatcgataaagactcgatactcatcatcatcgggtatgtctgcggtatcgggaagatcctcgtcaaggtaagtccatgttcgggccaaccgttcctgtagcggcgtcaaaacacaagttccattcgtagcgtaaatatcattcaacgtgaaaggaattccgttgacagagaacgtcattgcatcgtcgtcttgataacgcatcattccccacctcacttcagctcagccttcatatcctcaagctccacaccgttggtttccggcaggaacttgacgacaaagaagaagcccagcaatgccatcagcgtgtagaagccgtacgtccatccaagaccgataccatcacgcataggaggataaatcgtagtgataaggaagttgaacatccagttcgcggcagtcgccacggcctcccccttggcacggatacgattcgggaaaatttcgctgatgatgacccagacggtgacgttcgtagtggcacagcaaaccaggaagaacgcgtaggtgcatacgatggaaatccacgtccatgtaatcgacaggctcagagtaccgtcagcactcaactgtccttggccgaagccaatggccgtgatgcccaggaataccgtcatcagcaaagttccgtatttcataagattacggcgaccgactcgatcgataagcaccatacctaccaccgtggcaacggcggcgagcgtcgcacgtacaacagcgatggtcagcgacgcctgctcgctgaagcccagcatgttccaaaggctggaatcgtacagcatgatgatattctgcccgttggcctgagccagcagaacgaagatgatggaaatccagaccacgcccttgagaccgaacgtcttaccgcgcagttccctgaaggaaaccttcttctcgttctcctcgctctggaacgacttctggattttggcgatggtcacatcggcattgttgtcaccgatgacgtcaatcagaatggtcttggcctttgcaatctcgcccttcataaccagataacgaggagtctctggcaaagcgaagcataggaagaacatgataacgccaggcagggctgttgtcactagcatccaacgccatgcgtctatccccatccagaatggcatttcagcgccaccggatgccacgacatagatatcgttgacgaccagcgatgcgatgatgcccaatgcgatggccatctgctggaagctggtgaagaagccacgtcttgctgctggagaaatctccgaaatgtaagcggggccgattgccgaggtgaatccgacaccaaggcctccgacgatacggaagatgataaatatggtgaaattcgtcgtcagacctgtcaccaaagaagctgccacaaacaatatggcggcaagttccagtacacgaattcgtcccatacgatcggcgaccacaccggcgaaccatgcgccgaacacacatcccagcaatgcgctggagaccgagaatccgctcatggtactgctgagtgcaaaaccggaatccggactggcgattgcggtcacggcgccgttgatgaccgacgtatcgtatccgaacaggaagccacccacggctccaatcgtacagacggcaattaacttgcctttaagcttgccatcgatttgagactgagtctgttggctcatgatattctcctttgcccgatgatggacctcgtcgcccaccagtaagcccctatcgtattgagtgagcatttgccggtcattggcaacagggctatgagcgtgatacaaatgaatgattttgtgaccgatggttcaaggcgtcgttgtcgtactcggaggaagcctgataacaataaaagcggaggcgaactgacgcagtgcagtcgcccataccgcttaatcacaccaacggagatgcctatgagttttgcaagcataatccatcagcatacggtgatatccgtggacatcggcggcaccaaaatcgccgctggtctcatgtgcgtagacctcgacgaacaaggaagaccgcgggacatgccagcgttgattcgacggtacgtcataccgacgaaagcacgtctcggcggcacctccgtattgcaacgcgtcgttcaagccattcgccagtgtctagacgatggtgagattcctttcccactattggggatcggtgtagcgagcgcaggagtcattgacggcaacggttcggtggtatcagccacttcgttgattcccggttgggccggtattcaactgcaaaccgaattatcggcaacgttcaacgtgcctgccatcgtcatcggagatgttcaggcacacgcccttggtgaagcgcactggggatgcggacgacaataccaatcactactggtcgccgccatcggcaccggtatcggaggcgcgataatcatcgacgggaaactggtacgcggcgcccacggagcctgtggccatatcggccatctgccgcatcccgacgccattggtatatcctgctcatgtggatgtaagggccatgtggagtcaatcgcctcaggtaccggcattgccgataattatcgacgtgctctgcaacagaacggacacaatactctccccaccgacatcaatggacgcactatcgccgaactggccagtcaaggtagtacggaagccgtaaccagtatcactctggccggcacgagtctcggcgatgttcttggcggactaatcaatgcccttgatcccgatgccgtgatcctttctggctccgtagtccattctggagaactatggatgaaatctgtgaaacaaggcatccaaagacagaccttgggcattctttcccgaacaccggttttgacaggaacactcggcggcagagcccctctcatcggagcaacatcagctctgtgcgccgacctcagatcgaataaggagcagaaatatgaatactaacgatacttattcgaaacgtcttattgattcgctccacggcaaactgatagtcagctgtcaagcatatcccggcgagccaatgcggcatcccgaaaccatggcccaagtcgctcaatcagtagaaatcggcggcgctgccgccattcgatgccaaggtcttgccgatatcagcgccatcaaaggccaagtaaaagttccagtcatcggcatatggaaggaaggcgataacggcgtatacatcacgccaacgttacgccacgccagagcctgcattatggcgggagccgacatcgtggcactcgatgctacagatcggccccggccagacggtctaaccctgcagcagaccgcgcggcaactcaaaagcgagggcgcaatactgatggccgactgcggctgcatcgaagactccgatgcagccgtggatgcaggattcgacatcatctccaccacgctggctggatacaccgattcccgcgccaaaacagaaggaccggattacgagctcctcgctcaaatgctggagcggcacccccacgtaccggtgatatgcgagggtaggatacatactccgtccgatgcggccaaagccatagaaatgggtgcctgggcagccgtagtcggtaccgccatcacccaccccatgacgataacgtcatggttcgccgatgcagtaaggtcctgatgacgcacaaaccaacagcgacctaggtaggaggcgatatgcagtacgttaagggcaccaatcaggaactattgaccacatcaccgcagttccctgccctggtcatcgcacatcagggattcgacaaagccaggttgcattggcatgaaggcttcgaggtggtatacgtccgacgctgtcgggccacagtaatgaaaggcacccaacgttcgatgcatcatgccggtgatgtagtactgattcctccacgctgcctgcatagcatcgaacttattcaggatcttcggcaaccatcagctgtaccgcaggcgctttccgtaacgatctcgcccacggagttgctaccgtcatatccgtatattacccaaatccaacaacagctggattacgactacattggcgaaaaagatcatcaacaattgctgaaatgctgcgaacaaatgtttgcggcactgatcagcggcaagcagacacggttccttgaagcgaattcctggttctacaccatgcttaccaatgtttttgactacgccaaaccattggctgcagcgaaccaagaagacaccgcggatgaaaccatactccaggatggacgagccattagacgaatacgccactacgtgcaacgtcattatcgcgagcccctatccaccgcacaggtgtcgcagaaattcggatattcacgagagcatttttcaaggatattcagcaaatattctggagtgacatttaaagactacgtaacgcgtgtacgtctgctggcggcctgcgatttgctcaccaacacggatatgccaatcaatcaaatcgtccgggaatccggattccccagttctcaaaccatgcgaggattgtttgaccgcgaattcgcatgcacgcccagcgaatatcgctctcgttcgatggaagaataatcgaggcctttcgctgtttgtggtgggtggtttgggtgcggggtgatgccggtcgggtaggttggaggcatggatacctctcacctgttcaccgccgcgcttcagttgcagtcaccttggaaggtggggtccgtggacttccgtgacgccgacggcggccggcaggagctgcacatcatgatcggcttcgagcccggcgcccgcttccattgtcccgagacaggctgccgggaagacgcctgcccggtgcatgacaggcgggagcgtgtgtggcggcatccggacttcttccggtacaaggcgttcatccacgccgccatgccccgcgtcacgtgccccgagcacggggtgaggacggtgcccgccccgtgggccaggcccggcagcgggttcacgctcctgttcgaggcgtgggccgtggagatggcccgccacctgcccgccggcacgctcgccgagcaatcggacgagaccgacacccgtttgtggcggtccgtcgcccattgcgtcgacgaggcgaggaggctggaggactacatgggtgtggaggccgtcggcatcgacgggaccggccgcaggggccgcaattacatcaccgtggtcgccgatctcgtggagcacgatgtcatcaacgtgacgccgggcaaggacccggccacggtcgaacggttctcgcgtgatttcatggaccaca

SEQ ID NO: 1312 - DNA, 13330 bp, Unknown
  R157_18m  MAG No. k141_10749
ccgtcgccgtaggtggggtggagcatgaaggcttggctggcggcgatgtcaccgcgcatcaacgattcccacatggttaagcggctcatggagatggcttcaacgccgaggatggcgtcggcgatgtgcgcggcgtagagatcgcggtgcttggcgatcaggaagcgcatgagatcgaggcgcttggtcatgctggtcacgtttgaggaggccggggccgtgcggtactcgatcagcggctcgggggcgatgccgatatgggccgcgtcttttgcgggattctctgtatcccaggcactcccaaaacctccgacatgctcagtaccgccagtaaccccagcaccgcagatatcgttttccaccgccaatccgcactccaacaacgacaggaagaagtcccagtcctcgaagccgccgcgcatcgactcgtcgtagccgccgcagcgctcccacgcgacacggcgaatcatgcacgtggccgggcagcaattatgcgacacgaacgcggcggcattgccaccagtcggctggaccactgattccaggacaccgaaagtctgcagccagccggatgcagcgaccatcgttttgtcggcggacaacatcgacaacgtgcgctcaatgaaggccggccgcaaacggtcatcgccatccaacaccactacgaacggcgtttcggcggcggcgatgccacggttgcgcgcggcggaaggaccggcgtttgcctggccgatgaggtcgatggccacaccattcgcatccatcgccccgtgccggcaatcgtcgagagtggcgttcagcatctcgacggatgcgtggtcatcggacccatcgttcacgatgatgatccgttccggacgaaccgtctggggccaatgacgactcgactgcctcgtgaatcaacgggccctgattgtagctggtaactaccactgtcactgctgccatggcggcaagtctatcgggtccggacgtgggccatccaccggcgctgcgcgctgcctcccgccagtggggaggtggcgcgctatccccggctaacgctgatgcatgtgtgcgggcacgggtttggtgcggactttggtggtgaagtagtcggactcaatcttccacaccgtgacgctgcggacctgcgcatcagtgaattccacattcggcatatgcgcctgctgcgccatcagcgtctgcaagccgtggcggcactcatccagatcctcgaccagtgacgccgtgccattgccgacgatcgacttgaacgcctcaccccaattgcacgtggtgcggcccgccaccacctcgcagtcggtctgcatggtgaaagccacgggcagtcggccaccggcggcggcgcgaatcgcgtcgagcttgcggccgcgcggcgcggagtggaaccagagcgtcagcttgccagtcgcctcgtcgtaatcaaagccgaaattcagcggcacgatagtcaggccctcggcatccgcataggccacttcaacgatgtcgcaggcggcgatgatcgcggcgatccgctcgggatcggtcacctcgcggtccgcacggcgcatcatgcgatgctcgccggcgaccgtgtgctcatcctcacgcttggcgggcttgcgagcgcccgcgatattctccatgctcatgcctgatcatccccatccacaaccgcaatccagtcgccgtagccttcctcggccatgcgcgagcgcggcacgaagcgcagggcggcggaattcatgcagtagcgcaggccgccgcggtcggccgggccgtcggtgaacacgtggcccaagtgaatctgtgtgtccgacgtgcgcacttcgatgcggtcgcggcccggaatgcggtggtcctcatgctcggtcagcaagtcaccggcaatcgggcgggagaacgcgggccagccgcagccggaatcgaacttgtcttgcgacgagaacagcggttcgccactgacgatgtccacgtagatgccgggctcaaactcctcgtcatactcgttgacgaacgggcgctcggtagcggcgttctgcgtgaccgcgaactgctcaagcgtcagatcccagatgcgttccacgtacttttgacggcgttttacgttcgcgattgcggcgaccggcacgtggcaataccccgacgggttgttcctcagatagtcctgatgatgcgcctcggcgggatagaagttgcgcagcggttcgaccagtacggccgggcgctgcggctggcggtcgaccagctgctccagagccgccacatacacggcgcgctgcgtctcgtccgtgtagaacatgccggtgcggtactgccggccgcggtcctcgccctgctggtccacggagaacgggtcgatgacctccaggaacagcaatgtcagcgtccgcaggctgacctgtgccgggtcaaactcgactttcacggtttcggccgcatcggtgccgcccgcgcatacctgcttgtaggtcggcgattcgacggtggattgcgcgtagccgaccgtggtatccgtaacgccgtcgacgttctggaagtagcgctccagaccccagaagcagccgccggcgaagtatgcgacctgcgcggtgccgtcgccgcgctcgttgttccgttcgttcatgcgtcccacgttactacgccatgacggcgcgcgccgttcacgaccgcagcgtgctgagcatgccggccacttcggcgggcgtcacgctgggcacgtaggcgcgcaccaccgcgagcccgatctgcggcaacgccgccgggtccgggtagcacacgtagaccggcgcttcggtgggctggaacttgcgcttgaagttgaacagcgagtggaagccgtaggcgggttccatccagtcggccacgatctgcagcgcgtgttggagcacctgcgtgccttcgctggccggtgccccgtcctccccggcgttgtcccgatcgggattcatgccggccaggggcgccgcggacaggctcatgaactccacggcgtgcgtgggatcggcttcgccctcgtcacgcagccgctcggccatgcgcgcgatcaggaactccatgatgccgttggggctgtcggtgcgatggcgcatgaaatccaacgtccagccgacgatgcgcccgtcgcgccaggtgggcaaccagctggtgacgcccagcacgcgcccgtccgcgtcgatggcgtaaagcagccgcacgcgcgggtcgcgcagttcctcgacgccgccgagcgtgaacttcatttccggcagcgccttgagctgcgcccactcctcggagatgtcctcgatctgttcgcgcacatcgagcgacgcttccaggaatgtggactgcacgtcggtcacgccgtcgcgcttggccttgttgatggcggtgcgcacgtcctgccatttcttgccggtcgtcttccagccgcgcgggtcgaccaccatttcgctgccgacctcgatggagttccagccggcttccagcaacgcgtcgcgctgttcccgatgcacgccgtagaacaccggcgacagcgaacgttccgcacagtgctgggagaaaccgttcagatcgtccatccattccgccggatcgccgaacggtccggtgcaggtcagggcgatgccgttgagcacgcgatacgccacggccgatctgcccgtgggggacagccagtagctgttgccttcccacgtggtcatgaagctcatcgattcgccgccggtttcgaccagacgttcggcgcgcgcccgggcccgctcgttcgattcgctcacgtcgcccatccagtggatcaccacggccagcaccacgatccagaacaccaggccgacgccttggtacatgatcgaggccatcggagtgcgcggcacgaacgacagcttcatatggctcaggaagccgatgggcaggaagcgtcccggcagctcggccagcagcgacgaggccgtagcgcgtggcgagaaggtggcgggttgggcgatgccgtatatcaggtatatggcggcgcacgccagccaggccagcacgatggcgccgatgccgccgaccagcctgcaccagccgatgcggatcgggaagtgtttcatcgccgccagcagggcgatggcgaacagcagcgggggcaggacgttcgccacgcaggccacgatcgcgccgtgctgcagcagggaggccatgccgtccggcgcgaagctcagcggcacgaccagatagtaggcgacggcgatggccaccgtgaacaggttgatggccacggtgcagatggccgcgaaccgacgtccgcgatacaggccccacgccagcaccagggtcacggctgtgggcagcagcgagcgcagcaccgcgccgggcatcgaggcccgcaacagatcgaactgcaggaagcagccgccgtgcgtgtcaccggccaggcatttggccagcatgccatcgtcgacggaaaccgggctcatgagcaggccgatcgtgctgagcgggcccgcatggttatgggaggtgatggcgatgaccggccccagggccagtaccacggcgatggccgcgaatatgcgccgcgcctcgaaggaggtgctgcgcagccagtgccattcggcttcgacgtgcgcgggcggaccggccatcacacggccggcggcatggccgatcagcgcggcggcgagtatgcagtagccgctggggttgccgctgtagagcaacgtgaccaggaccgccacatagccgacgagtcggatgcgcctgcgccataggtggctgcagaacgcgctggccgccatgagcgcgccgaccggcaacaccagcgggctcaatgcgaaccgcatgcgggagacgaacagggagtcctggaacatccatccggccgccgcgcacagggtcaggcccgccagcacgccgccggccgcgcaggcgagcgcggtgacgacggtgcgcacacggccgagccatggttcggctatcgacagcatgacgagccacaggacggcgtcgaccatgagttggatgacgccgcgcgccaggaacagcgagcagatgagtttgccggcgttgaatgcggccatgctggtgctgagccgcagcggaaacgcgaatccggccatcgcggccaccagccacgccaccagattcagcgccaccagtgccgccgtggcggtgacggccagccggtggtcgtccgcccactgccgcacgtcaccggccagttcacgccagctttccgccgcatggctggaccttgccgtatgcggtttggtggctcgggaggtcgtggtgggcttcgtccgcgagggttccgcgtcccgcaggggccgccgcgtctgcggcatggccgccggccgcgcgttcccatgctgttgttcttcgctcattgcaacacctccacttgtgggtattcctccaacgatttcgtcatttcgcccagcccggttcgcgcgccgaaccagtcgagaccggggttccagaccgcctgcaccgcatgccagtcatggtcggcgccgggcacgaccagttcggtggtctgcatgccggccgcgcgcgcggccgcggcgatggtgcgcatgttggcgaccgacttccgatcccctttgccagcgccggcgaacagcgcctggccggccgtgccggtggcggcgatggcgttgaccggcacctgcccgtcgtaggccttgcggtcgccggcgaaatatcgccgaaccatcgtctcgacgctgccgtcggtcggctcgagctcaccatccaccggcagcatcgcaccgtagatgtcggggtgacgcggcaccagctgcgtggtgcaggtgccgccttgcgagaatccgcccatcgcccacatacgggccgacttggctaccggcagcgtcgccctggcccagttcaccacgtccttggtgaggtaggtttcggcgttgcctcgggtggtgtcggcgcacaggctgttgtgcatggccgaaccgttctggtcgggtgcgagcacgatcggcgccagcccatcgtgttcggcggcgtaagcgttcatcgtggcggcgatgttgccggcgtcgatgaggcgaccgggactgcccggctgaccggcgagcagctccatcaccggcagggccggcgggcggtcggacagcgcggcgggcggcaggtagaccatcgccttgcgcgccttgaacttggattcggtgttcgggatgctgacgacgaacaccctgcccgagtcgggcatggatggcagagcgtccttgcgcgccttgtcgcgccactcgccgacgctcatcgaggccttgcgcacggtgaccgaaccgagcggggggtatggcgtatagccgacgagactgccgatggtctggtattcgccgtagatcgagtccacgccgagcgcggtggacgccagcaccagcggcaccagcacgacggccagcgcgcgacgggccccccgtaacgtcacggcggcggccagcacgaagccgaggcccgcgaagcctcccgcgacggtgaggatcaccggccagcccaacgatacgccgaacaccatgaacacgtcggacatcagccatgtggccagtagtccgcccgcgccggcgagcgcggcggcaaccagtgaggcgaccagcggatgcaagtgacgacgttgcggcgtacgcaggccatgggaaataaacgtctcttccgtcgaagctgcggatgacgccgtagcagccgcgttcgtaggctggttggccggctggttatctgggtcgacgggcgattgggccgacgattcgccgtccggcgccaggccgtctgctgccgggccgcgcttcttgctcaatgccagcccaacaatcagtatgattgccacgatcgcggtcagtccgaacacggtccacggcacgattccgcggaccagcgacaattccatgaacgttttccaaacggagttcttcatccttcgtccccgcgctccaggctcctcgtcttgtaagctcacgcaatactagcgcgcgattcatagagcgtcacccaatttcacaaaaattgtcgcgagttctcatggtttccccagactccgttcagctcctgttcacatccggcctggacgtccgcagctcaaggccagtgtcggcgctggattagcggtgcgcaggcttgtcccagctttagccggaagcagggaatatgttggtggatatgactcacgcaaacgaacaacgtccagcagcgaccggcaatgtcgccgataacgtgtctgacgcccctactgaccccgcgacgagcgcggcggcaaggcccacgaccggcacggctgatggcacaacagccacgaacgccgcggccagttcaacagcaaaacccgcagccagcacctcttggaccagggaaaccaacccacgtcgagcactgttgacgattatcgtcacggtggtggttgtggtggccatcgtactggggctcggattcttcgtgaactggggattggcggccctttcggtgatcattatgattccgggggcgatttcgctggccgttctcgccaagcaccctgaatccaccggcgggcgcagcatgttcggcatctccgatccgaatacgctgcttgacccgattcgccgcccgtccgagcgccgcggcgagtaagttgctgctgcccatcgggcggtaatttacccatggggcggtaaaaggtccatggggcggtttgaagaaattgtgaaacggcagaataaagccattttgggataccgccccatgagggttttaccgccccatgggattattaccgccccatgagcaaagccaccccgctatttgcgcgcactgaccaagtaattgagcaccgatccggcggccaccagcagcgcgccacaccaaaacggcagcgacagcgccaaacccagcagcaccgcaccggccccggtggacagcaccggcgtggcataggacgcaatagccagccgctccatagacccatgcagaatgccatagccccagcaggcataaccgccgccaatcgccgccgcggcaatcaacacaaacagccatgcgaccagactcggcggctcggccggccacccctgcccggacgcgaagtggataatccacaacgccacggccacgcaggggaagaacaatgaagtgccgtccaccccatgactcatggctggcgtgaacaccgcgtacaccgaccaagcgagcgcgcccgcgaacgccagcgcatagggcaaagggttggcggcgatatgctgcacggccgcatgccagtcgagcccggaattaccgccgaccgccagcaccacgccggcagtggccacaatcgcgcccggcagcaccttgacgaccgcgtgcttgcgatgggatacgcccgccgacagcagcaccatcatcgtgggccacagatagttgaccaggctcacttccaccgaggatgcgtcggtagaggccagacccagcgagagggatatcgacgattcgtaaaatacgaacaacaggccgccgataatcaagtatttcttggggaactcgcgaatcgggaccgggcgccggaacatcagcagcaggatgccgccgaccgtgtagatcagggccgaaccaagcgtggcaccgaagttttcggagacgatgcgcacggtgccggccatgaagctccacagcaggatcgccatcaggccgatggtcgtggcgcgcgcggatacgacgtggccgccggaacggcttgccgccggggccggcgtgccgcttgcgttctgtgcgccgttcgccatatgtccgcctctcttgcctcgtttcgaaggcattctactcatcggatgtgtacagctgcagaacggcacacgaccggcgcgcgaacagggtggggttcggtgattgaaacagcaaaatgccgggtagggtaaatccctactcggcatttgcattggctatgtttcccgccgtctgtcaggttagtcggcgttgaaagcgtagggcaggcggcgtgggaagcatggtttggttacgatttatctctcccccacccgcttcgcgggagctccctcgtcagagggggcaaagctactcgaagcgggacttcgggacgaatcaagtatcgtcagccctcaatcgcgatttggtgcttggactcgacttgcggctgggcctgcatcttcggaacctggatgcacagcgtgccgttccggtagctggcgtggatgtcggactccttcacgtcctcgccaacgtagaaactacgcgagcaggagcccatgtagcgttcgcgacgcagccacttgcccgaatcggacgcgcaagcgcacttgctgtcggaagcctcgccctcagcggccggagccttgtcctcatgctcgctgcaacgcgaggcggacacggtcagatagccgttgttgagctcaaggttgatatcttccttcttaaagccaggcatatcgatgtcgacgtcgtaacccttgtcggtctcgcgcacatcggtggtcatcatgttggcaggcattgcggcactcatcgtgttgtccgtgttgcgccaaccctcaaagaacggatcatcgaacagatccgagaacatcgtgtcattcatcaaagccggaaacattgccataatcggtactccttgattaggagagaatcggcttggatgccggccgccaacccgtatcgcggggctagcagcggttatcgtggccggttccggaaccctcccgggctctcaacctttaaccttcacttcacccaattcccgagcgcggcaatcattccgggattatgcccacagagaaattgcggcggggaatggttgccggtaaagccggccgagccgagcgccgtgaccaccctcagccagtcttacggctgccagctcccgccagcgggagcatatatacgcacaccagtaggcgtactcatatacctctgccaacgggagcatgctggcgcgcgaacggctcacatctgctgggcgttttcgagcaaggcgtttttgaggtcggactcgatttggcgcatcttgacctgggcggcctcgcggttggccttgccttccttctggatctgcacggtctccttcagggtggcgatgagttcggcgttgatcttctccagcgtgtcgatttccaccacggaacgctggttggccttttccgcgtccaccgcacccttgtgcagggcggccgcgttacgcgccagcagcttgttggtcacatcgtcggccttgttctgcaggtcgagggccttgcgctggttggacaggcccagcgcgatcaccatctggctcttccacaccggaatcgtggtggagatggtggtgtcgatcttgtccacgatggtctggtccgcgttctggatgattttgatctgcggcgcggtctgcaaggtgaccacgctgatgcggtcgaggtcgtcgagtcgcttggcaaaacggtcgagcttggacttgaagtccttcagcacttgcgcctgcatggcgtcgccactggcggcggcctcggcctccagcgctggcagctggttggcgttgaagtcggcgagcgccttcttgccggccagtacggtcattttcagctcgcggtattgctgggcgttctgcgtgtacatcgtgtcgtacatggagatgtcggccacgagtttggcttgcgcggattcgagacgcactatgatttcgtcgatttgcgcgtcgactttctgatagcggcggcgcagcttatccacgctgacggccacctggccgatgatcggaatggtgcggaagccgccgaggtcagcctcgtcaatggtgaccagcatggtgttcagtagttcgcccgcctcgccggtgtctttggagcgggtgtcggagaggatttcgtcggcgaaggcggaggtggcgcgctgggcgtccttgccgtagctggattcgatgccgtcgcgagtgaagtcgatctggccggccatctggttgaccgtggcatggtcggcttcgggcaatttggcgatctgctggtccggggtcagggccgcggcggcttgggcttcggcggcggtggggacgagggtggtgttgggggcggcttggttggtgttgagtaacgggttggtgatgggggttgcggagcttttggcgaggtctgcgagggtgatgttttggggcattctggttccttttttgatagttatgtttgggtctctccccccacccggctttgccgggagcccgaacgcaattaaggacggcctacagccgatttcttatttgctcgctctcgctcgccttcgtctgcaaacagcccactgggctgtttgctatacgactcagctcgtcagagggggttaataaaaacaccgattgggggctggcaaaagagctattgcgtggattggagggtggcgatgagttgttgcatggcgtcgttgttgggcagttcggatacggcggggatctggtcgagcgtgccgggcacgccgaatcggctgatcgaatcggtgccggcgaagttggccgcgcggaagccgtggcgctcccacgccagcttctgcaccgccggtgttttcaacaggttcagcagtgtgccgcctttctcgtccaaagccatcagcgtgtgggtgctccacacggtcggcgtcgggtagacgatgaccacgtcgtccttgatctgcttgaacgcatccggttggttcacggccaaatcaagcagctgcgattcgtagcccaccatcatcggcttggagcccacgcccaaggtcaggaactggttgaacgaatcctcggaagaggtctccatccaaccggatttggcgaagatggaggcgatggtcttgccgtcgcgcgccaccgaatcgaccgtggccggctgcccgccattgagcaccgtggcgagcagcgccgcgtattcgttgcctgagttcgacttcaccggatcggtcgagtcgatgcggaactgcccgtagcctgccgtgtatccgacgtcggcccaggttgtgttggcgaccatcgcgtccacggctttggccatatccatgtggtacgcgcccgaatcgtccttggccataagtccgccgttcacgagcccgtccgccacggccttgtgcgtgtacagcacaatcggtgagttgaagacgatgtcgctttgggtggccttgacgcctttcgcattgccgtattcgacggccgcgcgcgaggaggggaacaggtaatccatgcctttccggtccgcatccatcatggccagcgatccggccttgcgatagtcgatggcgatgccttgcttggcggcaagcgccttgaacttggcgtcatcgaacaggccgattttctcgccgcccaggtagccggtgatgctcacctgttcggtcggttcggccggcgctggttgcgattgccgccacaccagcgtgccgcagaccacgcccactaccgcaagcagggcgatcagtccgatgatttttgatttggagagtttcattgtgcgtccgttttctggtccgactggtgagccgggccgccagatggagtctgactgggtgcatgccgtccttcatcagcagccgaggaaggcacaggcgaaggtgcgacgtcgtcgtatccatccatgcgggccaaccgttggatggcgtcggagtcggccgtaatgcccaacgtcttggcgcttaccgcccggctgagttcgccggcggcggtctgttcgagcacttgcagcgcctcgatggtttcgattcgtaccgtggctatctgatcgcgtgcgccggaactttccacgtccacgtaggagcgcaacagtttctcggtctgctcgccgtacacggtgatgtagtggcgcaacgtcgggtaggcggaggtgtctcgggtcacgtattgcactcaatctttggtagcggcgatgaagtcgttggcttcggctttgacggctgggtcacgtacttgcttggtgagcatggcgatcgagttgagttgagcgttcgccgcgtcgatcgtatcggcggtcttctgaccgttgggcaaggcggaaaccagcattttgccgatgcgtcgctccggctcggtgagcgtggaggcggcgatatacccaagtgcggccagtaccacggccacgatcaggccgggcactccgccgccgaccagtccgaaaccgagcccggcgagcagcagtccgacaacgaatccacagattacctggagcatcagttgaagcccttgacttggcggaagacggcggcgaggtcgccggagcggccgtcgaataccttggcgttgctcagggtggcgagagacttcagctggctgggatcggcatcgccgaacagggttaagggtcaaaaagtgtgtccggaatcgcggattttcacggattgacctgtaggtttccggaaagtatatgctccggaagcatatatctagcccccgacgggaaatcctcggtgtggcagccgtgatgtgctatgc

SEQ ID NO: 1313 - DNA, 21211 bp, Unknown
  R157_18m  MAG No. k141_11126
ccagcccctcgcgctcgggatcctcgccaatcgacttcaggaacagacgtacggcctcgcgcacgccttcctcgtcgtatgtgtgtttctcccgatggcaagactctatatattcgttcatctcatctctcccttgtcattatcgtcatcgtgtctactcttccggcttcatgccgaccgagcgcttgaggctttcgggaatctccaccggcggcttgtccgagtcggggcggcggtcgttggacagccacaccgggcggaccggcgccttcttgatcggcgcgaagatcgccgcaagttccttctcgttcagggtctccttgaccaacagctggcggaccagctcgtcaaggatctcgcggttgtcgttgatgatggtccacgcctcggtgtgcgcggtctccaccagcttgagcacctcgtcatcaatcacttcggcggtgcgatcggagtacttgcgcggctgcagaccgtccatcacagtggtctggtcatcgtcggaaccccacttgatggcaccgagcttgtcggagaagccgtattcgatcaccatcgtacgggcgatgttcgtagccttctcgatatcgttcgaggcaccggtggtcgggtcgtggaagacgatttcctcggcggtgcgaccgcccatcgcgtaggccatctggtcgagcagctggttgcgcgactgcgagtagcggtcggaggtcggcatgacggcggtgtagccgagggcgcggcctcgcggcagaatcgtcaccttggtcaccgggtcggtgttgttcagggcggcggccaccagcgcatggccaccctcgtggtatgcggtgttgcgcagctcttccagagccatgcccttggacttgcgcttcggtccggcctgaacgcggtcgatggcctcgtcgatggcgcggttgtcgatcaactgggcaccggcacgggcgcacagcaacgcggcttcgttgagcacgttggccagatcggcaccggtgaagcccggcgtgcgcacggcgaccatgtgcaggtcgacgtccggtacgaacggcttgcccttggcatgcaccctcagaattgcctcacggccttccagatcaggggcggccacgcccacctgacggtcgaatcgacccggacgcagcagagcggggtcaagcacgtcagggcggttggtggcggcgatgatgatgaggttggtgtcgttgtcgaaaccatccatctcgacgagcagctggttcagcgtctgctcgcgctcgtcgtggccaccgcccatgccggagccacgcttgcggcccacagcatcgatttcatcgatgaagatgatggcgggggcgttcttcttggcctcatcgaacaggtcacgcacacgggaggcaccgagacccacgaacatttcgacgaagtcggagccggccatcgagtagaacggcacgccggcctcgcctgcgatggctcgggccagcaacgtcttaccggtgccgggaggaccgtacagcagcacgccacgcggaatacgagcgcccagcgccttgtacttggacggatccttgaggaagtccttgatctcctcgacttcggccacggcctcgtcttcgccggccacatcggcgaacttggtggtgggggtctggccgtcgagcagcttgccgctgtttttcttgccacccatgccgagcatgccgccggcaccgcccatgcgactcatcaggaaccagaacagggcgaagaagatgatgaacggcaggatcgaggtgatgaggtagctcatcatgctggtctgctcgatattcgaggtccagcccttttcgagatcaccgttctccacggccttggccacctgtgcgccctgcgcgaaggtgtagtagaactgcacgttcttgccgtagttggtcaccttgccggtgtcggcgtttttcttggtgtagtcgttcttcagcttaaggcggacgacctgcttgttgtccgtgatctcggcgtaggtggccttgccctgattgatcagcgcgaaaccatctttggtgtcgatggttttggtgccaccgccggcgaacatctggaacatcagcacgaccatgaccacgagcacggcaccccatagccaaggggactgccatatcgggcggttctcgttgttgttgcctttgccattggtcccgttattgccacggttgaacgggttggtgaacgggttgccgttgttacggttgttgttcgggttcggattattgccgttacccggcccttgcgggaagctcatgcttgcactccttggtagacggacggcttgaggaccgcgatcgaatcgaggttgcggtagcgttcatcaaagtcgaggccgaagccgacgacgaactcgtccggaatctcatagccggcgtacttcacatcaacgtccacttctcggcgggaaggcttgctcagcaaagcgaagacctccacggaagcggcaccacgacgtttcagttctgcgaccagccacgcgagcgtgtgtcctgaatcaacaatatcctccacaatcaaaatgtgccgtccgcgaacatcggcggacaaatcctgcctgactgtgacctcaccgctcgacactgtgcccgagccatagctcgaaaggctcatgaagtcgatctgcacaggaatgctcatggcctgggtgaacgcgaccagcgtattcacggcccctttcagcaccgcaacgagcagcggattcttatcgcggtaatcctcgctcgcgagagcggccatctcgtggatcttggcatcgatctgttctttgctgaccagctcgtggtcaatatcttcctcaacgtcagcgattcgcatgcgctccatcttggcacacgcgaatgacgtgtttcttgcgattggctgaataacctctgggaagtgagacgccgccttggccatgccaatcgacgaccagccggtcgatggcggcaatctgggcggcactggcgttcacaccggcctggctcagcgcgtgagcgatgacccgcaaccgaatcgcctctggctcacgtgcaatacgtttgacgccgatcatcaggccgatgccatggcccgaatcgttggtatcgtctgcagcacaggctcgtggcgtatcggtcgataccgctgccgacgatgccggccaatcaactgtcgtaaccgcctcccccatcacctcgtcggatcgctgatccagatactccttgtccattctggccaaccgtgcgctttcggcgaaatggcgggtgacattgaatccagcgaatcgttcgatggccggcagcaggtcgtggcgcacccgcgagcgcaacggatagtcgtccggcaactcgccgtctaccgcatcgccattggtggggtcatcccaatattccacacccaagtcttcacagaggccggtggtttcgtctcgagtaagggtcagcagcggccgcgcaaaagtcacgccactgcgtgtgaagacctgcggcatgccggccaacgcatccacgccacggctgcgcagcagtccgatcaatacggtttccgcctgatcgtccatagtgtgggccaacagcacggcaatggcacctgattcacgcgccgcggcgcacagctcgttgtaccgggcctgccgtgcggccgcttcgaggccctcaccgcgtgcctgcacggttgtgttgcgcacgatgaccgggcccagtcccaacgcacggcaacgatccgcggcctcgccggcgacctgttcggaaccctcctgcaagccgtgatccacaatcacgacaccgcaacgcacgcccatggacgtgcatacgatatggcttaccgcggccagcgccatcgaatcgcgcccgcctgaacaggccacgagcacgagtggtgcatcggaggcaacggcatggtccccatgctgcgcgaattcgggagcctgcacatcgcatagttccacggcgctcagcgttgttcggaccgcgcctacggccttgcgcaatcgtgcggaatatgccatgtactcaccacccttttctggttataggcactcgtgcgtttatggacgtttacggcctttgtagcccttgatggcccttgatgcctcttttacagccccgcgagcttggtgatgaacaagtcgatggcgctacgcgcggcggcataatcctcaggattgttgaccaccacggcaaacgacaacgctcccccattggtgcgggacacattgccggccatcgacgtaaccgtgccgaggctgccggttttgacgcgcagcagaccagccacggcatcatccgtataccgatcctgcgccgtgcccaccaatcccgcgatggatagaccttccgcgccggccgcgccgctctcggtggtcagattacgttgttggacggccgccagcgtgcgtacggtgagccgggagccgggagacaggccggagcaatcggccatggtcagaccggatgtatcgagaccgagatcgttcagagtggatttgaccgcctccgtgccgccttcaggactgtttgtcgctgatttcgccaaagcggtgagtctgccgaactcctcggccagcgtattgtccgaatgtcgcaacgtgtatgccatgatttcggacagtgttgccgaactcaccgaggccaaaggcgtttcgccggatggagcggtgtttgccgtcacgtctccggtaacggccacaccgttcgattggagcagttcggcgaatttcgtggccacgtcgctggcggtgtgctgggacagttccgggtatccggccgaatcatcagggtcggccggcgcaggcgtatcggcggtgtattggcggcctccatcaatcgccattgatgagaccggcgtgaagtagacggtgtagtcgcttaagaccgcgccgccttccgacagacctgcgggaatgcgtgagtcgccgaatagggtgtcgtcgtactcgagattgacggaagtgatgcctcgctgggcgagcgcggccacggtggccttggccaaggtgttcagaccggcacgtccgttggtatggtttgcgtcggaatcgcctgcagacagcagcatgtcgccattgcctttgagggtcaacgtattggtgccgtcatcggattgggtcaggaacacttgggtatccaaggtggatgccatgttcagggtggatgaggcggcgagcgcggtcagcgttttcagtgtggatgcaggctcgcgtggagtgttcgactcatgttcggcagcgacggtgccttgggcgtcttcaatgatcaccgacgtatcgtttcccacgccttgcgcggacagcaattcgttgaccagtgcagaagcggccgtggaatcaatggccttgttcgcgttcagggcaccggcgatggtgccgcctgatttggcggtggccggattggcgaaaacaggtgcggtgacaggttttaacgtcaacaatccgggggccacgtcggtgatgtcggcggcgcagtaccccgcgaacagggcgatggtggtcagtgcggaaatgatgacggtcagtgttcggcgatgcgatcgttgggtccgccgttgcgcttcacgtcgctgacggcgtgataccgctgtagataccatcgtgctccttatgccaaggcaatcatttctgcaatgaggcgaacgagtcgagtgttgctacaatcgagagcattcgcgcatccatcagcttaccgcccagccatgtcccgagtgccagaatgccgatgccattggccagcgcgaccggaataatcgccagccacatgccgccttcggctcctgtcagcagcatgaccagcgccacgatgccagtgggcagcatgagcagcaggctgccaagcatgtagacgaacgggaagaagccttgggccatggcgcggccttgaggcgcggagaacggcttgtccattgaggcgaccgggtacatcagtacacaggaggtgacttcggccacgcccagtccgctcaaggcgatgcccatgcccgtggcgaggaagatcaggccggtagcgaggtcatcgggctgcgcccagcgtccggtcagtgcgccgaccagcacgatgccggcgagatagagcagcaccatgtagacgaccatgatgccgacgtagacgcgtacgcggccgattctgtcggcccggccacgcacgccggcgatgacttccatggtgaagccgcggccgtcatatgcgagcccgttgctttccacgaccgacatgaaccagccgcaccagatcagcgactgccagacgaccgcgctgatgccgtgtgcctggaaggcgaagatgatcaggaacaggaccggcatggcgaaggtcatggcttggcgggggtctcgtttgagataggtgatcaggcgtgcggaaaccgcgccggatgccgaatcgggcatccatgcgaatgcgccgatgcctttggcggtctcggacggactgtttgcgccgatggtgagccgttcatgtctcagacaccaggtgcagacggcgaagcagacaatccatgtgacggcaaggatggcgatgcgggcgagcagcaccgcccaggctccggtaagcgcgtcgaacggtagttggaaggccgcgccgaacggcgtccatgcgacgatggtggtcgccgcgccccaggtttcggtgttgaggctgaaggccacgccggagttgaccagaatgttcggcaactgacagatgataacgaacgtcagcacgatgaagatatagaacgcgcctttgccacgtttgctggtcaccagcgtggtggatagggcgatgagcagtttggagatgctcatcatggtgatgacggccagcactgcggcgaggagggaactgatgattacggctggtcccatatgccgataggccagtgtccagagcatcagtgaggccacgccggtaagggcggggatgccggacaggccggaaagcagcaagccgaattgcaggttgcggtcggcgatgccgtagagcgcgaatttgcgtgggttcatggtggagccttcgccaagcatcatgagctggatgaagccgatgaagatggtcatggtcgcgccgaccagcacgacgactatgttgacgatgcctccggaaccaaggatgttcagcggaaagccatccgcgttcacggtgaagggcggcagtatgccgatgaaccatgcgagcacgccggtgccgatgatggtgccggccgcgagtacggcggaaaagacataggcgacggtctgccacgccgattttcgcagggtggcgagcgtgagcgtccagcgcaggcggaccagggtgatggcgctgctgatcatcggcgggcctcatcggtgggtatggcgggcgtggcggttgtaagcggaatgggctggaccggctggaccgaagttggtgcttgggcttgggcttgcccgccgtcgagccatgcgagatgggcggcttcgtggcggccgccgaccagttgcaggaagcggtcttcgagttcttcgccggcggcgacctcgtccaccgtgccggccgcgcacaccagaccgttgttgattacggccacatgcgtgcacatcttttcgaccaatgccatcacgtgcgaagagataatcaccgtgccgccggtcttcgcgtattcgatgaggatgtctttgaggttggcgctggacaccgggtccacggattcaaacggctcgtccaggaccagaatgcgcgggctatgaatcatcgcggaggccaggcagatcttcttggtcatgccggccgaataatcggtgaccatcgtgttggcggccccggccaagtcgaaagcattgagcaggtcctgggcgcgacgcgtggtctcatcgcggctcatgccgcgcagcatgccggagtagacgagcaattgcaaaccggtcagtcggtcgaggatctggtcgggctggggcatgacgccgatcatgcgcttggccgtgttcacgtcgctccacacgtcatggcccaaaatcatggcggtgccggcgtccggtaccaatagaccggtcaccatattgagcgtggtggttttgccggcgccgttggggcctacaagtccatagaacgagccgaccggaatatcgagcgcgagtccgttgacggcgatcttccggtcgaagtgcttgaacaggccacgaatggacaccgccgcattcggattcggcggccatgcttgtggctgcggttgcgacggctgtgcaggcgcgggggcggcagctggcatcatcggcggctgaaatccgacattcctttgagtattgtctaagctcatacatccactctaccccaccagccaaccctcagcgaagcaaacccccgggttgctgttggattgccccgctgagcagctccaactagcggactcggtcaacccttatgcgcgatgggcttccactgggctttggagaagagggcctggaaggagatcggcacgtagctgagaatgtaaatcgggaagctgagcacataggcgagcagctccttgttcgtggcaccgatctggtcgcgctcgacaatgatggtcaatgcagccaatgccatcaggcccaacaccgatatgatgatgccactggaccaactggccagcgattgcagctggctcggccaactcacgaagccacacgcggcgaacagcaagcccattaccgcgcgaatcacgcccaacacggtaaacggacacagcatcaaggtgaagtcgatgcaggagaaatcacgttcgcgaaccgcgcgtttcagcaatgccgagccataataacggaatacctgcaggaatcccttgctccaacgcaaacgctgacgccaactttgcgagaaggtaaccggctgctcgtcgtagagaatcgcagtaccgcaatagccgatgcggtcgccatgcagaatcgaatccatagtgaattcaagatcttcagtgagcagatggaacttccatcccttgttccgcttcatcacctcgcgggagaacatgaatcccgtaccgcccacatggcaagaggaaccgagaatcatacgcgagttagacaggaatcgcgattcacggatgaaccacagcgcagaaccagaagacacccagttatccgccagattcaccgaattacggtagctggtcagaatcttgaatccggagcagaacgccttgttcatttcctcgaagtagtgcttgtccagcttgttatcggcatcgaacacgaagtaggcctcataatcatcggccacaccgatgtcgagcatatgccccaacagatacgtcagcgcatatcccttgccaaccagctcaagattgtggcgttccaccacatggcagcccaaagaccgcaccacgtcggcggtgttgtcggtgcagttgtcggccaccagccagatgtcgatgaggttggacgggtaggtctgatcgcgaatcgacccaataaggttgccgatcactttttcttcgttgcgcgcggagatcagcacggcataccggttggtcatcggggcgtcggggaagcgcacgggcttggcgaacagggacatcacgatgcacagtccctgatatatcatgccggcaccgccgacgatcatcagaagaatatcgagtacggaaagcagagtcatcagcgccaccctgccctaggattgctggaggcagattgatcagactgcttggtttgcttgcgttgctcgggctgctcaggctgttcggcggaccgctcaggctgctcgggccgctcagactgctgcgtatccgcggcaccacgctgcggaatcgccgccgtatccggctcatcaaagcttgcatccgcaccgactgtattatcggcgttatcggtatcatcggcatccgactccggctcagtgccgtgtaatcccttgcgagcgctggaggatagcacgttcttcggaatcgccacggtggcggaatcgtccaaatcggattctttcgtctcgtgcgacggaatcgcatagatctgttcctgcagcaaacgcagttcctcgttcatcggcacgcggttggtggatcccctggccgcacgcggcatgtgctcgccgattggctgcaatacgtgctcgccgaacgcctcggacgcctcgacgatcttggacttcttctccggagtcggatcgttcatcagcggtgagtcaatcagctcatagcgcttggtgtacgcacggaagatggcctgcagcgatgcggtgaccggcagcgccaggaacgcgccgaatgcgccgaacagcgagccgaacgccagcaccgagaggaaggcgacggccgcgttgatatccatcgtgcgctgcgaaatcctcggcgagagaatcaggttctcgatctgctggtagacgatgatgaacaccagcaccgccacggcgtacgtccacccgcggttgccccaagcgaacagcaccggcagcgcaccgccgatataggtgccgaccgtggggatgaactgggataccacgccgcagaacagggccaacggcagccagtagggcacatgcaggatctccaagaagatggcggtgcaggtggcgttgatcagcgccagaatcgaacgggagaacaggaaggacgaaatctggccttgggccacggtccacaccagcaggaatcgacgctgcgtgttgggggccagccactggcagaaggagcggcgcagctttgggccggcggcggagatgtaatacgtggtcattaccacggtcatgaggttcagcaggaaggagaacaggccacccaccgtactcatggcggtgccggcgaaatcggtgacccacgaggtctggatattgttgaagatttccatgccaagattgctgatttccggcatcttgaacgtggtgtactggtccgcgaactcacgaatctgctcatacattgccggcaaaccgcggaccatggcaatcatctgctgtacaaacatattgccgaacagcgtgagcagcacacccacgaccacggccacgcccaccagactgacggcggaagccacgccacgcttccagccatgagccaccagcgccaccaccagcggttcgacggccagcgccaggaacagcgagatgatgatgtcgaacaccagataggagatgtcgccccacgagcgccagcagaacatgaatacgatgacggcgagggccacatacagcagcgcgcggccgaaccattccggtggcctgcgggaatctcccttggcggggaacaaagtaccaaagtcgatacgattctcgtcgtccgggtctgccccggcttctgcggcaccgcttctcgacgtgtcggtgctgtttatgtttcgcgcgcgttcgctcatggctccccattgtagcgaggggtttgaagctcggatacgccggcggcgtacacccgcttttctattgttgatgttatgctcaacgtttcgatcatcatcccagcgtggaacgaagccgaacgcatccgcgactgtctgctgaacgccactcgccagaccatcatgccgcatgaggtgctggtggtggacaatcgttctacggacaacacctgcgcgattgtcgaacagttcatcgccgaacatcccgaggccccggtcaaactgttgcaccagaacgatgaacaggggctgattcccacccgcaactttggcctgaacgccgcgaccggcgatgtgctgggccgttttgacgccgactgtatgatccggcctgactgggtggaggtggtctccggcatcttcaccgaagacccggccgcgatgggtgccactggtccggtgatgtattacgacatgccctcacgtcatttcgggttgaaaggcgacaattccttacgcaagcgaatctaccgtgccgatggcggccagccgctgctgttcggctcgaatatggccttgcgcgcttcggcctggcatcagatcgcgaatgaggtctgccgagataaggccgatgtgatgcacgaggatatcgatatttccctgcatctgatgggcaagaatctgaaaaccgtgtactcgccgcgcatgatcgccgcgatgagcgcgcgacggatggacacgtcgctgagttcattcctgaactacatgcgacgttttaagaatacgtttgatgcgcatccgcaacatacgcgcacgcataagccggaggtgttgttcaccgccatgtatccggcgatgcacatgttctacccggtgtggcagaaagtgctgaattccgcggatatcaatcctgctgaagccgcgtggatcaacgagcagatgaaactggcggaggcgcaaggcaagcagctgtacgacgagacccccaccgacgaagtctacgacgaaaagcacgaaagatagcgatgccggtgggttcccgacgaggggaacccaccggcatcgtcggcgtcatcgactgatcacatcagcgacttgtaaatcgcgagaatgtcctcttcggtggcctgacgcgggttgccgggggtgcacacgtcgttgaaggcgtcgtgggccagcggttccagatcagcctcggtggcgccgacctcgctgatcgtggtcgggttcttcagatccacggtcagcttgtggacggcctgcacggcctcttcgcgcaccttctccaggtcgccggtgtaggcgtcctcgacgccgaacgcgtcggcgatgtcgcggtacttctcgcccgtgtagtccttgttgtattccatgaccggggccagcagaataccgttggccacaccgtgggccacgcccagacggccgcccagcgggtgagccatgccgtgcaccaggccgaggcccacgttggagtaggccataccggtgatgtaggaggcgtacgccatctgctcgccagccggaatgtcgccgtcggcggacttggctaggttcttggcaatcatgcgaatagtctgcatggacaggcagtcggacaggctccaggcacccggggtaatgtaaccctcgatggcgtgggtcagggcgtcaagtccggtggcaaccttcaggccgcgcggcatggagtcggtcagatccgggtccacgaaggcgacgatcgggatatcgtgcgggtcgacagccacgaacttacgcttgttggcggtatcggtgaccacgtagttgatggtcgtctcggaagcggtaccggcggtggtcggcacgccgaagatcgggacggacgggttcttggtatccgcgacgccttccagggacagcacgtcggcgaactccgggttggcggtgatgatgccgatgcccttgcaggtgtcttgcggggagccgccgcccaggccgatcaggaagtccgcaccggactcggcgaacttggcgacgccgtccttgatgcactcgaccggcgggttcggcttgacgttggagaacacctcgtacggcaggccggcctcatccagaaccttggtgaccttctcggcggtgccggtctccagcagtaccggatcagtgacgataaatgccttggtgaagccgtgctgcttggcgacggccgggatttccttgatcgcgccacgtccgaagtatgcagtctggttgaaaatcatgcggtataccatagggactctccttttgagctagtgtcttaactggtggtccactcactctttgagtggtccaacggttccccagtctactccgcgcatgagcattcacctgaaaacacgctgaaagaacaacactgaaaataatggcaagaaatggcggaattccgcacttgtcgaattattgtccattgaccaaaccagttcaatcgcccgagatctcaacgataagaccattttccggagtcgcttggtgctctccgagaaactcgtctcttatctgcttacttcgcgcgtacacaatcaatatgcgagatgcctaattccattcgtgtttcatcagccgaacgcgaactggttcaccagatggtgtattcaacggtttcagtctcctgaagaggactaagatacctcgacaattggggtgatcatcataagagaatgaggcagataatggcaaatggcaaggctatgacggtcggcgagatggcatccctgtttctcgaccccgacgctcccgttcgtatcgacgcttttgacggctcgcatttcggcccggcagacgcggatttgaaggtcaaaatcgccacgccgaactgcatgtaccagctgctcgcgcacccgaatgaaatcggcatcgtgcgcgcatacattctgggcgatttcgacgtggacgacattgactacgccgacccgtatccggcgatgcgcaagctggtgtcgctggccaaatacgttcgcccgctcactcccgcatccattgcccgcgtatccgccggcattctgagtcacggcttcaagaagccgccggtgcccgccaccgagggcccaagcaagttcgcccgcatcaagcgtggcctgatgccgcacaccgaaaaggccgattcggaaaccgtcagctttcactacgacatgtccaacgagttctacgccgacttcctcggcccctccatgacgtacacctgcgcgatattcgacaacgagcacatgagccttgaagacgcacaggccaacaaactgcgcctgattctcgacaaactggacttgcagcccggccagcacttactggacatcggctgcggctggggttcgatggtcatcaccgccgcccgtcgcggcatcaaggcgctcggcgtcaccctctccaaggaacaggccgcgtacgccaacgaatggatcgcccgtgaggggctgcaggatctggccgaagtgcgcgtacaggactaccgcgaggtgcccgagcatgacttcgacggtatctgctcgatcggcatgatggagcacgtaggcgtcaagaactaccagagctacttcgaagagatgttccgtctcctgaagccgatgggccgactgctgaaccaccagatcaccatcagccatgacaagcctcacggcaagcccggcaccgacgaattcctcgaccgttacatcttcccggacggcgacctcggcgcgcccggcttcatcgaatcgtgcatccatgacgccggcttcaacgtggtgcatcaggagaacctgcgccagcactatgcgctcaccctgcatcactggaaccagaacctctccgagcattgggacgacgcggtcaagcaggtcggctttgaacgcgccaaggtatggggtatgtacatggccgcctgcgctctgaacttcgagctcgacggcatccagattcaccagttcctggctgtcaagccggatcgcgtgggccacccggacggcaagtggtaccctctgcgccaatggtggcaggcctgactccgtttctgtgggacggcacgcggtttttaccattgttcatctgccgtcccacagaagtgtgggatagcagatacatcaatcgtttgacgtatctgctatcccgcatgacataagccgagaaccgcagaatagagccgttctttgccctcagctctgagggcgttcttcgaacgctgtgggacggcacgtcgaaaatcggcaaaatcacgtgccgtcccacacgattcccttcgcacgcgcatttcgcaggtgctttttctgcaatactgactctatgagcgccacagccccagaaacggctggggcggacgatcgcaccgaccatgacacgcgcggataagacccacgtttctttatttaaccctaacccgatgttcgcattggtgctgttggcgtgcgtagttgcggcgaggaagacagttgttggcgaacgcgagcctttgcattgaccggccagcccgccggagtaggtacgtgacggatatgcaaaagccccacacaaggcggggcttcattgtggtggctccgaacggcgtcgatccgttgacctagcgattttcagtcgctcgctctaccaactgagctacagagccatgaacagtcaaaaacccggataatccgggtttcataaccattccagcgaccccggccggacttgaaccggtgacctccgccgtgacagggcggcgctctaaccaactgagctacggggccattgttctcacttgcgtgaggcaacagatgtatatattaccgaaattcgccggtcgtgcaaatttcggcgtgttccgcgtaatttcaaggtttttgctatcaccagcacacggacacgtctgccataaacatccacaaacgacgaagggcgcgaccggaaccccggtcacgcccttatgaacagaagcacttcacggcatccaccgcaaagcaatcgtcaatctcagtcagcctgcttccaggtgtcgacgtcgatgtggtgttcggggttggcctgccaggcatcccacgcggacttgacgatgtcttccacgtcgtacttggcgtgccagcccatctcctcgttgatgcgcttcggggagccgatcaggtgcggcgggtcgccggcgcggcgggccatgacagcctcggtgaacggcagaccggtgaccttcttgacttcgtcgacgatctgacgcacggaggtgccttcaccggtgccgacattgaaggcgtcgtacttgcgctcgtcacggtcgaggtacttgagggcggcgatgtgggcgtcggccaagtcggagacgtggatgtagtcgcgcacgcaggtgccgtccggggtcgggtagtcgtcgccgaagatggcaggggccttgccctgcttgaggcggttgaacagcatcgggatgaggttcagaatagccgggtcttcgagttcgaccgggccgcagccggccacgttgaagtagcgcagcgcgcagaagcggatgccgaacggctgctcgcaggcgcgagccatccactcgccgaacagcttggtctggccgtaggggttgatcggcagcatcgggacgacgtcctcgggcaccacatcgaccggcggcacaccgtaggtggcggcggaggaggagaagacgagcttcttggcgttcttggactgggtcatgccggtgagcacgttgagcatgccgttgatgttctgctggtagtaccacagcggcttctccacggattcgccgacctgcttgcgggcagcgaagtggatcacggagtcgacgccttcggcgtcgaggatttcggccagacgctcgccggcacccggagcggcgatatccatgccgtacagacgggagccttcgatgcgggtgggcttgccgtagctcagatcgtcgacgacgacgaccttttcgccggcctgatgaagtgcgtgaacgacatgcgcgccgatgtagccgcagcctccggtgacgagaactgtcatagttgacctttccttatgcgggttgcaagtgtcggccgtgtggagttcagcggctgttcacttttggtccgctttgttaccttttgaaacaatttgagtatatcacacgaacataatcgcacaaaacggtggtgtcgtccggcaatatctgcattcattaggtcgatctggcgttcattaggtaggtcggcccggagccggcccgcacgaacaccgggtaaatggcttgatatggtggttggtatcgcacaccacccacctaatgaacgccaaatcgacctaacgaatgaacagcggtgcggcgcacaaggaaaatccgaggaatatatgaccgatcccgaatccacagcaatcgattccgtcgccgcgatggccacagaccacaccgaggcaccggcgcaccccctgcacaaggtgctttccttcgtgcgccgctccggacgtttggacgatcgcctgcagcgcgcatgggacaactatgccggcacatatctgttggacattgcggccggcaatctgctggacgtgcgcgaaggcgtcacgctcgaccgcgcgctcgtggagtccgcatggggcaacgacaatccgctcattgtggaaatcggcaccgggcagggagaaaacgtggcggccgcagccgcggcccatccggagacgaacttcctagccttggaggtctatgaccccggtgtggcccacacgctgctgctcgccggcaagcaggggctgaccaacattcgtgtggcccaggtcaatgcgcccgagctgttcaaggtgaccgcgcccggcaccgtggccgaggtatggaccttcttccccgacccctggcccaagaagaagcatcacaagcgccgcatcgtgcaggaggccatggccggcgacattcatcgcgcgctggtcacagacggcgtctggcgcatcgccaccgacatcgaggactacgccctgcacgtgcacgaggtgatggacggcctcgatggctggaagaacctgggcagcataaccgtcagcctcccgctggagcacgtgggtaagggcaatgccgacatggccgccgacatgccgcacgccgacttcaccgaatccgagcggttcgagggccgcgtgctcaccaacttcgaaaagaagggcctggccgccggccgcgcgatccacgacttcacctatcaggccgtcaccctgaactgattgcgacacgccgaaatgccgtcgatttgcataaccgaacaacctcccgtaaagtaattcgagttgttcgcccccatcgtctaacggttaggacaccagactttcaatctgacaacgagagttcgactctctctgggggtaccggtttgctcctgtcgccatcattgtgattcggcaggagccttttgttttcaacgggtcgcacctgccggcgatgtggcgtgccaggagcgtcgaggtcagcgctgccaccaacgatgcacctttgccttcgtttgtgttcgtgtcgtcgttgttgacgatgtcgtacagcgtgtcgtcgagcagttcggccggaggcatgccgagggtgacggccgcggccgcgatggcgttgaggtcccatgcggcgtcgaggttcattctggccgatatggtggccttggtcacgccggccgcctcgcacagggcctgctgttcgagttcttccttggccaggtgcaggcgcacgttccatgcggcgacctcacgcaggtgctctcccagttcgatggcctgtgttcttgccgtggtgttgccggtcatgtccgttcctttcgtttgcgtgcccttgggggtttgtgcgcaccatgctatgggcggcgcgcttggttgcgcaatacgaccgcctccccggttcggtctggtcgaactgggccgggaaaaacatggaaaacgaaagcgctccgcaccgtgttggcgcttggtgcagggctgatcgacaaccttgggcgggattccgggcgattcaagtgacaagagtcccgggattcgccctccattgaaagagagttatcgcaatgaccaatcctatcatcgcttccgccccgcgtgcggcgggagccgtaaaaaccatcccgtcgctgcgtgtgcggattgctcgcgcgcacttgctggcggtgctgctgcatcccgcgcgctcgtcgcgccgtcgccgccggggcgtctgagatggtccgggctgtggcggcggtggccgtcgtcgcaatcgttgtgtgtctgctggtggtgtgggcgttgtgccgtgcggccgcgctgggcgaccgcatcggcgaacggctccatgacgctaggggtcgcggggaggatgcgcgatgagcgggccggcggagcagtgggcgtggcagttgcaggacgagcagctgagcctgtcggagaagttcgtgttggtgtatctggcgcgaagggcgtattacgacgacgggtgcggcgcgtggccgtcggtcaacaccatcgcggcgcattgccattgcacgcgccgttccgtgctgcgcgcgttgaaacgcttgcaggagctgggctacttgcgcgagggcgaccaagagctggccgcgcgcaatccccgcagccacgaacccatccccaggggccatcgctccaaggtatgggacgtggtgatgaagggcgcgcggaccgagccggaggacatcaccgatcccggcgagaccagcgcgggcaagggtgttccggcgaagcctagtgcggccggaccatcgcggagcaaggagtgcgcgcggggtgacatggtgtcacctgacgcagtgtcacctgacacaatgtcactccagggcgattccgacggtggggtgacatcctgtccgaagagaggtgacgtcatgtcacccaatagacaagtgataaccaatgctccccttgtcccctacggggacattcccctcgccggggaacaacccgaagaggaacgaagcgagcatgatgccccggattggcgtctggcgctgccacctcggggagtgcgcgacccattgtggacgccaggggcggaggatgcggacgagcgggtgcgttcccgggccttgcaggaggttcgcgtgctgacgctgatccatgaccgtgtggcggccatcgacccgaaggcagccaggccggcgtcgatgcgagaccgacgcaaggtccacgagctgctgatggaacgctctctgacggaggtcgagacgatccttgattgggcgtatggcaatccgcgctggatctcatggctggtggacggcacgatggtcgaacgctacttcgcgcaggtcagcctcgacatgcgcaccaagcgggcacgaggtccgcagcattccggcagccatgccgctgctaccgagctcacgtcggtccatgatccagaccggccggtggcggttagttcgggcttggcctggcgggtgccggtctacggcggcggcatcctgtcgatcgcattgtgccaggcgcacctcgacggcgaaaccaagcaggcagagtgtccggtgtgcgcctacgaccggcgcaaccaagccagccacgccatcggcctggagaaaaccgaccgcgccgaagacaaggaatcccacgaggaggccaaggcatgaccggcatagcggatgccgcgcctcgttcgccggaggcgtggaagagcatgggatgctgcgcggatttcccgcagccgtgggccgacctgatgtggggcctggagttcgaggacacgcatcccctggcccgcgtgttccggcaggcgggcgcgtcggtatgcgagcacgactgcccggtgagggccgaatgcctggcctacgccggcgccgccggcttggaatggggcttgtacggcggccgctcgtgcaccgaccgccgtcagatcgcccgcctggcggaagccgacggcgtgccctgccgcgaccgcacggtgccctgggtccgccgctggggcctgttcgtcgactggctccaagcccatcccgaggtcttcgacacggcccggggcaaggccagcatggaacgcgggcaacgccgatggcgcgccgcaggccgcgcccagcccggagacgggccacatgaccgtcaaaccatcatgcaagcagacaatcaaacaatccgacaaccaagcaatcaaacaatcaacca

SEQ ID NO: 1314 - DNA, 28689 bp, Unknown
  R157_18m  MAG No. k141_11209
gccgaagtggaccgaggtcatgagcgccgatgcactcgaccatgacctgccgcgcgaaggccgcaatgcgccgctgagccgcccgcgcccgggccacgccgatctgaccggcatgcgcaagtatggttttgacgacgcccgaccggtactggagcgctccagcgcccgtgagaccgcctcccgtgtggccttgggcgaggtggccaagcagttcctggatcaggcgttcggcatccgcaccgtagcccacgtggtggcgctcggtggcgtgcagaccaaccctgatttgccgttgcccacacctgacgatctggaagcgttggatgcctctcccgtgcgtacgttggataaagaggccgaggtccgtatcatcgaacgcatcaacgaggccaagaaggccgccgatacgttgggcggcgtgattgaagtgctggcttacggtgtgcctgccggcatcggcacgtatgtggagtccgaccgccgactggacgcggctctggcctccgcgattatgggcattcaggcgttcaagggtgtggagatcggcgacggcttcctggaagcctcccgccccggttcgcaggcgcacgatgagatcgtggtcaacgccgacggccgcatcgaccgtctgtccaaccgcgcaggcggcattgaaggcggtatgtccaatggccaggtgattcgcgtacgcggtgccatgaagccgattccgtccatccccaaggccctgcgtacggtcgacgtgctgaccggcgaatccgcacaagccatcaaccagcgttccgacagcaccgccgtgcctgcggcatccgtggtggccgaggccatggtgcgtctgactttggcgaagtacgcgctggataagttcggtggagacagtgttgccgaaacacggcgcaaccttgagtcgtatctcgcctcgtggccggagcacatgcgctgaacgaagtggagtatggttccgagacgactgccgcggaaccatcagcaactgtacccaccaatcgtcgagaggattcgtagattatgaccgcacgcccccgcgccgtcatcatcggcatgatgggagccggcaaaacacgtgtcggtaaggaagtggcgcatatgttgcgtctgccgttcgccgatgccgatgtggagatcgaacgtgaagtgggcatgaagattccctcctacttcgaggaatacggtgagccggcattccgcgaggtcgaggccgatctcatcgccgatatgcttgaggatttcgacggtatcttttcgctgggcggtggcgctcccatgacgccatccacccagcatgccctcgcctcatacatcgaccatggcggtcgtgtggtctaccttgacgccgatccggcggaggccatggaacgcgcgaaccgcgggggaggccggcccatgctcaatggcaatgccaactcccgttggaagacactgttcaagcagcgtgacccggtattccgcgaggtcgccaacgttcatgtccatacccgggggcttacgcctcagggcgcagcgaagaaagtgattgatatggtatctgagcgagcagtgcatgttaccggatcggcaattgagccgtatgatgtggtcattggcgaaggtgccatgaatcatctggtcgacgtgctgggacccaagcccgccaaaatcgcgcttatccatacccagccggtgcagcgacactccgatcgtgcccgcgccctgttgcgtcagggcggctatgaggtttccgacatcgtgattccggatgccgaacccggcaagaccattaccgtggccaacggcatttgggaacgccttggcaacgaaggtttcacccgatccgatgccgtggtggggcttggaggcggtgccgcaaccgatttggccggttttgtggctgccacgtggatgcgcggcgtgcgctatgtaaactgcccgacctcgctgctggccatggtcgatgcctccaccggtggcaaaaccggcatcaacaccccgcagggcaagaacctcgtcggctcgttctacacgcctgccggtgtgctggccgacaccaagacgctggctacgctgcccaatgacatcttcattgagggtctcggtgaagtcgccaaatccggtttcatccgcgaccccgaaatcctgcatatcctcgaagaccacgcagctgaactgcgcgctttcgacggctctacattcctcggctcgccgctcgaagacgtggttgccgagctcattgagcgcacggtaaaggtcaaggcctactacgtctcctccgatttgaaggagaagggtctgcgtgaattcctcaactacgggcacacgatgggccatgccatcgaaaagctcgagcacttccgctggaggcatggcaatgcggtggccgtcggtatggtgtatgccgccgagctggcccatctgatcggttacatcgatcaggatctggttgactatcaccgttcgttgctcgcttcgctgggtctgccgacgtcgtggaatggcagctcgttcgacgacgtgctcgcattgatgcatcgcgacaagaaagcccgtggcaacgaactgcgtttcgtggtcctcgacgagattggtcacgtcgtacacctcgacaacccgcccgccgaagccgtagaagaagcattccgtcgtatccagcagtaattgaacggccgtaggccgtgccgttcgccatcctctcagaaaaagtacttggctcccctctaacggaggtgccccggagtcggatttaccttctacctccctctgatgagggaggtgccccgaaggggcggagggagagaagcacaaacaaaaggagtcccaatgaccaaagtcattgttgtcaatggccctaacctcggacgtctcggcgtccgccagcccgacgtctacggtcgtcaagacctcgacaccctgcgcaagctctgcgccgaatggggcaaggacctcggcctcgaagtcgaggtgcgccagaccgacgacgaagccgaaatggtgcactggatgcaccaagccgccgacgagaaaaccccggtggtcatgaatcccgccgccttcacgcactattcgtatgctctcgccgacgccgcgcacatggtcattgatgagaacctgccgcttatggaagtccatatttccaacccgtccgcccgcgacgagttccgcaagcgttccgtaatcagccctgtggccaccggcaccatcaccggcatgggtttctacggctacaagctcgcgctcgatgctgtggcgcacttgctgagcgaatagaaccaagccctccagccaatcccgggtagcagtcgacgttgcgcccgggattcctgttccgacgaatcggacccgaatcctcgtccgggcgcgccttatggacccgaagtacgccgtgtattcgaccatatgctggccaaggcagaacgagatgggctgcctacgcacgactacaccggccacgtcatgaacacgccgggtcatacacggatgatagagtggaattccatggttagaagaacacatggtaattctcaagaacacgtcaccaagcatattttcgtcactggcggcgttgtttcctctctcggcaagggcctgaccgcatcttcgctcggtcgtttgctgcgcagccgcggcatccatgttctgcagcaaaagctcgatccgtacatcaacgtcgacccgggcaccatgaacccgttccagcatggtgaggtctacgtgaccgaagacggtgctgaaaccgatctcgacatcggccactacgagcgtttcctcgacgtcttcctgagccagaaggccaacgtcaccaccggtcagatctatcaggaagtgctgcgcaaggagcgcgccggcgaatacctcggccagtgcgtgcaggtcatccctcacatcaccaacgaaatcaagtctcgtatgcgcgcccaggcttccgatgacgtggatgtgatcatcaccgaaatcggtggtaccgtcggcgacatcgagtcccagcccttccttgaggccgcccgcgaagtgcgtcgcgatctcggcccggacaactgcatgttcgtgcacgtttccctggtgccgtacatttccgccgcccacgagctcaagaccaagcccacccagcactccgtgatgatgctgcgtcaactcggcatctccccggacgccctcgtgttgcgttccgaccgcccgctcaaccagtccatcaaagacaagatctccctgatgtgcgacgtcgatgccgaaggtgtggtcaactgcgtggatgcgccgagcatctacgatgtaccgaagatcctgttcgaagagggccttgatgcttacgtggtgcgtgagctcggcctgccgttccacgatgtcgattgggatgaatgggcagacctgcttgagcgcgtccaccaccccaagcacgaggtcaacatcgccatcgtcggcaagtacatcgatctgccggacgcctacctgtctgtcaccgaggccatcaaggccggcggctttgccaactgggccaaggtcaacgtcaagtgggttgcggccgaccgttgcgaaaccaccgaaggcgcggccgccgctctcgacaacgtcgacggcatcgtgatccccggcggctttggcatccgcggcatcgacggcaagatcggcgccctgaagttcgcccgtgaaaccaagctgcccgcccttggcctgtgccttggtctgcagtccatggtcatcgaatactcccgccacgtactgggcattgaagacgcgaactcttccgagttcgagcccgattgcgccaacccggtgatcgccaccatggaagagcagaaggacattgtggccggcaagggcgacatgggccacaccatgcgtcttggctcctacccggccgagctggaggaaggctcgctggtcgccgaactgtacggcaccacgcatgtcaccgagcgtcaccgccaccgttacgaagtcaacgtggcctacaaggatcgtctgcgtgaaggcggcctgcgcatctccggccagagcccggacggcgagctcaccgagttcgtggaactgccgcaggacgtgcacccgttctatgtggccacccaggctcacccggagttcaagtcccgcccgaccaagccgcacccgctgttcgccggcctggtcaaggccgcgctcggccatcaggcggcccgctgaccgtggatcccgcgcggtcggtccgcgcacgatgaaggcgtgacggcacggcatctcaggatgcttcgccgccacgccttcgccgtttggcgccatccgtgatgccgcatggcccgatggcgcccgcatgtaatcaagcccacagccaatatgcgtcagggcagctagtgtttgcacttgggttctgctaggttttcatagggttaagtgtgatacaaggaaggcaggatggtgaccgaaaacacagcaccaaacgccgccgctgacgtggagatgagccagtatgtggctgatcgtacccgcgtcaacgaggacaagatcaagaaggatgacgagatcatcagccagttcggcgactacaactatggttggcatgattctgatgccgccggcgaagccgcaaaacgaggcattgatgagaacgtcgtacgcgcgatcagcgccgacaaaggcgagccgcagtggatgctcgacatgcgtctgcgtggattcaaggcgttcctcgaaaagcccatgcccgattggggtgtggatctctccggcttcaacgccgacgacttcaagtactacgtcaagccgatcgagaagcaggcgaagtcgtgggaggagctgccggacgacatccgcaacacctacgatcgccttggcatcccggaggcggagaagaaccgcctcgtctccggcgtggctgcccagtacgagtccgaggtaatctacaactccattcgtgaggacctgaagaagcagggtgtgatcttcgtcgacacggacaccgctgtgcgcgaataccctgaactcgtcaagaagtacttcggcaccgtcgtgcccccggaggacaacaagttcggcgccctcaacaccgcggcatggtccggcggctcgttcgtatacgtgccgaagggcgtgcacgtggacatcccgttgcaggcatacttccgcatcaacaccccggccatgggtcagttcgaacgtacgctgatcatcgcggacgaaggctcctacgtgcactacgtggaaggctgcaccgccccgatctggtccgaggactcgctgcacgccgccatcgtcgagatcatcgtcgagaagcacgcccgcgtgcgctacaccaccgtgcagaactggtcgaacaacgtctacaacctcgtcacccagcgtgcctacgtgcgtgagggcggcacgatggagtgggtggacggcaacatcggttccaaggccaccatgaagtacccggcctgcatcctcgccgaaccgtacgccaaggcatccaccatgtccctcggcttcgccggcaagggccagtaccaggacacgggcgcgaagatgattcacctcgccccgcacaccagctccaccatcgtcgccaagtccatctcgcgcggcggcggccgctccgcctaccgcggtctggtcaaaatcgtcaagggcgcgtacggttcgtccaactcgaccgtgtgcgatgccctgctggtcgacgacttctcccgctccgatacctacccgcacgtcgacgttcgcgaagacgacgtttcgatggcccacgaagccaccgtttccaagatttccgaagaccagctcttctacctgatgagccgaggactcacggaggaagaggcacgaggcatgatcgtgcgcggcttcgtcgaaccgatcagccgcgagctgccgatggaatacgcgcttgaactcaacagacttgtggaacttcagatggaaggatcggtgggctgattccgatgaccgacaacacaacacccgtcaaggaaatcaagattccggtcgccgaccccaacgacccgtacgcgattccggccgccatgccgtcctccgtggaccatgccgtgcgttcgttcaacgcaggcgactacccggagcccagccgcaagcaggacgaatggcgctacacgcctatcgagcgcatcaacgagttcttcaccgtgttcaagccttccggcgaaacgcagatcgaagtctccatgattgacggctcgccgttggccgaaggcgtgaagctcagccagatcaagctcggtgagggcctgtccggcactgtgtccaagcccaacgaccgcgtctccgcagtcgaatgggaatccggccacaccgcaaccattctggaactgtcaggtgagatcgcccagcccgtgctcgtcaaggtgcacggcgcgggggaggacctcgacgccttccatctggtgatcgccgccgccgacaaggctcatgcggacgtcgtcgtggaacacgacggtgacgcacgactggccgaaggcgtggaaatcaccaccggcaaggactcgcacgtctccaccacgttcgttcaggaatgggccaaaaccgccaagcatgtggccaaccaccgcatccacgtcggcaaaggcgcatccctgcgccactccgtcgtgaccttgggcggcgacatcgtccgcatccgcatggatcaggacttcggcggcgaacaaggcgacctcaacatgctcggcatctacttcgtggaccccggcgaacacatcgaacaccgcacgatggtggtacacaaccaccccgactgcaagtcccgcgtggtctacaagggcgcgcttgacggcaagggcgcgcactccacttgggtgggcaacgcgctcatccagcccaccgcccccggcaccgactcctacgagctcaaccgcaacctggtcctgaccccgggtgccatcgccgattccgagccgaacctcgaaatcgaaaacggcaacatcatcggtgccggtcacgcctcttcggtgggccgcttcgacgacgaggaactgttctacctcgaatcccgcggcatccccgaaaccgacgcccgcaagctcgtggtgcgcggcttcttcggcgaactcgtcgaggagatcggcattcctgccatctccgaacatctgatgaccgtgattgaccgccgactggcccgtggcgaaaacgacgccatggcacaggtcctcgaagacaagtaagaacagcatttttaggagcacaacaatgtcaacactcgaaatcaaggacctgcacgtccacgtcgaaaccaaggaaggcatcaagccgatcctgaagggtgccaccctgaccgtccactccggcgaaacccacgccatcatgggccccaacggttccggcaagtccactctcgcctacacgttggccggccaccccaagtacgtggtcgactccggcgaggccctcctcgacggcaaggacatcctcaagatgactccggacgagcgcgccaaggccggcctgttcctggccatgcaatacccggtcgaagtaccgggcgtgtccatgaccaacttcttgcgcaccgccaagaccgaaatcgacggcgaggctcccggtattcgccagtgggccaaggacctgtccgcagccatgaagcgcctcaagatggacccgaagttcgcctcccgttccgtgaacgaaggcttctccggcggtgaaaagaagcgcgccgaagtgctgcagctcgaactgctgaagccgaagtttgccatccttgacgaaaccgactccggcttggacgtggacgccctgcgcatcgtgtccgaaggcgtgaaccgtgccaaggaagccaaccagttcggcatcctcatggtcacgcactacacccgtatcttgaagtacatcaagccggacatcgtgcacgtgttcgccgacggccacttcgtcaagaccggcggccctgagctggccgacgaactcgaagagaacggctacgaccagtacctgcccgagggtgctgattccgagtccgcgctggcctgagtccgtgaccgtgggagtctgacatgccctatcctcgacacgctccgggccgctcaggccaagtctttacggtcgcgaacaggccatgtccgactcccactcgtttcgtacaattgttacgtaagtaggggaacataatggttgattttaaggagattcggggcgagttcccgattctgaatcaggagattcacgggcacccgctcgtgtacctggattctgcggccacctcgcagaagccgaatgcggtgatcgacgccgaggcgaacttctaccgtacgatcaacgccggcgtgcaccgcggtgcccacgagctggcggcccgtagtaccatggctttcgaagaggcccgtgccaaggtcgccaagctggtcggcgcgaatgcagcggaaggcgaagaagagatcgtcgtcaccggtggtgccacggccggactgaacctgctcgccaccgcattcggcaatgcatcgctgggtcgtgggggagaagccgccaagcgttttgccctgaagccgggcgatgagatcgtcgtctcgcgtgcggaacatcattcagtgctgctgccattccaggagctggcctaccgtaccggtgccaccttcaagtggatcgacctgaccgaggacggccgtgtgcgtacggacaacctcgacgaagtcatcaccgaacgcaccaaggtcgtggccgtcacccacgtgggcaacaccacgggtgccatcaccaacatcgcccctatcatcaagcgtgcgcatgaagtaggttcgatcttcatcttggacgcttgccagtccgtaccgcacctcaaagtcgatttccatgcgcttgatgtggacttcgctgcctggagcgcgcacaagatgtacggtcctaccggcgtcggtttcctgtacggtaagcgcgaactgctcgaagccctgccgtcggccaacttcggcggctccatggtcgaactcgcctacatggaccacgaggcccaatacatggcccctccggcccgcttcgaggccggcacccagccggtcgcccaagtggtggccgcaggcgtcgccgccgaatggatgatgaacatcgggctcgagaacatcgaggcccatgagaagaccatcgccgccgaactgctgaagctcggcgacatcgatggcattcgcatcctcggaccgcgcgaaaacgtggaccgcatcggcaccgtggcgttcgacgtggccggcgtgcacccgcacgatgtgggccagttcatcgacgcccagggcatcgcgattcgcgtggggcaccactgcgcccagccggtgcaccgccacttcggcctatacgcatccaaccgtgcctcctccggtgtctacaattcggtcgaagatgcccaagcattggtcgaagcggccaagggcatccgtaagttctttggagtggagtaaaacagaacaccatgaacgaattcggtatgagcggggatgacctcgaacagatgtaccaagaggtcatcctcgaggcgtcgaaacatccgcatggcaaggaatcctttgcgcccaacgcggcggtcgaacagtccgcggacgcggcggccaatgtcaccgtgcaagccagccacgaatactgcacgcccggtgaatcgcaccagttcaacccgacctgcggcgacgaggcgaccatccatgtcgaagtctccgatgacgaaccgcacaccatcaagcgattggtgtgggacggccacggctgctccatttcgcaggccagcctgtcggtgatggtcgatctggtgaacggcaaaaccgtggacgaggccatggatctggaacagacattccacaagctgatggaatcgcgcggtgccggtctggacgacgagaacctggaagaaaagctcggcgacgccgtggtattccaaggcgtgtcgaaataccctatgcgcatcaaatgcgctctgctaggctgggaagggctgaaggactccatcgccaaagccctcgctgcaaagaactgaggaaatatgtccaacgataatttggttcccgaaccacagccgtccgttttcgatgccgtcaacggcgtcctgcaggacgaggaggccgctcgccgcgtgatggccaatccggccttggccaagggcttcccgaacggacgcccgatcgagcactctgctgcgtccggcgatgacacctgtgcgtgtggcggtcaccatggcaaatgcggttgccgggatgacgaacagtccgatggcagcgagattccgatcaaggcgattgacgatatcggccgcgccactgccgaagacgtgcgcgaggcactgcatcaggtgattgatccggagcttggcatcgacgtgatcgatttgggtctggtctacggcattgagatcgatgagctaggccgcgccattattacgatgacgctgaccacgccggcctgcccgctgaccgaccttatcgaggacgaatgcgcatccacgctggccggtctggtcgaggagttccgcatcgactggacgtgggacccgcgctggaccatggagcgcatcacgcccgaaggccgcgaccagctcgccgcccttggcttcaacttcgacaacatgccaaagtactgatagcgcttagtaagctccctctgatgagggagctctatacgagaaaagccccgcatgatgcggggcttttccaagtctggactggtcaatcagtcatcgacgatggtgttcttcgggacaaccgtaatgccgtccggcgtgacggtgaagccacgggccagatcgtgctcggtatcgatgccgacagtggagttttcggtcaggaccacgttcttgtcgagaatcgccttgtacacgcgggcgcggcggttgatgattacaccgtcgaacagtacggaatcgacgatctgtgcccacgagtggatacgcacattgggggagagcacggagtggtgcacttcaccgccggagacgatcacaccgggggagacgatcgaatcggtggcgtggcccagacggtcgcggccggcgtgcacgaacttggccggcggcaggttgccggacatcgtgtaaatcggccaatcctggttgtacaggttgaactcgggcacataggcgatcagatccatgtgcgcatcgtagaactgcttaatcgtaccgacgtcgcgccagtaagcgtgatcagtgaccgtggaacccggaatctcgttcgagttgaagtcgtagacgccggcctcgttgcgggaagcgaagtacggggcgatgtcgccgcccatgtcatgcttggtgtcggcagccttctcatcgagagccagagcctcgaacagggccttggtgttggcaacgtagttacccatggaagccagaatctggttcggattgtccggcagaccggtggtggtggccggcttctcctggaagttcctgatcatgttcgggtgatcgggatcgacctcaattacaccgaactggttcgattcctcgatgggctggcggataccggccacggtgaactcggcgccggactcgatgtgctgctgtaccatctgctcgaagtccatgcggtagacgtgatcggcgcccacgatcaccacgatgtccggctggacgtcctcgatgatgttgatggtctggtagatggcgtcggcggagccgaggtaccagtgcttgccgagacgctgctgcgcgggcacaggggagacgtacgagccaagcagcggggagaaacgccagacctgggagatgtggcggtcaagcgagtgagacttgtactgggtgagcaccacgacctgacggtacccggagttcaccagattgctcaacgggaaatcgatcagacgatacacaccaccgaagggaacggcgggcttcgcgcgatcgcgggttaacggcatcaggcgggtcccctcaccacctgcaagcacaatcgacagaatcttgggattcttggccatcgtaactgtcctctctgttactgagcgtctttcgacaccgcactgctgggccggatgcttccttgcattcggtttacatagttaataattgcagaaaaattcgaacatgcaaggctttcgcccccccgcgtgccgtgaacttgcgatgaacagtttcgtagatttgtttaaggatccggccttttcggagcgcgtgcgattccttagcgtgtcgcgtagaacgccactgcgctggatgccgccacgttcagactatccacgccgtggctcatcggaatcttcacggtcaaatcggcgcgggcaatcgtatggtgggacaggccgtcgccctcggtgccgaagatcagcgcgagcttgtcgatatgcgtcggatcttcggcaggcgcgtgcagacggcgtgtcagctcgtccaacgaaatcgaacgatcctccaatgccatggccacggtggtgaagcccagcgacttcaactcgtcgatgccctggaacggccagtaatgcttgttttcggtaccgtcgtcgttgaacccggtgatacgggtccacggaatctggaatacggtgcccatcgacacacgagcggctcgtcggtacagcggatcaccgcaggagggtgtggccagcacggcatccacatcgagcgcggctgccgaacgcatcagtgcgcccacattggtgtggtccacgatgttttccattactgccacgcggcgggcgctcctgcagacctcggctacggagggcagcggccagcgtcgcatcgcgcatagggcgccgcgatgcagacgatagccggtcagtcgcttgagctgctcgggtgaggccacgtagacgggaatgtccgtgccccagcgcccgtcgatgaagtcgaaggtgtctttcatgccctccagccaaggttcctcgaccagcagtgacagcggttcgcggtcagcggccagcgcgcggtcgataaccttgggggactcggcgatgaacacgcccttggctggttccaagcgattgcgcaactgcatttcggtgaggctcacatacgcttcgacgcgcgggtcgtcaacggtgtccagcgtgatgaactgcattggtggcctttcgtgtgtgcagataacgaaaaaccccttgcaatgcaaggggtttatctgtgcccgagacgggacttgaacccgtacgcccgtataaaataggcactagcacctcaagctagcgcgtctaccattccgccacccgggcaggtgtcgtttggacaacgagtaaatagcttagcatgaaattacagggatgcaattcgcgcgtgtgcccggcgtgtcgcgtgtagccttgaagtcatgactgatgccctttttcttttcgacccgcaggtcgacgatgtcccggtgaacagcgacgaacttcacgccggctggaagctaaccctgcccgcgcacatcaagcgccatgctgtgcaggctatgcgactcaaggcgggggacagcctgcaactttccgacggcaacggcttgagaatccaggcagtgatggccgatcctgaagccggacttgctgaagttgtggaagtggggcgcgaacccgagccgctcacccgtttggcgctgattcaggcattggcgaaaaccggccatgatgagcaggccatcgatatggctacgcagattggcgtcgaccaagtggtgccatggcaggcggaccgatccattgccaagtggaaggtcggccgtacggacaagaagtggaattcggtactggatgccgccaccgagcagtcgcggcgcgcttttaagccgcaactggaggcgtgcgcgtccagcaaggaggtcgtggccatctgccgcagggcctgcgtgcatggcgatgtggtgattgtgctgcaccaggatgctaccgatacgtggtccggcgtggaggagaaggttacgcagttggtggaacgcacgctccaggacggccggccgcggactgtcagtgtggtggtcgggcctgagggcggcatcagtgagcaggaggtagcagatttcgtcaaggccggagcggtgagctgcgtactggggcacaatattctgagagccgcgacggccggtcctgtagcgttgtcgctgttgtctcgggtgttgggacgttacgagtaacgcccacgcgctaagctggtgcgtagcaacatcaaaccaaggagcatgatgagcgaatccgacgattgcctgttctgcaagatcatcgcagggcagattcccagcagcaaggtctacgaggacgagacgacctacgcattcaacgacatcaaccccaaggccaaggtccacgtgctcgtggtgcccaagaagcactacgccaacgtcgccgaacttgccgccgacgacccgaccgagctggcccacatcgtctccatcgcgcagaacatcgccgacaaggaatttcacggcgcctaccgactggtgttcaacaccggtctcgacgccggccagaccgtcttccacgtgcacgcgcacgtgatgactggcgaaaagctcgacgagtagtaggggaatatccgcttcgtggcaacgactacacgtaccatcaccatcccgccccaacttgaccccgtcgccgtgctcggcccggttgacgaggtcattcgcgaggtggagcgcgcctttccggacctgacgattatcgtgcgcggcaaccgcgtggcgatcgtctcccgctccaagcagaccgaagcccaggccgcacaggccgaggatttggtcaacaccatcatccaagccgcctacaccgcgcctatggacgccgacaccgtgcgtcgcatgctcgaccagaacgtgctcaagaaccacgtgcgcctcgaacatccaggtcacggcccggtgcatgacaaactggcgcaatcgacctcaaacgaacgcgcccatgcacgttctgccggctcccacgacccgacgtaccgaaagcccacggttcccggcgtcatcacctttgccgccggcgtgccggtccgtgcgaaaaccgccggacaagtggcctacgtgaacgccatcgaatcgcacaccatcaccttcggcattggtcccgcaggcaccggcaagacgtatctggccgtggccaaggctgtgcgtgccttccaggacaagcagattcgccgcatcatcctcacgcgcccggccgtggaggccggcgaaagccttggctttctgcccggcacgctgaacgacaaggttgacccgtatctgcgcccgctgtacgacgcgcttggcgacatgctcggcgccgaccagctcaagcggtacatggatgacggctccatcgaagtggcgccgctcgcctacatgcgcggccgtacgctgaacgacgcgttcgtgatcctcgacgaggctcagaacaccaccgaacagcagatgaagatgttcctgacccgtctgggcttcaacaccacgatggtcatcaccggcgatatctcgcaggttgaccttaccgtgccgcgctcgggactggccaccatcgaacgcatcctgggcggcatcaacgacatcgcattcgtgcatctcaaaaccgaggacgtggtacgtcaccagctggtcggccagatcgtggccgcctacgaccgtcactccgccatcgccggcgaccaccgcgacatcgagcgcaagggccgccgcaaccataccgacttcgatgcccgccagcaagcggattcaaccaaccaaagtgagacagacgatgagcgttgacgtcaccaatgaaacccagtgggtcatcgaccccaaggtcttctccgatttgggtatttgggtactcgaccagatgcgcgtgagcacccagtccgacctgaccatcatgttcgtggatcccgatcccatcgccgaactgcacatgcgttggatgaacctcgaaggcccgaccgacgtgatgagcttcccgatggacgagctgcgcccaggcgacggcaaaaccgtgatggaaggagtgctcggcgacatcgtcatctgcccgtgggtcgctgcccaacaggctgctgcagccgggcacagcaccatgcaggagatgctattgctcaccatccacggcatcctgcacctgctcggctacgaccacgtgacccccgagcaggagcgccagatgttcggcctgcagcgacagctgctgctcaccttcttcgccctgcgccacgatgccaacgtgcaggccacgctgcccgccggcacacccgacgcgctggccctgtacgacgccgcgcacggtgctggccgcgacctcgattccaaataaacttccaaatcaatcacaccaaattcggattattctataccgttcaaggacattcaaggacaccgaaaaaacattatggagtattccagtaccacgctgatcgccgtcaccgtcattctcgtacttgtggcggccatgttcgtctggctttcgctgaccatggccgccgctgaaggcgccgtggcccgcgtaacgcgagccagcctcaacaatctcatcctcgaggtgcagaccgactccgaagcaagccagttcctcaagatgaagaagatcgacaagattcatcgcgtgcaacggctcatcgccgaccgttacgccaccgccggcagctgtgcgttcttccgcatcgcctgcaatgtgctcgacggcgtactggtgtcttccatcgcatccctgtggggtgcggaactgtgggttgaactgctcgccggattcctgttcgcgattatcgtagccgtggtctccgtactggtccgcccgcgcaccgccggcatgaccaagccggtcgacatcatgatttccaactcgcgcatcgtgtcgttggccaccaagctcacgccgttcgcacgcatcggtggcgacaagtccggttccaaggggtcgggccgtcgctccaaggactccgatctgtccgacgacgaggagcttgagaagattcagctcgagcagggcaaggccgccatcgaccgactggtggagtccaacgacttcgatccggaagtctccgaaatgttgcgcaacgtgctcaccctgtctgatacgttgactcgcgagatcatggtgccgcgcaccgatatgatctgcatggagcgcgactccacactgtcttccgcgctgaaactgttctcccgctccggtttctcccgcgtgccggtgatcggtgaggatgtggatgacctgatcggcgtggcctatttgaaggacgccgtgcgcgccaccgccttcaacccggcggccatggaacgcacggtcgaatccatcgtccggcagccgctgcttgttcccgaatccaagccggtggacgacctgttccatgagatgcagcgttcccgccaacatgtggccgtggtggtcgatgagtatggcggcatcgccggcatggtgactatcgaggatgccatcgaacagatcgtcggcgagctggaagacgagcacgaccgcacccagcgtaccgagccggagaaaatcggcgacaacaagtggaagatgcccgcccgtacgccgattgccgatctggaggagatcttcgagatcgacattgatgaggacgatgtcgataccgtgtacggcctgctgaccaagattctgggccgcgtgccgattgtcggtgcttcggccgtgacgcgcggtctgcgactgaccgccgtggactccgccggacgccgcaagaaggtgtccaccatcgtcgtcgaaccggcgcacgtcgagggcggcgaggaaaatagcaggacccatgaggaaactgacggcgagcccgtcgaaggcgatgataccgccagcaaggagtgatatgaccgaccagaacaacagcacgaacgacgtcgatgacattgacgtcaccgatgcttccgatgttgccggcgttgccgaagtcgacgcgaccggtgaaacggagaatgtgaccaagcaggacgtgccgtatcgctccggattcgtggccgtggtgggccgcccgaacgtcggcaaatccacgttgatcaacgcgttgatcggcaagcagatcgccatcgcatcctctcgcccggaaaccacccgtaaggcgattcgcggcatcctgaccgccgaccacgcgcagctcgtgctcgtggacacgcccggtatccaccgcccgcgtacgttgcttggccagcgtctgaacgacgtggtcgacgaatccttggccgatgtggacgtggtggccttcctgctgcccgccgaccaggaaatcggccccggcgacaagcgtattctttcccgactgcgtaccgacttcgccaccaagcgtgaggacggtacgttcaagtggcgcatcccgctgattgccatcgtcaccaagatcgacgagcttggccgtcagcaactcatcaacaagctcatcgaaatcaacgatttcgccgatttctcggacatcgtgccggtgagcgccctgaagcacgacaatctggctgaagtgaagaacgtgctcattgagcacacgcccgagggcccgcagatgtacccggacgatcagatcagcgaggagcgtccggaagacaccatcgccgaactcgtgcgcggtgcgttccttgagaccctggacgacgagctgccgcattcgctggccgtggtggtcgattccatcgactatccggaagacaacgagaccggtcagggctatgacggcaaggcgcaggtcaacgtgtccatttacgtggagcgtgactcacagaagccgatcatcatcggcaagggcgcctcgaacctcacctacgtcaagaagaagctacgcaccccggtcaaccgcatcgtcggccaaaaagccaagctcgacctccacgtcaaggtagccaaaggctggcagtccgaccccaagcaactagaacgcctcggcttctaggaatcggccttcggccggttataacaaagggagattccaatggaatctcccttttgctgcactcgagtcctccttacttcttcttggtgtacatctgggtgttgaggagggtggagtagcgcttgatgaccttggggcgaatcaccttcatggaggcggtcatcagaccgttctcctgagtgaactcctcgggcaggatgatgaacttgcgtacggattcggcgcgggagactccctcgttggcccgatcgacccactgctgcacttcggcgcgcacggcggcgttccttgccgcgtcctcgagggacatgttctcgtcaagccccttggcggcgagccacgggcgcaacgacttctcgtccaacgtcaccagggcggagataaacgggcgtttgtcgcccagcaccaacgcctgggagacgatctcgcaacgctggatgacctcctcgatcgggccgggggagacgttcttgccgcctgcagtgataatcagatccttcttgcgaccggtgatgtacaggaagccatcgttgtcgatacggcccaagtcgccggtggcataccagccatcttcggtgaacgacagctcagtggcctcgtcgttcttgtgatagcgcgggaacacggcacgacccttgacctgaatttcgccgtcctcggcgatgcgcagggagaatccggggaatgcgatgcccacggaaccagcgtggaacggcgtacccagcgggttgaacgcgcacggtgcggtggtctcggttagaccatagccctcgtatacaggcacacccgcgccacggaagaaagccagcagttccgggtcaagcggggcaccgccggccacaatccacttggcgcgaccgccgagcacttcgcgcagcgaagagtagacaatcggatcgaaggcagcgcggcgagtgcgggtcagtgcacctgccttgccgttggcggagacttccttcatatagttctgcgcagccaccacggcggaggcgaacaccacgcccttggggccgtggccggccttctgggacgcggcgttgtacaccttctccagcacgcgcggcaccacgatcatgagagtgggcttggccacctgcagatcgctgatcagcgtcttgatgccggtggcgatgtagatgcggacgttcgaggagacgacgatgtagttgatggcgcgggcgaaggaatgggcctgcggcaggaacagcaggatggtgttcctcttgtcgtgcagcagatcgggcatgtaggccggcagattcagcgcggtctggcagtagtgctcatgggtcatttccacgcccttcggcgcggccgtggaaccggaggtgtacacgatggagcacaggtcggtcttcttgaccgagtcgatgcgctcgtccagctcttcgtccgagatgccggcgccataggccttgatctcgtccaagccaccggtctcgatggtgatgatgtgctccaaagacgggcattcctcgacggatccatccgccttctcgcgcatgtccgtatcctgcacgatcagcagtcgggcatcggagttgttgacgatattgcgaatctgctcggcggaatcggtgtcgtagatggtggcgagcacgccgccgcacgccatgatcgccgcgtcggtcaggtcccagtcgtaggaagttcggcacatgaatgccacggcatcgcccttcttcaggccataatgaatcaggcccttggccacggcacgcacgtcagccaggaactcgttggcggtgacggtcacccaatcgttgccggacttgtaggtgtacagcggctcatcgcccatacgttcggcgcggtccgcatacaggtcgtagatggacgtaccttcgtccagcggcggattgccttcggtggaggtggtgagcaggccggtggcggggtcgatgtcggtgacggtcaggtggccgtcgtcccaatcgtcgctgtgaggcaaagcgatattggtctcgaccggcacgtcggcattggacaggtaatcgggctcgtccggggtgtcgtcgtggaccgggtggacgaagtcggatcccaacctgagcgccttacgggtgagattgatagtgtgctgcgtgaaggaattgataaccgacaagtcttgctcctgtaaacctttcagtgtcgtccagccatgaggcgaacgcttctcaaagttcaaattgtaatcgcccaaaccgaactcgtcaccttacgcaaccgtaggattctggcgggttaggggagtgcgtggcaaaatattgcacaggtcccgatattgttgagtaaccgtgagctacgaaacggtgattgtcgataattactgagcggttggttgctgatcgatgccgggtgattgttggacgacttccgagcaattcatccgcaatgcacatggatacattcgtatttctcactaatttcgggttcgtttctgtttcgattggcggaatctcaagtcatggtctttaccttccgactacactttctatgcggataaccatgtccattttgaagtagaacaagaaagggctctcatggcgcaaaacccagaagccaccgtggtgttcggcgttttgaacgaaacgtccgaaacggaatcccgcgtcgcgctgacgccggatatcgtcacccggctgaagaggagcggagtctcctcgattattgaggccggtgccggcattgccgccgaatacaccgatgaggattacgaaaaggccggtgcgaaggtgaccagccgcgacgaggtgctcgccgaagccgacgcgctcggttttgtggaccgaccgtccgccgagaccgtggccaagctcagggccggccagtgggtcattggcatgctcggttccttcaccgatgccgattacgtggccgcgctcgagaaggccggtctggtgggcatcgccatcgaaaagctaccccgtaagctttccagcgcccagtccatggatgagatgacctctcagaactccgtgatgggctacaaggcagccatcaccgccgccgatgcttacggctccttcctgccgatgatgaccaccgccgccggcacgattcgcccggccaaggcgctggtgctcggtgccggcatcgccggcctgcaggccattggtacgctgaagcgtctaggcgcggtcgtcaccgcgtacgacgtgcgtcccgcctcccagggcgaggtcgagtccctcggcgcgaagttccttgatctgggacttgacttctccaagggccagggcgagggcggttatgcccgcgcgttgagcgccgaagagcaggctcagcagcaggctgccgtcgatgagaaggccgccggctttgacatcatcatcaccaccgccaaggtcccgggccgtaagcccccggtgctgctcaccgcagccggcgtcaagggtctcaagcgtggtgccgtgatcgtggactgcgcagcatccgacctcggcggcaacgtcgagggctccgccgtcggcgagcaggtcaccgagggcggtgtcaagctgattggcgttccctacctggcctccggcgtcgccaccaccgcatccaacctgctctcgcgcaatgtggccgacatcctcgtgcacttcgtgcgtgacggcaagctcggccaggatctcaccgaagaactcgacgacgcgctggtggttgccggccgcgccgccgccccggcagctgctgccgatgccgagaagtccgagaagtaaggaagaaggaataccatgcctactctcgtcgtttccattaccctgttcgtcctcgcgctgctcatcggtatcgaggtcatcggcaaggtgcccgccaccctgcacacgccgcttatgtccggcgcgaactccatccacggcatcgtcatcgtcggcgttgtgatcgtggcagccgaagccaatagcccactggcctacgtgttcatcttcctggccgccgtgctgggcaccatgaacgtcgttggtggctacgtggtcaccgaccgcatgcttgagatgttcaagtccagcaagaacgagaagaagggggagtcgaagtaatgacctccgcaaccgttggcgccatcgacatcgtcgcatggttcgtctacctgttctccgccgtcctgttcgtggtcggcctgcacttcatgaactctccgaagaccgcccgcaagggtaaccagatctccgcgttcggcatggtcgtggccgtgctcatggcgttcatcgtgcttttcgccaagggcttcgtgaacattgtcgccgtggtggtgctggtcgtcggcatcctgatcggtgccgtggccggtgtcgtctccgccaagaaggtgaagatgaccgacatgccgcagctggtttccgtgttcaacaccgtgggtggtggcgctgccgcactcgtggccctgaacgacatcctgaccaaggaaggcaccccggacatcgtggtgctcatcaccgctggtctcggtattctcattggttctgtgaccttcaccggctcgctcatcgccgccggcaagctgcagggcatcaagtgggtcaagaagctgaacctgccgggcaagggcgtatggaacattctgttcgccgtgctgtctgtcgcctcgctggtcatgctgtgcgtccagcccgaacagcgtctgctgtggtcgattctgaccaccgtgttcgccctgtgctacggcttggtcttcgtgattccaatcggcggcgccgatatgcccgtcgtcatctctgtgctcaacgcctgcaccggtacggctgtggctatgtccggtctggcgattgacaacgttgccctgatcgtggccggcgcactcgtcggttccgcaggtgtgaccctgtccatcctcatggctcaggccatgaaccgtccgctgctctccgtcttggccggtggcttcggcggtggtgctgacgccgccgctgctggcgacggtctggaaggcaccatgaaggagaccacgccggacgatctggccgttcagctcgtctacgcgcagaaggtcatcttcgtgcccggcttcggtctggctcaggctcaggcccagcgcgagctcgctgaccttggcgaactgctcaagggccatggcgtggaagtctcctacgccattcacccggtcgcaggccgtatgcctggtcacatgaacgtgctgctggccgaggccaacgtgccctacgaggagctcgtggatctcgatgagatcaacccgcagttcccgcaggccaacgtggctctggtcgtcggcgccaacgatgtgaccaacccggctgctcgccgtcctggcaccccggtttccggtatgccgattctcgacgtcgacaagtcccagaacgtcgtggtcatgaagcgtggccgcggcatgggctatgccggtatccagaacgagctctacttcgaggacaacacccagatgctgttcggtgacgcgaagaagagtctgcagtccgtcatcgccgccgtcaaggaactgctcgcgtaaccattcttggctcccctcacagaggggagccaagctctatatctactacagcccaaacacccgcttaacaaagctgttaacgcgacgccaatagcggtccggatcggtgctggcgctcatcgtgtggtcggcgccgggaatcagcagcttctcgcggtcgatgctggcgcaggcgttgtaattgatgtccagatacttcggattgacaaaagtatccgctccgccgtgaatgaacatcatcggaatagtcgcgtgccgtaatgccttcacacaggaggcgtcctcaaaccggtatccagccttgcgtttagacacatgactggccactttgaccagcagcacggccaacgagtgcggcaaatggaacatcgcctcggcattatccgtaaactgtgagaccacggaactgtatccgcaatcggaaatcgcagcgacgacgttgcgggggattcgcgcatcgccggccgccatcatcaccgtggcggcgcccatcgaattgccatgcaacagaatgcgtgcatccggatcagctgcggtgatcagcgaaacccagcccaacagatcgtcgctttccagcaatcccatacccacgtaacgcccttcgctcaactcatgggcgcgctgcgcgggtagcaggaccgtaaaaccgagttgcgaatagcgatgcgcccatttggccatttccgcgggctctccggtatagccatggcagcagatcgcgtatagatgcggctgtgggtcggaacaatccgggtccaacagccagccgtggagtttcaatccatcatggctgcgcagcgtgaccgattgcttggcctcctcgaaccaccggccggcctcaagctgctcggacatgtcgaattcgatgcctttcggcgtctcctcgtgcggcatgttgaacatcgaacgtttggccttggtgtccagcgcgaacatgaacatgacgttggcggccgcggctgtgacgccggctcctgtggcggctatcgcggcaagtgccgcagccatgcccctgacaacgcgagtgtgtgcggcgatgacgtcatggccatcctcattgatgacgtcgtccgaacgagtcatatcaacctcccgatatggtactcaccatcgtacgttattatcgaaatcatccccaacttcgtgaaagaccgtacactgagtgtcgctgagcgtacgtttttcacgaaatggcgaacgatttcgtgaaaaccgtatgatgagaacgggtaagcgtacgttcttcacaaagttagggattatttcgcggaaaccgtacgttgacgtagctgggacggcctatatgcagtgtcatcgaagcatcattacgcaaagtccggggttggcgtatacttgacaattgttgctttggcgagggaagtgtgcatgctgacacatgacacagattccgttatcgactcggcgtatttcactccttgtagggtgtctttcggcgcgtcgtggcgtctgagcgagacagtacgaaacgaagatacaaggagtatccattatggctaccaccattaagcttgagggcgaggcccgttccgagttcggcaagggcgttgctcgtcgtctgcgcgttgccaacaagattccggccaccatctacgccggcggcgaagagcccgccttcgtgaccttgccgatgcgcgagaccaccctggccctgcgtcacaccaacgccctgttcaccatcgccttcgacggcaacaccaagatggccgtcgtcaaggacgtgcagaagaacccggtcaagcgcatcatcgagcacatcgacttcctcgaggtcaaggccggcgagaagatcgacgtcgaggtgccggtgttcgtggaaggcaccccgaagggtgctgccgtggcgttcgtcgacattcaggagctcaaggtccgcgccgacgtcaccaacctgcccgagaagatcgtggtcagcgtcgaaggcctgaccgacggcaccaaggtgttcgccaaggatgtcgtcctgcctgagggcgtcgagctggacgtcgaggatccggaagagtccgtcgtcaccgtcgaggtgccggaggatgccaccgagtccaccaccgctccggaagctgctgccgccccggctgacgccgccgctgctccggctgccgacgccaagtgagtcggtcgcttcgatagcgaacaattcagaacataactgaaacgtggaagcccgcagccgttgagaacggtgtgggcttcttcgttttttcaccatgtgaactctgccacacgagtaacacatgggtgtgcaaaagtatgcaacagagttcgcgccacaagcgcacagcacacaccccatatggtggctttcgggccgccaaagtcaagaagaagtagctagtgatgactgaaaacacgcaccacgatccggcagcactcgacaagctcaccgaaccgtttaccgtactgccgaacgacaaccccgcatccgatgagaagcgccagtccctcatcgacaagccggctttcggccaggtgttctccgacaacatgacccacatgacttggaccaagggcgaaggctggtccgaccgccgcgtcgaaccgtacgcaccgctcaagatggacccgggtgcttccgtgctgcactacgcacaggagtgcttcgagggcctcaaggcttaccgccatgccgacggctccacctggctgttccgcccggatgcgaacgccgagcgtttccagaactccgccaagcgtctgtacctgcctgagctgccgattgacgacttcctcggttccgtggccgcgctggtcaagcgcgacgccaactgggtgccgtcccgccgcgagtacacgctgtacatgcgtccgttcatgttcgcttccgagccgttcctcggcgtgcgcgccccgcaggaggtcgactactgcgtgatcgcctctccgtccggcccgtacttcccgggcggcgtcaagccggtgagcatctgggttgaagacaagtggttccgcaccggccctggcggcactggtttcgccaagtgcggcggcaactacgccgcctccctgctcggcgagtacaagggtgttgagaatggctgcgagcaggtgtgctttgtggacgccgccaccaagacctaccttgaagagctcggtggcatgaacatgatggccgtgcacaaggatggccacgtggagaccccgtccctgaccggcaacattctgccgggcgtgacccgtcgctctctgattcagctgctgcaggacaagggccacgacgtggtcgagaccatgatcgccctcgaccagctgctcgaggacatcaagtccggtgaagtcaccgaggtgttcgcttgcggtaccgccgccatcatcaccccgatcggtcgcttcaagtccgagaagttcgacgtcaccgtcgccgacggcggctccggcaagctcacctgcgaactgcgcgacgagctgctcggcatccagctcggcgaagtcgaggacccgcacaactggatgtggaaggtgtgctgaactagcaccttttgtttccgactaagaccccttagaatgtcaacaattccaaggggtcttggcgtattggaaatgttcttggctagagaggtacagatggatttagcaacatttcgca

SEQ ID NO: 1315 - DNA, 33176 bp, Unknown
  R157_18m  MAG No. k141_11286
acgcttccagttgagcatgtcggtggaggagacgtgtccccagtgcatcggaccccactgggtgccgtacgggtgcagctggtagaacacgtgccagcggcccttatagaagcacaggccgttcggatcgttgatccaaccgccgttggatgcgatgtggaacttcgggtaccagcggttgttgcgcttggcggccatctcggccacgccggcttcggcttttgccagttcagcagcgtggtcgcggatgggggtgagaacaggggtttcgggagtgaagtcagtcatggtgtgtcctttcaggccttggcagcttccatctgacgcagctgcttgtcggtgtagaaggtgttggtcaggagcatgaagacgatgagcacccacagggtcggcatcttgagcacgccgaccatctccttgaaggaggggttggtcttctcggcgttcggatcggcttccttcttgagctcttccttctgctcggccggaacccagaacaggtagatgagcagcatgccgacgccgcaggcggtgccgatccagaagttgatcatcgggctgatgttgaacaggaagtcggcgcacagggccacgatggcgtagctgaaggagccccaggcgcgggactggccgtattcgaagttgaacttacgggagtagcgttcggtgacagcctcggacagggagcaggctgccatgaagccggcggacaggacgatggagccaatcagtgcaccagcccagcgggtgacgcctccggcgttgatcatcggggcgtagacgaactggacaaaggggttgcgggccgcgccgaacctatagggccatccgcttccacttgcggatcttcgtcctgaacgaaccgaacggggcgacggtgttcacatgaatgaacctgtacacttcccataccgccgttttggtggcgtcgtcggcccattgcctcatatgcggcttgaacagctcgtcctcgctcatcgcatcgatcatcatatatatggcgtcgacgttgtcggtcaacatgccctccagctcccgcagcgaaaggtgggcgtaggtgtcgttgaaccaccggtacagctttccgagctggttccacttgaactcatccgacggtgttcgcaccggaaggcccctccgctcgcgatcctcccactgcagcagcagggtggtccaaccgacctgataggcgaggttttccgccggggtcctctcgacctcgtcgatgcgcttgtctttcagggcttccggaatatcgtcgaactccgcaatgtatttgcggaacgccgcactgatctcctctttgagctcctgcgcgttctcgtatgttctcaccatgcacctcccggtcgccgtgcgtcgctgtgacgatgcgggcatcgtatcagtccggcggatgtcgtgacgtcatcggcgtgtcgtacccgttcgagacgcaaaaaggcctccgtgctggacggaggccttgagaaatcgtgtgggcctcggttacttcaccgaggccttttcgatcagcgtgcagtggatcttcgccggaatcggcgcgtcgatcggcggcaggggagcggtggtcgctggccgtgagacgtcgtccatcgagcgtccttcgataattgacaccagcttggccacggcccagtagcccatctcgaaatgcggcagttccacagtggtgagcatcggttccaacgtttcggcgaacacgcgatggttgtccacgccgatcacggagatgtccttgccgaccgtgagtcctcggcgtgcggcgcattcgtacacataccaggcgcgggcatcgttgaagcagaagaatccgtccggatgctcggcgtcgaacaaatcgctgactgcggtcagtgccggcccgttattgagcacattgacgaccagacgatcgtcatagtcgaggcaggcgtccctgagcgccgcctgatagccttccaaacgaccatcctgcgcaatcatcggttccgagcaacccacataggcgatacgtgcgcatccggccttaaccaatctggtggtggcgtcgtagccgatttggaactcgtccggttccacgctcgggattttgccaagcgagtcggtggcatccaccaacaccagtggcgtcttggccagcgaagaaggcgcatgggtgatgcggttcgacatcttggcgtacaggaaaccgtcggtgccgtatcgcttgagtgcggcgatttcctcgctctcgctgttctcaccgtcggtgctcacggtgatgagcatatagccgaactggcttgcggcggtctgcgcgcccagaatcataccgccggcgtacggggtggtggccacctcctcactgatgaaaccgaggatgtgcgtcttgcctgtacgcagcgaactggccagcggattcgaccggtagccgagcttggtggcgatggcgcgcacattgtccgcaatttcggactttacgcgcccctcgtcgcgtccgttgagcaccagtgacaccgtagagacggaaacccccgccttgttcgcgatttccttcatcgtagccatgcgtcaaacgatacaccctaattgacggactgtcgggaaagtatcagtgttctccaccgactccgccgaggttgcgcaccgcaccgatgaataatggtatgccgtccggggtgacgtacgaatacaggaatgggcgatccaccgtgaactcgatgttgtccaccggcgcgctagtgaagtctgcgccggctttggtgaaggacatggccttggcgccggcctcgttcacctcgatgcgcgtgccttgcagaatcgaaccgatatacagattctcgccgtgcgaatcggtgtcgaccatcttggtgaagtcggcgtcgcctgcactgaacgcatcggtcacccccagtttttcgaatgccttgatggtggcttccgagtcgaacatgctgtcgacggtgaatcgcggcagcgagacgttcaccgtggccgagttgacggagacgccccatccgggcagactgtccgcggtgcaacccattgcgtcctcgccaggggatgccgacgaacacgtgccgaacgcccatccgagtttctcggcattgccggccagctcgtcgaaatgccctttggccggcagcacgatggccagattgccgctgttgtcgaatggaatctccacccgctgccaagtgttgtactcatcatggctgtaagtcatttggctgaaggtccggtgcatcatcggcacctgagcatctccggcttcgccgtggaaggtgccgtcgccggtggactgctcttcgaacggatccttccagcggccatccgcatagacggtgttgatgatggacaggacttcacggtcacgcagcgtgatcttcggcttgagcgaaccattcgtatgcttggcaatccaatcggacatcttggcggcggcctgatcgtcgaacggtagcgaggtgacttcggcctcgaatatcttcttgacggtggattggtaatcgctggcaagagagtagtcgttatcgatccacagcgagttcgcggcgctcatctcggatttcgcccccgaatattgcccgttcatcgaactcagcagcgattggtagtcgctgtcggccagcgaaccggagtccagcagctcattcagttgcgagcgggtcgtgcccttggcgccctgcgcggcgatggccaacgccatccacatcgaagcaggggagtagttcacattaccggtgtctcggtcgccggctcccatcgccaggaattccggtgcggtgcggtaggcgaaggctgcggtgctgtcgactaccggctgtgtggcaggcgtggccttcggcttgaacatattgcgaaccagtgcgctgccatcgccggccgtccaccatacgccgccggcgacggcaaggacaagcactactgtcacgatggcggcgatacaagcgttacggcgtttgcgttgtttgcgcaaccggtactgttccatcagtttctcgctcatggtcagcccctttgcttggatcggctcgtgcatcattgcacgaagcccctgattccagtatattttggtctctcttattttgtgcgacgagccacaatccaccgcacggcccacaccacgccgaatccgaggaaactcgccacggcgaacacgatgacgaaatgcaagacctgatccatcgagccccaggagaggtatcggtcgccgatcagcgtgcaggtacttcctatcgggcacgtgtcttcatacaccgtgatgagcgccatgagcatcggcgcaggtaccagtgtgcacgccaacgggaacagcaggcttttccacggatacgtcagtgaggccgggcgtagcgcgtagatgccgttgatgaccagcaaggcgggcggaatcacaaaattgattagcaacgcggcggccatcgcagccatgccgccccgtaaggtcagcgccaatagcaagccgtacatgattgccgtcgccagccagcagccgaagcgaatcgcatcctgacgaatccgtgtgagcagtcgtccgctcgccgtctgcggattcggatccacaaacaattcgcgcagaccgtagcgtccgattgcatagcagatgaacgcaacggccgtataacagatcaacagcatggccgagccgatcaacgaatgaaccaatagctgatggccgctttcagcgtgcattagcttccaccactgagcccaggaacggtatgggaaccccggccgtaagcgaagattggtacagccgaatgccagcggtccgatgattgcgctcgccaatgggaaagacagactgccggatcgtatcgaaccgagtatcaggttggtgattcccaacaccaatggccagtgcagaaccataccggggaaccatacgaacaggtttttggcagccctgtcaaggacctcgtcgggcatgagatacattgatgagctccactgcagcagcaacaacaccgctatcagtacaaccatgccaatccaatgcgcgcggttccacgcgaatattcgttgcgtcccgcgctcggcggcggcattgcgcatatcgctcctgttgagcttgctgagtgcttgtgcacggttcattgcagtcctcctttaccgccttgtcaaggattgatgatgattccatcgtaaatcgcgcaggaaatgtggaatgatagttgtcatagtgaccatgacatgtcaggacggagcagttcggcgtcgggcacactgaaggggtgaatgtaatgggagaagcgcgcaaccgcaacatacgcatcggcattgtggacaatgacccgtatgcgctgaaagtgttcggcgcgctaatcgagcgcatgtccagcgattttgccgtgatatggacctgcgatttgggtgccgtggccatcagccgatgcctgagccccaccaagcggcctgacgtgctggttacggatatgtctatgggcgacgtgcccggtaccgaagtctgtcgtgcgattcgtaccaaaacacccgaggttgggctggtgggtgtcacctcatacgcgctcgcgtcatttcacgacgaggcggctcgctgcggggcgcaggccttggttggtaaaaccgatttgaacggcattgcgctcgctattcgcaatgcagcccaaggattgtcgaccaatgagctggtactgggagatgaggggagcggtaattcgctgtccttcatggatgccgcaaccgcctacgcggtgctcgaagatacgtcatacgtgcaccgtggcgcgctttccggcaaagaacgcgacaccctgcgtatgtatgcggatgggtcgaccaccaaggaaatcgccgagcgattgggcatcagtgtggccactgtggcgacttttgaacgccgcgcactcgccaaactcggcgctcgcagtcgcgctcatgccatatcaatctgcgtgaaacggcatgagatttaagagttggcatgggcggtatgtgcaacggcatggatggtaggaaaggaactgctatgaaagcgttacgacaccgattggccgagctggatagcggtgttcgcaatgcatggctgttgattgccatactggttgttgccttgatatgcacgatggaaaccatggcgggcttggctgctgacagtgtctcggcggcggactgccttgcggagttcatattcgttgccattgtggggtggatggcgtttcgcccggtcaccggatgcgtggcggtaacggtggcttggatagtgttgtgcatgagtccgatctggatgccgtcgggtgcaatgctcgccgtgttattggcggtgggtattgccggatacgccgataagcgattggcgctggcggttgccggcattgccgttgtggtgtggatgttgtcgcgtggtggcgtggccattccttggcttgatggcggctcagacacgatgagcggttctgcggatggcgcggcgagtagtagtgccctagacggtagtgttgctgatggtggcgctgctgatggtggctcttcatccagtgggtctgacagcgcagggcagtcgggaagcgacttcaccggaagcgcctatgaatcgagcggttcttctgccgagcatcgcactgggcaagtgattcttggtgcgattgccctctatggtgtgatgccagtggccgtgttgtttattggcttcatgcttggtggcatggcggcgcgatggaatcacgaacgcagcttggttcgagcggagttggctcaccgccgtcagcaggaacgcacagctcaggacattcacgattacgtatccaatgatttggcatacctgattttgcgattcgacaaggatattgccgatggcaagaccccttctgaagaagaattacgcgaactgcgtagcgtggctatgggcgcattggatcgcacgcatcaggtcattgatgttattgaaggcaggggagaagcggcgcacagtgcagtgactccgcatgattcgaccgttgatgccgcttctggcattgcatgtggcatcacagacgctgattgcccgctagccgagcaaattcgtgatgttgcgagcaatggtgaccgccgattatcagagcttggctttgaaggtcagacgattatttccggtgctcatggcgcagccggtcggagtggcctgatcgccgggctgctggaggaactgtacggcaacatcgccaaacatgccgacccggaagcgggctatgtaatgacgattggcatcggactggacaccgtccgcatcgcctgcatcgacacggcccgcacgtcatcggattcggatgcggatggcagtgcggacctatccaccggtaccggtctcaaccgttaccgacaattactagaacaacaaaacggcgccctgcatatcaccacgcaagacgccgaatggacattatcagcagttattccactgtgaggaaaccgatcacccaaccgacttctgcgcagtctccgcgccaaagaagccgacaatcagcatcgatgcaatagcaattgcgctgatggccacaaagatggacgtggcaccaagcgaggtaagcatccaacccaccaccataggcatcaacacattgagcagcttggccacggcgttcgcgaagccgacgcaacggaagcgaaccttggtggcgaacagttccggagcgtacacagccaccacggaagccataagcacgtacaggcacatcatgagcaggaagccaacgataattgcgctcacggtagaggtctggaaggcatacattaaaccgaacacgccagtgaataggaaggccggcacaatcgtgcgcttgcggccgatgcggtcgataagcagagagccaatcaggcagccgaccggggcaccgagcatcatcgccgtggaggtgagcagcgagctggacaggttaataccacgcttgaccagaatcgtcggaacccaagaagtgaaggcgtaggagcacacgttcgtggcggccacagcaaccacagctacaagcaggcagatgccgagcgaacggccgccggcgttgcgggtgtcgctggtgtcgctggtgtcggccttggcggctgcgtcgatcagttcggagccgttggcctcaagctgcttgacgatggcgtcggcctcatcgtaacggccgtgcacggcgagccaacgcggggattcggggatgtcgcggcgcagccaccagatgatggcggcccccagaccgatggccacgaacagcggacgccaggaccagcgggggatgatccatgcacacagcagcatagcgatcggcacaccgcagttggccacgagcgagacaatcgcgcaccagtggccacggcggttcatcggtgcgaactcgttgaccatggcgaagccggtgacgatttcagcgccgaggcccaggccggcacccagacggcacagggacagcacggccatgttcggggcgaatgcgccgaggaaggtgaagccgccaaacagcagcaggttgatttggtaagccacgcggcggcccttcaggtcaccgacgaagccggccagcagcgaaccgaccagcagacccaggaagcctgcggacataaaggtggaattttgcgcaacggtggaccagtgtgtggccaacgcgctggaggcaacggcgctgccaatatatacgtcgatgctgtccatcagcatgccagcggcgaccagcgccacgatgcgatggaacatcggggtttcatgtgcgcgatccacgcgcgagataatatcctgaaccttggcttgatccgtcacggtggtacgtgcttgtgcgctttccatagccgcgggattgccggaaatctgctgttcagcagcagtcatatttgagccctcttcttgcaaacctgcccgcgtgcaactgctcaatgatgttgcggcgagcgaactcttgattggactgcgtgttccgttcgccctcccattgtgtgggatgaacgacgtttgcagtccaagtcttgaattccacgtagcgagccaatcgttgtgagatagctcactacatggggcttaactataggttcgatcttgtggcacgccgcgttgcggtcacattatgaacgataacagagtttgtaacgctcctatatatgccccacttacgctcttaccccgttgaaagaaggcagaaccgtgattcccatggggcggtaaaacactcatggggcggtatttggcccatggggcggttagcggattttgcctttccgcagaatagagccgttttcgcctaccgccccatgagggttttaccgccccatgagatatttaccgccctatgggtgagttaccgccccatgaaacgtgtaataacaaagcatgcccttgctggtggaagcgatgctttgctatttcgcctgcttgtcggcgaggatctcatctaccagcttgggcttttcggtcagctggccggtgaagccgggacggatatccatgtgcagcaccagagaagtgcggtagccctgctcggcgagcttcttggcggcctcaccggccaccttgagcacgtcgtccagattgccttccacgttggtgaacagggcgttggtttcctgcggcaggccggattcgcgaatcacttcgacggcctgagccacgtatggtgaaacctcggagcccacgccattggccgacacctggatggctgccacggtgttgaggtacggtttgccggtttccgggtcgatcggcacttcctgagtaacggcattacggtcaagaaccatgattctcctttttcagtagtgttaagctcccctggcaaggggagcttaacagccacacttatgtcagcgatacttccagaaatgatccatcgggccggagccgtggccgagattcagctgggtcttcagcgcaccggtcagatacttcttcgcatgcttgatggctttggacagcgtgtcgccaagcgccagatacgaggcgatggcggagctcagcgtgcatccggtgccgtgcgtgttcggattcttgatacgcgcgccatcaaaccaggtcacggttccatccgtctcggcaagcacatcgttggcatcctcggtgccatgaccacccttgaccagcgcggcacagccgtaacgctccacgatgcggtgggcggcggcctccatatcctcctgatcgcgaatcagcgtatcggtcagtacttcggcctcgggaatgttcggagtcacgaccgtagccatcgggaacagcttgccggtcaaggccgcaatggcatcgtcactgatgagcttggcaccggaagtggccaccataaccgggtcgagcacgatgttcgtggcgtgatggaaggtgagtcgttcagcaatgacgtcgatgatgtcagtggcagacaccatgccgattttcaccgcgaccggcggaatatcctcaaacaccatgttgatctggtcggcgagaatgtccggtttggtgtcctgaatggaacgcacgccggtggtgttctgtgcggtgagcgcggtgatggcgctcatgccgaacacgccgcaagccagcatggtcttcagatcggcctgcatgccggcaccgccggacgagtcggagccggagatcgcgagaacagcgggaagtgtagatgttgcaatctgtgccatagtgttcattctaagtggggcccatgatgtttttcggagcggttttccttgatgttttgtcgctcctgtggtgagatggggaggatttgctgattgcgattgattcatgaaatgttcgggaggggacatggctgataacgatgtactgcgccgtgacggcgtcttggtacgcatcaccggttttgacgatgaacgcaccgcatattttggcgtaatgcctaatgggcacaccacacagctcacatttccgcgtcaggaggtgttcgatgtgggcgacgtgttgctcgtcggcacggatttctatcgtaaagtgccgcatgatgtgtggccgttgaagccccgtgtgggcatcgtgcgccgtgcgctcaacgaaggcgtggtcctggagacttccgacggcctcgaactgcttgaaggcgattacccgaattcgatcatgcccggcaacaccgtgcagttcaccgacctgttcggcatcgaacgagtgctgtggcccacggccatccgcccaggcgaatccgatcacgatgacgacatcaagcagtaccgcatcacgccgggcagcgatccgtcgcttaccttcgattcgttcggcggttatgagcaggtgatcacgcgcgccaaggagcttatcgaaacgcagctgggcaacagtgcgcagatgcgtgcgatcggtgccaagcccatcaagggcgtgatcttcaccggtgctccgggcaccggcaaaacgcatctggcccgcatcatcgccaatgtggcggacgcgcagttctatctggtgtccggcccgaccatcgtgagcaagtatgtgggcgatagtgaggaaacgctgcgcatgattttcgccgccgcgcaggcggacaagcgcgccatcatcttctttgatgagatcgattcgattgcgtcctcgcgcgagaacgataccaatggcgtcggcaagcgcttggtggcgcagttgctgacgttgatggatggtttcgagtccaagggcaatgttgtggtggtcgctgcgaccaatcgtattgaggacgtggatcccgctttgttgcgtccgggccgtttcgactggcagattcctttcccgatgccgtctgagcgcgaccgtttgggcattctgcaggtgcaggcccgttcgttgtcaatcgagggcgaactgccgttggtggatatcgcacagcggaccgaaggctggagtggcgccgaagtgtgcgccatctggaccgaggccgctctggtggccgccaaggaccgccgcggcgcgatccgtgctgccgacctcgtcaccgccttcgagcgagtcgagcatcgtcccgaattaagacaccaccgggcataataattggctcccctcagagaggggagccagagaggtttactcctgggcggtggagtagagcttgccgccttgggcggtgtacttttcgctcatcgcatccatgccggcgaggatttcttcggggctgagcacgttggcggacaccacgtcgttatcgacattggccttggccttagccagtgcctcggagtcgatgccagcagcagcctccttcacgatttgctgctgagcggcctcgccaccgaatgccttgcggatgttctgggagatggccatcgagcagaacttcgggccgcacatcgagcagaagtgcgccatcttggccggctcggcgggcagggtatcatcgtggaaggcgatggcggtgtccggatcgtaggacagattgaactggtcgagccaacggaactcgaagcgagccttggaaatcgcattgtcacgatccatcgcgtgcgggtggtgcttggcgatgtctgcggcgtggcaggcgatcttgtaggcgatcacgccctgcttcacatcatccttgttcggcaggccgaggtgttccttcggggtcacgtagcacagcatagcggtgccgtaacgaccgatctcggtggcgccgatggcggaggtgatgtggtcgtaacccggagcggtatcggtggtcagcggtccgagggtgtagaacggggcgcccttgcacacggccttctccagctcgatgttcatacgcacggtgtcgaacggcacgtggcccgggccctcgatcatcacctgcacgtccttggcccaggcgcgctcggtcagctcgcccagagtcatgagctcggaaagctgcgcggcgtcgttcgcgtcggccagggagccggggcgcaggccatcgcccagagagaacgccacgtcgtacttggcgaagatgtcgcacagctcgtcgaagtgcgtgtacaggaagctctcctggtggtggcgcaggcaccagtcggccatgatggagccaccgcgggagacgatgccggtcacgcggttggcggtcagcggcacgtaacgcagcagcacaccggcgtggatggtcatgtaatccacaccctgctcgcactgttcgatcacggtgtcgcggaacagctcccagctcagcttggaggcatcatcctcgaccttttcgagggcctggtacatcggcacggtgccgatcggcacgggggagttgcgaagaatccactcacgggtggtgtggatgtcgttaccggtggacaggtccatcacggtatcggcgccccacttggtggcccacgtcagcttctccacttcctcgtcgatggaggaggtgacggccgagttgcccatgttggcgttgagcttggtcaggaaggcggatccgataatcatcggctcggcctcggggtggttgatgttgcagggcatcaccgcgcggccggcggccagctcggagcgcacgagctccacatcgcagttctcgcgggtggccacgtactgcatctccggggtgatgatgccgtggcgggcgtaccacatctgggtgatcgggtggtccttggcgcgcatcggctcatgcttgcgtccacgccattccttggtggcgcggccgcgcttgatggcgcgcttaccatcatcctcaaggttgcggcggcggccctcgtagtcttcgatgtcgccgcggtcgcggatccagtcgagacgcaggggcttcaaaccttccttcgggtcgcacttggggccttcggtgttgtagtcgtggaacggcgggttcgggcccacgccgggcgtgtcgctcagcttgatttcggtgtacggcacttccaggtcgtaggaaccatactgataggtgaacggtacggacttggtcttgcggatgtgcgccttgtcgcgctgcttggaaccacgggcggcgatgtccacgcgctgctgcttggcgagcttctgggcatccttggcgtccttggcgttggtgaacttcttctcagtggcctcggagccaggctttgcggccccttcctgagcagcctgagtatcagcagcgggggtgtgggctacgacgcgcggcgcgtagccgtgcttcttgtcgccgcggacggccttccagccttcgaccatggtgcgcgcggcctcttccgggttctcggcacccgcgatggcggagaccgcgaaccagccggcggccttggtgccggcgagcatggccatatcggctgcggtcacgccgccgcccacgaccaccgggaattcgctggcagcgcagatggtgttgatctgggcggcgtccagtgtcttgccggagccgtcgttgccgcccacggaagcctcgggcttggtggtggagacgtgcagagggccggcgccaatgtagtcgatgcagccgtcgggcagctcgttgatgagctgaacgaggctttcggtctcagccgacagacccacgatggcctcgtcgccgagcagggcgcgggcttctcgcggctccatgtcggtctggccgatatgcacaccgtccaccttgatgcccttgcggcgggcctgccacaccacgtcggcacggtcgtcgatcacaaaggccacggaatcggacttctcattgtcctcgatgatctgcgcgatgtcgcgggccatgtcggtcagctcagaggcatcggcctccttggcgcgcagttggatgaaggttgcgccgccgcgcagagcctgatccaccacgtcggtcagcggacggcctttgcagtcctccggccccaccacgaagtacgcggacaagtcgaagttgtctcgcatggaggcgtatgggtattcattactcattattattcctacctttgttgtttcttgtggaagtcttattgggaaaaactgttatgagctccctcatcagagggaactgaaactactgcaccaaaatctcggattccgccacctgttcggcggtaacattccacagcgcgtcaaggaacgcgacctggaacgagcccggcccgtgcgaagtcgtatcggctatctctgccgcgcggttgtacagcagagatgcggacagagcggcggtcaacggatcggaaaccgccagatatgtggcagccacgccgcccagcgagcagcctgcaccgatgatcttggtcatcatcgcgctgccgcccggcagtcggtacacggtttcgccgtcggtcaccagatcggcgatgccggacacagccactgcacagcgggtggaagcgtcatgggaggaatgcttggcgtgctgttcggtcagatactgtgccagcgccaccgccgcaacggttgcggactccacgccatcgacggattccactccggcggggcggtgctcggaagcgttccccacggtttcggtattgagcccccacatgttcgccagcgcgattacctcggaggcgtttgcgcgaatcatggtcgggggagcggccttgaaggcctgaagaatggcggtgcgggtgcggccgatgccggcggccaccgggtcgagcacccacggcttgtccaagtagttgagtcgctgggcgatttcgggcagcgcgtccttatagaacggcagcagcgtgcccacgttgatgtagttcgcgcccgcgattttcgcggtttcgatcacgtcgtccggcaggaaactcatggccgcagtgccgccggccgccagttgcgcgttggcaaccaaattgatggtcacgaaattggtgaatgactgggccaacggagtcgtctcgcgtacgcggcgaacggcatcggcgatattgtcgcggatgggtgaatcggctggaaccggagtcccggcggtacaaccgctggacacatcggcaaacaatgatgcactattgctcatttactgctccctacgatggtcttaaccaacaggttctaagggtcaggctcaggcctttctcaactcgcgaaccacatgcgagtccccctgcactacagtgccgacgctatgcgccaacatggacattatcgtgacggatttgttcgatacgtgtcgtcaggtctggcgcgtcccgtccattcgtgatatatagacgcctccgccgagcaacatctcccggatttgtgacgctgacgcgatgtcagtggtacaaattcgggaagggtaaaacaacaggaacaatatggaggtgttgcgatataggaatcgctgcgaacggccgctcgtgagacgcggaacatataccggacaatgccgcctgacctgtcaccgtatacggctatcctgaagcggttgttattagaccccaaaccgttcaaaccagaaggtgcattgtggctcagtccaaactcgatgaagtcgtatcccttgcgaagcgtcgcggcttcgtgttccccgccggcgaaatttacggcggcacccgttccgcttgggattacggccccctcggcgtcgctctcaaggacaatatcaagcgtgaatggtggcgctccatggtcgtcacccgtcctgatgtcgtcggtgtcgacacttccatcatcctgcctcccgaagtgtgggtggcctccggccacgtgagcgtgttcaacgatccgctcgtcgagtgcctcaactgccacaagcgcaaccgcgccgacaagctcgaggaatcctacgccgagaagcacggcgacaagatgccggaaaacggcatgaaggacatcgtctgcccgaactgcggcacccgtggacagtggaccgaaccgcgcgacttcaacatgatgctgcgcacccacctcggcccggtcgaggacgagaacagcctgcactacctgcgtccggagactgcacagggcatcttcgtcgacttcaagaacgtgatgacctcctcccgttccaagccgccgttcggcatcgccaacatgggtaagtccttccgtaacgagatcaccccgggcaacttcatcttccgcacccgtgagttcgagcagatggagatggagttcttcgtcaagcccggcaccgatgaggaatggcaccagtactggatcgacgcccgcacccgctggtacatcgacctcggcgtcaagccagagaacctgcgccactacgagcacccgaaggagaagctctcccactactccaagcgcaccgtggacatcgaatacaagttcggcttccaaggttccgactggggcgagctcgaaggcatcgccaaccgtaccgattacgatttgagcgcgcactccaagcactccggcgaagacctgagctacttcaaccaggccaccggcgagaagtacgtgccgtacgtcatcgaaccggccgccggtctgacccgttccctgatgtgcttcctcgtggacgcctacgatgtggacgaggccccgaacaccaagggcggcgtcgacaagcgcaccgtgctgcgtctcgacccgcgtctggccccggtcaaggccgccgtgctgccgctgagcaagaagcctgaactgcagaccgtggcccagaacctggccgacgacctgcgcttcaacgaatggatgatcgactacgacgagtccggtgccatcggtcgtcgttaccgtcgtcaggacgagatcggcaccccgctgtgcatcaccgtggacttcgacaccctcgaggaccacgccgtgaccatccgtgagcgtgacaccatggcccaggagcgcgtcgctcttgacaaggtggccgattacgtggccgcccgcatcggcgagaagcgcacccgcgtgcccctgaagcccgtggaaatgggcggcgaggcttggcctgagtccggcgttcaggaagccggcggtctgtactaaagacgggtctgtatagaggctcccctctatgaggggagctgtctacgaagtggactgagggggctcttgctgaggcgactcccctcagtcgcctacggcggcagctccccctcaaagaggggagccaaaactatttcagaacaggaaccacatggcagaatctgaaaccgaaaccaccatcaccgctactcacgagaccaacaatctcgacccgcgtacggacgcgccggcacggcccgagactccggtatacatcgcccccgtgcagctcggcaacattaccgtgccgaccccggtggtgctttcgccgatggcgggcgtgaccaactggccgttccgcgtgatctgcgaggaatacggtcccgatggtctttacgtggccgagatgatcaccgcgcgggccctcgtggcgcgcaacccgaaagccctgcgtctctgccatttcgccaaaagcgaaaaaattcgttcgctgcagttgtatggcgtgaatccgtccatcaccgaacaggcggcgaaaatcgtggtcgacggcaacatggccgaccatgtggacctgaacttcggttgcccggtacccaaggtcacccgtcgcgggggaggctcggccctgccatggaaaaccgacatcttcaccgagctcatccagcgcgtggtcgccgtatgcgagccggcgggcatccccgtcacctcgaagatccgcgtcggcatcgaccataaccatgagaccttcctcgaagccggacacatcgcgcaggaggagggctgcaaggccgtaaccctgcatgcccgcaccaccgccgaatactatggcggtcattccgactggtcccgcatcggcgagctcaaggaacacctcaacattccggtattcggcaatggcgatatctggggtgccgaggacgcgctcgaaatggtgcgcgagaccggctgcgacggcgtggccatcggccgcggatgtcagggccggccgtggctgttcgccaacatcaaaaacgccttcgagggcaatcccgaacggctcaacccgaatctgggcgaggtctgccgggtgattcaccgtcatgccgagctgcttaccgagttctatgagggcgatgagatgatggccgtccacgatctgcgcaagcacatcgcctggtatctgaaagggttcccggtgggtgggtccacccgcaaggcctttatggaatgcgagagcctggccgatgtggaccgcgagatcggcaagctcgacccgaccatcgaatacccgccacgcgtggtcgacaaaccgcgcggccgcgtgcgtttcgccaagaaggtgcacttgccgtatgggtggttggaatcgcgtaccaccacccacgaagagcgtgaggcgctcttcggtgacgacccaatggacgccagttactgaaaaaatactgaaaatacacgcaacacgcgccattctgcgcgtgaatttccctccaagagtagcctgtttgcgctactcttgggtgtaaccgtgaagtgacaggagccaaacgtgagcgagatcgcgcagaatgagttcaacgacaagaccaacatcaaggttgttggcgtcggcggtgccggcggtaatgccgtcaatcgcatgattgccgagggactgcagaatgttgaatttgtggcggtaaataccgatgcgaaggatcttctgcgctccgacgccgacgtgaaaatctccctgtccgatcagtccagccgcggactcggcgctggcgcggacccggagaagggtgctaaggccgcacaggatcatcagtctgatatcgaggaatccctgaagggtgccgacatggtgttcgtcacctgcggtgagggtggtggcaccggtaccggcgccagcccgatcgtcgctcgtgcggctcatcagcaaggtgctctcaccatcgcggttgtcactcgtccgttcagcttcgaaggtcctcagcgttccgcttccgccgaatacggcatcgacaacctgcgcaaggaagtcgacgcgctgatcgtcatcccgaacgatcgcctgcttgagctttccgaccgttccatcggtatcatcgaagccttcaagacggccgataccgcactcctcgccggcgtgcagggcatcaccgacctcatttcgatgaattcctacattcacgtcgatttctccgacgtgaactccattcttcgtggcgctggtactgcgctgttcggcattggttccgcgcggggcgaagaccgcgccacccaggccgccgaaatcgccatcagctccccgctgctcgaggagagcatcgagggtgcccacggcgcgttgatcaacattgccggcccgaccgatctgaagctgcaggaagcttccgccgccaccgagcttgtacgcaaggccattcaccccgaggcccagatcatctggggtcttgctctggacgatgcctatggcgacgaagtgcgtgttaccgtcatcgcggccggtttcgatccggttacaccgcaggatccctctgccgccgctccggcaattgccgtaccggccgcccagccggctgccacgcaaacgcagcagcccgccgccgcttcggccgcccagcccgtggccactccgcgtccggaattcaccccgacgaccgcagacccggcatccctgccctttgacgatccgactacctcgcatccgaacatcgccgtgaacgatcccgccggcgatctcgacattcctgatttcctgcgctgaaaggactgatccatggctgggttcatgaaaaacgcgatgtcctatctgggcatgagcgacgttgtggacgatgaggacgactacatcgaagaggacgaggagcagaagccggctccgaagtccgcattcgattccgaccatacggtcacgccgctggcatcaaccaccgcgcctgccgcatcgtcgactaccaagccgttccccggtggtcgcgtgaacagaatcaccaccatccatccgaagtcatatgaggatgctcagctggtcggtcgcgcattgcgtgacggtgttccggtcgtactgaatctcaccggtgtggccgaagccgtggcatatcgcattgtggacttctccgccggcgtggtgttcggcgtgcgtggttccctcgagcgtgtcactccgcgcgtgttcctgttgagcccggcgcaggtgaacatcaaggtcgaagagccgacaaaaccaacctcggcacacgatttgttcgctgactgaccggttcagtagttttcgcattcgacgttatatcggtattcggccgactcccagcaaggagtcggccgattcttattgcgctccgagcaaacttttcatgcgcggttgttagtctgtctgcatgctttccttagtgttctctctgatcggccgcattcttgcatggctcatcaacgcgtatatcacggttctgttcgtgcgcatgattctggactgggtctccgttctcgcacgaaactggtatccacgtggtgtgctggcccagctgatcaacattgtgtattccattaccgaaccccctctgcgctggctacgtcgctatattcgtccattgccgctcggctcgatttatcttgatgtcagcttcatcgtgctgtattttgcgttggtggtactagaaagtgttgttctgatagtgttctgaggccgtttttgacccgccggaggcatatatctggcataaaaacccacgttgaatgttctgaaacgatggggtcgtgatagcattctgacttgagaccaacgtaagtgcgggcaatgccccaaagcgaggtgcaagatttatggctctgttgacgccgaaggatattagggagcataccttccagactgttcgattcaaggaaggttatgatgtcgacgaggtcgatgacttccttgatcaggtcacggaaaccgtcgaggctcttggacgtcaggcggtagccggcggtcaggccactcagtctctgggccctgacgtgaccaaccttaatgcgaagatctccgatcttaccggtcaggtgcagcaactccagtcggagaatgctggtttgaagaacgctgtggctcaggcccagcaggccgctcaggctggcaatgatcaggcggcacagcttgcctctgccaagctcagcgaagccgaggaatccaaccgcgcgctgtcctcccagaatgagcagctcaagggtcaggtcgatcagctgaacgctcaaatcgatcagctcaccgcccaggccgctcaggcctccggtaaccaggaagccgtcggccagcagatcgccgccattcagcaggaacgtgatcagttccgcgcggccaacgaggagctgtcccgtcagctcgccgctgctcagcaggagggttccgccgctcagcagcagtccgctcagatcgctgaactgtctcgtcagctcgaagaagccaagcagcgtgaaaaccagcttcgtgcccaggtttccaaggtcgagccgagcactgagaccggttctctgcagaagatcgctggcgtcgcttccatgccgggcaccgagcccgagcgcgccaccgccatgctgactctggctatgcagctgcacgatcagtacgtggagaagggcaagaacaaggccaaggaaatcaccgaggccagccagaacaagtacaacgatttggtcaccaaggccaacaactactccgagcgtacccgctccgaggccgacgactactccactcgtactcgttccgacgccgacacctattcggatcgtacccgctccgaggccgacgcttaccgtgaccagattcacgcggatgccgagacctactcccagaacacccgttctgaggccgacgcatactccgtcaagactcgtcaggatgcggacaactactccaagtctcagcacgatgacgctgacaactacgagaaggaagtgcagcagcgtgccgccgagtatgacaagaacactcgttccgcagctgatgcgtacgacaagaacacccgctctgcagccgatacgtatgccgagcaggtgcgcgacaaccttcaggctcagtccaaggtcgtcgagggcaacatccagagcctcaagcagttcgagactgaataccgcgcccgcctcaccgagtacctcggccagctggcatcgcaggtttccgagtcgaacaactacgtcgaccagacctcgtccaagaccaactgagcgtaggcaggtacaggtcgtatgacgaaccaacagggacggctgcgcactcgcgtggccgtctttgcatgtgtggccgcggctgcgctgattgtcgatcagctcaccaaggcttgggcgatggccgcgttatccaacggtcagaccattcgcgtgattcccggactgctgtccttcaccttggtgcgtaatccgggcgcgtccttgggcatggggtcaggcgctacttgggtaatcagtctgttggccgttgtggcttgcgtggcccttgctgtggctggggtgcgcactatctccatgaaatggtcggtggcgctttctctcgcgtttgcaggcgctctgggcaacctgattgaccgtgttatgtacgctgacggcttcctcaacggcaaagtggtggatttccttaactatggctggtccgttggcaatgtggcggatatctatctggtagtcgccggtgtggtcctggtgattctgattcttatgggggagccgttctcccacaaggatcttatcgagcaatccgacgaatccctacagtctgagccggaggcggacgccaagtaatgagtcgaatggtccctgctcccgatgcattggtgggtaagcgtttcgacgtagccgtggccaaaatgctgggtatttcacgatctaaagccgccgatctggttgactccggacaggcgcgcgttttagggcgtgaagttgcgcggtccagcacgttgcaggcgggggagaccgtcgaatttgatttggcggaggaacaggccgggcctgagcctatcgcaactgatatggctgttgtctacgaagatgatgatgtcgtcgtagtcgataagcctgtaggcgtggcggcgcatgcctcggttggctggaccggtcccacggtattgggatcgttgcgtgatcgtggcgtgcatatcgcttcctatggcgcggccgggcgtgaaggcattgtttctcgccttgatgtaggcacttccggcttgatgttggtgtgcaagtccgaccttgcgtacaccgagatgcgtcggcagttcgccgagcatgaggtaaagaaaacctatcatgcgctcgtgcagggcggtcttaaagagaacaaagcgaccattgaggcaccgatcgggcgcgccaaagtgtccgatttccgcttctgcgtgactccggccggcaaaccggccgttacgcattgggatgtgttggagcgtttcggccatgaggccacactggtatccgtgaatctggagaccggacgtacccatcagattcgcgtgcatttctcctcgattgggcatcctctgtgcggcgaccctatgtatggtgccaatccggtgctgtctgaagctttgggacttgaccggcagtggctgcacgccatgaagctcgaattccgccatcctcgcacccgcgtctggaccacggtccggtcccagtacccggccgacctggccgccgccctcgatgccatgcgtgcccgtcacatcgaacccgctgaacctgccgagcatgccgaagttctggtggactaattccgcaacgtgtgcatcatgcgttttaatatttagattcagttccagcctcgccggattcatcccagaataatgagagatcggtcatgatggctctccgtcatgaccataccccaagtgactgcggatgctgagtaccgttcaggccaatggtcggtaaccgtacgtgaattaccggtatttccgctcaacgtgtctcggtactccagcgtgaagtgaacagaaatgagccaaagcagtaaggctgagtacgagtattcgtggccgtcatcaatcgatggtggtcattgggattcgcgccatgtactacgcagtatgttgtacgctctgcctggctgttgaacgaagtccacaagaaacagtagatactagggcggccagcggattagcaagacatcggttggtgaggactgctgacattgaactccgacggatgaattgaatactcatatggtatccgattctgaacaattgagtgggggcgttgatggttgccatcgtttgagctggctaaatgcgatttcgcgccacgctgtttcaacaacggtaacaacagctacagttgaactatgcatgggttgaagagtgcgattgacaggggagcggacgcgtgggcgcgttcgctgcctgggcgcgtgctcgaccggtatgtgtcgcggcgcggccccctgctggcgaatggtctggcatatggtctgctgttcgccttttttgccggcgtctggattgcggtgagcgtgttcggccttatcatggtcggcaacattgattggcagcagatgctgatcgacgcggtgcgtgaagtcattcccggtgtggccgactcgtttctgacgtcttccgcactaaacaccatgtcaagcacattgacgtggaccggtctggccacgttggccatgttctggtggacggtgaccggctggatgaactcgctgcgccacgccgtacgggccatgttcgacgactgcggcgacgagctcaatatcgtcgtcgcaaggttacgcgatacgcttgccgccatcgccatcgcaatactgttcattctttcgaccgcggccggtacggtgtccggtggcatggtgcggcgcgtgttgcagtggagcggcatcgccagcagctcgctgccggggattctgctgctggagctgaccggtttctgcaccggcgtcgcgctgaatttcgccttgttcatgctgctgttgcgtgtggtcgcgcacatcaaagccggacgattcacgctgatcggcgcgtcgtcgggttccctgacggtttcggtgctgcagctgctcggcgcgcgactgctgaccggtgcctcccgcaatccgctgctcgcaccgttcgcggcgttgatcggcgcgctggtgtggttcaatctcgtcgcccaggtcatcatgctgtgcgccgccctcatcgcggagtgccgacgggaatgctgaacagccgcccagaccacacggtatggtggggcgcatggctgattacgggaacaactttgtgcaactgcataaccacacgcactattcgctgctcgatggtgcgtcgaagatccctgatttggccaagcgtgcggccgaacttggcatgcctgcggtcggcatcaccgaccatggcaacatgcatggcgcctacgagatgtacaccaactgcgtggccaatggcgtcaagcccatcatcggcatcgaagcttatgtgaccccggaaaccgcacgtcaagacaaatcccgcgtgcattggggcactgaagcccagcgccgtgacgacgtctccggtggtggtcttatcacccacttgaccatgtgggctgaaaacgacgaaggcctggtcaacctcatcaaagcttcgtccgtggccaacctcgaaggtcgcgtcatgcgttatccgcgtatggataaggaggtgctcgccacctattccaaaggcgtgatcgcctcctccggctgcccctcgggcatcatccagacccgtctgcgtctcggtcagttcgatgaggccctgcgcgccgctggcgaattccaggacatcttcggcaaagacaacttcttcatcgaactcatggatcacggtctgcccatcgaaactcaggtgaccggtgacctgctgaccatagccaagaaactcaacgcaccactgctggccactaacgattcccactacgtacacgccgaagatgcccaggcacaggacgccatgctctgcatcaactccggttcccgtcttgacgatccggaccgattcaaattcgacggcaccggctactacatcaaaaccgccgaagagatgcgcgaactgttcaaggaccatccggacgcctgcgacaacaccctcgccatcgccgaacgctgcaacgtgatgttcgacgaccacgaagacggcgcgttcatgccgaaattcccctgccccgaaggctgggatgagacctccctgttccttaaaaaagtcgaggaaggtctggagaagcgttacgacggcaacccgccgctcgacgtattgaagcaggccgactacgaatgtggtgtgatctgccagatgcagttctgcggatacttcctcgtggtcgccgactacattcagtgggccaaggaccacggcattatggtggggccgggccgtggctcggccgcaggcgccatggtcgcctattccatgggcattaccgagctcgatccgctcaagcatggcctgattttcgagaggttcctgaaccctgagcgagtgagccttcctgatatcgatgtcgacttcgaccctgaaggtcgtgcgcgagtcatcgaatactgcggcgaaaaatacggcaccgataaggtcgcccagtgcgtgatctatggcaccatcaaaaccaagcaggccttgaaggactccgcccgcatcatgggctacgagttctcggtcggtgaaaaagtcaccaaggcgctgcctcccgcggccaccggcggcaaggatatcagcctgcatgacatcttcgacccgacagccaaacgctacgccgaggccagggaattccgagaactctacgattccgacccggacgccaagcgcatcaccgaagaagccaagggtatcgaaggcctgatccgacagaccggtgtacatgcctgcgccaccatcatgggtagcgcgcccatcaccgacacctcgccgttgctggaacgcaccgatggcaccatcaccaccaccttcgaataccacacgtgcgaaacgttggggttggtcaagatggacttccttggcctgtccaacttgacgatcatccacgacaccctgaagaacatcgaggccaacggcaaacccgccatcgactacaccaagattccgctcgatgacgccgaaacctacaaactcatgtcccgaggagacacgctcggcgtgttccagctcgattccgacggcatgcgttcactgctgaaaaccctgaagcccgataacttcaacgatatttccgcacttatcgctctgtaccgaccgggcccgatgagtatggattcgcacaccaactacgccaagcgcaagaatggcctgcagaagatcacgccaatccaccctgagcttgaggaacctctgaagcaggtgcttgacgagacctatggtctgatcatctaccaggagcaggtgcagtccgccgcccgaatcctcgccggctattcgctgggcaaggcagacgtgctgcgtcgagccatgggtaagaagaagcccgaagtgctggccaaggagaaggtgccgttcttcgccggtatgaaggagcatggatactccgaagaggcctcccaggccgtgtgggatattctggtgccgttctccggctacgctttcaacaaagcgcactccgccgcatacggtctgatctcctactggaccgcatatctgaagacgcactacccggtcgaattcatggccgccctgttgcaaggtgccgccaccaacaaagacaagaccgcactgtacttgggcgaggcccgccgcatgggcatccaggtgctctcgccggacgtcaacgaatcggtgtacgagtactcggcagtcggcgacgtcgtccgattcggtcttggtgccatccgtaacgtgggtgacaaggccgtggccgatatcatcgccgaacgcgaaggcccgcgcggcaagttcgtgaacttcatggacttcatccgccgcgtgcccctgaccgcgctgaaccggcgattggtcgaatcgttgatcaaggccggtgccttcgactcgattgacccgaaccgtcgcgcgctgttcaccgtgcacgaggccgccatcgactcggtggtgagtctgaagcgcaaacaggcggagggccagttcgatttgttctccgatgccgaggatgggggagcggaggccatgggcgacgcttccgtgaccgtacccgatcttgaggaatgggacaagaagaccaagcttaacttcgaacgcgaaatgttgggcctgtatgtgtctgaccatccgctctccggtatgcagtcgattctcgcgtccctgcgtgaaatgtccatcgcgcatctggttgatcgagccaaaacgatgggtgaaggacagcaggtcacgttggctggtttggtcaccaatgtggaccggcgcgtatccaagaagggcaacccctgggccatcgtgaccatcgaagacatggaaagctccatccaatgcatgttcttcggcaaggtctatgaagcggccgccgccgaactcgccgtggacgccatcgtacagattcgtggccaagtggagttgcgcgacgaaaccgtttctctgagagccacggaaatgcagattccgaccttggaagccgaggatgaacgtccgttggtcatcacgctgccgccggtggcgttggagcgccaacgcatgatgcaactcggtcaggtgctcgctaatcatcctggttactgcgaagtacatcttgcggtgctggatgagaagggtaacgctcaggtgctcacgtttggcgatcgtttccgcgtcaagcgggatacttcgttgtttgctgagatcaagattctgtttggccccagctgcttgcctgccgcctgattggcgggtttcgcccctggcctctccctcacctggctttgctggggactccttcatcagagggagctaaggcatgtgccaccatacgatgtgcgcgactattgtggaacgtatgggcatggagatggcggatactggtaacaacgatgacgagcgacaatggattgccgcgatgctggaacggctgtctcattcgcagttccgcgccaaattcgctttgaccgacaaagaacgagcctatgcccgcaccaaaggcaaggcgaccatcgatcgtcatgcgcgagaaatgttgcgagaccgcataggcgcagccgaaccgaagaacgacggcaggcagacgccatggcgcggccatccggtattcaccgctcaacatgctaccgccacatgctgccgcggatgcatcgaaaaatggcatcatctgcccaaaggccgtgaactcaccgaagcggaggtaaaccgacttgccgatttggtcatggcatggattgagcgggaccttatcaatcatccggttcggtgaagcacccagcatcctcagtatgcctgtatgccttcaatagttatgagccaacagccaacacaggcctcgaaaaccgtagacgcaaggtattggcgaatacggcagaacgccgaacgttgcctatggcgtgttcggcaataatgtgacatgatgtctattcaagaagagttgacgaagcgtcaactctaccccaaggaggcggaatatgtactacagcagcggcaattatgaggctttcgcacgcccgaagaagccggccgacgtggacaacaagcatgcatacatcatcggtaccggactggcggcattgtctgcagcctgttatctggtgcgtgatggtcagatgcctggcgagaacatccacatccttgagaaggacccggtacccggcggcgcctgtgacggtcttgatattcccggcctcggctatgtgatgcgtggcggccgcgagatggacaatcatttcgaggtcatgtgggatctgttccgctcgattccctccatcgaaaccgagggcgtcagcgtactcgacgagtactactggctcaacaaggaggacccgaactactcgctgtgccgcgccaccaaggacctcggcaaggacgcggggctcaagggcaagttcggcctgtccgacaaggcttcgatggaaatcatgaagctgttcttcaccccggacgaagacctgtatgacaagccgatcaccgatttcttcgatgatgaggtgctgaactccaacttctggctgtactggcgcaccatgttcgccttcgagaactggcactccgcgctggaaatgaagctgtacatcaaacgctacattcatcacatcggcggactgccggacttttccgcgctgcgtttcacccgctacaaccagtacgagtcgatgattctgccgatggtcaagtatctggaatcgcatggcgtcgaattccgctacaacaccaaggttgagaacgtggaattcgcgattggcgggggagccggccccaagcgcgagcacaccggcgtaggccaggacaccatccaaaagattcaggccacctccggtttcttcaagcgcaaccctgccagcacgcccaccaagaagcttgccgtgcgcatcgacgtggatcacgagggtgataaatcctccatcgacctgaccgagaacgatctggtgttcatcaccaacggcggttgcgtggagaactccaccatgggttcccagaactcgcccgccgcatggaacccagacctgaagcccggcggcggctgggatatgtggaagcgtatcgccgaccaggacccgagctttggccatccggagaagttctgctccgatccgaatgccaccaagtggatgagcgccaccatcaccaccctggacggcgagattccgccgtacatccagaagatttgcaagcgcgacccgttctccggcaaggtcgtcaccggcggcatcgtcactgtgcaggactccaactggctcatgagttggaccctgaaccgccagcagcagttccgcgaccagcccaaggaccagctgtgcgtatgggtctacggcctgttcccggacaagcccggcaactatgtgaagaagccgatgaccgaatgcaccggtgaagagatttgcgaggagtggctttaccacatgggcgtgccgaccgacaagatcgaggcgctcgccaagcatcacgccaacaccgtgccggtcatgatgccgtacatcaccgcgttcttcatgccgcgcgcggccggcgaccgcccggacgtggtgcccgatggtgccgtgaacttcgcattccttggccagttcgccgagaccccgcgtgacacgatcttcaccaccgagtactcgatgcgcaccggtatggaagctgtctacacgttgctcggcgtggaccgcggcgtgcctgaagtgtggggcagtgtctatgacgtgcgcaacctgctcaacgccaccgtcaaattgcgtgacggtgcaccggtcaccgatatgaagctcaacttcattgaaaaggccgtggtcaagaaggtgctcaagaaactcgacggcaccgatattgccaccctgctacgcgaataccacgtaatctgacatccatccggctcccctcaaggtgaggggagccagcacgcgaagcgtgactgggggagttgctcacaacggagtgttaagagaaagacaaaaacatgactgattctgatccccagttaatccgccacgccaccatcgacgatctggacgcgctggccgccatggaattcgaatgcttcccggccgccgaggccgccgaccgctcgtccctgcgcgcccgaatcgagacctatccggaatgtttctggctattgattgatggcgagatcgtcatggcgttcatcaacggttttgtgaccgatcggcgcgacttgaccgatgacatgtacgaggatgccgcgcagcacaaccctcaaggtgactggcaaatgattttcggcgtggatactgcgccgaagtatcagcatcgcggttgcgccagtacactcatgaggaaagtcattgaagacactcgtgcagccggccgtaaaggcctggtgctcacctgcaaagatcggttggtcggattctatgcgcgattcggatatgaggacgagggcatttccgattccactcacggtgacgtggtctggcaccaaatgcgcctgaccttctaatccccctttggcttccctctttgatgctgggtcgtttaaaaaacagtccggtggactgtttttttagacgaaggcgagacgatagtcgagccataagggcgcgagctttgctcgtccgtaattgcgggtgagctgtccgcgtgatcggactgaggggagttgaacgtggaatgaattgttgcgacacgccggtgaacatctgatttcgttacgtgagcccataaaaagccggcgtatcctgatgataacggcgtgattcaagctgatttcgacacgccgatagaacgccgtcgttgcaacgattctggcgtaccttttcatgcccgatttgcgttgtggcgtggttgcgtgtaaattattcacctgttgccgctcagcgcggcgggttcctttttctggttggtttcctgtcttgctggtgtggtggtggtttgagaactcaagagcgtgtttgtactacttctttatagtcacttattgccagttcattcctctcctgattgcctgtcgtggttgtcgggtacccgggagggtttgatgaggggtgaggttttttgagggcgtccttccttaaggacgtgctcgtcgatttttttttgagagtcatctgtcgatgtctcttcgcatttttttgtggagggttcgattctggctcaggaagaacgctggc

SEQ ID NO: 1316 - DNA, 3260 bp, Unknown
  R157_18m  MAG No. k141_11548
aaccgtccttgtcatcaattccggttccagctctatcaagtatcagctggttgatcttgaaaccggtgaaggtattgcttccggcctggtcgagaagatcggcgagccggttgacggccactacaagcacgagttcaacggcgaaaagcatgagctggaagagtcgatccacgaccacgagcagggtctgaagcgcgtgcttggcttcttcaacgagttcggcccgaagctggacgaggccggcatcgtggcagtcggccaccgcgtggtgcagggcggttccatcttcccgaacccagctctggtcaccgacaagaccatcaaccaggtcaaggatctcgccgtgctcgccccgctgcacaacggtccggaagccaagggtgctgaggtcatgcgtgcgctccttccggacgttccgcagatcttcgtgttcgattcctccttcttcttccagctgccgaaggccgccagcacctatgcgctgaacaaggaaatcgccgaccagtatcacattcgccgttacggcgcccacggcacctcccacgagttcatctcctccgtggtgccgagcgtcatcggcaagccggctgaaggcctcaagcagatcgtgctgcatatcggcaacggcgcttctgcttccgcagaggtctccggaaagccggtcgagacctccatgggtctgaccccgctcgaaggcctcatgatgggtggccgtaccggcgatatcgatccggccgtcgtcttccacctgatccgcaacgcccacatgaacgtggatgagctcgacgctctgttcaacaagcgttccggcatgatgggcatgaccggtttcggcgatctccgtgaggttcaccgtctggtcgccgaaggcaacgaggacgccaagctggctctcgatgtctacgtgcaccgcatcgtcggctacatcggcaactacaccgctcagatgggcggcgtagacgtgatcactttcaccgcaggcgtcggcgagaacgatgacgtggtccgcaagatggtgtgcgacaagctcgctccgttcggcgtcaagctggacgaagagaagaacgccacccgttccaaggaaccgcgcatcatctccaccccggattccaagatcaccatctgcgtcattccgaccaacgaggagctggcaatcgcccgcaagtccgcggccatcgcagaagtaggcgaagacacttacggcaacgtcttctccaagtgagcgaggagatcccgcagtcaaatgattgacgggaccgtataagaggaccgtacgttccattggcatcaaatcaataccaatggaacgtacggtcctttttcgaataatcgttatgtctccaccgcttccgaggttgcgttcaccgaatgtttttaatcgtcccagacaacacctttccatatctgttcatgatccgcataatgggggaggggctggtagtacgatacgaaacgttgttcctattacgcacatacgtcgcatgttgagagaagcggttgattgttgtgataagacgtcgttttgtcggtctgaatggcctcaagggcatcgccttgatcgcgatagtgttgtatcactgcgaccagggctcgctgcggggcggattcctaggtgttgacatattcttcaccatttcaggttttctgattttctcgtcgttgctgaatcatattgattccggcaggggaataggtttcaaggaatattacctcaggcgtctgcgcagaatatacccggcgttgattctgatgattcccgtcaccgtatcgttggcatggttcatcaaccaagacatgttggtggacattaaaaaccagatagtgacggctatgttgggttgttacaactggtatgccatcggcagtggcgccagctatttctcgcagatgaatccagacatgttccgtcatctgtggttcatgtcggtgctgatgcagttctatctgttggctcctttgctgatctacctgcttcgaaaaattctggtacgttgggtaccagtggcagtacttgccggacttgccgtgtgtagtgcgctttccatgggattgcagtatcacccgggaaccgatccaaccagagtgtatttcggttcagacacgcatgccatgggactttggctaggtgccatgctggcatggctgctgatgatcatacggcgtggcaacggtcgtccggaagaaacggcgatcatggaacgtgcttgtctggtctggagcaagatcggccctgcggcggcttttgtggcattactgattctgttatggatgatgcagcacgttgaacagggtcctgctgccttctatggagggattttcgcggcctcgctactttcagtggttctggtcgctggttccattccttttggatcttggatacaggatctgctggtgttcaaaccatttgatgtggtcggccgatattcatacggcatttacctgtggcattggcctttatggttgttcaccaaggcgatgttcccccagtggggtgcgcggcatcttggatggatgctgctaatcacactcgctcttaccgcatgttgtaccgccatgtcgtggaagttagtggaacagcctgttgcccgaggcggattcatcgccatgattcgtcctcttccggaaaatggcatgtgggatgctgccagatgctggataacgattgtcgtggtattgagtacatgcttgatgtctggatacgtggtggacaacgtgccaaagcagaccagtgtggaacgcgcgctggaagagaatgcgagaatgctgaaagagcagcagggcatgaatctcgacttcaataggaagcatccaccaacgcccaggaaacccgtacacaccatgcctaatggacagcagatggtcgcattcggtgactcggtgatgctcgcctccagtaaaggtttgcaatccgttttccctggaatcactgttgatgcggaaacctcacgttcgatgaccaaggcgttgggacttatagaccagaccaaaagccagccggaaggtttgcgccaatgggtgctggtcggcttggctacgaattcagcggtgaccgatggccagctcaatgacgtactgaacgacattggaccgaatcgtgtgcttgtgctgattaacgcgcatgcccccgtgtcttgggtccccagaacgaacgacgcgttgagtaacttcgcggccgcccattccgagaacgttgttctcgttgactgggatgctacgatttcggcgtatcctgatgagcttgccggagatggtattcaccc

SEQ ID NO: 1317 - DNA, 38765 bp, Unknown
  R157_18m  MAG No. k141_11560
atgacgtgcccgactggctcatccccagccgcgtctacgatgtgctcaaatggctgggcctcatcgtcctgccagcactcgccctgttcgtgggcacggtcggccccgcatggggctggccccacgtggacgccatcgtgaccacgctcaacgcgctcggcatcctcgccggcgcgctcatcggcgtcagcgccatcaaacaacgcctcgaccgcgccgcataaccacacatagttcggccccgtccggtatcgcagacagctcgcacagagcttgactgctgccggacggggccgatttcgcgttgtggcagagggcttcgcgggctcgatttctgcccacattttgcccacattttccgtaaaaacaggttaaaaaccgttaaaactggttaaaacgaaaaaagccgctcagccctactcccgcaaggcaaagcggccattttccaacccgttctcagctcagcgcgtccttcaacttgctgaagaagcctttcttttggccagcctgtggacgggatgcctgggagacgtgcgtggcgcctgaatcatgcgaggcggcgaactgttcgatgaggccgcgctcggtttcgttgagcttggtgggaatcagcacattgacgtgggcgatgaggttgccgcgctcgtccttgttgcggatgttcgtgacgcccagtcccttaagcgtcacagtgtcctcaggctggcagccggccgggatggacacggtcttctcaccatcgaacgtgtcaatggacagatcgtggccgagcacggcccagctcatcggcacctgaatccagcagtgcaggtcgtcgccatcgcgggtgaactgcttatccgccttgatgcgaatgtcgatgtacaggtcgccggcagcgccgccgccctcacccacttcgccctggttggccaaacgtagacgcgcgttgtcgttgatgccggcgggcacggtgacgcccacggtacgtgtggtacgcacacggccgtggcccatgcagctggggcacgggttcttgatgatggtaccgtggccctcgcaacgttcgcagggggcggaggtcatcatctggccgagcatggtgcgcacgaccttctgcatgaatccctggccgtggcagtcggggcaggtgaccggctgtgcgccgccctgggcgccggagccgccgcactcctggcacagggagaacgtgctgatcttgacgtgcgcggtgccgccgaacacggcggtcttcaggtcgatggacgcggaggccagggcgtcgcggccgggctgggtacgcggcaccgggccctgtgagccaccaccgaacgcggaaccgaagaacgtggagaacacgtcgctcatatcgccgaagcccgccccggagaagccgccggcaccggcgttcggatcgttcgggtcgacgcccgaatcatacatacggcgcttgtccggattggacagcacatcgtaggcgttgttcacttccttgaacttgtcctcgaattcagggcccgcgatgtcggggtggtacttacggctgagcttgcggtatgccttcttgatctcgtcgtcactggcgccgcgttccacacccagcgtctcgtaataatctgccacttgattgatcctttgtgttcgtttggtctgcgggtcattgtgccacagacggcggtcagtcttgggtccggccctcggagaggaaggcggtcaaatatctggctacggccctgacggcggccatagtggccgcatagtccatgtgggtcggccctatggagccgacgaaggcgatgggttccgtgtcgttcgtctggctctccgtctcggattcggtttcgggttcgcctacgggatcgttccccgccggttcgcccgccgcaccgctgcgcccatagccactgctgaccacggaggcatgcagtaggccgggggtgtgcatttcggagccgatggccacgcccacgccggatgcattcgtctcctcgctcaggttgctcatgagcttcatcagcacgacctgttcttccagcgcgtcgaagagcggggccagatcggccagggaccgggagtgggccaggtgcgaggtgccggacatgtacagttcgtccgcgcgttcgtccaatgccatcgattcgaaggcgtcggccagcgcgtcggccacgccgcgcaccgactcgtagccggcgctggcggcgatggatcgcacggtctccgcggatttcgatagggacagtccgacacattgttcgttgacggtgttggagagccggttgatctcgtccacggcgggcatggatgcgatggtcaggccgtgctgggccacgcggccggtgtcggtaatcaccaccgcgagcaacgtggtcatggcaacgggcaccatctccacgtgccgcaatgtggccttggccagcgatggcgaggtgactatggccacttgaccggtgatttcggacaacagtcgtgccgaacgctgcagcgcgtccttgagactcaccgatccggacaggaagctgttgatgccgcggcgctgcgcctcgctgagcggcaccacggtagcaagtcggtccacaaagtatcgatagcccttttcggtgggcacacgaccggccgaagtgtgcggctgaatcagatatccttcatcctccagagcggacatgtcgttacggatggtggccgaactgacgccgagatcatggtcgcgcgtcagcgaagtggagcccacgggctcctgagaacggatgtaatcctccaccacggcgcgcagcaccagcatgcgtcttgattgcgtcatgcgcgcctccttatatatgcatacatattcatatcagtcacggttcactcagggcgtaccccgacggtcggttcgccacgccgcgacacgcgggaacccagaaatattgcctctttcttggctccgccacgtgcaggtggcgcacttcaccttagaacattgtattagcactccttaggcttgagtgctaatgcgttcgtttgcagcgtagcaatgttcactgtgaacgctaacagaacacaaactaccaaaacacgccaaaattgcaccgcaacgtcgcaaaccgacgctagcatggtaatcgcaatgtgagggcgtcaagcgcccggcacaagccggatacgcggcccgaccaattggaaggaaagtaatccatgaccgaattcaaggagaccgagctcgacgagcgcgccatcaagatggcgaaggtcctttcggctgacgcggttgagaaggcaggctccggccaccccggctcccccgtctccctggcgcccgtcgcctacacgctgtaccagcacttcatcaagcacgatccgaatgatcccaactgggaaggccgcgatcgcttcatcctttccggtggccatgcctccctcacccagtacgtccagctgtacttctccggctacggcgtgaccctggacgaccttaagaacttccgtggcggcgctgccacccgcaccccgggccacccggagtacggcctgaccccgggcatcgaaatgaccaccggccctctgggccagggcttcgcctccgccatcggctttgcctacggcgagcgtttccagcgcggtctgcttgacccggagaccccgaaggaagattccccgttctaccacaagatttgggccatctgtggtgaaggcgacatcgaggagggcatctccggcgaggccgcttccctggccgccaaccagaagctcggcaacctgaccgtgatcttcgacgccaaccgcatccagatcgaaggcgacaccaacctggtgctggccgaggacgtgctcaagcgcttccaggcctacggctggtacaccgacgagttcagcttcatccagcccgacggctcctacaaggaggacatcgagggtctggccgacgtcatcgccaaggccgaagccgccgccccggaccagccgaagctcatcaaggtccactccctgatcgcctggccgaccccgggcaagaccaacgacccgtcctcccacggctccaagctgggcgccgaggccgtcgccggcctcaagaaactcctcggctacgatccggaggagtccttccacgtcgacgaagaagccctggcccacgcccgcaaggtcgccgatcgcggcctggaggcccacaaggcctgggacgagaagttcgacgcctggcgcaaggccaacccggacaaggccgccctgtacgaccgtctgaaggccggcgaactgccggaaggcttcgacaaggcccttgacgaccttgaggccaccttcgaagtcggcaagggtgtcgccactcgtggcgcctccggctccgtgctcaacgccatcgccgccgtcatgccggaactctggggcggctccgccgacctcggtggctccaacaagaccgacctcaagggcgctgccaccttcgccccggccgagtgcgccaccaagcagtggccgaactgcaacgagttcggtcgccagctgcacttcggcgtgcgcgagttcaccatgggctgcatcaccaacggcatcctgctgggttcccacacccgtccgttcggcggcaccttcttcatgttctccgactacgagcgttccgccgttcgtctggccgccctcatgcagatcccgaacctgtacatctggtcccacgactccgtcgccgtcggcgaggacggcccgacccaccagccggttgagcaccttgcttccttccgcgcgattcctcagcttgaggtcattcgcccggccgacgccttcgagaccgccgaggcttaccgttacttcttcgagaagaagaacaccctgcctggcgccatggttctgacccgtcagggtgtcccggttcttgccgagaccgctgccaaggccaaggacggtgtcaagaagggcgcttacatcctggtcgacaccgaaggtactccggacgtcatcctcatggcttccggttccgaggtccagtgggctgtggctgccgccaagaccctggccggcgagggcgtcaaggctcgcgtcgtgtccgtgccgtccatggaatggttcgaggagcaggacgccgagtacaaggaggctgtgcttccggccgctgtcaaggctcgtgtctccgtcgaggccggcgttgccatgccgtggtacaagtacctcggttcctacggcaagcctgtctccatcgagcagttcggcctgcagggtgacggcgctcagaacatgatcgacctcggcatcaccgccgagcacgtggtggaagccgccaaggcctccatcgccgaagtcgaagccgccaagtgagcaactaagcaataattcaataattgttggctcccctccctgaggggagctgtcaggcgaaagcttgactgaggggagcaatgcttgagcccactcccctcagtccgcgttgcggacagctcccctctcccaggagaggggagcctagggcttgaatccaaggagaaaataaatgactgaagcaactcagcgtacgtccgacaacggcgtttccatctggctggacgacctgtcccgctcccgcattgagtccggctccctgcaggacctcatcgccaacaagaacgtggtcggcgttaccaccaacccgtccatcttccagaaggccctgagccaggtcggcccgtacgacgctcagctcaaggagctcggcaaggttgacgttgagaccgctgtccgcgagctcaccaccaccgacgtgcgcaacgccaccgacatcttccgcgagatcgctgaggctaccgacttcgtcgacggccgcgtctccatcgaggtcgacccgcgtctggcccacgacaccgagaacaccgccaagcaggctgtggaactctgggagaaggtcaaccgtccgaacgccatgatcaagattccggcaaccctcgaaggcctgccggccatcaccgccaccctggccaagggtatctccgtcaacgtcaccctgatcttctcgctcgagcgctacgagcaggtcatcgacgccttcatcgagggcatcgcccaggctgacgccaacggccacgacctgaagcacatcggctccgtcgcttccttcttcgtctcccgcgtggacaccgctgtcgacaagctgctggaagccaacggctccgacgaggccaaggctctggagggcaaggccgctgtggccaacgctcgcctggcttacgagctcttcgagaagaagtttgccgaggatccgcgttgggccgacctggctgccaagggtgccaaggttcagcgtccgctgtgggcctccaccggtaccaagaacgccgcctactccgactgcaagtacgttgacgagctcgttgccaagcacatcgtcaacaccatgccggagaagaccctgaacgctctggccgaccacggcaacggcgctccgtccatcgagggcacctacgaggagtcccacgccgtcatcaacaagctggctgagctgggtatcaacctcaaggacgtcactgacaagctggaggccgacggtgtcgccgccttcatcaagtcctgggattccgtgctggctgacgtccagtccggcatcgaccgcgtgaacgcctgagattattagctgatgcgcatttcgcgcattaactgattagctcacagaagctccgaccccaaccggtcggggcttcttacgtttgttgctacagtagtacgagcacatgagagaaaggccgaaccgtaatgaacaaacttgtcgcacgccagcggttggtgatgacctttaccttcttttcgatgttcttcggagcgggcaacctgatcttcccgccgtttgtcggagctcaggccggttccgcgaccataccggcggccatcggcttcatcgtctccgcggtcggcctgccgattctcggcgtgctggcggtcaccttcgccggtggcttcgacaaactcgccggccgggtctcccccaaattcgccctgttcctcggcttggcgatcatgctcaccatcggcccctgctttgcgattccgcgtacggcgaccacctcgttcgaaatgatggtggcgcctttcgtgccgtcctcctacggctggctggcccaactcatctactcgctcgtgttcttcacactggcgttcctgttcgcccagcatcccgaaaaactctccaaagtgctcggccgattcatgggaccgttgctgctggtgctgattgccgtcctgttcatcgcctgcctaatccacggtatcggtaccccggccaaaccgatgggcgactactccacaaaccagattgcacgtggcttcctcgacggctaccagaccatggatctgctcgccgcgctctatttcggcatcgtgatttccgcgaatatccgcacccagcaggtcgatgacgaatcgcaagtgcagaaggagaccgcgtatgccggactcggcaccggtgtgctgctgatcgtgatctacggcgcactgagctacgtgggcgtggtgtccggtgccatcgccaccatcgatcccgccaaagacacgggcgcgaccgtgctcaccaatctcacctcgtccctgttcggcgcgttcggtaccgcgttcctcggtatcgtcttcgtcatcgcctgcctcaacgtatgcaccggactgatcggtacctgcgccacctacttccacactcggttccagaccgttgcagggagaacgttgagctaccgcacctggcaggtcatcttcaccgtgttcagtttcatcgtgtccaacgccgggctaagcgcgatcatcaaggtttccgtgccggtgttgtccgcactgtatccgatcgccatcgtgctggtgctgctggcgctgacccacaagtcgcttggcgcgcgattcccgcatgtctacttctggaccgtgctgctggtgggcatcgactccttcgccacctgcatctccagcctgatcaccgtcttcggcggctccatcggctggctggacacgacgctggccatgctgcccttgcagcaataccagctcggctgggtggtcccggctatcctcggtgttgccattggtatcgccgatgctccgcgacggtagttcttcccggtctgtgccggagtctggcggtcggtcggtgatggcggttgttgcgacgctcagcggtgccggtgtatcgttcgcaccactatacaccactatatgagcgcatttggggcggcatgatgctgcatccgaactgtccggcgattggcagaatgacctactatctctcgggccaagcaactgacgattatggagtctgcgtcacctcaccactgtggtttatgacggtgactgcgctgagtgttgtcgcgattctctgtctgaccgttgcgggagtacagggcttttcgcgccatcggctctgttcccgttgccctgttctggtcaggtctcacgttctttacctacagctacaacactggtagacacaccgatttctgcccagcgctatcggcaactgacaatgcaggtcttgtcgcttattgcatcggccgtgaagctttgggactgctgaccgtcgtgttgtgcgtgctgccattgttctccctgctttcggcgattatggccatcacgttggctgcgcacgacgcgacaccaccggcataaaatctccttcatatcacgaaacaacgggcacccgttttgcgaggcattctatccgtcccgtgtttcgcaacgcatgagacggcacatccattgaatcaggagtctagaccatatctcgccgaatcttgcggtaggtggcatagaacaggaagccggccacgatgccggaggtggcgtcggagatgggttcggcgatgaagatgccgttgacgccgatccagtgcggcagcagcagcgcgagcggcacgagcaggatgatcttgcggaagatggccaagaacaccgactgtttggcctggcccatgccgacgagtgcgcattgcgcgcccatctggatgccgaagataccccagccgcagacgaaaatcggcatcatgcgggtcacgatgtcgatgaccgtctgttccgaggtgaaccatgaggcgaagaagccggggaatgtggcgagcacgttcgcggcggccgctcccctgacgccccatccgaacacgaaaatgaacacggggtcaagaaggatggatatgccggtgccgatgagtacggagaccatggccacagtggtttcgccaactgcagcagcacggtgagggtcagggctatggcgatgaggaacgcggcgctggtgccgaggatgcgttcggctttcttgaagttgccgcgcccaagttcaatggaggcgcgaggcgcgccgcctgcgccgatcagcgaggcgaaggcggtgacggccggcagaatcgggaagcagatgcccacgccggtcatcgccgcgttgcccacttcggggatgtgcccgatgaacagtcggtcgatgatcgtgtacgaggcgttcgccgcctgcgccacgatggtggggaccgacatggtcagggccagacggggcaccggtttggtgcccagcccggcatcgatcgtgttcgcctgtaccaaggatcagctctgccagtagtagctgaagaagtcggcgagctcccccatggtttcgtgcagcatgcccatgcgcggcaggtacaccacgcggaagtggtcggggcgatgccagttgaacgcgccgccgtggctgatgaggatgtgcttgtcatgcagcaggtcgagcgcgaactgctcgtccgagtggatgttgaagcgtttgacgtcgatcttcgggaagatgtagaacgcggccttcggcttgacggcggtgatgccgggaatctggttgagcatgtcgtaaacgaggtcacgctggtcgtgcacgcggccgcccggcacgatgtagtcgttgacgctctggtggccgccgagcgcggtctgcaccacggactgggcgggcacgttcgagcacatgcgcatgttggcgagcatgttgaggccctcgatgtagtccttggcgatacgcttgttgccggacaggatcatccatccgatgcggtagccggcgatcatgtgcgatttcgacaggccggagaaggtcacgcagaacaggtccggggccatcgaggcgatggagatgtgctgcaggccgtccatgacgaggcgatcgtagatttcgtcggagaagatgatgagctggtgttcacgcgcgatgtcgacgatctgctggagcacttcctttgggtaaagtgcgccggtggggttgttcgggttgatgatgacaatcgccttggtgttgctggtgatcttggagcggatgtcatcgatgtccggataccattcggactgttcgtcgcacaggtagtgcacggcggtgccgccggccaggttcacgcaggcggtccacagcgggtagtccggggagggcacgagcacttcgtcgccggtgtcgagcagcgcggacatggacaggttgatgagctcgctgacgccgttgccggtgtagatgtcgtcgatggtgacgttcgggatgttcttcagctgcgcgtactgcatgatggccttgcgcgcggagaacaggcccttggacggcgagtagccttcggtgtcggtgagctggtgggccatgtcatagacgacttcgtccggcgtgcggaagccgaagggtgctggattgccgatgttcaatttcaggatgtgggtgccgttggcctccatgcgcatcgcctcgtcggcgaccgggccgcgcacgtcgtagagcacgttgtcgagcttgtgcgatttgccgaaggtacggcggcggcccacgggaatctcgctgtccgtcaggggcttggcagtgcccgtggcaagcggcgtggcggcgtgttcgccgtccgtgacgctgttggaagcgtccgagttcaattgcggggtggattcctcgccgcgcagccagttcgcgtcgacgtccagttcgctggccaggaattcgagcacgtcttcgcggggcatggtcttgccggccacgtattggctgatatggctcttgcccatctttacgccacgatgttcggcggcgtgcaccaaatcgacctgcttcaatcccctactgttcatcgcattgcgcagacgttccgcaaacaccgatacgctcatatccttatgcctccaaccgggagttcaatttatcttttgaacaacagttcaaagcatactcccggttcaacacaagttcaattttggcgtgttctcgagtctcggccggttcagcccaactgcgcttcaatccattgggcgacgccgtcctcgttgttgggcgggcagatctcgtcggcgatagacaacaccttggggttcgcgttggccacggccacaccccggccggattcgctcatcatgttgatatcgatgaggtcgtcgccgaaggcggcggtctgttcgagcggcacgtccagtcgttcgcacagcaggtgcagcgcgtgctccttgttggcctgcgggttcatgagcatccacatcacgccttcgctaatggagatgtcgaagtccggcggaatcagcgcacgcagctcgttccactgttcaggctcggggaagatggtgatcttatccgccacgccttcgggcacgtcgtggaagttcgtatattggaaggcctgtgttttccaatacacgcgcacatcgaagttggtgtagcgcacgtcgttcatcacgatgccgagcttcaggccgggcatgcgatcgagcaggaacagacagacttcgcaggcacgccgtgaggagaagccaatcttgatcaaatggttctcatcggccggcgtggcacctgaggtgagcaggtcgaagtcggagtgggccgggtcgaaatcgatgagggcaccgttcagatagattacggcgtccaccggcagtttttcggcgaactggaggccggtactcaccggccgcgcggtggcgatggcgaatttcagtccggcatcgtgcgcgcggttgatggtgtcgatgctgcgctgggtgatgaaccggtcctcgaatacctcggcgtcgtgcagcaacgtaccgtcgaggtcggcgaccagcagtcggggttgtttcggtgtgatggcgtcgagaatcacagcagcccctcgcagtgttcacgcacgagttcggcggaatggtgcaatttggcctgctcgtcctcgctcagatcgagttcgacgatctcgttggcaccattggcgcgcagttcagtggggacgccgaggaacacgtcatgttcgccgtattcgccgttcagcagggtggagacgggtacgatgcggcgttcgtcccacaggatggtctgcacgatgccggccacggtggaggcgatgccgaagttggtaccgcccttggccgcgacgatctcatcgccacgggtgcgggtcttctcttcgatttcggtggtggacacggaggcgaaacggtcttggttgtcggccaggaagcgggcgaatggcttgccgccgagcgagacggtggaccatgcggtgaactgggagtcgccgtgctcgcccatcacgaagccgcccacgttacgcgggtcgaggccggtctcttcgccgatgatggtcttgagacgcgaggtgtcgagcgcggtgccggtgcccagcacctgggtgcgcggcaggccggaacgtttccaggcataccaggccatcacatcgaccgggttggagaccatgacgatcacgccgtcgaagccggaggccatgacgttgtcgaccacttcgcccacaaggcccacggtgaagccgagttcggccatgcggttggagttggccggcggcttgcggcccacggtgatgacgacgatgtccgcgtccttgcagtcggcgtagtcgccggcgcgcaccttgacgtggcggtcctggaattcgctgccgtcatcgaggtcgcgggcctcccccagggctttggcggcggagcggtcgatgagcacgagctcattgcacaggccgtgcgtgacgatgccgaaggcggcggtggcaccgacctggccagtgccgacgataacgactttgttgcggttcatagtgaccatggtgatgtcctttcgtaatactcgatagaacgcatacgacccatgaccgacggtaacggtcatgggtcgcgagcgacaagtctatatggcgtgcaagccgatcagccgaggttgaacttggtcatcatgtcgaggccgatgatcaatgccacccacaccagagcgatgataacggtccaacggttcaggttcttttcggcgacaccggaagtaccggcgttctgggtcagaccgccgccgaacatgtcggacaaaccgccgcccttgcccttgtgcataaggatgagcagggtcagcacgaagctgagcagcacgacgatgacttgcagcgtgatcttaagagcggtcacagggtacctccggattgattggactgttgaccagcatagcgcacacacgggaaaaccgtggtattagttccgtgatttcgtggatttcagtgccagtcgagcgattttggcgagttcctcaacatccagggccgcccctccgatcaggaagccgtcgacgtcgggttgggaaatgagttccgccgcgtttttcgaggtgaccgatccgccgtacaggatacgtacgctatcggataccttcgtgccaaaagtggtcttcaaatcgttgcggatggcgtttgcggcatcctgggcggattgcggagtggccaccatgccggtgccaatggcccagacaggttcgtaggccacgatgagttcggcggcttgttcttcgttgagatcgcgggtgacgtctcgtacctggcccacggcgaaatcgagttcaatgccttgacgtcgttcctcgaagctttcgccgacgcacaaaatcggctgcatgccggcggcgagcacggcacgtacctgatcgacgatattggcgtcatcttcaggatggtatttgcggcgttcggagtggccgacgatgacgtacgagcagccgagatgggcgatcatgtccgcggacacatcgccggtgaaggcaccttgggtggtcacggaaacggattgtgcgccgtaggcgacatggagcttgtcggcttcgaccagcacctgtacgctgcgcaatgacgtgaacgaggggaaaagcgcgacttcgcagcgtttaaagtcaaagcgagcgtcacgcaacagccataccagcttctgcacgaagtaagtggcttcaagatggtcgaaattcatcttccagttgccggccaccaacggaatgcgtttggacgccatatgtttcccctctaaaaaaatacgtagctcccctcaaggaggggagctagaaaatggattactcaagcaccttcagaccagggagctccttgccttcgaggaactcgagggaagcgccgccaccggtggagatgtgggagaagccgtcctccgggaagccgaggttacgcacggcggaggcggagtcgccgccaccgacgatggtgaacgcaccggctgcggtggcgtcgaccagaccctgggccacggccttggtgccggaggcgaactcaggaacctcgaacacgcccatcgggccgttccacacgacggtcttggagtcgacgatcttgtcgtggaagagcttctgggactccgggccaatgtccagacccatcttgtcggccgggatggcgtcggcggcaacgacttccggagcaaccggggtgtcaccggccgggaagccggcgttcacggcgacgtcggtcggcagcacgagctcaacgccgttcttctcggcggtctcgatgtagcccttgaccttctcaagctggtcctcttcaagcagggaggtgccgacctcgtagcccttggccttgaggaaggtgaacaccatgccgccgccgatgaccagacggttggccttgtcgagcaggttctcgatgacgccgagcttgtcggagaccttggaaccgccgagcaccacggtgaacggacgctccgggttctcggtggccttggacagggccttgacttccttctcgaccagcaggcctgcggcggccggcagatcggcggcaacgtcgtagttggagccctgggcgcggtggaccacgccgaagccatcggaaacgaaggcctcgccgagggcggcgatcttcttggcgtaagcggcgcgttcgtcggcgtccttagaggtctcctccgggttgaagcgaacgttctcaagcagcacaacatcgccatcgttcatggcggcgaccttggcctgagcgtcctcgccgtaggtgtccttggccagcggcacgttggtgccgagcagctcgccgaggcgggcggcaaccggggccaggctcagctcaggaacgaccttgcccttcgggcggccaaggtgggccatgaggatgaccttggcgccttcttcgcgcagggtcttgatggtcggcagagcagccttgattcgaccgtcatcggtgatggtggtgccgtccagcggaacattgaaatcagcgcgaaccagaacgcgcttgcccttgagatctccaaggtccttgagtgtcttcatgaatatcctttccttgacgaatcgcacgtcaaagtggccaattttgccactttgcatattacaggcattccggaacaaaacaccgcattcgtctactgactgaatgcggtgtttcgttacgtcgttgtcgggttacttgccttcggctgcgcgagccttctccgttttctcggcaagctgaagcagtcggcgaattcggccggcaatcgcatccttggtgatttgcggttcggcgatcttgccaagctcctcgaggctcttgtccacgtgatcgatgcgcagctggccggcctgacggaggttgtccggaatgttatcgccgagcacttcgaaggcatgctgcactttttcgctggcttcggcggcagccttggcggaacggcgcatattggcgtcatcgaagttggccagacggttggccttgccgcgggcctcgccgtcggagcgcttgccggtccattcgcgggccgaacgggtggcgcccatgagcttgagcatgcgttcgatggcgtcaggatccttgagggtcacgcgctcggagctgcgcagcgtgcgatgcttggcctggatgccgagacgacgggccacgccacacagggccatggcggcctcttccgtggggcaagcgatttccaggaagctggccttaccgggatcggataggaagccacgggccatgaaggcgccgcgccatgctgctttgatttgggcgatggatccgttgaccacttcagacggcagtccacggacctgctgcttgcggcggtcgaccagtccggtctgcaaagccaaggccactacgttgcgggtgatgagcaccacgtaggtctcgacagggccgttcggggtctgacgggtgaggtggttgacctcggcttcatgcccgaacgtgttcctcaacgtgttcttcagccattctgcaacgtcaagcgaggtgaatacggcttggataacgtatgtattctgtaccggtcgaagaccgccgccaaaacggatcatggccgcagcttgggccttgatcgcggctggtgaatcgccttcaaaggccgccaactcgcttttgacatcgtccagaagagccaagatctacctcctacagtcccgttcttctcaatgcttcaggcgcttcgtgccgttatctgctgtcatacggtcggaagccatcggctttctgtgatacctaatctggtggacaagcgaacccgtttgatacgtattatgggctttgctttctcgcagtgtggtcaccgaacgcttgcccgatgaccgctcgacgcctgcttacgatgagtgacgcttatgctgttctctcgcggaaacggttacgttgagcccatgtgcgcgtaagcggcgagccagctcttcgctcatcgccaccgaccggtgctgaccaccggtgcagccgacggcgatggttacatagtgcttgtcttcctgggcgtatccttccaacgcaatctcgatagctttctcataagcgtcgagaaattccttggctcccttgctggaaagcacgtagtcggcgaccggcttgtcgtgcccggtaagctcgcgcaggttgggaacccagaacgggttgggcagaaaacgcacatcggccacgaaatcggcgtcgatgggcatgccgtatttgaagccgaagctgaagatgtgtaccgccacggtggtggggccggaaccgagcatcgtctcgtagagtttggtggacagctggtggatgctcagggagctggtgtcaatgacccagtcggctcgctccttgaggtcttccagcaggtgacgttcctcaaggatgccgtcgatcagtcggttgccgtgctgcagcgggtgcgggcggcgcacggattcatagcgcttgatgagcacttcgttgctggcgtcgaggaacagaatatgggttttgacgccgagatcatccagatggccgagcacggcggccagctcgtcgaaatagctggagcgcacgtcgatgacggcggcaagcttgtggacgcccgaccccgatccggaaccggaggtggtcatcatgtcgacaagcgggataagcagtttgggaggcaggttgtcgaccacataccatcccatgtcttccacgcagtcagcggcatgagagcggcctgcgccggacataccggtgatgagcagcacctcgaaggcatcaagcggggtcggctggttgtccggagtcgatgtggatgtcgcggaattcgccggcgcattcgtggcggccgcctcgccggtatcgcggattgttgtctgttgactcattacaacgcctcctcaagagctttgcgcatcgcgatctccagctggtcgtcttcggtggtggtgtcctgcagacgctggtcggcatcgctgggcgggtcgtcatcccagataccggtcatcagcaatacctgtacgagagcttggtacagcagcatttcttcgccgccgatggcgtgaccgccatgagcgcgccaggcttccatgagcttggtggggcgtggatcgtagaccacgtccagcagcagtccggagaatggctcggttccggcattggtgagggcatccgcgacgttgtcggccgcatgtccgggaatcgtgttgatgacataggtggcgttgcgggctgcctcgagcagggcctgatcgtcgcctaattcgatttcgctgtacgggttatgcacgttgacgaacttttcggccactggtttaagcccggtgtttttcccagggtggcgggcggcgacgatgatatggccgatttcgggcatcatgcagcatgcggccaacgccgaagtggcggtgttgccattgccgaggatcaacgcggcgccgcttctcgatgcggtgtggtgttcgccgagttcgcgattggcgtggtcgaaggcgagttggatgccgatgacatcggtgttgtacagcttgatgcccggcttgccgttcggccaagcgggatcatcggtagccacactccagtcgaataccgcggtattcgccaccttcagttccttggcccacagattttccggaacaccgtacggttggatggtcttcttcaacggcatggtcaggctcaggccagcccacgtcgagccaaggcctttgaggaaagcgtcgaggtcgtcttcccccacctcgtgcttgtcgtacagccaatcgtcgagtttcagcgaacgataagccgcgttgtggagcacgggcgacaatgagtgcgcgacgggtttgccgagtacagcgcaacgatgattggccatatcccctccttgatgtctgtttccatgctagccgacactttgcttcgaatatgtcaaccacaggccccgcaaccgaaaattcactctgggctgctggaccgggccggctcactgctcgtgcagcgcgttgtacagcgctttggctttggcgtggccgatgcctttgaccttctcgaagtcctcgacactggcttcgcgcatggctttgaccgagccgaagtggttgagcagccgcttctggtagctttcgccgatgccgggaatctcgtcgagcgcgctgcgcagggcgcctttgcgccgctgttggcggtggtaggtgatggcgaagcggtgggattcgtcgcgtacacgctgcagcagatacatgccttcggactggcgtttgaggatgatcggatagtcgtcgtccggcacccacacctcttccaagcgtttggccagtccgcagacggccacgtcgatcacgccacagtcctcaagcgccttggcggcggccatgacctgtggcttaccgccgtcgaccaccaccaggttcggcgtgtaggcaaagtgatgccggtttgtgttctgctggacgatgtcgggcgaggactcccgtgcatcgttctgcactccgaccggcaccgcgtgccccttgccactgatgtcggaaccgccctcaccattgtcgttaccgttcgcaacgattgtctccgccgccacggcagtggtcatcttgccggcggccgaggccgcacgctgttccgcgtcgatgctttcgccggagtcgccggcgatgttgccgtgcctgaagcggcgggtgagcgtctcgtaaagcgcggacagatcatccaccgcgcctttgccgtccttgcctcggacggcgaagcgtcggtattcggatttcttggcgatcgcgtcttcgaacaccaccatggaggccacttggaaggcaccgcccacagtgttcgaaatgtcgtagcattcgatgcgcagcggggcttgcgcgagtcccaatgccttggccacatcgttcatggcctgggtgcgtgcgcccatgtcggagatgcggctcatcttgctgcgttgcagtgcttggctggcgttctcgttggcgcggtccataagctgcttcttgtcgcctcgcgaggccacgcggatggtcaccgcgcccccgcgcagattggtcagccagccttcgagttcctcgcggcgggccggttcgacgggcacgatgatttcgcgcggtaccggtgcgatgggtgccagcaggtccgcgcgtccggtggtctcctgacgggtgttgcgttctcgggtggcctgggcgcgtgccacagcgtccgtggccgtgatggtctgcgtggagccgatggcctcgcgattggtggagatggtcgcggccgactgggggtgattgtccccggcggcgtccgaatacacctgcaccagaaggtcggccatcaagtcggcgtcatcgatgtcctcaactcgttcgacgctccagttgcgttcgccgcgaatagagccggcgcgcacataaaaggcgtgcaccgaggcttcgagctcgtcgctggcgaagccgaacacgtccgcgtccacatcctggtcgaagacgacggcgttctgttgcaccacggtttccagcatttggatctggtcgcgcagtcgggcggctttctcgaattcgagttcggcgctggcctctttcatgtcgcgggtcaactgggcgatgtatggccgtccgagtcgtccggtcatcacgccgaccagctgttcgcacagccgccggtgttcgtccgcttcgatacggttcacgcagggtgcggagcatttgccgatggaggcgaacaggcatggccgtccggtcagttgcgccttgtggaatacgttggtggtgcaggtgcgtaccgggaacgtgcgcagcaaccggtcaagactgtgccgcaattcccacactttggcataggggccgaaataccgggtatcccgccgtttgcgcgaccgcgtgacccacacgcgcggaattcgctcccccgtgctgaccgcgagatacggataggtcttgtcgtcgcggaactgcacgttgaaccgtgggtcgaattccttgatccacgtgtattccaacgtcagtgattccagttcggtggcgacaaccgtccactccagactgcgtgcggtcagcaccatggtctgcgtgcgcggatgcagcagatacagcggctggaaataattggtgagcctgttgcgcaggttcttcgccttgcccacataaatgacgcgcccttccccgtcgcgccatttgtacacaccgggtttggcggggatatccgaggtcttgggtcggaacaggtcgcgagaatcccccagcaaaggtgccccattcgcattcaccttcgccgtcgtttccccggcgcccacagctacgctttccggcattaacgccgccgcggtcttccgccactcatccggactatgccgctcaatatcgttcgtcataatcctcctcgctattaagcaaaaccaatcatcagggattgggtgggttggtatgtgctgctggaccgtaaagacttggcctgagcggcccggagcgtgtccagcaacataccaccccaacccacccgaggtcagctgcaatggaaggctaaagcatggatttcaggaacttgccggtccatgaggattcgcattcggcaacctgttcgggcgtgccctgcgtgacgatggtgccgcctccgtcgccaccctccggaccgagatcgatcagccagtcggcctccttgatcacatccagattatgttcgatgacgatgaccgtattgcccttgtccaccagggactgcagcaccttgagcagcttgttcacgtcttcgaagtgcaggccagtggtcggctcgtcgaggatgtacacggttttgccgtcggatcggcgctgcagctcggtggcaagcttgacgcgctgcgattcgccgccggacagggtgggtgcgggctggccgagtcggatgtagccgaggccgacgtccacgagggtcttcaggtatcgggagatgccggtgtacgccttgaagaagtcggcggcctcctcgatgggcatgttgaggatgtcggccacggtcttgccgttgtacgtgacttcaagggtctcgcggttgtatcgtttgccgtggcagacctcgcagtccacgtagacgtcgggcaggaagttcatttcgatcttcagcgtgccgtcgccgtggcaggcctcgcatcggccgcctttgacgttgaaactgaagcggccggggccgtagccgcgcacctgggcttcgggagtcttggcgaaaagggtgcggatcttgtcccacacaccggtgtaggtggcggggttggatctcggcgtgcggccgatcgggttctggtcgacgtggatcaccttgcgcacctggtccacgccttccacgcgcctgtggcggccgggtacgatgcgtgcaccgttgagcttgtcggcgagcaccgggtagaggatcgtgttgaccagcgaggatttgccggagccggagacgccggtgaccacggtgagcacgccgagcgggaagctcacgtcgatgttcttgaggttgttctcgcgggcacccacgactttgagcacctgggtcttgtggatcttgcggcgcttggagggtacggcgatctctcgccggtgggcgatgtagtcgccggtgatggagcgcttggcttcgatgaggtgcttggcggggccggagtagatgacttcgccgccgtgttcgccggcgccggggccgatgtcgaccacccagtcggcgcggcgtatcgtgtcctcgtcgtgttcgacgacgatcagcgtgttgccgagatcgcgcaggtggtgcagggtttcgatgaggcgttcgttgtcgcgctggtgcaggccgatggacggctcgtcgagcacgtacatgacgccgaccaggccggagccgatctgcgtggcgagtcggatgcgctgcgcttctccgccggacagggtggcggccgcgcgcgagagggtcaggtagtcgaggccgacgtcgttcaggaagccgagtcgggccttgatctccttgagcacttcgccggcgatcagctgtgccgagccttcgagtttcaggccgttgatccaggcgagttcgcgtacgacgggcatgtcacatacgtcgaagatggatttgccgtccacggtgacagagagcacctcgggcttcagacgacgtccgtggcagacctggcagggcacttcgcgcatgtacgactcgtagtattcgcgcatggactgcgaatcggtttcgtcgtggcgtcgcatgagcgtgcggatcacgccttcgaagccggtggagtattcacgcaggcgtccccagcgattgcggtaggagacgttgaccttgaagtcgtggccgtagaggatgtcgtgcttgacgtcgtccggcaggtccttccaaggggtcttcatggagaagcccatttccttggccaagccctcgaggatgtggccgtagtactgggaggtcatcttggtgccgctccacggttcgatgacgccgtcggccagtgacttgtccgggtcggagatgatgaggtccgggtcgatttccagtttgaagccgagaccggtgcaggcggggcaggcaccgtagggggcgttgaaggagaaggtgcgcggctcgacctcatcgagttcgagcgtgtgcccgttcgggcagctgcggtgttcggagaacggctggcggcgggccgggctgccttcctcctcgtccacgaagtcgatgacgatgctgccgttggcgagcttgagggcggtttccaccgaatcagtcaaacgttggcggataccgtccttgaccacgagtcggtcgaccacgacctcgatggtgtgcttcttctgcttggtgagtttgatgtcgtcggacagctgtgtcatctcgccgtcgatgagcgcgcgggcgtagccgtcggagcgcagcagctcgatcatgtccacgaactcgcccttgcggcccttgaccacgggcgagagaatctggaatcgagtgcgctccgggtagccgagcagcgtgtcgacgatctgctgcggggtctgggaggcgacgggctcgccgcattcggggcagtgcgggatgccggtgcgggcgaagaggagtcgcaggtaatcgtagatttcggtgatggtgccgacggtcgaacgcgggttgcggttggtggtcttctgatcgatggagacggccgggctcaggccctcgatgaagtcaacatcgggcttgtccatctgacccaggaactggcgggcgtaggcggacagggattcgacgtagcgtcgctggccttcggcgaacagggtgtcaaacgcgagcgaggatttgccggaaccggacaggccggtgaacacgaccatacggttgcgtggaatcgccaggtcgacattcttgaggttgtgttcgcgcgcaccctgaatcgtgatcttgagatcgttcgggatgtgcgagatatcagctaccagcgaaccatcgtgttcgatcagcggcgcctttttgatttcccggctcaggaaggagtcgctggtcatcaccttttcgacgatgacctcaccgttcttgcccttgctggttttcgcgccctttgcgcttgttgcgcgccttgcgccagtccgcgttgccgtcacagccacaccccaccttccatctcaccgttcccgcgcgcacggttatgcgcgcgccaaatctgtctcaaggatacccgaacacacgaccaaattcgaacgcttgttcgatggcgtgtcaggccggaaaaccgaaccatagtatgcaaaattccggaccatcagtggaccgaaacgcaagagccggcccacgcgacatcaaccgtgcgcccagccccagtcaagctctatcccgaagacctctcctcctctgatttgccccggttcacatgtcaatcgtttgacgtccgcatcggggcaaaacccgctgtcccggttcgtgattttggcctgttttcgagaaccaggacattccagtttccacggaccacataaaacgcgaacggaaacggcggaataaagccaatctcagaatcgccatgttgtcccgattctcgcatcaaacgattgacgcccataccggggcaacacaacatgtcccggttcgcgaaaaacacccgaaatcacaaaccgggacaacggattctgccccggtacgtccgtcaaacgattgatgttcgaaccgggacaaaatcttcaatggactccacggggatgccaagcttgcgtaattcgtcaactgcatcacgcatgggaatgcgttcctgttcgatacgccgataagcgatggttttgtcagcacacagtcgttcataaagacgtcgctccgccgattgaaggccgggcgtcggcttaggctcccgcatagcaatcttcgcgctgcgttcagtacgatcggtaccaaaatcgtcgtgtcccggatcgagataacggaaccgcagttcggtcggccgtttcgacagacccaacgtttcgacaccgagcagtcggcaaatggccttacgacgattggtttttgactcattcagccatttgccgctgaatcctgtcagtggaatctgtgcgacggtgcgcttcgcgatattccgccgccagcatacgaccaaccacacgcatggctattgattcgtcaggaacgacgactttggagatcaactcgacagaggtgcctatggtgcgatgcttggttatgatttcgcaaccattcttgcttgcccattgccgtatctcattgttgttgtcatgcactgcaatcgcattggtttccaaaaatgcttggtccggcaatcccaccggcacgggaaatggccatgccggttcgatgtcgtacatatgtgaacgcatatgtttcttcacgcatgtggtgatcgcagcgatgtctttcatgccggccgtagttcccatcacctgctttcgaacatcgtcgagtcgaaccgaatcgtcttaataccggcgacgccgggactgctcattcggcaaccccgtcatccttcaatatatccgacgatgattcatcgtccatgtcattctgatgcagcacggcctcgcgcagggaggtgaggccggtgtcggggtccttgtaggtcacgtaggccttggtggagacctcgaggatttcaccggtcttgctttccggggcggagacgatgacctggaatccgaggcgcggcagcaccgtgagggcgcgctgcgtgtaacggccgtcggccttgatgagcgcctcgtcgaggaacagcgtggtgtacgagggctcgctggtcaggccgccgccaagcaggtagatgagcgccgcgccgtatacgaacgaggtgagctcctgcaaggcgccgcccgaacggccgccggtggaggtgatgcgttcgtccggaccgtcggcatgatgcacgatggcgtagaaggacgagcggcagcgcgggtcgaggttgcgggcgccgtagcttttcacgccgttcgtgtccttgacctgcgcgagttcggcgcgcagcagcccgaccatcggcgcgcaggccgcgaaagccttgcgcgaggcgtcggaatcgttgacgtcggcggatttccaatcgttcagggtgccgatgacgcggatgagctgcgcccagaaggtgcgctcgggacggcgcacgtccgcgtgcagggacaggctgccgtgcttggggccgaactgttggcccttgagcatggcgttgatgcggtcaagctggtcgtggatgtcgctggcatccgtgtcgatggcgcgtttgatggtcaggaagctcctgagcagctgttcgaggcagcgccggtattcggcgtcggtggcggcgaccgcggccagctgggtgaggctggcgagttcgtcgagatagtaccggtagtcctccacgctggcggtcagcgaatcatcgtcggccgcgtagagcgcgatgtaggtgctcattttcgattcgacgccggtgcgtgcggcgtcggcctggccgttcagcaggttgatgcgggaggccatgtccttgccgatgccggcgatggtgcgtccggggaagctctcccccggcgcccgcgttccgaccacgcccgcgccgatgatcatgtgcgcgcgcatggcggcgtccgccaatccggcgaatcggttgtcgtaggattcggcgagcgccgccgtgacttcgtccggcagcgggccggaagcggcgtcatcgtcattgtcggcggtggcaccggcggcgtccgtcgtgccggtgtcggcatggtcgcgcagccagatgagcgccgcttcgacggcgctgccggcgcgggccgcggcctggtcggattcgatgcgctggcgttccacacggtcgagttcggcgttcagttcgtcgcgctgtttggcgagttcggcgagtttgggatcgtttttgatggatgcgatggcgtcctgcgtgtccgtgatggtccgttgcgcgccggcgatgtcgatgcgttcccaggacgtgtaggcgagctggttggccagttcgagttcgcggtggaggttatcggactgtgttttggcggccgtgtagtcggtgtcggcttggctgagcgcgttgcgggcggcgtcgacctgcgctgcgagcgcgttgaggtaggtttcgttgacgaatccgatgacctgggcgcggtctttggtgccgtgctggccgcgtgcgccggatttgatctgaccgtcggcctgcacctgacggttggtgcggtcggtgtcgtcgatggcggtgacgcatagggcgtcgaatcgttcgtcctgggtctgcgagcgcagccagtcggcgaagggcgagtcgtcgcggtagcgcagtttgccggacagccagtcgccgtcctgttctccggtgagtatgttcgcgtgcgcgccggtgtcgtcgtagtggcgtgcggtgtccacgaactgccaggtgcgtcggggcatggtgcgcgggtcgatggtgctgactttggcggcgaagccctgttcgtggcgcttgtcgacgaggatggtctgggcgatgggcgcgtaggcgacgttcatggcgagacgccagtcttcctcgtgttcgttcacgtccatgagttcggccacgtacggcagttcggcgggggcgagtccggtggcgcggcagagcatggcgcgggtttcgtccatctgctgggagatgcgggtgcgctgggagcgttgccggtcgaagtcgcgttgcagtcgttcgaggtcgccgcgtgcgccggcccgtgcgttgatggcggcggtgagggcttcctcgcattcgccgtctcgtttgttgtattcgcgtttgaagttcacggcgttgatgcggcgttcgttccaggactgttcgttgccgggcagcgtctcgccgatggatgcgaacgtttgttcgattcgtgttcggttggcttgcatgtcttcgagggtgcggcgggcctggtcgagttcgagttcgagtcgggtcaggttgccgccgtccagaccctgcatctggcctcggatcatgtcgaggcgggtgcgcaggtcttcggttcggcggcgcagcagcttggcttccgcctcgctgttctgttgttcggcgcggtcggcgggcagttgggcggcgacttcgccgcgcatgcgggccaatgcccagtcgcgcagcacggccggcaccgtgccgtcgacggccggcttgaccggttcgaaggcgcgggccttgccgcgtgcggcggcgtattcgccgtaggcctgttggatgccgcgcagcgtgtccatgcggcgggtcttctcgtccatggcgtggaagttctcgtcgtaacgttcgtagtcctcgaccgtggtgcgggccaggtccagggcttcgggcacgccgagcacgccttgtttgaagatgtcgtcgagccgggagggcgcgtcggcggactggatcttgtgcagcagtcggcaggcggcctcgctcaggcccattgcgctccagatgtgtgtgtggaacgcttcggcgctggggaatgtgaggcagtcggggtaggtggctttgagctgggctggtgtgaacggggcgtcacggtattggtccatgcgcctggggtccacgggcttgccccagaccacgtactggcggcgcacgtcgccgcggccgtcgccgggcatcaggtagaggaatttggcgcaggaaagcacctggccggtggtctggttgcgataggtgtccacgatggcgccccacacgggttgcggcgcgccgttctcgtcgcgaccgcgcaggtagagcggctcgtcgccggtttcggtgctgcccacgccgaccatgccgcgcaggtaggtgtagtcgctgcgttcggagcggccggagttcgaggccttgttgaacggcgtgccggtcgggtacagcagggagatctgcgcgtcgaccagcgtggatttgccggattcactggcgccggcgagcagggtcaccggcagcttgtggtccgtggaggggcggaattcgtggtagccctcataggagccccagttgatgagtcggcgggattccagcatccaccggtccgcgatcatctgcacgtctgtcgcctgcatcattcggctcccttctcgtcgtcatcgtcatcttccgtgtcgccgtcgccgtgttccgcgacgtcgagccaggtgtcggccagttcgcggtcgagcaccacgggcacgagcggcgtgatctggtacatggcttcgtcgtccaggcgcgccaaatacccgtaggtgatcatcgcggagacgatggcgccgatctgctttgccacgccttcctcgtcattgcgggctgccaggtaaccggcgccggtggcgagcgcggcgcggatctcctcaaagctgacgagccagtcggcggggtcggcgtgcacgttctcgtattcgaggacgcggatgcgcaggaaggcgagcagcgcggcctcctcgcgtttgaggctgacacgggttttgagcgagcgcagggtcacgtcgtcgccggccacgggcgtggcgtacatgatacggtagcgttcgttgatcaccaagtcgagcaggtcgttgttcagggagcgtacgacgacgtcgcggttgtcgagcacggtgtcgtaggtgggcccgctgatatagcggtcgcgtttgagggcgatggcggccatgcgtgcctcggccggcatgtcgccggtgtcgccttcgaacagggcgtacgggttggcgttgtccatgtgctcctcgtgttcctcggccacggtcatccttcctccacaatgatgttcagctcgtccatgtcggccagcaccggtctagtgatccagtgccggggctcgccgtcgatcgatacgcaatgccaagtcgcggtatcgccgcgctgcgccggggccggctcggtggcgatgtcgctgtcgatgccgacgccgtcagtggacggctcgtcggcgatggcgctgccgcttacggctcccagcccgcccaggaagccgacgatctcgctttcgcggcgttcgctttcgggcagccggttgaagctggcggcgatgtccacgagggttgcgttggacctgtcatcggacctgtcaacggtcaccgggttgcgccggatgaggctgaccatgcgcaggagtcgggggccgccgctgttgaccatatcccgcagatcggccaccggagtcgcctgcggggcttcggcggcgaggtcgctcaggccgggtgcggtggcgcgggtcatggatttggccgggcgcatcggcaatggcgcgaacagcgcgtccgcggtggccgtgtcgtacgggcgcgaggcgtctcccatatgggttttcgcatccgcgttgaggcgcgcgtacagtcggttcaagcgggtgagcatcgtacggtagcgagtgtcggtttgctggcgcacgagccggctgatcgcctcgtcggagacgcgcatctggcggcgcacggcttcgatgccgtcgtagatgcgggccagttcgtcgcggatctggccgagcagcacgccggattcgccggccagatacggggttttggcgatggcgcgcagggcttcgtcgatttgctggcggccctcgtcggtgatgatcacctggaaggcgtcctcgaagcggcggccgctgtccgattcgctgaacgagcggcggtattcgtcgtggtagcgggtcaggttctcgtccacgctgatgtcgccggtctgcatgcgccggcgcaaggcgtcgccgttgtcccgctcgtcgagcacgagttcgcgcaggtcgatgggtacgccgcgcagcgtgttgtggatcacggcgatcacgtcctccacttgggcttcgctcagcgtggcgtgctgcttgccctgttggatgcgtttgatctcgtgcttgcgttccttgatttcacggttgaggagtttgatgcgctcgccggggtcggcggtcagctgcatgcgcgcgtgttcgatttccatgatgatgctgttggcctgcgcgccggacagggcgcgtgattcgtcttcgagcctgctcagtgcctcgatggcgcggtgggcgcgggccgtcaaacggtagaggaatcggtgtgtggccgcatcatgcgagttggcgagccaggcgtagtcgccttcgccttcacgggtcaggtcggcgaggatctgatgggcggcctcggcgaaggtctggtcctcgcgcggcgcatattcgccggcgtcggccagagcgttcagactttgcgcgaaccgctcctccacggtctcgcgcggcagctcgccggtgagcgggtcgaacgtggaacgcagcagcgacacgtacagcatcgcgttctggcgcaacagcaaccgcaggacgcccgtctcatacaccggtcgcagccgttccagctcccgcatcacatcggccacagcatgcctccctctgtcgtgaccgcaccatactagccgatagccgcgaaccacaccccgcccgcgccacgcgtgctctctcccgcccagcaccaatatgtcacttttactgcacatgtcatcatgtgcagtaaaagtgacattgaggctgcgcactcatggtgatcgttcactccagccgtcgcccctattcgccgcgcaggacctcggtcggggtgagacgggcggcgcgggaggccgggtagaggccggcgaggatgccgaccaggatggcggcggcccaggcgagcggcagggaggtccagtcgagggcgatcggctggccggcactggcggcgacgccgatggcagcgccggcgccgagcgcgatgccggcgaatccgccgagtgtggacaggagggccgcttcggtgacgaattgcatgcggatgttgccgggcgtggcgccgagcgcgcgtctcaggccgatttcgccgcgacgttccatcacggtgacaatcatcatgttggcgatgctcatgccgcccacggccagcgcgatcacgccgatcatcaggccgagcgtggtcagtgaatcgttggtggtgtttcgcgctttggataggtcggcggacgcggtgacggacacgttgccgccggccgggttggcggcgtgggcgagcgtgcggcgggtgccttcggcgtcgccgggcgtggtgcgcacgtagatggcgctgatccgtccgatggtgtcggcctggtcggggtaccggccgagcgcccattgctcgccgatgatgacggcggcgttcaggttttcagcctgcggcgtggggttcaggatgccgatgacgccgtaccatgcgttgtcgatgaggatgcggtcgccgggctcgttgacgccgagccggtaggcggcgtccgagccgagcacggcgacgggcaggtgctcgttgttcgcgtcgatgccatgaccttgggcgaggcttgctccgacggcgtcgagtgcgccgggccgcatgatggcaagggccagcgcgttgccgttggttttggggcacagcccgttcttgaagatctgcaccttctctggcgcggtgtcgaagacaccgacccgttcgacctgcggctgacgggcgatggttgtgggcgcgtaatccggcagcggaaccttctgctgggcggcgtccacgccgggggcgaccaccgacagattcgcgccaagcgcgtcgagttgggcgaggagcgctgcctggttcgatgcggcgatgccggacaacgccacatatgcggccacgccaagcgcgatgcccagcgatgccagcaccgtgcgggacgcccgcccggcggccccaacccaagccgcatgcatcaaatccgcaattcgcgtgcgtattggtttactcataggagtacgttcactcatatctctcccccagtcagcctttggctgacagcccctcgtcagagggggcttgattcggcttgtcgagttcggtgactaggccgtcttggatgtgcagacgcctggggaaacgtgcggcgatggtctggtcgtgggtgaccatgaccaggcttgcgccggaatcggccgccgtgagcagcaggtcgacgatggtgtggccggtttcgcagtccagcgcgccggtcggctcgtcggcgaagatgatgtccggccgtttggccagggcgcgggcgatggccacacgctgctgttcgccgcccgacaactgggccggccggtgatgcaggcggttccccaatccgacctgttccaacgcctcggcggcccgttgccgacgttcgccgcgcggcagggttgtgtattgcaggcctgtcatcacgttctccaaggcggatacggtggcgatcagatggaactgctggaacacgaagccgatgcgcgcggcccgcaggacgctgcgctgccgctcacccatcgcattcacatccccgccgtcgtatcgcaatattcccgaggtcggcatgtccagcgtgcccagtaacgacagcagcgtgcttttgcccgagccggacggcccgacgatggccacgagctcgctgcgatcgatggccagtgacgtatcatgcaatatctccagcacgctcccgtccttgcctggaaacgccttcgtcacatgctccaacgtcagcaatgccccatgctctgggccagcgggggcaaactcgatgtcgttcatgagaccaccaccttgtctcccgccttgaggccgtcggacttggtgatttgcacttgcgcgtcggacaccagcccgattgacaccggcacacgcaccaacttgccgccgcgtaccgcttcgaccgcatacgcgctgccggcgctggcgatcagtgcggtcaccggcacgatcagcgcctccccggtcgaggcatcggcgttcgggatgatgacttgcacggccgtcggcccgaaagccgccacctgcgactggtccgggaagtcgatgcgcgccgatggctgtgtggcttgcccgttgtcgccggtcttctgcccgccctgatcgaccgaggcgagcgtcgtttcgacggtggtgttgtccggcagcacgacctgcgccttgtctccggctttgaacatcgccgcctgcgtggcggtcaacgtggcctgcgcatgcagggtgacgcccgtatagcttgccgggctgacctgtgattggccgagtttcgcgttcaccgccgtgatgcggattggtgcggccgcggccagggccaccgtattcgggtcgaatgtgccggtgaccgcgtcgccggtcaggccgagcgagcgctgccattgccggatcgcctcgcgggtcagccagttgaaatgcggtccgacctcgccgccatagaatccgagttcctgcaggttctgctccagttgcgtgacgtccgggccgtcggagacgccatcgccgatcgtccgccagaacgggcggtcgccatggaacagcggcacgggcgcgccgtccatctcgtacacctgttcgccggtgttgatctgtttgccggccaccggcagttgggtgattgtgccggaagcggccgcgaaatcggaggcgtcatcgtattgcagactcgcgccgagccgggtctcggcgttgagtacgcccttggtcacctcctgcgtgcgcagcgtggacacatccacctgctgcgatcggccagtctgcccggtcgcggtgacgtgcccggcccacgtccacggcctcaccgccacgcacaccgcggccagtccgatcacggcgatcgccgcgataatcatcgtcacgattctgcggtgtttcccgaatctgcgcgcttccgtccgtgtcatgattgctcctttgtccgttatcggatggccgtctcattgctggggcgcggcttcggtggacgcgctgccggaggtgaattcggagaggactttgttgtagtcatagccgaattcctcggtggtgccagcgaaggcataggagatgttcgcgccatcggtcgggcattccttgaggaatcggcgcagttcggattcgcttacggtgccgggaatcgtgattgaggtgggcgtatcggcgtccgggtccttgacccagtcgaagcccttcttacgcgcggcctgggcgtaggcgagcgccgcctgcttgtcttccccggaatactggtgttgcggccccatgtccggaatgggctgggtgaagtcggggttcttggcctcgcagtcggcgtattcccgctgtttggatccgtagggtgagccggcgagcgccttggcgtccttgaacaccacccaggtgctgtcgtcttccatcgacgtgtaggcagcgttcgggtagagttgcgggccgtcgtcggatgcgctgaggctgttgccttgggaggcgaccggcttgccgtcggtgccgatcatgcgcagtgcgaccgcgtttttggtcggggcttgtttgcccgagccggagccggacgacacgccagcagccgtacgcgcgtcgaatcctttgccggtcaggcaggcggcgaatcgcttcgccgtggcgtcggtggtggtcgtcgcatcggaccgatcgtcggcacctgagcctgttccgactgccgccagcggtgacgagcaggcgcccagcatcgaagccagcgagagtgcggacgtaagcattgcgattcgccgtaccaggcgcgtatgagtagtggacattaccgtctccattccgtgagtcgattgtgacgacttccatccaatcgccctcaccgtggagcgtcggtaagcggacggattactttcgccttaccgtagaatcgggaaaatgttgggtgatgccattggttcgggaaggctcggaaggggacatgatgcggattctgattgtcgaggacgaccgcgaactggccgccgcgttggacgacgcgctgcgctacgaggggtacgcgaccagtctggcaaccaccggcgtcgaagcgttgaagatccttgccggcacgaacgtggacatcatgctgctcgaccgtgatctgccggtattgtccggtgacgcggtgatggccaccgtcgccgcgaaccgcattcccgtggccgtaatcatgctgacggccgccgccgaggtcagcgaccgcgtgagcgggctggacctaggggccgacgattacctgaccaaaccgttcgcctatcccgaactgctggcccgtatccgcgccctgcaacggcgcagcgggaccagcaacgcgaccgcagccgtgctcacgcgcggcgacatcaccctcgattccacacgccggctcgtgttccgcgaccacgggcgcacgctcgtcaaactcacacccaaggagtacggcatattgctggagctcatgcgtgcggaaggcggatacgtgaccgcgcacgaactctacgatgcggtttgggatgagccgaccgccgccgacccgaccgacgtgatcaaaaccaccatctattcgctacggcgcaaactcaccgatcgcgaggccatcgtctcgacacgcggggaaggataccggctgcaatgaaggcgacgaacacggcgaaagcatcaggtcgtatacaggcgcttgccggcaaactgcggcccaaatcattccgcgccaaactgacgttggccatcagtctcgtgttcctcatcgccatgggatcggcgaccctcgtgcagaccattgtggtcaacagcatgttcacgtacgccacgacggtcaccgccaaaaaccctgagatgcaggtcgaaagccagcacagcggttccggcaccggcaaacgcccggattccgacccgcgaatgttttcccggggaagcggcacaggtctgaacgatatcactggaacatccagcgtcggcggcgatatgggcgacggtgactatcaggtggaatggggcaaggacgggtcgtataccatcaacaccccgtatggcgtctccgtgtggaaccaggacaacatcgccaccggattgcgcatcagcgcggccatcatcttcgtgttcttcgggatcaccagcattctgatcatctggctggtcacctcgcgcatgtcccggcaactgacctccatcagcgcgcaggcggcggcattggacccggccaaacttgatacgcgcatcgacgtgaatgggccgccatctcgccgtaggccccagttccggcgtgcgggcagacgcgggaccgaggattgggatcatagcacggacagccgcacggacggtcgagctgccggccaatcctccgaagtcacgcagctcggtgacgccatcaacggcatgctcgaccggattcaggccgcatccgaagcggagcggcggttcgtgtccaatgcctcgcacgagctgcgcacgccgattgccgcggtggagaccaatctggacgcgccgttggcccaggggcggttccccgaggatgtgcgaccgtcggtacagcgcgcactggatgccaatcggcgcggcgcgcaactggtgcaggcgctgctgaccttgtcccgtattcaaagcgggaccatcggcggcaagcaggcgggcgatgtgacacagatgagtcccgcatcaacggcacgcacatccacagatttgtacggatgcgtcggcaactcccttgcggatatcgacgatgccgccaccaagcgtcgcatcaccataaccgtgaacaaggccggcggcgacgcggacatgtttctcatcgccgccgacccggcgttgctggaactggcggtcggcaacctgctgcgcaatgccgtcgtgcacaacacggatgatgggtcgatcgacgtgaccgtcgtatcggatgaggatggaagcggaccccgtctgaccgtcacgaacaccacggatgagatgctgccggacgatctgaacgagctgacccaaccgttccatcgcggcgagaactcgcgtatcagcgccgtgcccggcgtggggctcggcctgtccatcgccagtgcggcatgcgaggcgatgggagccaggctggaactcggccaaccggccgaaggcgagttccgggcgagcattcggttttgatggaacactcaggctccccttcaaagaggggagctctattgtttcgcacgcaaaaatcacagacagactattgccttgcggaaaatcatcgttagattggcgagaggaatattgtcaatgcatacgaaacggaaaacatcgtgaccgcaccgaacatgcccgccgaaacctctgaccagctcaacaagcccgccaaatccggcaaactggaggtctccgacctcatcaccatcggcgtgtttgcggccctgtacttcgtgatggtgtgcatcgccacactggtgagcaccctgttcaccagcggcttcggctccatcttcctgcccgccggacgctcgattcgcgcgcgagactcttccttctgctggtggcgaacctcatgctgttcttccatgtagggctcgccacgcaaatcgtcatggtcgtgctgttcctgttgcccctgctggcggccgcccgatggcgaaccgcgttgaacttcggcgtgacctatgccgtactcaccgcgctgggaatgctcgaccccgatgccctgggactgccgtggctgcatgtggtctccgcgctggccgtggacgtcacgatgatgctgccctgtttcatcaccgactcgcatggctcaacggcgtggccgaccggtacgtggtattcgacggcggacatatcgtgcaggattacgaggccgatgaattcctgtccctctcccccggctgcgtggccgccatgggattgcgggcgtttgacttggaaccgtatcggcaccggattgcggccctggcttcaagcccggccgccgaa

SEQ ID NO: 1318 - DNA, 3540 bp, Unknown
  R157_18m  MAG No. k141_12301
ccgcgaacaatgaagccaggggagtgccggacaccaaggaaacgctgtgcccgaacgcatcgtacggcggattcatatggtgttcgatatcgctcggatgctggcttggcaaatcctgccacaacgtgccgcccagtgccgcgttgatgaactgaatgccgcggcagatgcccagaatcggcttgtcccaagccattgcggccggcagcagaatcgactccatgcggtcgcgctcaggagagagcacctcgctacggccggtggcggaggccactgcaccaaccatcggtcccacatccggcccacccgtaaacagaaacgcgtcaaaccgttcggcgcattgcgcaagaatgtcggcgtcatcggtcagcggcaacatgacgggcgtaccgccggcccgcattatcgcctccatatatccgggcagcatccacagactatcgcgcccgtaatccatcagcggagtcaccgcaatgagcggtcgattcgtagtcatgcctgcctcttttcgcccaagtgtcgctttcgtcgttctgccgcaaatcgcttgatccagtggccaataatgccgtcactgtaccgaaccaatgtaaccggtcggccagcattatttcgtcagccagccacgacgagatcgcacaatgtgccaatgatggggggctcggtgcgaccttgtcaatgttcgggccattgcactttcagcggggaaagcatgccccgtccgcgcatcgtgatgaacgagtaaggttgacggggagggagaatcacatgaaccaggcatgcgtacgcaacgacaccatcgacgcgggcaaccatcatggccgaccgcaataccggtcgttcctgcgatttctgacatcgcaggaacgcaacgtcatttggctgttgctggccgtcgcttttcttccggtggacggcaccacgcttggcctgtacgcgccgttctggtcgccaatcagtccggcgctattcgccgtgtactgcctatgcaattggcggcaactgcgcatcgcagccaaccggtacctgccaatgttcctcctaccggtggtctgtataatcctgtccatcccgggatggctgaagttcggcatccacctcaacgccgcgttcatgagcatcaccggattgctgggcgtgctcgccactttgggtgcgatcgcccttgcgttcgacatcaaacgcattccgtggcgtacgccattgcggattctcatcgcatcatactgggtttccttcggagtgggcgtcgtgcaatggctgtccatccgtctgcgcgccaaaccgttgaccgactatttctcgcacctcatgtaccggcaatacatcagcgacaactcggtgtggggcggcggccgtccgcagttcctgttcgccgagcccagctatatcggcatgcacctgttcggcatactgcttccgctcatgtggctcatgcgcgggcgcgaccgcatctacgccaaacggctgcgtgacctcatcgtcacgtatgccgtcggcgcggtgctcatgcaagccggcaccagaatcgtcatcgattccgtcgtggcgttgctgatcgcccttgtggcgcgcaccgattggcatgacggcgcacgccgcgtccggggcatgctgcagattctcggcgcatgcgcactgggcctgctgggtgtgctggcggattccagactctccgccatcgcggagaacggggccgagggagacggctcgttcttcgcgcggatctaccaaagcctcgatccgatatgcggattgctcacccatccgtggacgctgctcaccggttatggcgcgggcaacatcatcaatgcggtgtgggccggcgcggccaaagccagacggctgctggacggtcttggtatgaacggcggcgcggccacgggattcgcggccggcgtgaacgcggacacggtgtggacgatgtgcgcgtataccagcgtcatcgccgaatacgggctgatcgggctggccatgctggtcggagcctcgatggtctgcatgacgcgcgggaggacggtatgccgtggcggtgcggatggcgcatcgtccgacgggctggcgcacggtgtttgtgtcaccgacgttgccgacgttgctgatgttgccgggggcaatagtggtgatggcgttgccggcgcgggtccgggcgaatccggcgtctggcacaagaccgtcatctgctggctcgtcctggtcgcatacctgtacatccaatgcgagaactatgcgttcgccgctctgccgctcctcgtgttcgccgcctcgaaggtgaggcgcgagcgctgattcctctcgggccgacgcatcgacgcggcccgagacggaccaaaatccagaataaacgacatttgccgctgttccgtttttcgcccaaggcgtatctcttcccgtatcttgaggtgcatcatgtattgtcgcggctaactaaccggcgaaacgcggcatgtttcgcattttgggcgaaaagcccaaggcccacaggaggtattgatgacgttcgttgcacggtcggtgcgctatgtgctcagaaaacgagtacgaaccatagtgctccttatagtattgaccatcataacggcgagcatgctatccacgatcgcggtttctcgggcagctcaacaggccgccggacgaatcgagaaggaagcggtcggcgggttcgtgctggccagcaacctgcagggcagcatgctcacgcctcgcggaggtggcatggtgcgtcccgccgacgtacgcaggatcgcccaactgcccggagtcgattcgtatatggtccgtcagaacgccaccgccgatctcgtgggggcgaatgtggcgaaggtccccggcggcgatgattacgatgcgaccaaggagcagcagttcggcaacgccgccaacgtcataggcacgaatgattcgtcgaaactcaacgtgttcacgtcgcgcacgctcggcatggccgaaggacggcatctgaaggcctccgacaagtacacgtcgatgatccatgaggatctcgccaaagccaacgggctcaaagtcggagacacgctcacgctcaaggccaacgcctacgacgccgacaacgaatcacattcgacggcgaccgtcaagaccaccatcgtgggcatattcaagggcgacagcgccagaaaggtatccagccgagcggaactcaccgccaacaccatctacaccgatctggataccacacgcgatctgtaccagtacaaggacggcaaggaaatataccaggacgccaccttcgtgctgtccaagggcgttgacgtggagaagaccatggacgccgcgaagaaactcccggtggattggaacaactatcagatcacgcgcaacgaccagtattcgtcgagcatgctgcatgccgcccgcggcgtgcgctccatgatgcgcggcgccctgattggcgtgaccgtctcggccgtgctcgtgctcagtctcatgctgctgctgtggatgaacgaccgccgtcaggagatgggcatactggtgtcccttggcgtcggcaagccctccctggtcgcccaatacctc

SEQ ID NO: 1319 - DNA, 7708 bp, Unknown
  R157_18m  MAG No. k141_12391
aaatcagaacgcgataacgcccaaatgctccaacagcactttgacgccaagtagaatcagcaccacgccgccggcgatctgcgccggctcctgccagcgggagccgaacgcgcggccaatgtacaggcccgcagcggagaacagtccggtgaccacaccgatgctgaggatggcgaatgccatatgggctttggtgaacatgaaggtcaggctcacgcccacggcgaacgcatcgatgctgcaggccacggccaggggaagcatatgcttccaatcgaactgggcggtctccttggagttttcctcatcttcttcgaaggcttcgtgaaccatgttgccgccgatgaacaccaacagggcgaagatgatccaatgatcgaattgggttacgtatttgctgaatgtagatgccgcgaaatagccgagaatggggaacagcatctggaatccgccgagccagagggcgcttttcgcggcgtcttgcactcgtacgcgggatacggccagacctttgccaatggatacggcgaatgcatccatagctacggaaacagaaataagcaggatttgaatgattatcggaatcatggtgcgacagaaggttcatcgccggattaccgtgcgatgggcctcgaccagcgttcctacacgccgcctacgcctagctgaaaaatacaccagcactatatcacgcgatgcacgtcgaatcaaaaaggcgggaggcctccggagaggtctcccgccgacgattcggaatcgaatcacttgccttcgttggcgaggcgttcgcgtgccgcgatgatttccttctcggcggcgtcagcaccggtccagtagtcgcccggcaggacttccttgcccggctccagagccttgtactgctcgaagaagtgcttgatttcggccttgtggtactcgttgacgtcgtcgatgtccttgatgtcatcgaaacgaacgtcggcgggcacgcacagcaccttgtcgtcgccgccggcctcgtcgaccatgtggtacaggcccacggcgcggcactcgaccacgcagcccgggaacacggagttcggaatcatcacgagagcgtccagcggatcgccgtcctcgcccagggtgccgtcgatgtagccgtagtcatccgggtaacccattgcggtgaacagggtacggtccaggaagacgcgaccggtctcgtgatcgacttcgtacttgttcttggagccgcgcggaatttccacaacgacgttgaaggtttctgccatgtcatttctccttgaaaatcgacagttacgttatcgtctcaccacaataccctgtttgcgcctgcaaaacaggtgcggaactcaagaaaccgtgctgagattatgccgacactatgtctaaacagacgaaatcctcccctcaaggggaggatttctagcggtttacgcacacgataaacccatgcacgtcaacggcatcactgttgcattaccgttgcactaccgcatcactgcacggacaggatgtgggccacatccgcccaaggcgccagagacacgtagttgtcccaaccccactggaattcgcggccggtcagctcgtcgcgcacgttgagcgggcggtcggtgggcagacccagctcgccgagttccaggtgaatcatcgactggtgtgcgttgtgtccatcgaggttcacgaccacaatcagcgtgtccgcttggccggtaccggtcagttcggccggcgtgtggcgtgcgaaagccagaatattctggtcggacgtaggcagcacggtgaggttgtggtagctcaacgcggccgggtgggcgcgacgaatcttgttgagcgcggtgagcatctcggccacgccgtactgcttggccttgctccaatcgcgaaccttgacctcgtacttctcgttgtcgatctgctcttcgaagccggggcgctgcttgttctcgatgagttcgtaaccgttgtagataccccaggacggcgagcccatggctgccagcaccgcacgcacgcagtggccggctacgccgttatctcgcacgtaagcggtgagaatatccggcgtggtgggccagaaggtgttgtgctggtagtagccgtcgtcgccattggtgatcggcagatactcttccagttcgtccttggtgttgcgccacgggaagtagcagtgggactgggtgaagcccacgtagctcagggcacgcatcatgcccgggcgggtgaatgcctcagccaggaacaggatctccgggtgcttcttggtcacggcggcaatcacgtcctgccagaaacgcaccggcttggtgtgcgggttatcgatgcggaagatggtgacgcccgcctcgatccacagattcatgatgcgttcgacttctttttcgatgccgggcatgtcggcgttgaagtcgatcgggtagatgtcctgatacttcttcggcgggttctcggcgaaggcgatggagccgtctggcttgtgacggaaccagttcgggtgggccttgacccacgggtgatcgggcgagcactgcagtgcgaaatcaagcgcgatttccagacccagttcatgtgcacgctggcacagggccttgaaatcgtccatggtgccgagcagcggatccacggtgtcgtggccgcccagctcggagccgatgccgaacggcgagcccgggtcatcggggccggcgaccagcgtgttgttgcggcccttgcggttggtcacgccaatcgggaagaccggcggcagatagacgatgtcgaagccttcggcagcggcgcgttcgaggccggccatcgaggtcttcagcgtaccctgaatgatcttgccggtgttcggatcgatggtggcgccttcggaacgtgggaagaactggtaccaagccgcgaagctggacttcgggcgttccaccttgaaacgctggggctggctgggggagatgccatcgcgcagcgggtgagtctcgtgcagggcggcgatggtagggttgtcgccggcggcgaggcgatcctcggcgctcagcgtctgatcggccatggtctcagcggccttctccaaggtcttgcgatcgcgtgcggtcaggccggcgtccggggttgcggcccaacgggccagcagctcggcaccggaattgagcgcgttgtccacgtcgtccatcacacgcaccttgatacgggcgtcatgcagccaggagacgtacgtgtcttcccaaccttcgatggtcacggtccattcgccgagctgacgcttgacggccgcgtagccatcctcccaaggcttcagatcgctgtgttcgccgcacttgaccatcacggtccaacgatcgaggccgggatttacgcaggtcatggcccggcgcatggtttccttgccgcgcgggttgcgcacgatggcggtggcacccaccttggtacggccttcgatgaacacttgggcggtcatctcaaacggttcgccgagttccacacgggcggggaagatgccacgctcctcggcgggagtgatgtccatgacattgatgcggccgaactggccgggctcgtttgcttcgatggacggtgcgggggcttcgacagccaggcctttcagcgctgctgcggcgcgtgccgtttcggcgctgactctcttgcgcttggttgcggggctctttcgggcagaagtcgtctttgacttcgtcttcgtggtgttgttatcggtattactagtgcgcgtggtcgcgcgatgttgtactgctgccataaggccctattctagaggcttttgaacatatgttgcacattgtggataacttgcaggtaaacgttcggtcaaccgcatgaggtggataactcggcggaagagttatccacaactcgccgacaaacggcaagctcggaccacataggccgaaaaatcggctgtagcgaatgaaaatctgccatgatcgtggcctacccgcacacagtgcagtatgcggggaacgtaccaggaaaggacgaatgatgataacgacatggcggcaacggggcatggccatcgtagcgatgctgaccggtctgataataatggtgggagtggtgttcggctcggcgaatacggcgtatgccgcgacgttgacgcccgccgacgaaagatatcacgtgatgtttccatacaacgatatggaatattacgtcggtgtcgcggggctggacgcttcgggcaacaagtactactgcatcgaagcggggaaactgagcgactatgtgataggccccaccacggtgcttgcctccgatgagaatgcccggcgtatggcatggatccttgaccggtaccgcgacacggatgccgccacccatgcggcgatcggcatcatcgtgcaggatcacttcgggcgcgatcgggacgagtgggcgagacagatggcggtcattcaaggccggtatcccgagatcgtggcgaaggcggcccggatatgggatcaatcggccggcaagacgcctgcgggcacgacggtggaacgcaccgatgccgaggctttgcgcagcggttccatctcggtgaaagtggtgaaccgcgacggtgacgcgatcgcgggagtgccgttcactgtcaccttgcaggggccggcgcggttcatccaaggcggcaacacgttctcgggggtgtcgacgagcgccggatcctcgatcgcgtgggaggcgaccggcgccggcgaggtgacggtgaacaccacatacgagtatgggcggatgcacgtcatggacagcactcaggacatgctggccttcgattcgatggcttccgccggcggttcgtcgtcgacgttccaggtgcgcaaggatttcgttccgtcggtgtccacgcaggtgtccgataaggtgcttgatgcggcttcgccggtgttcgatgatgtgaccagcggcgtgggggacgagggcagtcattgggtgcccggtctgaagctgcaggcgcgtggatactatttcgacgggctcggcaaggacgatctgggcaaggtcatcgcgccgaacgcacgggagagcgcggacgcttttctcgcccggctggcgtcctcgggttatgagccgagtgcttatggcaaggcgtccttcaccggtgtggggcagcgggttcgtgtgcgggccatggccaagccggacggtgacgccgcctatctgactccgaagaccggcggctttggcacctgggtgtgggtgttccggcggagcgagcaaagcaaacgggcgcaggaataccttaccggcgactgggtgagcccgttcatggaggcttcggaaagcaacgtggggcgcgggaaggtcgaagtcatgtcgacggttaccgaacattcggcggatatcggcgccgaactcagcgacaccatcaccgtgtcggggttcccggcggaccacggccagttcatgggtgatgaaacctatggtttcgcggcggatcagccgtatgcgacggtgagcgtatggtggtccggcgatcccgacaacccctccaacgatgaggcgtacaagccatccgggggagaggtccccacggaagacgacaaccaccggttgctggccacctgggagattcccgcgatgaacggcacgttcaaaatcggcgccggggcgttggacgcgcatggcgctcccatgcatctgaccgccgaacggcatgggtggtacgtgttcgtttggcggttcgagggggatgaccgtgtttccccggcgtccagccggtatgacgatgcctgggagcgtgtgcgggtgttgcccccatgcgagtcggagaaaccgtgcgaaccggagaaacccgagacgccaccggcgccggcggaggcaaccacgcccaaccctcgcccatcactgcccgtcacgggtggcgatgtgtcgcttgcctcggttctggccgtgtcagctctggcgataggcgccatactgtccatcgtcgttcggtggcgtcgttgctatgaccgatccaagcactggacgatgcgctggccgatacgttgacccgctgcggcatgatgccgatgatgtcggctggatggtgaaccgcactccgcttctgagcagaaggacgggagctgggcacgaagtcgattgtgacatacgacttgtgcccggcttccgcttcgttgagaaacttcacgcctgtcgcctcccgtggattagacaactgaaggtccgcgatgaaaacgacgagacgtttatgatcgccgacttccctgggcaccgtagctgcctgatcgcctttcatccatatcgccccggtcaggtcgtcacctacaacggcggcggcagcgtcgccaccggcagcaacgccccaccgtcccgtaccgtgaccgtccgtgcagaccctcggccccgtatggggctggacgtgggccgatccggccgcgacgaccatcagcgccgtcgccctgaccatcggcgtcgtcatcggcgccagcgccctcaaggccaaggcatccaaggccgaataacaagaagcccccgaacctgaaccgtatcacgcggcaggttcgggggcttttcgccgtatatgggtcaggccatcgcgggctgtgcctgattggcggtcaggtatgcggccagtgccttgcggatcagagcgctcttgccgatgtgctctcgttcggcctgtgcccgcacctgtgcgtccatgtcgggcgtgaggtatgccttgtagagcacgtcggccttccggcggggctggtcggcgagggggcggccggcgaagatgtcgtcgatgtcatccatcgtgatcgccctttgcgggcggatggtctcgccgatgatggcgggggtgtgctcggtgtattcgtccgagagctcgtcccagtctgtttcgttgctcatgatgtcctccttggtgttttttagtcgtcgaacttgtagagccattcgcggcggcagtccatcgcgtggaacaccttgcgggtgcgctgggataccagcagctccacggggcgttccctgaactcgtccgggtgtccgaggatcgccatgaccctgtcgccggcgtgtctcgactgcacctcgaacacggccaccggatgccggaatatgtagtcgatctgtggctgtgtgaaccagtgcttgaaggctgacggctcgcattcgatcatgcttattatggtaccataatttagtaccacaatcaatttagtaccacaatcaagtcggggaaacggaacatcgtgatcctcctaggcggcgaggcgcgtggcttccacggcggcgcgcagctggtcgtcgggcatggcgatgtaccgttgcgtggtctcgaccgaggcgtggccgctccgccggccggggaacagatagccgttggcggatcggatcagcagggcgaggtcgtcgccctccacgtccctagatcgcccttaagcgccctcgacaatgcggacatctggcatcggcgcgtgccgatcgtgttgggggagtagcccgccgccttgagggagtcgagccatagattgattgattctgcccagagcgggcttggatgttgttttttcacaggacatcatcgccccgatcggatatgcggccccgtagggcacgacggcggataaacgaaaagccgtcacgaataatcgtgacggcctcgcccgcagtagcggggcatggatttgaaccatggacctctgggttatgagcccagcgagctaccgagctgctccaccccgcgtcggcttgtctctcagacagctctatctacaataggtgcagattccagaaagtcaacatcggcgtg

SEQ ID NO: 1320 - DNA, 16016 bp, Unknown
  R157_18m  MAG No. k141_12515
cgagcattgccttgcgcaaccggtcgactccattccaatatgtggtggcttggcccgatgcaatgtcttgccccgagaacgtggcgtagtcggcttcccgaccgagttgaatcagtgcctgatcgtccgtgccgagctgacgggcgattgcgccggcctgatcgcgacgagtgcccttggctgtgatgccgctttgctcggcaagtatgtgtatggcattccaccccgctgccacacgggctttcggactgccgtgccgtcgtgcacgtgccagcaatgcagctttaaatatcaggattagtccgcaaacgatgagcagagtccacagggggcttccatagatggctaccgcacgagtaactcgccagaaccgcacccagaacaggttggtcggcgaatcatcggcgtcggtaccggccaacgaactctggcctttggcctgcgtctgatcgcgcagcgggtcggtcaacggcactggtggttgccggaccagtgtctgcggattcggcggcgtcaggttctggttttcatcaggcaccttggtctccttgggcgtcggatagaacgccacccatcccaggccttgcaatttgatttccacccaagcggtcacatcattgccggtgaattcgattttggtgccattgcctgaagtcttctccgtgcgggcatcggtgatttcgccatcctcgtttttcggcaggaatcccaggaccacacgggagggcagtcccagctcacgagccatcagtgccatggcggaggcatattgttcggaatcacccaccatggccgtgcctgccagcagcttgttgatacggtaattgccatggcccgcatcggaaggataatcgccttccagaccgtgtgagaaccatccggagtctttcaatgtgtcggccaaggccgtggcggcggcaccgcccgaggactgcccgccggcaatggacgtggccagtttgctggccgaatcgggaacatcctgggctgaaggctgcgtgatgcgggccgcggccgcactgctgatctgcttatcggtgggcttgtgggctatgatgccggattcggtataggtgagtcccttgcgcgtgccggcgggaataatggcggaatcggtatccgtgttgtagtagaacgtgtcattgccgttgtcggcatcgttggcgaagctcacgccagcggccgctcccgccagcggcagccaggtgtcggtcagtccctgatcgacggtgaaggtcgcagtgaaggatttaccctgctcatccgccttgatcgtggtgcccacgcgatgataattcgaggagtccgtggcttcggaagaatcggacaggttccatactgtgccgtcgaatcgatccatcaccgcaagtttgaccggtgttccggccggtagattatggacggtcagcaacacgtcttttttgtggtccttgatataggatcgcatgccgctgagcgggctggtgtaatcgtaggggcttaacggcggatcgtagcggtcacgcagcacgaaacggtcctgcggcaccagcaacgtgcccccgaaagcaaggccggcagcgagcacgacgatgatcagcgcggatatccagcgcccccattccagcagttcaagacgccaagacagccagataatcagcagcaaggcaaaggcaatgccgcagatggcacgttgccagccgctgtccgtacccagcagagcacatacggccacggccgccgcaaggggcggcactcccaccagagacaaccatgcgttggcattaatggcaaacacgccggtgaggaacgtaagccacaggccgatggtccataccgccatcagtacgccgtcttgcgtgcccagaggcggatcgacggaaataatgtacttgaacgagccaaacgtcatttcccaacctgaactcaaggtcttcaaggtgggaatcacgtaatgggacgtggtggaactcagcgttaccaccggaccgatgatgaattgggcaaacgccagaaacacgatttgccaccacagtcgcaacgccggcaacatgcccgccagagcgatgatcgcgcccagcaaggtggccggtacagcggcaatcgtccaagtggccacgccgccgtacacgtcgatgagattggcttgcgccagcaacatcatcgccgctatgagtacaaggctggcgattcgtttgccccacggctggcgactgaggcccatgccgcgaagcacattgcctctggtcatccagataaccgaatgtgtggagtcggcccaggagccggtggtggtggaggttccggtgtacgtgccggaggaagtgccggtgtatgtgccgctcgatccggcgtacgcagcggtattggtagtggtgatactggactggtcgaaggtcatgcgagcacccccatgatcagtgggagatcatcgagttcgccgatggtggccaatgtgaaattggcgaatcttctgatgccgcgattggcgccggcgctggcctgcaataccacgcagctggccgatcggggcaaggccaaggtcatgcgcttgatttgctcgatgtctttcagcgatccaacagtgaaaaaatagaacgaagcatcaggactgtgcttcagcgtgccctcggcgagattcggattatcctcacgatcaggctctatggcactggcgttgtcgaggaactccatggcgttgcgcggttggccatgcgcgttgcccgagtgacagaccagcgggcgatcctgcagcaggcatttgacgccgatggaggagtggatggacaccgccatctcgaattcctcgccgttgacgtactcatccgggttcacgctgatggtcaccgaggtgtcggtgcggcgcgtggcctcatattggcgaatcatcaacgtgccggttttcgcggagctcagccagtggacgttacgcacgtcgtcgcccggctcgtattcgcgcaatccgtagaagtcgagatcatcatccacgatctggccggatggttggccttccagatcgcggggcacgccggcattcagggtatcgagacgcacggtacgaggatggatgaatacggtgatgcggtcggccaactccttttcgtgacgcaccaggccgaacgggtctcccttgcggatgcgcaacgggccgatgggcagtattgcgcgcgatacggtacggaactccacatcggtttgcttggattgcccgggagccagcatggggatgttgaatcgttcacgcgcatcgccgattggcagatatccgcgtgccgtggtcgtcggcgttctgccggtgttgtcgatgccgacgataacggatacggtgtctcccacggtcacgcgatgattggatacggcgatggacgcgtggaagcgtgtgttgccgagggaaagcgcgattgccgcgagcatcatcaccatcgccacgatgccgaatacgagcagctcatgccagcccagaggcaggaacgcaataagacatgcgatgcctgtgcccgttaccgcccagcccaagggcgagacgtaggatgcgaagaaccgtctgatgcgtcttaccgcgcgcttgaacatgcgttcagcgcgccggcgacggcgtaatgaggcggatgcagatgccatggtcggatacctttccaggccctatcaggaaccgatggtgggggagggaacgtcttcgagcacctgtgcgatcaggctttccggagtcgcgccatcgaaggtggcttccggagtcagcgtgatacggtgtgcgagcacggccactgcaaggtccttgacgtcatccggcaccacgtaggcacggccatcggccgcggcccagatacgggcgcatcgggtcagcgccaaagcgccgcgcatggaggaaccgactgtgatcttctcgttgtggcgggtcgcctcgacgagcctgacgatgtattcacgaatcgcatcatccacatagatttcggtggccacctgacgcagccgcatgacatcgtcaccgctcagcaccggggaaatggtctgcgcacggtcggtgatatcgacctgcttgagaatatcgacggacacatcatggcccgggtagccaattgacgtcttgataaggaatcggtccatctgcgcctcaggcagcttataggtaccgagctgctcgatggggttctgggttgcgatcacgatgaacggctgcggcacatcatgggtgacgccgtcaacggtgactttctgctcttccataacctccagaagtgcggactgcgtcttcggcgatgcacggttgatctcatcggccagcacgatggaggcgaaaatcgggccctcgcggaactcgaattctccgcgcttctgatcgtagaaagtcacacccaccacatccgaaggcagcagatcgggcgtgaactgaatacgcttgaaaccggtggaaatggagttggccaagcctcgggccaactgggtcttaccggtgccggggttgtcttcaagcagaatatggccaccgaccatcagtgcggtgacgcattgcttgatggggatggtcttgccgataaccaccttggagacattctcgaccagcgcattgaaggactgctggaaatcccggacctgagccgtgggctgggacagtagtccggaattgatgctggcgggtagtgccgatgcggctgcttgcgcggctttgctcgactgacgctgcggttgggattgaggcgtgctgtcatcgcccgcagggatggagacggcatcagtagtaggagacggcttttctgacgacgcttgtgacggccactgcggcaggttaggcagcgcaacgggctgcggcaccgacgcggtgcttggggtcgtgccggtgtgtggtgcggatgccaggtgcgtggcgtcggacaagtgcgtggcgtcggatagctgcgtgctgtcggacagacgggtcgtgtcagacaactgcgtcgcgtcgtcgatgttctcgctcatggatgttctcctactgcttgtgaatggtggttgacgatattggggtattgccgaaaccaagaatccaggggttcttggccaaagtgatgacatcggtaccggatttgagcgattcggtcccctccgaggagccagaggggcgtgtgcccgcgacgctgtctccgtccgcagtgttgtcgagaccggagtatcccggcccgccggtgactttgacgctccacgcgtagttgccatcggcggccacggccaagtcggtgacgtccaatggctggccggagttccacgtgaacggttgaccattgatgatgatttgtacagtggccggcttgccatagacatcaaccgaaccgccggtgacgttaatgacgtgagcgttgtctgaccagcgcagcccctgcggtttgttgattacagccttcttctcataggtgtagagagcgccattgcgcgggcctccggtggcggcatcgctggtagcgccgttgaacacctgttgcaccgatgcggtgttgcatctggcccaaggactcattcggaagtcgagtgagttccggttagtagctgtaccggaatcgatgccatcggcagtcacgctgtaggactgcgcatgcccatgcttggtccaatgcacggtgcatgtactgccggatccggtggtgtagacgtcagtgggcggctggaccttgtactgcgggacaaagctgctctcgcccgtgccggcggaagcaccgcgctgcggcaccacggtggccgttacggtgattgttgtggtgttgagcaacgactcatcgatggagaacgactgggagctcggtgactcgcaagaggcttcgccgccagcgtcgccaccaaaggatatcttccggcagccggcattgcggttgttgccgagagtgactttcgccgttcctgtggtgtcgtcgttcgacagcgcaatggtcggcgcatccgggtctccccagatgtcctttggctgtgatgaggcggactcggcactccaattgattttgttatgggctttgacggtcgccgtaatggcggtgccatcggaaatgtcgttgttgttgaacgtaaacgacagctcggtggccgtattgccggtttccttggtctgcggagcacctgcaccggtgacggtcactgaatagttgtcgacggcgctgaaatcaccgctcggcgctttccacgtcactttggcggttttattgccacctgtgaccgtgacatcggtgggagcggacggcaccttgtccggtgtggcttcgacggtggtggacggtttggaccaaccgacgtcatttcgcgcggcgacggtgaaggaataggttttgccgttcttcagacccgtgacctggcatgaggtgacggcaccgcaatccttctctccagtggcggcgccggtccaactgaccttgtagttggtgatcgggctgccattggcggcaccgggcgtccatgtgaggctgaccgcgctgtcctgcggttccccggctacgggggagagcagtggcggctcgggcttgtcgatcacggacacggtaatcgatgcggtgacttcacgatccttggacttgctgccgtcttgcacggtgacgagcacggtgttcgtggaagcacccggatcggatgcgacggcgatggtgacgtttccggaggcatcgcatccggcgatagtgagtttggcggcgtcatccgccttgcagctgatgacggtcagcgaggaatcggggaacggattgtacgcgccggtaagcacgttcacggcatcgctggcaccggccttgatcttcagcgtcttgtcgccgacgcgtgccagcggacgggtggaagacactacgcgcacggtcacaccggcattcacggtgcccgcgccgtatgcgatttgcacgggaatggacgcggtggtgccaggagcggcatccttggtggcggaaacctgcaagctgccggaacgggacaggttagcggtgattcgcccggacgatgagcttccgccggaatacgtgtattgcttctcgtcgtcatacacgccggacggtgcatgggtgagcgccgtcagatcaacggtcttggggttcgcgcccgcctcgacatcaatagtggaggacgagaacgtgggcggcggcacatcgcggcctatcaccgtgatctggagagtgatcactgcggaattgatgatcttggtcttatccgatccctgcttgccatccacagcggtaaaggtaatggaggcggggcctgcgtagtcttttgccgcagtgaacttcagggtcttgtcgttcacgtagaaatcggagttggaagccttggtggcgctgacggaatcagcgctttcgatatacggttccttgccggcaccgacgcgaacatagtcattgatgttgatttcaatggtctcacgcgaattgaccttcaattccggtgccttgggacgcaacgtgggcggaaagacaccataggccggtacctggatgaacgcggtggaggtgatgttgtatttcgtattggtcaccgtgtaaggcacggctcgcgcctgtgacgtcaggtcgacggtgatggtggtcgaatgctcaccgcccttgacgtgagcgtgagcgctggcggagggatgcacgccgaccttgagctcattggctgtgccggaaggattggcgatccactgggaaacatccacatccacggacttcttatcgatggtggcggcggacggcacacgatagtcgtaggcggtaggcggctcgatggcggcattcggatccacgtttaccgtgagggtggccgtatcggacaagccggccttgtctttgaccgtgtaggcgatataggcggtggtggcgctgccgggcgtggtgaaggagatcatgttgtctttcgcgctcaccccgtcgagaccttggacctcgacatgcttgtcgacggtcagattggtgttgtcgccggagatgtcgttctgcgcgaccggcacggttgcggccgtattgggcctcaacgtgatttcgtcatccctggcgtatacgccggagtcggacgatccttggaatacgcccacgcggatctgcgcctgtgcgcgctgaccggtccaatcctccacggcataggagaaggtgtcggtgccggacgaatccggatacgcttcatagaccaagtagtcggaaccgacttcggatatgcggcccagcgtgggtgccttgttgcccagacccaacagctgatcgtcgtcgccatccgtgtctatgccggtcagtgtgatggggatgcggaccttctgtccggcggcaacctgcgcttcggcgtcatgcggggttggcgcggccttgctcgctgcgtcgctcttatgcacggtaatggtgatattggcggaagccacattacccagattgtcttcaaccgtataggtgatggggaagttgccggtctcgctggatgcttggtagcggaccgtgtctccagagacgaaggccagacccttgaacgtctccttgtcgtattgcaggttgttcttgagcttgaccgtggtgccatccgagtaggccacatggtcaagcacatccacggacacgatgccgccggtgcgcacctgggcattgatattgctggccttgggcactgaattcgaggtggtcagagccggtggctgcaacacgatggtgcccttggcggttccggaggcgttggccacggtgtaggtaagggcgacgggtttcgtgggcacctgacgcgcagtgatatacacgcgcttatggctgacgagaccaaccttgatgccggagtcggccggtgcgctcaccgtggtgacggacagcacgccgcccatcggatcgacgtcattggtgagcggctccacaatggcggtattatccgcgccaagcagggcgacatcgttggcggcaaccggtttggcggcctcgccggtggcgggctgtacctcgacgcgagccaatccggtggccggaatcgagccttgagtaatggtgtagggcacataataggtgccgggattggtggccttgaacgtcaacgacatatccgccgcattggtggtcgtcgaagcgccgttgggcgtatccacctgagtcagctgtgccggctgcaaggaagtgccatgcacgtaagaggacagcttgacgacggtatccgtgttgggaacggtggttttcgctaccgggtcgatgaccgcggccaaggtgttcgcgggcttgaccgagaaatacaccatgccggtgccggtcgccgtgccgtcggagacggtgacctcgacgcccacgcgtcccgacgccagcgcaccggtgttgaacgtaagctggccgtcggctcgggtggacacctgcacctggtcggtgttctgggccacagcggagaccagagtgagcgggtctccatccggatcgttgaagctgctcagcgcattggcggtataactggctccctgctccacatcgatctcgggaggagtgtcgaactgtacgggagcgtggttgcctccatcattcagggttacggtcaccgtggcggaagaggtctggccgcggccatcggaaatatcgtaagtaaaggtaacggtgcctgcggatgtggcggaggcatcgagttgcagataccggccgtcgtaaatcggcgaaatggtgacgtctttgttgtttggtgcgccaaccttggtgattttaagcacggaacaatcggtctgctcgtcattgcgcagcacgtcgagaatctgttccgaaccggctcgtgcgccgatttcatcatcctcggctttgatttggccggattgtgcggaacaggtcttggagaagtcgtggtggttgttggccgagtcgttgttctgctgttctttctcggtctgctcggcctgtattttgttccactgtattttgatgactttggtggaatcctcagggttccacacattgccgttaaccgtgtcgttgagcaccacaaggcgatggttggtgcggaacaccaattcggaagtagtattgacggattcgagggtttgcggcttgacgctggtatccgcgggggagcaggcgcgaatgtagttgctggccttctggctccaagccgagtacacgcagcccttggacgataccggtcgtgccggattcgccttgcccccgttggctatgaaattcgccttggcattggacttcaacgggataagcgtaaggcctctcggtgatgccgcggccacccaatcggactgtacgtcatcggtgggaggctcctgaagggtgagggtgccggtcgtgtcgacatcgacgcggccgcccttgaatatgacggttttgccggttgcgattaccggcgtgctcccgatgacggtaaagctttcaacggtctgctgcttgccgtcggtcagcgattcgagggttttggccttggcgctgctgggattgtcaagacgcagcaccataccgtcggatggacggtatccgtagaccttgccatcgtgggttactacgatgcgcccgccctcgcccagcttcattttcggatcggaagtggtgggggccacggaatcaaggttttccgacaagccggtccacacattgccggtcttctcgttgatcagggctacggtatccccgccgaccacagtggtggtgttggctttgatgtcggtcttgacaccggtgctgaccgtggatgccttgatggtggaggctttggtcgtttcggtcaggatggtgtcgccattatgctgcgcgatgtcgaatcgtggggcggaggaggagacgccggcgtcggcctccttgttctttacgttgaatcgtgcggccttctggttcttcagcgaagtgacccacacggtgccatcgtccagttgcacatggcggcgcgtgacggtgctcatgatcaccgcgccggcaacaagtcccagaagcagcaggagcgtgattacgggaaccgtccacgtatgccctccggagggcataaggcggcgcaaagccgcgctgatgcgtcggcgacgatcgtatgactgggacgatgtggccatctgaactccctgaaccctggtttctctggttgctagtgtaatgacaacgctttacggttccaatacctgccgttcctgttgtccatttggtgaattcgccactgccgggcgcatgcctgatgcgatacgcaatgccaaggtggtatgcccggcagcggcgagcggatcactcttgcggcttggccgcacaggcgatggcggggctgacggacatctggcggttcttgcgcacaatggacacctgaatgcaggtctgcgagccttcctgcgcgttgacggtcaccgtgggatctgacgttgtgacggtttgcgcgctctggtcggtattgctgccctgcactatggcccacgtataggtatcaccgctttgcgggtctggattcgtccaggtgaacgtcacggatgacccatccgccgcataggtgccgttcagattctccggggaaggaatctgggcgttcgcggtatcggtgatcacgtcatcctgattattgcggttgttgtcatcatccttggtgccgggcgtcgccacctgtttggtatctgatccggtggcgctgtccatgcggggaacgaccacgaaggcgaatatcagtgccgctgcggtgattgccgcaagtataccgacggtaatacccaccggtttgacccatcgccgtgacgaacgggtggtctgatctcgctggtccgtggcccggcgccgacgctcgatgtctttggggtaggccggcatcccttccacggtaacgggagtggcatgcccgaaatatgcgaattgcacacgctgcatggcacgtgcgaactccaacgcggagtagtaccgctggtcggggtccttgttcagggcccggcgcagcaccgcttccacatcggccggtacgtcggggcggttgaggcgaggcaatggctggttgacgatcagcgaaatcagttccgattgcgaacgtggatgatattcgtgctggaatggcgagcagccgacgaacatggcgtacagggtggccgccagtgaatagatgtcggcggcttccgaaccattggtcagatgctgaagcacttcaggcggtgcccacggcggcgagaatccggtttcggtacggtcatacacatcggtggagataccgaaatcacccagaacaggcaagccctgcgaggtgatgagaatgttgctgggcttgatgtcgtgatggatgatattgctgcgatgcgcggtgaacagcgcgcttgacagcttgatgccgaggtcgagtacctgctcgcaggtcatggaccgggccttcatgatgctgttgtaggtgccgcccggcgcatattcgatgacaatgtagccatggccatcggaggtgacgccggcaccatataccggcagaatgtacgggtgggatgacagcttggccatgaagttggcctcgcggttgaacagggcagcggcccgtgggtcaagggttttggcgctgacctttaccgccaccgggcgtgcgggcatacgctggttatataggtacaccgtggcggtggcaccgcttcccaacatctggacgaaatcatatccgggcagcttcggcggcctcatcggaatattggccatctgttccctccctccttggaaaatgcgctctccctgcattcgttctacaggataccgtcaagggtacgattcttcgtcgggttcggtaaaatttttccctctgtgacggtcgggtttaggctggagccatgatgacgagacttgaacctggaacagtgctggacggcatcgaccgtgatggagcggcgaggctgattgtcggcacgcctggaagcggcaaaaccgaattcgccttatcggtgttgatggcggggctgcgccgctacggtggcacgcaggcggtgatggccgtatccggccgtgtggccgccgacgcattgggcaatcgggtgattcgtgagctcgggttttccgtgcaggccaggccggtcaccacgctgggtgccgtggcattccgggccatatcagcttcgcgcgagggaactggattgccgtcgcctcgattgttgaacggtgcggaacaggatgctttgctgcgtcaagtcatggccgtgcatctgcgccatgccgtagcgggagatgattgcggcacctgtgatttgctacgcgtctactttgcccaggatgactgggcgaaactcatacgcgatgccggtgccggcgagatgcccggctcggccgcttccgtacaatcaagcctctcgcaacaagggtcggattcgccgtctccgacgtcggcaggcggctcgaccagcgcggataggttcactcgaggtatttcagatgcgtttatcagccagttgcgcgatatgctggcccgattggatgagctcggtgtaggcgttcacgaagagccacgtctcttggacgccgtgacggaggacgcgcgattgtcggtgcaatggcgtttggctttcgcattgcgccgtgaatatattgcagcccaaagcgcggcatatccggggcaataccgtttggatgcctcgtatttgctggtggcaggagctcgtgtggtgcatgaggcattcgccgccgatcacgcggatgattccgaccggcctatgcgtatggaggcgttgggcttgccccggctgctggttgtggatgatgttcaagacaccacgctggccggcatgcgcttcttggaggagttggggaatgccggcgtcaagttggtgctggtcggcaacccggatgaatcggtgcagaccttccgtggatcgtatccggaatatctgatgcgccgtgccgtggaagggtggctgaaagccaaggaagaacagctggttggcggcagtaccggcgctgatcagtcgcacatgacgatggctgatgtgatcgcgtctcgtatttcgctgtcgattccctcgccggaagacgagccgctgcctccggccgagcgtcccggcaagctgaccgccatgctgggcggagtcgatgcagcgaattatcagtcggacggcacggtgaccgccggcctgtaccgatcctcacgtgaggagctggatgatgtggtctggcgcatcaagcgggcgcatcttgaccggcatattcggtggaacgacatggcggtcatcgcccacgacaatgccgccgtgcggctgttcggcgaacgactgcgccgagatggtgtgccggtgcggtattcgtcggttacccgtcctttgaaggacgagactttcgtgcaggggttgttcgcgcttgtggagcttgcccgattgcgtgccgagggaatggcggaatgtcagatgacgttggcttcctgcgcggcatatgtaaggactagagtggccacgttgatggacggcccgttggtgagtgccggggccagacccggtcaggggcgtcccgcaaggcttgcgccgatcgaatcggccatggggtcgttggagtcgctggcgcatctcgccacggatgatgccatgctgacctctctgacgacggcatgggaaacattgcgtgaaacataccgtgaaacacggcatgaaacaggtcgtgacacatcctcgtcagtggtttcgacgtcagcggtttcgtcgtcagtgacttcgtcgccagtgtctgtcgaaatactcggtgagccctccgacgatgacttggcctttggcgttgacgcgctatacgtgatgcttgccgttgatgatgccaccgcgccggcgcaggctgcgctcgcatccatccacgcggtgctcggcaacgactctcaggcccgcgcttttgcgaatctgtggcatctggtgggcagcgttgcttccggcttggagcggctgccggcaagccagcgcgtacagccgcgctatgcgctgtctgttgcgtggaacgccaccggtctggcaccggtctggcagcgtgcggcattattcaacacggcagaagggcgtacggccaatgaccggctggacgcggcaatgcgcctgttccagttcgccgatgattccaccgccagccgagacgtcacgtcattcatggcacaggttcggggcatggaagtgcaggccgattccttggcccacatagggccggtggaagacgcggtgacattgaccacgccggcaggcgcggccggacgccactgggaatatgcgtggataccggtggtccagcaagacgtgtggccgaacctcgccgggcgcaacaccatgttcggtggtgaagaccttgccgagctcgtgctgaggggagcgcttgaagaaagcgacaaaaccgggcatgatccgcggttcacggctgtattgtcgggcgagaagaagagcttactggtcgcgctgacccgtgcgcggcgaatcatgatcagcgcggtatggaacgacagcatgagcccatcggactttcttttcgggtatctgccggaatactatccgcgcaaccggcaacaggcgcctttcaccacagtaggggcacatgcgggattcgccgaatatgatctggccggattggacgccgacccacgtgggttggtcagcgccgcccgcgcggttctggccactgctcaaccgcagcaggctgccgcaaaggacgccgcggttgcgttgacactcctgtcggagcatggtgtgcgcgccgcaaatccgcagagctgggcgttcgtggaatcgccggcccaatcggatagcgcgtcatctggcggtgcgtcatctggcggtgcctcatccgacagtgcctcatccgacagcgcgtcatctggcggtgtacagtctgacggtatccaaacggggaaaggcaagacggatgcgcaggccgcacccatggtcaccctgtctccatcggcggtcgacagcctatgggcatgtccggtgtgctggatgctggagaaccggttcgccggtcctcgccccagctccgtggccaccagcttcggaaccctcatccatgcggttgcacagcaaggcagcgaggaagggctggaccatctttcccacaatgcccagacgttggccacactgggcttggactccacggccggcacggaacgccgcatcgaggctgtcacggcacggcttaatgccatctatcagagcaaacgtcctgatccgaatgccatagccgacacccgga

SEQ ID NO: 1321 - DNA, 27011 bp, Unknown
  R157_18m  MAG No. k141_12678
atccagaacgtcaaacgacgggcgagaggcttccgcgacatggaccactccgccaccatgatctacctgacctgcggcagactcgacctcaaagccgtcaccaccacttgaccatcacccaccacaaacagcgaatagcctttgtattttctcagtttccatacggttttttcgtttggtttcttgcttagttttccgtctggctttttgtgcgcttttcaaatgctgtacacttcgcgcgtcgtttcgcgcgttgctttggcgatttccgccaacgaacggtcgagataatcggcgagcgcctgcagagtgtagggaatcatgtatggtgcattagtgcggccgcggtatggcatcggacttaagtagggggcgtcggtctcgaccatgacatggctcatgccgacgagtttcgcggattcgcggataccgtcgttgcctttgtagctggatgtgccggaaaggcttaaataccaaccgttttcgcgggcgatttcacccatttcgacgtcgccggagtaactgtggaacacagtacgttcgggggcaccgtcggcgaggagtgtttcgatgacttccttgtgggagtcgcggtcgtgaatctgcatgggcagattgagctccttggcgagggcgatatgcgcacgaaacgcctcacattgcagctctttggcaccttcaccagtgcggaacaagtccatgccggtttcgccgatggccacgacttgattagggtaggtagtggcgagacggtgaacttcggccatggcatcgtcaaaggggatgtcgtgccagggcttgtatttgatgggcaggccgtcaggtccgggtacgccgcgatgaccatgcaatacggattcgttggggtggatggcgattgcggcgtgcacggttcccgggtgttcgcgggccatgtcgatggcggtcatgagattgggcagctcgcaaccgcagtcgattacgccttcgacgccgacatcctgggcttgtttcagcagttcgtcaacactgtagacaggcacttcgccctggcctttttccatggcttcgtggctcatggcttgcgagaaaggcacgacggatgcgacgtgggtgtggttgtcgatgacgtgcgcgtcttcgggaagtggctgtggggccggcgcccagttgcgattgcgatgatgcttgctcatggcttccagattacgcttcctgcgatggccagcattgctcgtatccgactccggtgagtcgttcgaccacggcacgggttttgtcggtgacgtcggctttgctgccgccgtgctgcagtcgtgcgatctcgtcaagcagaatggcgtcggtttccttgctgatcgccatccgttgcgatgcgatccagccgacaatcatggcgacggcgaaccagccgagcaacatggcgccgatgacgatgtgtgccgcgaatggctgcgtgccgtgttgggagtcgaatcccgttgcggcgagcacgaggccgacgccgatggacagcagtccgctgcacagctggcgtgcgaaggtctgcgtgccgaggaacgtggctgagcggtatcgtccggtgacgatgtggtccacatccgccatgtaggggaacacttgccatggcaggtatccgcaaagggatttgaacgagaagaaccacagcgcgccgatgacggtgaacaccgtccatgccggtcgtggcatgacgcctgcgcacagccagctggcgagcagccaggccacgccaatcaaacagccggcgaaattgatggcgtagaggcggcgggggccgatagctacgaccgcccagccgaatgccggcatcagtggtagggagatcacggcgcaggtgagcagcatcgatccgaaggctgcggaggagccccaatcgtagatggcgaagaacaggaacagctgtccgaacaggtccattgagaccattaccatgacgtatacgaccaggtggcggcggaattcggcgatacgcagcgtggacaggtattcgcgcagcatgacggcggcgcgatgcgtccacgtccggatgacggaacaggtctgtccggcgggccggccggcgttccgatggacggagccctgtgcgccacgggagagcgtctcgtatacgccgaatccggcctcccgcggcgtcatctcccatgtggagtgccagcagatgacaatcgccagcgagaacatggccgtcactacgaacgtgaatcccatgtatccaccgggatggtcctcccccaccgtggccagcacaatgccgccgaccagcggaatcagcgtgcccgaagcggtggcgaggaacagcctcacggtggacagcgtggtgcgttcgctgaaatcggttgtcatttcgccgggaagtgtgctgtacgatgtgccgaacagctgcgcgagcatgacccacaccacgtagaccaagcagtacagcgctaccggaagccccggaatccatagcaggaagccgaccagcaccgccggcgccacgacggcgagcaccagtcggcggcgaccgaaccgacgacctacacggaagcggtagagattatcgcacagcacgccgaagccgagggccgcgaacgcgctcagaatggcgctcatgccgatcacgccttgcgtcagaccgatgtccatgccgcagaaacgattccagaacagcgcaaggtaggtggccacaagcgcgccttggccaccgccgtacagatcgcccatgccgtatccgatggccgacatgaacgtgaccttgcgccgtgttccagattgtttcacagtgcgtttcacgatgattcaccccgtgtgatttcgctatttgagcgcgatgacggtgaacgaccacgccggcgccgcataggtgccgtccatcagatcgagcggagtattgaccggcttggtcggcgattcctcgccgacctgtccggcatacggatcgttgccggccaggatggtggccgttgccgtcgctgcggattgcgcggagacgtcgagtccggcgaggatctgactcaggtctacatccaccggttcgtccatggcgttgaccacgcgcacgtaggtttctcctgccttggcgttgcgcgatacggtgacagtgcgcctcggctcgtccttgacctccgtgccgtccgcgatcagcgttccatcgatgtacagcttcatggcctggccgcggccggtaacatcggcgtgcacctgccaggtggtgcccggcaacacttcgttcatggagacttcggtgccggcgagcgcgtaggctgtgccgtcgcggaccacgcggacgctgtggcctcggccgaatgagacgatgttgtggtttttgccgtcgatgtcgccgcagatgagatccatgccccatttgccttcgtagtagacgacggtggcatcgatgctgtaggcgtccgtgtgcaggtcgagcggggtgtcgatggttctgccgtcgtaggacacgtcaccgaggttgaccgtttctccggacgcggtggtgacggtgaggttgttgaagtcggctttggcgttgcctgcgatgcgcagtctcactgtgtcgggcagggtgcggcgcagcgtggatgggccttcgacggcgacgggccaggcggtgtcggccgtggtggtggcatacatttgctgtacccagtagctgtagggatggtaggcgcgttcgttgtcgaagtagataaggtccgggttccagctgtggtggctgttcttggcgaacagcggggcataggaggccatggccaccacgtcgccgttgagttccatgcgtcccatgaaggccgcttcggataggccgttgatcagttgggtgttccaggagccgtattcgccgaggtaaaccttcgggcccttgcggtccgtgtggtcgtagtggtcaaggttgtggaaccaccagctggatgactggtaggagtgttcgtcgacgatcggcaggcccgcttcgcgcgcgtatttccaaccttcctcatagtccttgccgctgggggatggtccgacggtgccgacgacgacgatgtccgggtatgcggctttgacggcatcgaagatctgttggaagcggtttttgaacacgtcgtcgatgaggtcttcattgccgatgccgaggtattcgaggccgaacggttcagggtggcccatggcggcgcgcttggcgccccattcggtgtcggtgccgccgttgcagaattcgatgaggtgcagcacttcatcgatgtaggtgggcatgtcctcctgagccactggcaccgggccttggctggtgttctggcagctcacaccggcaggtagcaccggcagcggcttggcaccgatggtttcgcacaggcacaggtattcgtagtagccgatgcggaacgactggtggtatccccagaggttgaagttgtgcggacggtgttcgactggtccgatggtgcggtcccagtggtacatgttgtccatgccgaggccgtgggtgatgcagccgccggggaatcgcatgaatcgtggtttaaggtcggcgagcgccttcaccaggtccggacggaagtgtttgagcccgtggtaggtggtgcgcggctccaaggtgatgaaatcgagatcgatgacgccttctcctccgaaggtcagacgcaacgtgccctgcgtggacacgctcgcaccggctttgccatcttcttcgccgctttccggaacggtcagagatgcctggcatgtcgtccatgccgaggccgtgacggtgatggtggtttcgctgatgatgctgccgtcgtcgccgtgtagcgagaccgtcactggcatcgcgcttcctgatcgtacgcgcatccatgcggtgaaatcgtaggtttctccggcatggaataccatgccgtcccagccggtgttgtccagtgcggccggagcctgttcgatttccaccgtcgcgtaatgcgggttttcgacggcgaccgggtcgatgtcatggatgcagaacgcggcgaacgagccgtccggcacgattttgcgccagaaactgtagttgctccattctgcggaatcggcgcgattgtattcgaaggcgccgttctgcacgaggtcggcgttgagaccgccgtcgccggaatagctgatgtcttcgaagaagatgccccacaggtcggtgctgatggcgcgcacgcccgctttgtcgagcgttgcgatgagtttgtcggtcattgatgttcctttgtggatggttgttgttggatgtgccgccgttcgccagattggctcagtctggctcagtcgagcgcgaaccagaggcagccgtgcgcggggatgatgccgcggatgacgcggtcctcgccttcgccttcgatgcggatgtctggttggatgtcgtcgggcgcttgcgggacgtcggcccacaggtcggtgagtgtccagtccttgttgcgttggtcgatgccgacgaagctttgcagttggatgttgcctttgagctcgtatggctcgctgcctgtccagaagatcgcgccgtagtgtccgtgcttgtgcgccgatgtggtgccgtcggcccagtcggccgcgtcggcggtccatacggcaaggtcgccgagatagctgtcttcctcccaccagcgtccgaagatccgctcgtagacgatttcgcggttgttcaccgatcctgcggtcacttcgcgcagggccgggttggcgagcagtgcgatggtgtcggcgctgctggtgggcaggtcgccgccaaccatcagcggggaccggcccatgctccacagggtgagcagcgttttctgctcgtcgcgggtcagtttcgattggcggtcgtcgccgcgttcggcgcgcaggccgatgtgtccgagcggcagcatgtcggcgtcggcccagtggccggtgcgttgcatcggcgcccatcgagcgagccgggggaactgctggtagatgtcttcccaacggtcccagaggtcgtcggagatgcgccacatctgtgagacgccgcgtaggaaatcgacgtgggtgctggccacccagccgcccggggacagcgatagcgtaatcggccggccgtaggcggcttccgcacgttcgatggcgtggtggtatgcctcgatctcctccgggaagaacggcgtctgcatgtcgtcgaccttgaggaaatcgaggccccaggaggcgaacaggtcgacctgcgcgttataccaagcctgcgcgccggcgtcgccgcgcttgagaccgtagttgtcgtggttccatacgcaggtgtgctcggtgtcggccacgtccctcgcgtgcagcgtggtgcctttgaccggcaggttctcatgcacggcctgccgtgggatgccgcgcatcacgtgcacgccgagcttgaggccaagcctgtgcaccgcttcggcgagcgggccgaatcccttgccgtcggccgcgcttgggaagcgctgctcgtcgggaatctggcggccgtaggcgtcgatgcacagtggcgtgccgtcggagtagccgtgcgcgtgggcgttgggatcgaaccagccggcatcgatgaccaaggtgtcccagccggcgtctttgagatgcccggccataaagcgtgcgttggccaggacctcttcttcggtgatggtggtgccgtaggagtcccagctgttccagcccatcggcgggcgccaggctttgaccggcgcggacgtgtccattgggcggttgtcggttgagtcgacggaaacggtggtcgggatcgtcatcgaacctctcttcgttcagggccgctatggcgctgcctcagcaagagccgaacgccatcacgcggaccacatatatgtatcgttacatattctaacgcaaatccaaccggacgcaatcggcacaacatgtcggtgagtctctgtgttttcaacgattttccagaatcagaaagtatgatatcgttacatattaatcgtgtttttcaaggagcggcatatgaccagcagcacaccgacgctacgcaacgtggccgcggaagcgggcgtctcccccatgaccgcgtcgaacgcgctgcgcggcaagccgggcgtcagggaatcgacccgcgccaaagtgctcgccgcggctaagaaactcaattaccgtatcaatctgacggccagcatgctcaagtcgggccgcagcaacatcatccacgtcatcgtcaacgaattcgattcgccgttctattcgaagctcacgcaggcgttgagcaacgagatcgtgtcccgcgggctcatcccgttcatcgagcagacgcagtattcgccggacgccgccgagcatgcactaagcagcaacccgttctccggacagctgttcgatggcgagatcctgcacgccacgggcttgggcacgaacgtgccgctggccaaactcaacggcggcaggccgttcgtgctgctggacgcctgcgaggagatgccgaccgtcgacgccgtgaacttccccaacgaggaggccgaacgcgcggcgatgcagcatctcatcgaccgcggatgccgcaatatcgcgatcgtcggccaccggttcgccccccgcgccgatctggcgcatgcccagaacgcgttcgctctgcgattgcgcggcgcatgcggagcgctgtccgacgccggactgccctatgacgagtcgatggtgttcgaagccggggatgtggccaatggcatcatcgccgggcatgcgattgcggaacgtattctcgccgcacggagcggacatggtggcaccgagttcgacggcgcgtgctgcgccaacgatttcgcggcgttcggcgtgatacgcgggctcgcggaccgcggactgcgcgtgccgcaggacgtgaaggtgatcggattcgacggcgtgacctccggctcgtacacgacgccggcgttgagcaccatccaggtcgatttcacgcagcttgcgaaattctcggtcgatatgctgtccgaacgtatcgaccatggaacagacgaggcgttgccgccaagacgggccatcatcggctaccagctggtggaccgggaatctaccgcggtctgagcggcgcccggcagcggcgatccgccccggcaggcggcggccgcgacgaatccccctcaatcggaatcaatcatcatcatcattcatcaaggaatctctaggagcatcatgagcatcgacacccaggcctatctgttcgtgcatttcatcggcgaggagcgcatccccaccgacgagcagctgtacttcgcgctgagccgcgacggcgtgcattggaaggatctgcgtccggccggcagtccggcgctgacgtggctgggcggcgagaagggcgtgcgcgacccgcatatcgtgcgcgacccgcgcggcggattccacattgtggccaccgatttgagcatccattaccgtggcggctgggggccagacgacggcgcggacacgaacggttcgaccggcctggtgatctgggattcccccgacttggtccattggagcgagcctcgcctcgtggacgtggcctcgaagattccaggcgcgggcatggcctgggctccggaggcgaattgggatccggatcgcgggcagtggatcgtgttctggtccacgaagagcaacgcggacggctccgcggatccgttagccaacgagctcggcgacccgacgaacgtgtattatgcgacgaccgttgatttcaagacgttctccgatccggtcaagtggatcgaccgcaggaacgtgatcatcgattcgaccatgctgcgcgacgacgacggctggtggtaccgcgcgtccaaggattcggagatcaccatcgaacgcacccgcaacccgtatgcggtgacctacgaggtgctgcgcaccgacgatccgaacgcatggtcgtatgtgggcacgctcactgacatcttcggcaacggccgatattccatgcattatctggagggaccggaactgttccgttacaacgaggcggacgtaaaggacgtcaacgggcggccgatgccgttcggcctcatgtgcgaccagtacgcggaatccaagggctacctgtcgttccgctccgcctcgctggcctcgcgcgatccggccgattggcagcgcgccgacgatatcgatttcggcgcgctgaagaagcgccacggcgcgattctgccgattacagccgccgaatacgacgccgtcgaaaccgctttcgccctgtaggcgtcgcgatcgtacggttatcgcgacgtccacgtcgcactgccggttcccttacgtcattcttttgactcgtcatgcatattccgccgttccagagcgatggaacggcggaatgccaacgaaaatctcttttgcctgccatttgcttttcttttgattctagaatcaaaagaaaagcgagacgccaagccgacggggaatcgcacgcgtctactcgaagcgaaggtaggcgatgaacgaggccggcacgtccttgttcttggtgacgttgccgaaaccgaggataacccctttatcaggtagacccttcgtcgaggtccacgtggccgatcgcgacaaatcgaagccgacggccttgtcgatgtccgacaccggctctcccttggcgttgaccaaggaatccttgatacgttcgagctcggcggcatccatgacttcggagggcttggtgatttcgccgcgccgattgacctcggcaaaggtcttggcgtcggatgcgatcatgttgacctgccccgcggacaccatggcgagcagcttggtggagtcatcctgcgcgttcccacctgccgcatcacccaaggagattgaggcatccatgctgaccaagcggccgtccgtaataccttccgattgggcgaaaccggcgccgagcgaatccagttggtccgagcaacggctcatgttgacgccttcgaaagacagcaccgggtctggcgccttgatggcgtacgaaatgccgaacgaggcggcgatgccgacggccagaaccgcaacgatggcatatgtcaggaaattatccttgaaatacggccatttttcgctcgccggcagttctcggaatgtcttgagcttcgactgcttcgcatagacgttggtctcggacagttcggagaccgccgccttctgctcgtcagacagcacgaaatcgtccctgcgttggttgtcggtcataggttcccgccttcgtcactcgtcgtactcacccgcgtaggaacaccgtcatctcgttctcgccacggttggcccatgcgaagtatgggatcagcgtggccttcgtcgccttgcgttcggcgggacgccaatcatggtacaacgtggaggtctgcgcgtcgtcttccatttcgcgccaggcgggaatcgtcagcgtggtcatcggcatatcgacggcgtccacttcgccgagcccccgctcgtcctgtgcggcggcgccggcatggaagacgatgcgatcgacggccacgcaggacggatcggacgcgatgcgcgcggtgtcggcgtgcagcagatgcaggttcgcaccattgtcaacgccttccgcgcagtaggccagcggcccgcgcacgaacgccaccttgccggcgtcctcgcgcacgagcggattcgcgccgaccatgcggaccggcatcgggaaatcgaaatcgacgatgtctccgtcatgccatgtgccggtcaggtacaggtatccgttcctgacggcacgggagatgtcgtcgcggccgcgcacgatgaccgcatcggaagcgctttcgccaccggcccaggctggcaggcggaaggcgatcgtgaaaaccgcgtccttggatgcgtcggaagcagaatcgcctgcatcaaagcccaccgcgacggatcccttgccggaccaaggcatatcggacgtgacgtcaaggcgcacatcggcgccggaaagcctggcatggacgccgccgcccatatacagatgcatatacagggtggatgagtcgtcgccgatcgtgtaggcgtactgctgcacgtcctccacgatgcgtgcgatgttcggcgggcagcaggcgcagccgaaccacttctggcgcaccggctttacgtgcgccttgcgttcatcgcgatggcatgcctcgggcaccacttcgagcgggttcacgtagaagaagcttttgccatcgagtgccatgccggcgagcgtggtgttgtacagcgccgattccatgacgtccgcatattcggatttcggctggatctccagcatgcggcgcgcgaagaacgcgagcgcgatggcggcgcagctttccgagtaggcggtgtcgttcggcaggtcgtagtcgaaggagaaggactcccccatgtgggtggcgccgatgccgccggtgatgtagagcttccggtcgatgatgttgcgccatagtcgttcgcaggatgccagtaggtcggggtcgccggtcagtcgtgccacgtcggcggatccggcgtagaagtaggcggcgcggacggcgtggccgagggcctctgtttgttccgtgatcggtttgtcggcttggtagtaggcgtagttctgttcgcgtggctcgtagttgcggccgtcctcttgggcgcggcgtcggtcttcgagttcgaagtagagcggttgccggccgcgttggcgtacgaagtattcggcgaggtcggcatagcgttgttcgccggtggtttcggcgagtttgacgagtgccatttcggcgatttcgtgaccgggataaccgtgcagtttgccgtcggtggcgccgaatcgggaatcgatgtagtcggcgaaacggcaagccgcgtcgagcagtttgcgtttgccggtggcttggtagtaggcgatcgcgccttcggtcaggtggccgaagcagtacagttcgtgatggtccttcaggttggtgaagtgccggtccatgccgttgaggatgtagtaggtgtccaggtagccgttgtcgagttgcgccgcgcagacgatgtcgatggcggcgtcggcggttgcctcgagttcggcgtccggatggtgggtcagggagtatccgaccgcttcgatccatttggagaagtcggtgtcctggaatacgaagccgtagaacttgtcgggatcggagtgtgccggatcgtccggcagggcttcgaagcctcgaaacgtgtatttcggcggcacgaaggccttaccttccctgcggtgctcggcgttctgcgcagcggcggctttgaagttgtgcatgcagtagctgggtgcggcgccgggcacgttgtcgttgagggcgttccactggaacgggatcacctgggtgcgtacgagttcctgccgcgatgcccagaatgggtcggtgatcgtcgcgtccttcaacgcgatgggatgactatgttgcgtcatgctcattcccttcctgattgtctatttcgattttcggcggtgcgtttcagtaatggatcggagcgacttcttccggacatgcgtcgtatggtggctttcgtcccattgccacgtcgtacattccgacatggcaccggcgcatcgcctgagccatttccggatattcctgggaacatacatccacgagtccgatttgatagttttcgccatcaaaacgtcccaaggcgctttggtcgttgtactggaagtaatgcgcgccgacaaaataccggcttcgcaaagcctgctcgacgtagtatcggtaagctttcccgcgatcctcctgcgtgcgcacaccacgaatgccatgcgcgttcaatccccggtcgagggcaccgtggtggaattcgccgaccatgaccggcatattcagcgtttttcccagctcatcgacctgatgataacaggtcatctgatagctgttgatggagaacacgtcgtagcaatcggatcccgcgagcaatgtgggatcggtgatgtacgcgtatcgcatgccaagattcagatggtgcgggtcgactcggcgcaaagcttctgcgggaatcctgacgtatctgtcgatcatgaggatactgaagtcacgcaaatcgtgcatgctgccagacatctgccgcacgcaacggtatcgggggcacgcgattaggtcttcgaaacactcgatgccggaatcgtcgggaatccgccatgcctgtttccatgcctgcgcatcgccatggtaccgatccaccaaccatgcgaccaaggcctctttggaggccagacgctcgggattggcgagcatttcctcggcaaggttcagatcatatacgaacgcccaattgggttcgttacgcatgaagtagccgatcatattgcgatcgtcacgccaatctttcaggccctgtgcgtatacgtcggcattgcgttcgtattccgtcgagaacacatcggggaaatcacggaacaccatggttttggtgcggggatattcccgcagcgtatcggcgggcagcacataggggatgcccgcagtgcgcatcagctcgtggtccgaccaattgccgatggtgttcatgccccagtcgtggaaatgccgcagtacgatccgtttccatgcgtcccatgccgaagcgccgaatgcgtgacgtagattggccatggcgtaatcgtatgagcattcgaaaccgcaatacgtgttcggagcgctgcggattgagaaatccggatcgccaatccgttcattccgacgcgccgcatccaccagttcccgtacatgccggtcaacccaaggcaataccggatcgactctggtgtcaatgccgggattgacacagtcggcgccgacggagatgaatgcgttgccgtcagggtcgagcagccagaatcgtccgtcatcccccggttcacgccatacacggaaccatccggtcgcctcggcatgcacatcttgacatccgccataggaatcccggtttagcaatgctggcaggccggccataccgcccgcaccggatggcatcggttcggccaatcgatgcaacgcctcatcgcaggcggcacggttggtggtctttcccggccattggcgtggcttccattgtcccatctcatcgataagcgcatgcacgggcggatccgcgtgcgcgatgacgtccgcccattgcaccggccacaccttcaaacgtctgccatcgcaactcgcatcagacgataggacaatgctcgagacatccgctttgcgtagaggtttgccgaaaatcgtcatcttcagacggccaggggtgcgcggagcgaacaacgtctggccgtccagccaccgcaaatcgaaatacacggtggtctccacgcccggcaacagtccgaacagcgcgtacatcgtcggatccgcgccacgttcgcgctgccccgcctcgtagaattccaaccgcaagcacatggagtactcgtcgcatccccgcaaccgcaatgcgagaaactccgcttgccgaaacagttcggcggccggcatggtcttgcgatcgaagatctccgccagcgccttgcctgcggagcatgtcaatgtccgcccgccatcaaccatattgtcgttcataagtgcccttgcccgtcccgtctcagccgatgtttccgtccgccttggacagccgttcatattcggcacgcgtcagggaaagaaccccgccatgcttggtgtgcggcgccatgaagaaatcggtggaacgaaggtagtcaaagccgcggtcgggatcggaactgaccataggtctgtagccgatggatgggatcacatccacatacagataccacttgtcttcgctgtgcgaggcgaacagggccggaccctccactccaccgggatggccgttctccgtccaatcgacgccaatgttctcctgcagcaccgtccattcggtttccggcttccaccattgcacggcatccgtcgcatccagccagatattggcctgaggaccgttgtctttggtggcgcggtatgtgcgcacggtgccgtccggcaaggttctttgcagcatggtggtgtcgatggtcgggtgccccctgtcgatgaacactccaccgaatgagaaggtctcgtttgtgaagtctgtggtcacgccccacatgaccctgtcgtacacgtcgggattcgtgtggtcgacatcatcatcggagaacagggtgcttgaccaatacaccacgaaagctccacgaccgcccgcatggccttccggataatagtcgggcacccacaatgcctcaggggcccacgccatgcccagctgcgcgtgcgtgccatccgcacgtttgctcatgtcaagcatgcgcggagcgctccaatgcaccagatcgtcggattcccagatgatcaggttcgtgctgccgtgatgcgagaacttgtaccaatcggctccggaatcggaaccgtgtccatcggagaacaccatcagatccgtggcgaggatgtacaccttgccggtttgcgggttacgcaccaagtatgggtcgcgcacgcccctcgtgcccaacggcgatgtcagtatcggcttgccgccgttcaaaggattccaatgctcgggattatccccatcggacaaatcgaggtagattcgttccgcatacgcattcgggtcctcgataaagtggaccagcagatagccgaatggctggctttctttagattccatggattctcccaatgtccagattctttctacatcgttgtatagttgcttcacaaagtattatcccacgaatcccgccactgcaggacggcccgtcgatcgtcgatgtcgatcggcagggtgaccaacggggaattgcccagatcatccggattccaacgatcgccgatgtacaggaaacgaccggcgtgccattggtccgcgccatcgagtggcacgatgatgtcgcattgcgactggtaggtgtgtgagccttccggggtgaacggggtgaaatcgctccatggaccatgcagatccgtcgccgtcgcgaacatattgtcgttgcaatcccaacccgtcagacaggaaccgaaccagtagtagacgccgtcttttttaatcaggatcgggctttcatagccggcccagtaattcgtgccccgcaggcaaatcacatcttcgacgatggacaggtaatcatcggaaagacgatagatgtgcgtgccgtgaggccgatcctcgctcaaaatgtacccgactccatcctcatcttggaaaacaccgatgtcgcgcgattcataaccgcggaactgcatcgtgttcagaaactcgaatggtccggtcggcgcgtccgagatcgcggtgccgatatgcgcataagcgtaatcgcctttgccgtcgacatgcagatacatcacatactttcccgtctgtgggcatcgcatgaccttcggacgctcgatgatacgctccggaccggtgatggaaccgtcttccccgacttccagcaccgtcccctcattgcgccacgtcacgaaatccgtggttgaatagcaggccacgccctggaacaggttgccgttgtttttgatctcgccatacgcataccaacgatcgccgaaccgctgcacgccaatgccgtgcagctgcgcgacctcgccattggtgtcgcggaacagctgagctccttgcatgattgccataatccgattcccttcttatctgtgtgtttatttcgggctggtcgatcgtcaacgatcgaccgagcctccaagcatgattccgcgcaacgtgcctccgcgttcccgcgtcgattcggcgtacagcatcaggtcgccttcgccatggggcaccacgaacagatcgccgcgccctccagcgaaaaccgtacccggcaacggtcccaacacgacgcgtcccaagcaatactcatcagtgaacgccgtcagctgcagaccctcgccatcaaaacgcacgatggtgttatttgagtactcactaccccgaatggacgcgccgggaacacgtatccaccgcccttcgccaccgggaacaagcaccggaagcgatgcacggacatacgtcgcccgcgcgcatgatgcacgcagttccttcagtccttgggattcgcaggtccaaccggtcaattcatcgcctaccagcaatgcaatgcgtccggcatcctcaccccacatgcgattcacgacgatggacagctcactgccgtcaggcacttctcccagccacagcgtcggagccagcggcgtgatgatgccgatggtccgaccgcccacacgcacttcgcaacgcgtctgcccatgctcgatatgaaggcaggcggaggccccgcccagcgacagcgtacgcgtatacaccaaagcatgaggccaggccgtcgtgctacgcgaaccgaaaccgcagcgcggcactggagcgtcgccaagcaccaaaccgttttcacgcaaccgttcggcgttgtccggatccgtacggttatagccgacgcgccatcccgaaccaatatccaatacccgttcaatgctcattgcgccgcacatgccgcgcttgccattcaaccgcaaggcgttcaatctggtgtcatcgaaattcgaatgaccccagatacgtgtggtgacgacgatatctttggtatcgtcggcaacgggctcattgaaaggaatccacgcatcgacgccgccgcaggcctgccaatcagtgcctgaattcccgcatcgcacgttcacggtatcggcggcattatggagcaccactcccaaagcgccgcgcatgttcgtcgccgcgcggtaccggccggcaccggaatacacgcccatgtcctccaatggcagcgcgtcgtgcaagacgtcgccgtcgcagagggtccacgacggccaatctaaggaaatggccacgctacggacgctgctgtgtggagcgcagccgagcaccacatgatgttcgggctgggtgaaagtgatgcgccatgacgattgcccctggccgatcgtcgccgtgccatgatccccttgaaccacaatatcgccgttcaccatatgcgcagtcaatgcatcagtatggatatggatatcgtccgccttgatgccatgcgcgggacggataatcgctccaaaacgccctggtgccatagtcggtgccgacaacgtaagcgtgtggccgctttcatccaactcaatcaattcaccggaagtcgcacgaagcatcatgccgtcgcccaatggcagacccgcaacgaccatcgctccggcaccggccggcaaggtcagagctggatatccaccatcagacagggcatcgtcgggcgcatcgccgatgcgaatatccgcagcgtcatcggacacgttggtgaatgtcagcagacgtccgccaccatgcagatccaatgatccgacggcaacgccgacgcgcgtctcgtcaaatcggtcgccttcagccgaatcaagatggattcccgtcaatcggtcatcggatatcgtcgccgaagccagccgctcgcccaatgcgtcgatgatggagcaaagccgacgcgcgtcatcggcatcgggacgctcctgccccgtagggtcgatcacaccgccaaaatcataatcatgggtcatgtacgcttcgacgcgaccccaattattcaccgaagtaccgtaatcgaaatcccatccggaaacctgcaggaacggtccgacgaaacgcgctccattgcctaccagacgacgcagcgtacggtgccaacgattggtttcggtaaccaccaacggcacgtcataggtatccgccgcccggcggtagtaccggacctgtgcgtcgacgtccacatcgttatcgcccggatacagattcacggctggagacacgtcttcagccgtgccgccggcccgaagcatatcaccttggccggcacaggcgattataggaacgtccacaccgtatgaacgcatcatcgaagcgagcgcaccaatatatttccccggctcatggcaggcgtaaaagtcgagttcgttatccgcctggacaagaatgacgacgccgccatcatcggcatcggcaccgcgatactgctggcgcgcgatgatcggcatgattttgccataccattttctgacttcgccaaggaacgcatcatcatattgacgaacatgcgttttcccattcgtagacacccacgcggggatggcaccgccatcccattccgagcagatgtacgggcccgggcgaaccagcgcgtagagccccacctcgtgcgtcaatctgaggaattcctcaatatcatgctgaccttcaaaattccatatatccggttcggtttcatgaaaattccaagggatatacacatcgatggcgtgatatccgatgctcttgacggcttggagcctttgtttccactgttcccgcggcacacggaacgggaacagggaagcgcacatcaacacacgaggccggccgtcgatcagcagacggttatggtcgaaagccacgaatcgagacatcatttttccttaaaaatgcatcgataaaggtcatagagatccattggtataaggaaggcccgtgcaggcattgacagaagcttgcacaggcctcccaatcatgcggggaacagtagaagaaccgtcccgcatccattcgcaggcgatcagcccttgacggcaccgatcatgacgcccttgttgaagtacttctgcaggaacgggtagatgacgagcagaggcagggtggagacgatgatcacgccatatttgatctgatcggcaagttgctgctgctgcatggcgttctgcccgccggaactcgaaccaagctggttggtctggttcgcgagcaagatgtcacgaagcacgttttgcaacggctgcagaccactttcacggatatagataaggccggtgaagtagtcgttccagtggccaacaaagtaatacagaccaataaccgcgatgatggcggagctcagcggaataaccactttgaaaaaatatccgaagtagctaagaccgtcgatctgggccgcatcatgcagatcctctggaatggatgtttcgaagaacgaccgagcgattatcaggttccacacgctcaccgcccccggcaggatgaacacgagcgggttgtccagcaggccaagggccttgaacagcaggtagttcggtaccagaccgccggcgaaatacatggtgaaggtgaacaggaatagaatcacacggcgcggcttgaactcgatgcgagccagagcaaatgctgccggcaatgtgacgatgaggttcagcgctgtaccaaacacggtgtagagaatcgtgtttgtgtagccggtccagatacgcgaatcctggaaaaccctgatgtagccggcaacggtgaagccttttggccaaatggtgacgttgcccgcggaaacctgcatctggtccgagaacgaagcgacgacgatgaaccacagcgggtaaatcaccaccgctacggttgccgcgatgagcacccagatgacgatatcgacaatccaatcaccgacacttttctgctgatgcatgtgcttgttccacggaatctcatcggcgctcgttttaggcgcaacagatggggaaacgcttgcattagtcataatcaattcctccttgcgattccctcattagaagatgctcgtatcggatacgcgcttcgaaatccagttggcgataatcaggaacgcgaagttgataaccgtgttgaacaggccgattgccgtgccataactgaactggaacgattgaataccgattttgtaggtgtacgtcgagatgacttcagatcccggcatgttcatggcattctgcatcagccataccttttcaaagccgacgttcagaacggaacccatgttcatgatgagcagaatcacacaggtcggcatgatggtaggaatatcgacataacgaatcagctgcagacgtccggcaccatccatcttcgcggcctcatagagactcaggtcaacagaagagagcgccgccagatagatgatggcgttccagccgacgtgctgccagacttcggaaatccagtaaataggagcaatggcgtttgcattgtcgagaatgctctggcttcccaggaaacgccccagcagaccggtcttcggagtaaggaagatgttcagcatggccacaatcaccacggtggaaatgaagtggggcatgtaggtgatggtctgcacgaagcccttgatcttctgcgagccgatctggttgatgagcagtgccagtacgataggggccaaaaaaccgaggaccagagttcctaggctgatcttgaaggtgttgatcatggtcgatgcgaacatcggcgacttgaagaactgctcgaaatactggaacccgacgaatttgccgccggtcaggcccttcgccggaacgaattcgcgaaacgcgagctggatgccgtacataggcacataggcgaacagtccgacgaaaatcatcgcgggcaaagccatcacccaaagctgccaataatgcttgaaatgccagccgatgcgcttgggaagcggccaagatttgcggacggcgttattgtcgatcacaccgttttcatcaactacagaaatggacttgctggacaccattatcctccttacaccatagcggaagcccgatgtggacggggacgaatccccgcccacatggccctctggcttacttgacgtacttgttgtacgccttctgccagatttcggtgttctggtcgatgttgtacttcttcaggttctcctggaaggcgttccactgggaatcgtcctcaacaccaccttggctcagccacttggacacaaccgggatggcgtagttgaacagcgcagtgttgttgttcgccacggtgttctggtcggattcgccgatgcggacgtaaatcggcatcagatccttggtgtggtcgtagtgggagtactgctccttgtacggcttatcagcgttagcaacatggtccatgccgcggtcgccttcgacggtgacgtcatcggaaacccagccggccagacgatcttcgagagccggaatcttggacgcatcctgggccttgtggaacttctcggtcaccttgtaggagtgggctccggtcttcttcacatagccatcggagaacgagccgaagagctgctgaatcgaatacttctcggagtagagcaggttgatcaccttcaggcaggcatctttgttggcggcgttcgcggacatcgacatgtggtagtcctcgtaacggttggcctcgctggagccatcccagacggtgtcttcggcggacacgccatccgcagacggaatcggaatggaaatgtactgattcgcaagatcggaaccgtaggaaccgaaagcggattcatcccagccgaacaccataccgaccttggcggtcttgccatcggactggttgcgcgcgttgtacttgtcgtccttgacggtcacccagtcagacggcgcccagccgttcttgaccatctcgtggtagaactcgatgacctgacggaactgcttggtctgcatccagttggcgaccttgccgttcttcacgtagatgccctgctgggacggaccggagttgaagtgggtggcaatgccagtggaattcatcatcaggaacgggctccaccaatcaccgatcttaccggtattcatctcgcgcgggttgaaggcgatctcatcggcctggccattgccgttcggatcctgggtcttgaatgcctgcatgaccttgcgcaggtcatcccaggtcttcggcaccgagaggcccagcttgtcaagccaggtcttgttgatcatgaaatgctggccggaggcaaggaagcccttggtacgactggatggcaacacagtcacttttccgtcgacggtgacgagcttcttagcggtaggctgttccttgaagaacttcttgacattcggcagcttgtccagatcgttgccaagctgctcaaaagctgaagagtttcgagcggcatcatccgggttgaaagcgcgaatattcaaatcggaaatctcaccagcggcaagggatgcgttcttctgctgaccccactgatcgtcggagacttccttccattgaatggagcaatcacaatccgcctcgagatccttggtccacgacatatcggccatcttggtttggttagagttctttacaaccagaatggtaacgatcggcttgccattggaatcggtggtggccttgctgcttccgcaagctgccaacgagccaagcatcgccaatgcactgatagcggcacccaccttgactgccgtctttctacttagcattagtccagtcctttccctggtcctttccgataaagagcgccagttgcccttccacggcattccctttaatgccattgcttatcgggttgctacctcccttccgagaaatcgcaacgattcgattatctatcagaattccttgtaagtcaaatccacccgacacacgtgtaaaacccagaaaatacctgtagtttaacgttttactttgcacaaaagccgaaaaaaatatcgcaacgattcgattttcccaaatttgtggctatagtaggatggtaaatgatattgcaacgcagcaaggagaacaacccatggtcacgcttaaagatgtggcaaacaaggcaggcgtttccatgtcaacagcgtcggcagcaatacgcgggaaagacatcgtcaagccggaaaccacgcagcgcgtgctcgaagccgcgaatcggctcagctaccgcaccaatctttccgcgcgggccttgcgatccggcaagtccgacatcttcaccatgatcgttcccgatctggaaacccagtactatgccaaactggcgaactccatggctaaagctctggcgtccgaacaaaagcgccttatcgtgcagatatcacaatacgacaaagacaaggaacgcgagctcgtccgccagatcacgccatcgacctgcgatggcgtgttcatttgctccacgcaaagcagcggcgcggacattcatgccgtggcaggcagcattcccgtgctcatgttcgatgatatgagcaacgacatcgaagcgtattatgattccatcgagacacccagccagaccggcatgtatgcaatcatcaaacacctggtggaatgcggacgacgcaaaatcggcatcgtcggcaccacaacgtcgaatatccgtaaaatatcattgtcgactacgctacgacaaaatcgttgcatctatgcgtatcaagcgatgcaatcatatggactcgatacttcgaaggcatacatccaatcggattggggcgtgggagccggcatccaaatcgcacacgacctcgtcaggcaaggcatgtgctatgacgcgctctgctgcatgaatgacgaacttgccttaggcgtgcttcgcggattggccgaatgcggcgtgcatgttcccgatgacgtcgcggtgacgggattcgatggagtgcccaccggatcgtataccatgccgacattgtcaacggtagcagtggatttcaatagcatggcacgcaccgcggtcgccatgatgcaggatcagatagaacgggacgatgccgatcacgttgagtccatgccacgccacgtgattgtcggattccaattgctcaaacgtgaatccacactgggacgaaacatttcgacggcatccatcaataagaatccttccgcaaaaacttccgctgatagaacatccaccaccaaggaagcatgatttcatgaaacgcgttgctgtgacctatgaatatttctgccgcatcatcctcatgattctcgtggcacacgtggccttcatagcacacacgctgctcgggctcgtcatcggcggattcttcccatccgtcgcggcgacctacgccacataccgcacatggctcatcgatgtgaaagaccggtcctggaccatcaaacagacatggacgaccttccataaggcgtggaaggcggagctcaagagtgcgaacgccttcggctggccgcaattcgcggtctgggcactgctgatctgggagtactggctcgtgcagaataacgacatgggcgtcgccggccttgtggtctccggagttctgcttctactgaatctcttctacggccttttcgttttcatcagctgggcggtacacgccaacttcgacgaatcgccgtattggacgctacgcacgtcaatcgccatggtcatcgccagaccgatgtgcagtctcatggtcttcctgctattcctcgtcaccgtatgggcatacgccgcatggccgggactgcttatggcattcggcgtggccgttccgatttacgccactatgatggccgcgtattcatggggacgtttgcccggcatggatgtgcatgtgcttgagccgaacgaaaaggacgcggcagccgccatacacaaacagtgaaattcaatctgaatgaaattgggcttggatcgatgaattcgatccaagcccaatttcattcaacaccaaatcggcactcacaccttgattatcgcgtactgcgattcgtagagccgatagtaggcaccatggcgggcgagcagtgcggcatgactgccctgctccacgatctgtccgtgatcgatgtagcagatctcgtccgcgttctcgatcgtcgacaggcggtgcgcgatgatgaagctcgtgcgccccttgagcagatgctgcaggccggcctgcagcgcctcctcggtgcgcgtgtcgatgttgctcgtcgcctcgtccaggattaggatacgcgggtcggcgagcagcacgcgcgcgaaggcgatgagctggcgctggccggccgacagggtcgatccgcgctcctccaccaccgtgtcgtacccgtcgggcagttccatgatgaactcgtgcgcgtgcacggccttcgccgccgcctcgatttcctcgtcggtggcgtcgagcttgccgtagcggatgttctcgcgcacgttgccggagaagatgaaggtgtcctgtagcatcacgcccatctgccggcgcagcgatgcgagcgtcacgtcgcgcacgtcgtggccgtcgatcgtcaccgagccctcggacacgtcgtagaagcgcgacagcaggttgatgatcgtcgtcttgccggcgcccgtcgggccgaccagcgcgatcgtgcgccccggttcgacgtggaagtccacgaggttgaggatgttacggccgtccttctcgtagcggaacaccacgtcgttgaagtcgacgcgcccgcggatctgcggcaggtccgccgcgtcgggcttgttgcggatctccggcgtgacgtcgagcgtctcgaagatgcgctcgaggtacgccgagcaggtgatgagctggttgtagaagttaccgatgttgatcaccggattccagaagttgttcgcgtagccgacgaacgcgatgagcacgccggtggtcacgttcacgcccccgaaacccatcacgccgacgaagtatatgaacgagatggtcatcacggagatggtctgtacgcccggccacatgaggaactggatgtgcacggcgtgcatccacgcggaacgcacctcgccctgctgctcctggaaggtcctgaactgggcctgctcctgcgcgaaggtctgcgtggtcttcactccggcgatcgactcgtggatgtaggcattcaggttgctctgcttgttggagagcttctggtaggcgcgccgctggaagatctgcagcacgcgcacccagatgatgagcaccgggaacaggatcaggctccacagggccagctgccagtcgatcacgaacatcacgatcagcgtgatcacgaaggtgaacacgtcggagatcacgttgatcagaccggagctcagcgtgtccgaaagcgtgttcacgtagttgaccacgcggatcaggatcttgccgtgcgggcgcgaatcgaagtagctgaagggcagcgtctggatatgcgtgaagatatcgcggcgcatatccttgagcatgagctggccgacgcgcgtgatcgccaccgtgcggtagcgcagcccgaactcgtacagcacgatcagcgcggcgaggatcacggcgaggatgccgagcttgccgaggcccttgttcgggatcgcctcgtcgatcatgatcttggtcaggtacggcacggcgacgacgatgcagctcatcgagatgacgacgacgagaatgcgcgccacctgtgccatatacggtttgagatatttgccgacgcgagcgatgtcgtggaggttgatggactcctccagctcctcatcctcgcggaatgtattgcgttgtgccataagtcctcttctaaaacccctgtgcggc

SEQ ID NO: 1322 - DNA, 58850 bp, Unknown
  R157_18m  MAG No. k141_12962
acaagtccaccaacaagatcaatgccatcatcgccggcaagcagcctgctgccacctggctgaccctggacgaggctcgtgccgagctcgagaagggtgccgccgcttgggattgggcttccaccgccaagaacaacgatgaggccgaggtcgtgcttgccgccgccggcgatgttccgactcaggagatcatggctgcttccgacaagctgaaggaactgggcgtcaagttcaaggttgtgaacgttgccgacctgctctccctgcagtccgccaaggagaacgacgaggctctgaccgacgaggagttcgccgacatcttcaccgccgacaagccggtgctgttcgcgtaccactcctacgctcacgacgtgcgcggcctgatctacgaccgtccgaaccacgacaacttcaacgtccacggctacgaggaggagggctccaccaccaccccgtacgacatggttcgtgtcaaccgcatcgaccgctacgagctgaccgctgaggccctgcgcatgatcgacgccgacaagtacgccgacaagatcgacgagctcgagaagttccgtgatgaggccttccagttcgccgtcgacaagggctacgaccacccggactacaccgactgggtgtactccggcgtgaacaccgacaagaagggtgccgtcaccgctaccgccgctaccgctggcgacaacgagtgataacacctccacggtgttgttagttcgctaacaccaaagggctcgggattttcatcccgagccctttgcttattcataagccccctctgacgaggaggctgtcatgcgaagcatgactgggggagagaaaagcggaagcgaaggcgagagccaagactgaaaacagcccataaattccccaccccaactaatccttaaggatgacaactccccatcaattcaatcctgcgcatgatggaaaccacgtcattcctccataggcttggaaccagtatccgggcacgaggctcggagccagccatgggggagagcacatgcagaaggatcagcagcagaccgcaatcatacaaccgttggacgctaccgacaccgtggaatcaagtgtcgacgcccttgcccaaggcgaggcggagaacgcggaagtcgccgaattcaaccgattaatgcgcgaacgtgagacgcgcaagaaaaagcgcgtggtgcatcgcatcatcgccgtcgccgtcgtggcggtactgattatcggctttatggtggtgcacgcgattattaccccgtcagatgggggcgtgtctccggtatccacggcaacggtggaacgtggccatttcgtcgaccaagtcagctccaccggttccatagaacccatcaactccaccgtcgtcgccccgcagatcgacggcaccatcggcgaagtcaaggtgcaggaaggcgcaaccgtcaacgccggcgacgtactgtttaccatcaacaacgacaagctcgatagcgacgtgaatcaggccgatctggctctgcgagcagcgaactcaaaccttaatgccgcccagcagcaggtgaaccaaatcaatgcgaccataggtcaggcacgtaatcaggatggtgaggaaggccaagccgctgccgataatgcggccggacagctgcccgctgcacaaagcggcgtggagagcgcgcaggtcgccgttcagcaagcacaagccacctatgacgaggcggtcgcccaagccaacaagcgtacggtcactgctccggtctcgggcacggtgctgaccatgagcgcggtgcccggtgccgccatcggagcttcctccgatggctcatccacttccgccggcgcagacggtaaaccattgtgtcagatcgccgacctgagtcagatgaaggtcaatgtcaacatcaatgagctggatatcactaaagtggccaaggaccagagcgccaaagtcacgttctccgcggtgccgggactgacgctcgatgccaaggtggataccatcgccagcaccacgtcgcagttggctgattcctcggcaggcgggcagagtggcaacggcggcgtgggatacgccgtgcgtctcatcattcccgcccctgatccgaaactgaagccgggcatgacggccagtgtgaaaatcaccatgcagagcattgacaacgctttgatggtgccgctcgccgccatcgtggatgagggtaaggagagcagcgcggtcatgctcgagaccaacgccgaaacccatgagttcaagcgggtgcgagtcacggtcaaagccaagaacaacaccaaagccgttgtggaaggcaatgtgagcaagggcgatgtcatcatgcttgatggcgcttcggctgccgacaatactggcgatgctgcttcttccacctcgcaaaccgcggcttcggacgaaagggcacgctgatatgttcccgtttcgttccgacgcgagccgggcaaatcgcggcaaacggcgtaatgagaccattgccgtgcccaccgccacagccaacgtcatcgaggttgaaaacatcaaccgcatcttcgagacaggcgacacctacacccatgtgctcaaaggcatcaccatgaacgtgcgccaaggcgagttcctcgccatcatgggaccatccggttccggcaaatccacgctgatgaacacgctgggcctgctcgaccgcccatcatccggcacctaccgcctgtgcggcatggacgtgcagaatctgagtgatgacgaacgctccgaactgcgcgggtggctcatcggcttcgtgttccaatccttcaatctgctgccgcgcaccagcgtgctgcgcaacgtgatgctgcccctggcctattccgactgcccggtgcgtgaacgggaagggcgtgccatcaaagcactccaatcagtggcgttgagtccggaactgttcgaccgcaaaaccaatgaactctccggtggtcagatgcagcgcgtggccatcgccagagcgttggtacaggacccgccgctgattctcggcgacgagccgaccggcaacctggactccaaaaccggcgatgcggtgatgcacacgttcgaacagctcaagcagcaaggcaaaaccatcgtgctcatcacccacagccccgaagtggccgaacgcgccgaccgatgcctgcacatgcgtgacggcgtactgcgtgaagggatgtaccgatgagaacacgggatctgctggcggaaaccggctccgcactgagggcgaacaaaggcaaaagcgcactgaccattctcggcatcgtcatcggcattgccgcggtgattaccatgacctcactgatcggtggcattcgagactctctggtcggcgaactgggtatgaacgcggcgcgcacgatttcgatttacacggacgtcggcacccttgacgacgaacagatcactgcgatgcgcgcggaactgaccgactacgagtacttctcgccgacgaactatggtgccgcctcgtcaatcgccgcgcccggtaccaccgacaaggtgtcggcgagcatcaccggtgtcgacgagcatttcttcgatgtatccggagtgacgattggtcgtggacgggccttcacatcgagtgaagcaacgagtggtgcaatggtggtgattctcgacgggcagggcgtgcagaagctgttcggcagcgcggacattgacgccatcggcagaaccgtcacgcttgacggcaatgaagcaaccgttgtgggtgtggtcgagtcgtctggattgatgggcggcatgggcggcgacagcgtgaatatctatatgcctgccaccactgtggcgctgcggtttgcgtcctcgaacatgggatacatgcagatctacggactggccaaggacggggttgatatcgaccagctcacggaacagacgaagaccgttgtcgctcgcatcatgcgtatcccaaccgaacagatcgaccagaatctgtcggtcgtaagcgcccaatcctccatcgaccagctttccagcttcatgagcgcattccaggtgctggcgggttcggtggccggggtctcgttgctggtgggcggcatcggcattatgaacatgatgctcaccaacgttaccgaacgcatccgcgaaattggcctgcgccgggcattgggtgccactcggcgtgacgtgaccgcgcagttcctcgccgaatccattgcaatcacagtgcttggaggtcttatcggcacgttgatcggctacttgctgtcgttgggcgccgctggattggtgtccggcatcgccggtggcatgagtatcgcgccagcagtttccgtgcagtccatcggactggcagtgggcatctgcatcgctgtcggcgtgattttcggctactatccagctagacgcgcggcaaagctcgacccggtcgaggcgctacggcatcaataatcgcgtagcaccccgaaatgcagtagggcattgcgcacaccgtcgtggtccacgtcgtcggtgatgtaatcggcggcggcctttggctcggcggtcgcattgcccatcgcgaccccgatgccggcgtaggcgagcatatccgtgtcattgccgccatcgccgaaggccatggtctgcccgcgcgtgatgccgtaatgcgccatgaaccgctggatgccgcgcggcttgccgccatcggccggaatcagatccgtgaaatccggatgccaacgcaccccgcgcacattgctgcacagtcccaccagttcggcctccaactcgggtccgacaaagggactgatctggaaagtctcatgatccagcgcgcgggtgcgcgggtcctcaaaataccgggtcggtgcggttttgcccagtttgctccacgtggcgcgaagcagatcattggactggttgaagtacacgtaatccttctcgccgaaattggacaccacatcggggtgacggtccagccagtcgagaatcacctcaatatcagcagtatccaaggcctgcgaggcaaagaagccggtgtcatcaaagcaatactgcccattgaacgccaccacgccatcgaacgtcaccggcatggtatccagcaccacgtgcatctgtgaaggcgcgcggcccgtgcaaatcagcaccttgacgcctgcggcctgcagccggtgaatcgcctcgattgtggaatccggcaccgtatgggtcgtgaaactggtgagcgtgccatcgatatcgaagaatacggctcggatatcggcattggcagtatcggtagtcatggcttccattgtcaaagcccctctcgacgtgctttccggcgtgttcgacacgcctatagcgggttatcaaacgcacgaatcccggccattgcatgcgcgccataaaagacacctatacggcaatcggccattttccgtcactttcgcggttcaagcgcgttatggtgttacccgacatcaattttggagagaggaaatccaatgacagcagcaacccagtcggcaactccggccgctcctaacaataacgagccggtgcgtgtgaaccacaccgtccgcaacgtcatcatcaccatcgtggtcgtggcgattatcgccgtggccgcgttcttcggctaccgcgcgtttgccggtgccaacgagtcgtccgccaagggcagcaagggcaacccggtcaagatcggcgtggtcggcgctaccaaccccgaatgggtcaagttcaagcaggacgccgagaaggccggcatctacgtcgacatcgtcgacttccaggactacacctccgaaaacccggcccttgactccggcgagctggacctcaacgaattccagcacctgctctacttggccaactacaacgtgagcaacaagaaggacctgcagcccatcggcggcaccgccatctacccgctcggcgtgtactccaccaaggtcaaggacatcaaggacctgaagcagggcgacaccgtcaccattccgaacgacgaaaccaaccaggcccgcgctatcggcgtgctcaaggccgccggtctcgtgacgctcaagggcgactggaccgccttctccactccggccgacatcgacgaagccaagagcaaggtcaaggtcaccccgctcaaggccgaacaggtggccaccaccctgaaggacccgaccatcgccgctggtgtgatcaacaacgactacgtggccgacgccggtctcaacccgaaggacgccatctaccaggatgacgccgaatccgaagaagctcgcccctacatcaacgtgtgggtggcccgcaaggcggacgtgaacaacgagacctacaagaagctcgtttccatctaccagcagaaggatgtgctcgacgctctgcaggagaactccggcggtaccgcggtgttcgccgacaagttcagcgccagcgagctgcaaggcttcctgtccgacattgagaaggacgccaaagcccagcagtgagccgtggctgatacgagtgcacgactaacctgtccatagccattaccaccaagcggagcgagtacccgagccaacaatcgggattcgctccgcttccgtgaccggacatcaacaaccagcatcagggagcactatgagcgaccccatcatcaccttcgaccatgtcgtgaaggaattcaaaacacgcggacgcggcgcgaacatcgcacgagccgtggatgacgtcagcctgaccatcgatcgcggcgacatcttcggcatcatcggctattccggtgcaggcaaatccacactggtccggcttatcaacgcgctcgaacgacccacctccggcaccgtgaccgtgctcggcaccgatatcacctctttgagtgagaccaagctgcggcccatccgccagaaaatcggcatgattttccagcagttcaacctgttctccaccaaaaccgtggcgcagaacatcgcctacccgctgcaactcgatcactggcgcaaggactatcaggatcgtcgcgtcaacgaacttctcgaattcgtgggccttagtgagcacgcaaacaaatacccctcgcagctgtccggcggccagaagcagcgcgtcggcatcgcccgcgcactggccactaatccggagattctgctcgccgacgaagccactagcgcgctcgacccggaaaccaccaccgaagtgctggccttgctcaagcgtgtgaacgaggaattcggcatcaccattgtgcttatcacccatcagatgaacgtggtccagcagattgccggccgcgtggccgtaatgagcgccggacgcgtggtcgaatccggcgacgtatacgacgtgttcgccgcgcctcagcagccggtgaccaagcgattcatcgccaccgccctgtccggcctgcccgaggaagaccgggtcgagcgattgcaccacgaatggtcgggccgcatcgtcaccgtgctcatccgccaaaaggacgtttccggcagccatggccacgaactcaaggcatccggacagaacatctccgaactcatcgccaaatacggcgtcgaatccagcctgctctacggcggcatcgacacggtcaaggggaccgccatcggtgccatcacctacgaattcaacgggcccggctggcacgtggacgaattcctgcgcgagctcgccgccaatagcgacgtcattgacttcggcaccgccgcaaagcccgtggcttacgccgacgcagttgccggacatgcctcctacgccgaagaccgcgcccatgacccactggcggccgatactgccaccgcgcccgctgtatccgccgccgcacatgaaggagacaacgcatgatcatcctcgccaactcgcgtagcgactggaacgtgctgcgcccactattgttcgaatccatcggccagaccctgaccatggtgctcgtcacccttgtcatcggcggattcctcggcctgatcctcggcgtggtgctctatggcacccgccccggcaacctgttcgagaacgcggtcgtctaccgcatccttgacatcatcgtcaacatcgtgcgcccgattccgttcatcattttcctggcagccatgcagccgctcaccatcgtcgtggtcggcacgtccatcggcaccgtggccgccatcttcccgatggtggtcatgtgcaccttcgccacttctcgtctggtcgaacagaatctcgtgccggtcgacccgggagtaatcgaggccgcgcgttcgatgggtgccggcaagctcaccatcatccgcaccgtactcatccccgaagccctggcaccgctgatcctggcctacgccttcctgttcatcggcgtgcttgacatgtctgccatggccggctacatcggcggtggcggtctcggtaacttcgccatcgcctacggctaccagaagttcgaccagaccgtcacctggacggccgtgatcatcatgatcgtactggtccaggtggtgcagggcatcgccaacgccatcgccaaacgactgctcaaacgccagcaataacaaggcatactgaccccatagatcgcggccttcgccaatatgaagcgagggccgcaatatattcttcgcgctactagaatcgggaaccatgagtgaacatatcgacatcgaccacgaactcatcaccatccgccactacctgcacgcccatccggagcgtagtttccgtgaattcgacaccagcatctatctgaccgaccagctcaaggcgcacggcatcgagatcctgcacaacccgctggagactggtgttgtggggctcattcagggcgaggccggtcccgggccgcgtatcgggctgcgcgccgacatcgacggcctgcccatcgtggaagactccggactggagttcagctccgtcaatgaaggcgtgatgcacggctgcggccacgacctgcacatgaccggtctgctcggtgccgccttctggctcgccgagcaccgtgacaagttcgccggctcaatcaagattctgttccagccgagtgaggagaccggccaaggcgctcgcgccatgatcgacgccggactcgtggatgacgtcgaagccattatcggcacgcacaacaaccccaactatgcgtccggccagctggccatcggcgtcgagccgatgatggccggctgcgtgaaattccgcgtgaccctccacgcccaaggcacccacgccggctacccgtacaagggcaccgggcccatcgaagcgctcgccagtattattctgagcctgcagaccatcgtgagccgcaacgtcacgcccttccacccgctggtgctgtccgttaccgaagtgcacggcggccatgtgtggaacgtggtgcccgccgaagccggattccaagggactgtgcgctatttccacaagtcggatggcaatctggtcggccgtcgattcaaggaagtggtggaacacaccgccgaggcatacggtatcagcgccgatgtggtctgggatgatttccaagacccgctggtctccgatccaggtcttgccaaggccgtggcggcggatgtcaacgactacgcgcagctcgaaccgatacgtcagtcgatggcgggggaggacttctgcgaattcgccaaggtgacgttgccggtgttcgcgttcgtcgggtcaaacggccaggaaggttgcgccgactggcatagcccgcatttcgtgggtctcgacgaatccattcccaccttcgtcaacttctacgtcaacgccgccctgcgcgtgctcaacgagctgaggtaaatccttttttggctcccctctggaggctgaggcgttaggcagacagcccaatgggctgtctgcagccgaaggtgaggcgacagccgaaccagatatgcgcgggcctcgcccgtccataagtgcaggacgagctatcagcgaagctgactgaggggagtggcattcgttcattaggtcgattcatcgtccattaggtcggtgaacggcgatactggttgttggaatcgcgccattgcaacgactgatatcgcattgcagtgacctaatgaacgcaaaaacgacctaatgaatgacgccaagccggaagaacaggcaatccgacgtcatacgcggctacactaagaagctatgacacagcttcgcttcgcactcgcccagatcgacacctgcgtcggcgcgctcgatgccaacgccgccaaagtgctcgactactcccgtaaagccgccgcagggaatgcccaagtggttgttttcccggaaatgaccctcaccggataccccatcgaagatctggccctgcgccgcaccttccgccaagccgcatgggacaaggccaacgaactcgccgcccagctcaacgacgacggcctcggcaatctgttcgtggtggttggcaccgtgggcactgatcgtaagacctccaagccgcgcaaccgactggtggtattgcatcagggcgtggtctgggccggctacgacaagcacttcctgcccaactacggcgtgttcgacgaattccgtatcttctccgccggcgaccgttccgtgaccctcgacgtggatggtgccaccatcggcgtggccatctgcgaggacatctggcaggatggtggcccggtggccgacctggccaccaagaacatcgacctgctgctcaccatcaacggctcgccgtatgaggaaggcaagaccaacacccgtttcgagctcgcccagcgtcgtgccgccgaagtcaacgccccggtcatctacctgaatcaggtcggcggtcaggacgacctggtcttcgacggtggcagcttcgtggtcgatgccgacggcacgcttatcgaacgcggcccgatgttcatggaaaacctgacgttctgggacttcgattccaccgccgaacatcaggtcaaggccgagatcgttccggaactcgacccggacgaagaggtatacactgcctgcgtgctcggcctcaaggactacatggccaagaaccacttcaccggcgtgacgctgggcctctcaggaggcatcgactccgcactggtagccgccatggcggccgacgcatgcggcggcgagaacgtctggggcatctccatgccctccatgtactcctccgatggttccaaagacgacgccgctgacctggcctccaacatcggtgcccattacgaggtccagcctattgagccattgttcaacgcctaccaacagcaacttgaccttgatggcgtctccgccgagaacctgcaggcccgcatccgcggtgtgatcgtgatggccagttccaattctcgcggcctgctcgccgtggccaccggcaacaagtcagagctcgcctgcggctactcaaccatctacggcgatgcggtcggcggctacgcacccatcaaggacctgctcaagacccgtgtctgggagatcagccgttggcgtaacaaggccgcggctgcaggcgtcggtatcggcgggctcaagatcgtgggcaacgaggacggcaacgccggcatcccgttgaaggacggcgtgatgattccggtctcatccatcgagaaggctccctcggccgagttgcgccccgggcagaaggactccgactccctgcccgaatacgcgctgctcgacaaggtgctcgctgcatacatcgagcacgcgcacggccgcgccgacctgttggccgacggcttcgaccaggccaccgtggacactgtgatgcgattggtggaccgcgccgaatggaagcgccgccaatacccgttgggaccaaaggtcacggccctcgcgttcggccgcgaccgccgactgcccgtcaccaacgcgttcagggaataaacatatattgctcccgccagcgggagcaagtaataccgttgaggaggtaccaatgacagacgataacaagaagcagtggtatttcaacaccgtcaagaagcaggccgagctgggcatggtctcaccgattgaacagcgcatgggtccgtacaagaccaaggaagatgccgaacacgcctgggacatcgtggtggaccgcaacgccagatgggaggaggagaactggcgctggaagaactacggtgtgaaatccgcgcaagcgaacgatgaagactgacggccaaaacagacggatacggttctgctgtcaatctcaagaccgaaccgctcaccaagccgctcatacgaacatcacagtatgagcggtttcccatatctggagacgtgcaatagccccatcaatacctagaaaccattggaatggtagcgttcataaaaaacaatgtgagatagctcactcccaatttcggcttttcccaagcaagtgccaactacactgttgaaccaagggttccgtgaagatgcgaaacctacaaccccatttaaggagtgacatgaccgcagtagaaaatgcagctgtctcccaagaggagctcgacgccaaggcgtgggccggcttcaccgagggcaactggcagaaggatattgacgtccgcgacttcatccagaagaactacaccccgtacgagggcgacgagacattcctggctcctgccaccgagaagaccaagcacctgtggaagtacctcgacgacaactacctggccgtggagcgcaagcagcgcgtctacgacgtggacacccacaccccggctggcatcgatgccttcccggccggctacatcgactccccggaagtcgacaacgtgatcgtcggcttgcagaccgacgtgccctgcaagcgcgccatgatgccgaacggcggctggcgtatggtcgagcaggccatcaaggaagccggcaaggagccggatccggagatcaagaagatcttcaccaagtaccgcaagacccacaatgacggcgtgttcggcgtctacaccaagaacatcaaggtcgcccgccacaacaagatcctcaccggtctgccggatgcctacggccgtggccgcatcatcggcgactaccgtcgtgttgccctgtacggtgtcaacaagctgatcgccttcaagaagcgcgacaaggactccatcccgtaccgcaacgacttcaccgagccggagatcgagcactggatccgcttccgcgaggagcacgacgagcagatcaaggctctgaagcagctcatcaacctcggcaacgagtacggcctggacctgtcccgccctgctcagaccgcccaggaagccgtgcagtggacctacatgggctacctggcctccatcaagtcccaggacggcgccgccatgtccttcggccgtaactccgccttcctcgactgcttcatcgagcgcgacctcgaggccggcaagatcaccgagaccgacgcccaggagctcatcgacaacatcgtcatgaagctgcgtatcgtccgcttcctgcgcaccaaggactacgacaacatcttctccggcgacccgtactgggcgacctggtccgacgccggcttcggcgacgatggccgtccgatggtcaccaagacctccttccgtctgctcaacaccctgacccttgagcacctcggacctggccctgagccgaacatcaccatcttctgggatccgaagctgccggaaggctacaagcgcttctgcgccaagatctccatcgacacctcggccatccagtacgagtccgacaaggaaatccgttcccactggggcgacgacgccgccatcgcatgctgcgtctccccgatgcgcgtgggcaagcagatgcagttcttcgccgctcgcgtgaactccgccaaggccctgctgtacgccatcaacggcggccgcgatgagatgaccggcatgcaggtcatcgacaagggcgtcatcgacccgatcgccccggaggccgacggcaccttggactacgagaaggtcaagaacaactacgagaaggcgctcgagtggctgtccgaaacctacgtcgaagcgctgaacatcatccactacatgcacgataagtacgcctacgagtccatcgagatggccctacacgacaaggaggtgtaccgcaccctcggttgcggcatgtccggtctgtccatcgccgccgactccctgtccgccatcaagtacgccaaggtgtacccgatcaccaacaaggaagccaagaacctcgaaggccacgagtacgagtacgtcgaaggcgccgacgacgatctggtcgtcggctaccgcaccgagggcgagttcccggtctacggcaacgacgacgaccgcgccgacgacatcgccaagtgggtcgtctccaccgtgatgggccaggtcaagcgtctgcccgtctaccgtggcgccgtcccgacccagtccatcctgaccatcacctccaacgtggagtacggcaagaacaccggttccttcccgtcccgccacaagaagggcaccccgtacgctccgggcgccaacccggagaacggcatggactcgcacggcatgctgccgtccatgttctccgtcggcaagatcgactacaacgacgccctcgacggcatctcgctgaccaacaccatcacccccgatggcctgggccgcgatgaagccgagcgcatcggcaacctggtcggcatcctggacgcgggcaacggccacggcctctaccacgcgaacatcaacgttctgcgccgcgagaccatggaggacgccgtcgagcaccccgaaaagtacccgcacctgaccgtgcgcgtctccggctacgcggtgaacttcgtcaagctcaccaaggagcagcagctcgacgtcatctcccgtaccttccaccagggcgccgtcgtcgactgatgaccaaccccgcgaaccgcggcaatgactaactgaaggggtggggcacggctccaccccttccttatttcccacagactttcgcatcatttggaacaggaggacaactatgcccgcaacacccacgttccgcaccacgaccaggcatatgctcaaggaatcgaagacctatgcctcgcagactttgatgggcggcctttccggctttgaatccccaatcggactcgaccgacgtgaccgcctttccgccctgaaatccggcgatatcggcttcgtccactcttgggacatcaacacctccgtggatggaccgggcacccgcatgaccgtgttcatgtccggctgcccgctgcgctgccagtactgccagaacccggacacttggaagatgcgcgacggcaagcccgtctaccttgacgccatgatcaagaaggtcgatcgttacaaggacctgttcaaggccacgcatggcggtatcaccttctccggcggcgaatccatgatgcagcccgccttcgtctcgcgtgtgttccatgccgccaaggagatgggcgtgcacacctgccttgatacgtccggcttcctcaacacgagctacaccgacgagatgctcgaggacatcgacctgtgtctgctcgacgtcaaatccggcgacgaggagacctatcacaaggtcaccggcggcaccttgcagcccaccatcgattttggccagcgactggccaaggccggcaagaagatctgggtacgatttgtgctcgtgccgggcctgaccgactccgaagagaacgtcgaaaacgtggcgaagatctgcgagtccttcggtgatgccgtcgaacacatcgacgtgctgggattccaccagcttggccgcccgaagtggcacgaactgcgcatcccatacccgctggagaaccagaagggacccaacgccgccacccgttcgcgggtggccaaccagttcaaggaccacggcttcaccgtgttttaaattgcagggccgaaccgcgcgtaaataccacgattcggcccgttcgcccataccctagagatatggccgacatctacgcatttcctatgggagcgtccaacgatggacgccccgtacgccctcagggtgtgccggatgaagtatgggcagctgtcgaatccgtcagcaccatgaagcgcatccatgacgtgcgctatcgggagattcccgtgccttccaccttggccgattatggtatcggcgtggaattcgaagcgggagagcgtgccctcggcgatgccttttccgccggtcttggcaacgatgccgaatcacgaatcgccacaggctggatcatgatgctttatgctcatgagctgcgcattgaccgggattccaactggcgttgcgtggcgttcgcgcggctgccgctggaaaccgccgaaaacgattctctgacccccggcatgtactgggatgacatgtgcgactatttcgacggcatcgagccggattcggtatccggcacagtcaccgtgacccaaaacacggcttttggttcgatggccggctccaccagcgccgggtgtgagattcgcgtctcatggaccccgcttgacgggaccggaccggacggtactatggacgccggcgcacaaatccgctcgtgggccgcattcatcagatccaccatccgttttgaggaggatgacgccagttgagtgacgtccgtgacaccgaaccccgactgctgaaagagcctcgcgggggagtgcccgatgtcacttcgtcgctggatggctatcatcgtgcctgcgatgcgctggccgaggcgacgggctcgctggccgccgacgccgaacgggcgtccggattccgctatggacatgaggattggctgattcagttcaaacgtgaaggtgcgggcatcgccttgcttgatcccgtagccctgacacgggccggagctgactggaatgaattcaatgacgccgtgggcgatgctacatggattctgcatgattctctgatggacttgcccggattcgccgaaatcggactcaaacccaaggccttgttcgacacggaaatagcggcgcgattgctcggcctgcaccgcttcggtctggccgccgtcaccgaacactacctcggcatcacgctggccaaagagcattccgccgccgattggtcctaccgtccgctgccgcgcgactggcgcaactatgcggcgctcgacgtggaggtgcttatcgaactcgaaaccttgatgcgtcgtgacctgaaagccgcaggcaaggacgagtgggccgctgaagagttttctcacgctttggttgcgggtcttgccccgcgcaaacctcatccgattccttggctgcgtatctcgcgcatcacccagctgagtcgtgatccgaggggcttggccatcgccaaatccctatgggaggagcgcgaccggctcgcccggcgatacgacatcgctcccagcctgttattgaccgattcgtcaatcatcgaggccgcgaccaacaagccgcacaatgccgcccaattccgcgcactccgatccctgaacgagcgtgtgcgcattcataccggcaccgagcaggacaaaatgttcgagcggtacgcgccgattcagcgtacggtcaagccgaaggtctggaagcaggccatcgaccgcgccatggccctgaagcccacccaatggcctaccatgcccgcccccgaacaggacgaaaacggtgtggtgaacgcgccccgatccatgcgactgtggcaacagcgccatccggagcgttatgaccgtctgcagcgggtacggcgtgtgatcaaccgcatcgccgaagacacccgcacgccggccgagatgatcatcaagccacagatcctacgcaacctgtgctgggtggaagacccggtggaagtggacgtcgagacgttcctgatcgagcagggcgcaagaaactggcaggtgaaactcattgcaccgtccgtaagtggcgttatcatgtagaggttgccttacggcagaactgtaagaaataacgacttttgaggagtcattagcgtgaagatcagcgttcgtaacctcgagcccaccaaggtgaagctcaccgtcactgttgaaccggaagagctcaacccgtatctggatgcggcccgtaaggaaatcgccaagcaggtgaacgttcccggcttccgtaagggccacgttcccggcaagatcatcgaccagcgcatcggtttcgccgccgtcgccggtgaggccgtgaacgacgcggtcccggagttgtactccaaggccctggatgagaagaagattcgtccgatggctcagccggagttcgacgtgcaggatgttccgcagtccgccaacgacgagaccaagctgaagttcaccgccaccgtcgagcgtcgtcctgacatcgaactgccggaaatcgacggtcttgagatcgccatctccaagccggaagtcaaggatgaggacgtcgacaagcgcctcgagaccctgcgtcagcgcttcggcaccttggtcggcgtggaccgcccggccgccaagggcgacttcgccaacatcgacctgactgctgagattgacggcgagaccgtcgactcccaggaaggcgtgagctacgagctcggctccaacaccatgctcgacggtctggacgaggctcttgacggcctgtccgccggcgaggagaccaccttcgaaggcacgctggaagccggcgagcacgagggccagaaggccaccgtgaaggtcaaggtcaactccgtcaaggctgaggaactgccggagctgaacgatgagttcgcttccgaagcttccgagttcgacactctggacgagctcaaggctgacatccgcaaggctgccgctcaggacgccgaaggtcgtcaggccaccgaggctcgcgatgccttcatcgccaagctgcaggaaggcctcgagatcccggtgccgaagggtgtcaaggccaacatggtcgaagagcagctcaagggcatgaccccggacccggagaaggccaccaaggagcagaaggctcaggccgaggagaccgtggagaaggatctgcgcgatcagatggtgctcgacgctctggccgagaagctggacgttcaggtgtcccagtccgacgtgttcaacttcctcgcttccatcgcccagcagtacggcatggacccgaacaacttcatccaggccatcatcaagaatggccagcttggctccgctgtgcaggaagtcggccgttccaagggtctgctcgccggcatgcgcgccgtcaagttcaccgctgatggcgaggttgtggacctctccggcttcctgggcgaggccgctgaggacgaagagtccgagtccgtcgaggccgcttccgctgctgccgccgtggccgacgaactgtccgccaaggatgacgccaaggacgctgagtgagcatagcctcatcgcgttagcgtgattgtttgagcccggaatcgtgtttcacggttccgggctcttcctattctggtaaaaggactatttctttggctcccctttggggggagctgtcgggcgtagcgagactgaggggagttcccaaggcatactcgttgcatagcgtgcggaggttgacatgcagccaacggttactatcaaacgccttggttggctcgctgcggcgaccattgtgctcggcgtgctcatcggtgtgggagcaggtctgctgaccctgttgctctacggcgttgaacatgtgctgctcggctacatcgaaggcccagaattgtctggtccattcggcgtgcccgctgcacgccgtgtgatatcggtgaccgtgggactcggcatcgcgggcattatctggtatctgctacgacacaaaacgactgtggtgccctcagtcaagaaggccgtggcgggaaagcgaatgcctttctggcaaaccattgtgcatgtggtgttgcagattttcatcgtcggctccggtgcctcgatcggccgagaagtcgccccacgcgaactcggcgccatgatcgcgcaacgtttttgcgacctgttccatatcgagggcgttgatggtatcgaccggcgcatggtggtggcagtggctgccggtgccggtctaggaggcgtctatgacgcgccgctggccggcatgttcttcaccgtcgaaatcctgttggtggatgtgacgatcgaaaaggttgcgtttggactgggcgtgtctgccattgccgcattcgtggcggttgcgatcaaagggcattgcctgttctacgacatcaccgccatgcaaccggaatccacgccaacgttaatgctgttcgctctgatctgcggtgcggcatgtggagtgggcggcgcattgttccgaaaaggttcgcaatgggcggaagcgcacaagccgaccggtaaggccattctgtggcagatgccgctggctggtctcatcaccggtttggtggcgattgttgtgccgcaggtgatgggcaacggccgtgccgcagtgcaacttggattcagcacgttcattcctgaaaccgccggcactgctggtgccatgcagtcggcatcttcagcggccgcctctccatggaacttgctgacgggcggcggtaatgtatccgattcggcctctggcgggggagcgggctctggaatggcctcgttttgggccatgcttcagggtgggagcggctcttctggatccgtgatgaacgccggtttcccgctgtcccagtccaatatctggatgttgctgggtgtgttggcactcacttttgtcgccaaggcgctggtgacgctgatgaccattcgctccggtgcatcgggcggtgtgctgcagcccggcatcgcattaggttccacgctgggtgcgatgctcggcctcgtatggatactgatgtttccgactgattcggtaaccgcgtgtgccttgatcggtgcggcttcgttgctttcggcctcacagcaggcaccgcttatggccatgtgcttggtgatggagctgaccgaagcgccgattaccttcttcgtgccagtcggcatggccgtggccacgtcgtcgttgatatcaaagtggttgctgagtcgtaagtaagtagatgcatatattctggctcccctctctgaggggagctgtcgaacacagtgagactgaggggagccgaggtaaagaaagctatgtcagaaaacaccgaagtccgtgcggcacttgaatcgcttgccgctgagccgctcactgagcagattgactactatcgaaagccattcatggtgttgtgggccgccattcaggaggccgccagcgatgtggccgaagactacgacttgcctgcggatatggcccaattatgggtggccgaacagatgcgccaagtcgccgattcactggtcgatcggctcgcggaaaaagccgtggcccatggtgccagcaagtccaacgtggcgcgagccgccggtgccagccccgccaatgccgcccgtcgcttcccgcgtctgggcgacgatgccgcctcccagacccgcctcctcattgacgacgtcctcgacaccttggaataacccgaaatccctacgctacccgccaaaaagcacgcgaaaagccgccttcagtcgcttcaaggcggtagtctgaacaatgttcgagtaattagaaggagaatcaaggtgagcaatacctttgcgaccttgccggtcatggcgggcgatgacgtcccggccggccccgtcgacccgattttcaaccgtctgctcaaagaccgcatcatctggatgggtgaagaggtcaaggacgatatggccaaccgcatctgcgctcagctgctgatgctggccgccgaggacccgaagaaggacatctggctgtacatcaactcgccgggcggctccatcaccgcaggcatggccatctacgacaccatgcagctcatcgagcctgacgtggcgaccgtgggcctgggcatgtgcgcttccatgggccagttcctgctgagctccggcaccaagggcaagcgttacctgacctcgcacgcccgtgtgctcatgcaccagccttccggcggcatcggcggcaccgccactgacgtgcgcatcaacgccgagctcatcatggacatgaagaaaaccatgagcgagctgaccgctgagcagaccggccacaccctcgaggagatctaccgcgacaacgaatacgaccactggttcaccgcccaggaagccctcgactatggcttcgtggacaagctcgtgaccacgccggacaccatcggcaacaaccagcagggggagtgagactcatggcaagtgaagaagcaaagttcgccgcccgtgccgaccgcttggccggccgtcatggcgtagccggtttcatgccggccgccgcccgcgcagcccagcccgcgccgaccaaccgttacatcatgccgcagttcgtggagaagaccccgtatggcatgaagacccaggacgcctactcccgcctgttcgaggatcgcatcatcttcctcggcgtgcaggtggacgacgcctccgccgacgacgtgatggcccagctgctggtccttgaatcccaggatccgaaccgtgacgtgatgatgtacatcaactcacccggcggttcgatgacggccatgaccgccatctacgacaccatgcagtatatcaagcccgacgtgcagaccgtgtgtctcggccaggccgcctccgccgccgccattctgctggcctccggcaccaagggcaagcgcctgatgctgccgaacgcccgtgtgctcatccaccagccggccatcgaccaaggattcggcaaggccacggagatcgagattcaggccaaggaaatgctgcgtatgcgcgaatggctggaggagaccctcgccaagcacaccggccaggatgtcgagaagattcgccgcgacatcgaagtggacactttcctgaccgctcctgaagccaaggaatacggcatcgtggacgaggtgctggaacaccgccagtaaaacttccgaacattgcaataccctcggtcggcaacgaccgggggtattgtatttcaaggatgacaatgataatgcgcagcgtggcggttcgacggtgcggcgcggtcggcaaaggagaatcatgggacgtgtggtgagctacaacgaggacgtaccccgttgcacgttctgcggcaaaaccgaacgtcaggtcagaaaactggtggccggtcccaacgcctccatctgcgatgaatgcatcgccctgtgcgtggacatcatctccgaggagcgtgtcaaagatgccgaggtcaattcgctgagcctgcccaagcccgctcagatcttcgattatctcaaccgctacgtcatcggtcaggagaacgccaagcgcgcattgtccgtggccgtatacaatcattacaaacgcgtcaatatggagcttcaggagtccgctgagcagcttgacgggaataacgggcacggtggccagaccggcaaacaagccaagcaatccgctcccgcccagacgcgtgctacccgccgcaacagtgaccctttggctgacgttgaggtcgccaaatcaaacattctgttgctcggccccaccggtgtgggcaaaacctatcttgcacaggcgttggcccgcgtaatgaacgtgccattcgtcatcaccgacgccaccaccctgaccgaggccggctatgtaggcgacgatgtggaaaccgtgctccaacgtcttctccaagccgcggatggcgacgtaagccgagcccagcacggcatcatctacattgacgaaatcgataagatcgcgcgcaaatcaggtgagaacacctccatcacccgtgacgtgtccggtgagggcgttcagcaggcgttgctgaagattttggaaggcaccatcgcctccgtgccgttggagggcacgcgcaagcataaggagcaggacactgcgcagatggacacacgcggcatcctattcatctgcggcggtgcgttcgtgggactgacggatattgttcgcaagcgattgggccgtcgagagaccggcttcggcgcgaattggcacgacgccgacatgaaagacgaggaattgctcgaacaggtcaatgccgatgatctggccgagttcgggctgttgcctgagttcatcggacgtttgccggtcaccagtgtgctgaaggaacttaccgtagacgatctgacggcgattctcacccagccagccaacgcgctgatcaagcagtaccgtaagctgttcgccgtcgacggcgtcgaactgcagttcaccgaacaggccattcgggcgattgctgatatcgccatcaagcaggggaccggcgcacgcgggttgcgttcgattatcgaacgtacgttgcaggacacgatgttccagttgccgagtttggatgatgtgaagcaggtgattgtggacaaggcgtccgtagagggttccagtacgcccaaactcttgcgcgaagccgtggatgtgccgcagggacgcctcaaagttgcgtagtcggttttgcttgaccgagtccgtacacatgcggcgtgaggccagtaaatacgccgttgcggtggtgattaggatggtgcgactcgccgcaacacgccgagttgcattcatctgaacggcgtgtattatatatcgagttgtctgaaaagacgacatgcgccagtagcccagcggattagagcagctgactacggatcagcaggtcgcaggttcgaatcctgtctggcgcactcccgaaccacggggacaacagtggtatgcgccagtagcccagcggattagagcagctgactacggatcagcaggtcgcaggttcgaatcctgtctggcgcacagtaagcctcgaaagcgaaatgcttccgaggcttttccaattgtattggcccgtttgagtcggccacacaggggtggggtaaggttgcccttcgcgactcagcccggagcggaacgtcctgagatattccgtactattacatacggttcatccaagagagtacagcaaggagacgcgatggccacgaccgccggcgcgaagaagggactttggtccaccatcaggcgaatcgccgcctcagaccgtatttccggactcatcatgctcggcttcgcgctcaccggcctggtgctcgcgaacctgcccgccaccgcgcatgcgttcgagaccgtagcggaaacgcatctgttcatcccctacaccaatctcgacctgccgattggccattgggcccaggatggtctgcttaccatcttcttcctgaccgtgggcctcgaactgaagcaggaactcaccaccggctcgctcgccaatccgaaagcggccgccgtgccgatgctgtgcgcggtgggcggcatgatcgccccgcccatcctgttcctggccgtcacggcattgttctctcagatcgggcctggtgaacccggcacgctgattctgaccaccaccggcagcagcatcccgttctcggagatgtcgcacggctgggcagtgcccaccgccacggatatcgcgttctcactggccgtgctcgccctgttcgccaaggccctgcccggttcgatccgcgcgttcctgatgacgcttgccaccgtcgacgacctgctggccattattctgatcgccgtattcttctcctcgatcaacgcctggtattggttcatcggcatcgccgtatgcgccgccatctgggcatacctcgtacgactgaaaaaagtgccgtggatcgcggtcggcatcgtcggcgtcctcgcttggatcatgatgttcgaggcaggcgtgcaccccacactggccggcgtgctggttggcctgctgaccccctcccgtgaaatgcacggcgaactctcaccgcgtgccgaacgctatgccaacaagcttcagccattctccgcactgctggccctgcccatcttcgccctgttcgccaccggcgtgcacttcgagtcgatgagcccgctgttgctggcttcgccgttggttatcgcactgattgtggctttggtggtcggcaaacctttgggcatcatcaccaccgcatggctggccacgcatgtgggcgggctcaagatggccaaggggctgcgcgtacgtgacatgattcccgctgccgtcgcctgcggcattggttttactgtgtccttcctcatcgcctcgctggcgtacaagaacgcggaactttccgctgaggcgcgcttcggcgtgctggtggcctccctgatcgccgccgcgatttccggtgtgctgctgagccgtcagtccaagagattcgagaaggccgcagccgcagcagcggccgatgcggaggatgacgaatcgattgatggcgatggcgctggtcagaccggtcgcaccacaaagtccaccacgcccacggaacaccccggcaccctcgccgacggcaccgccagtgtggagattgacttccgccactgatggcttagacgatccctactccatttgttggccttgtttcgtgaagaacgtacgctgagtgtcactcaccgtacgttcttcacgaagtcaaggatgatttcgcggaaaacgtatgcagagcttcaggcgctagaatgcgaagagtcgatagcaccgtacaggaggatattggatggcaaagaagcagaagaaatccaagaagaacgacggcaaaaaggccgctgaagcaaagaatccagccgaggccgcatccaagtccacagtcgtggacgatatggaaccattggaagccacagccgcgaatgatgcgacaacgttggaggccgagacggcaaccgaggctgccgcaacgccggtgaacccggtcgacttggaggacgtctcgccgctgggcgacacctatcatcgcggcccggtgattctacgcggccagatgattccctcggacaataccaccgccaatctgctgaaacccgaccaggacaccgactggctgcacatggacccatggcgtgtgctgcgcatccaatcggaattcgtggacggtttcggggcgctcgccgagctcggacctgcggtctctattttcggctccgcacgcacccagcgcaccgaatcgatctacaaggcggcccggcgcatgggtagccagatagccaagcgcaacatcgccgtcatcaccggcggtggtcccggcatcatggaagccgcgaataggggagcagcactggctggcggcaaatccgtgggactcggcatcgaattgccgcacgagcaggggttgaaccagtgggtgaacctcggcatgagcttccggtacttctttgtgcggaaaaccatgttcgtcaagtattcctccggcgtaatcgtgtgcccgggcggcttcggcacactggatgagatgttcgagctgctgaccttggtccagacccacaaggtggcgaatattccggtggtgctctacggcaaggaatactggcaggggctctttgactggctcaacggtccggtggccgagcacggcatgatttcggcaatcgacccgaaactggtcaccgtgaccgatgacgccgacgaagccgtggaggtggccgtcagcgcaattgtgaggtaagcgagatagagtggctcccctctccgaggggagccaagggcagagttactttttgtaggcgatgagcaggcctgtgccgtcaggggtaagcgtggactcgaaaccttcgtcatcttcgacggtggtgagcagctcacgcatggcgatggccttgtcgctgcggtcggccggattaatcatgccgccctgaccgtcctccaacgccagcacatcggtgaacacgatcacgccgtgcgcgcgcagcagacgggaggcctgggcgaacgtggcggcatagttctcggcgtcgcccgccaccacgatcagatcgtaatcattggcgttgaggcgcggcagaaacacgctggccggggcgttcaccgcacgcaacgtggtgtcggtctcatcctgcagttcggcgaacgccttgcgaatcagcgcgatgccctgagcggtggaatcgaccgcagtcagcaggcccttgttatccagcgcatgggcgagctgcaaggtctccaccagtgagccggtgcctacggcgatgaccgaagcggcgccggtgatgcgcaccagcatgcccagcagacgggcctgcgcggccgaaccctgcaactggccggacttgtcggcggccgtacgggcgtcggtcaacgcattggattcacgttcgcgcgcgtgttcctcggtgaattcccatgccttggcgaggttggtgtactgtgttctgtccataattcgttcctttatgtcttctctcgtgcgggcacccggtggatgtatcgactacgtgttgcagcgattgccgtagctggtcatggcgcggcttagcgctcgcggaccttggccacgatctgccacatctcctcgcccacatcgatgccgcgcgggcagtggcgggagcaggcgcgcacggactggcaggcggccacgccgtcggcggtgtcgatggcgtccatacgctccatggccttggtgtcgcgcgaatcgttgacgaaacgggaggcccaaatcagcgaggccgggccgatgaaagcgtcgccgccggcgtacaccgggcaggcgccttcgcacacgccgcaggcgatgcagttgctcagcagctcgtatttggcgagttgttcggggttctgcaggtattcgaacacgtccaccttgccttcggcggtggtggcgagcacgccgtccgcccgaagatatggggtgagcttccttatttggttgagcatcgggtcgatgtcggcgatgaggtcgcgctgcggcgggaagccgggcagggatgccagttcgatgactcccagcgagccgtttgcggccgagtcctggtcggctgccgcgtttgcgccgttttccgcggaatcgtcggattcttcggactcggtgccggtgtgccggaacccttcgtcatcgacttcggggatggcgccgggctgcttggcccaatcgcggatggtggccgtgcacagcagggtgggggtgccgttgatggccacggcgtccgaaccgcacatgccgtgaccgcacgaatagcggaaggccagcgtcgggtcgacggtgcgtttgatggtcagcaggcagtcgagcacggtgtccgaggggcgcgcgggaatcgtgtattcctgcacccactgcttgccgcgcggacgacggcgtgccgccgaatccgagccgccgccgaatggggagcttttcttggcgaacgggctgccgccgcgtgcacgttcggcgcgctcgggtcgcggcatgaaacgatgcacttgcagggtaaccgtcgtgttgctcgcctcagccatgttctgcctccatgaaacagtgggatgtcaagtccaatatcagccaacctattgtgccacaagccctaggcggcttggtattaccaccagcggatcagtactcgcgcttcttgggtggatagtcggtgatgtgcaccggcttgaaacttgccggaccatcatcggcgaccatcgagtgagcaaggaaatgctcatcgtcgcgttcggggaaatcaagtcgttgcatggatccgcgggattcctgacgggattcggaagcgtgcagcatggcctcggccagttcgattagatgacggacttcccagatggcggtgacctcctgattgaaagcggcggtcttgtcatgggcccgcaaggtatcggcaaccggtgtgatgtcgttgttgatctgagtcaacgccgtatcgatggtctgagcggtgcaacgtacggccagagcctgctccatcactgatccgagttgggccatgagctgataaggattggcggtgggcccgccatcgtctgaatcgtccatcggtccggcgagcagttcgtcaagctctgccttgcgggaatcggcagcctgatcggcggcatcggtcagcatgtcatcggtcgaatcatcggccatgggggagtcaaccgggttctcgacgatgcgtgcggccatcgtctgaccagcacgtgtaccgaacaggcaggcgtcgagcagagaattgccgcccagacgattcgcaccatgtacggagacacaagagcattcgccagcggagaacagtccatcgactacctgcacggcaccgtcggcccaacggtacacctcgccattggtggtgatggggatgccgcccatcgtgtaatgcgcagtgggcttgataggcaccaggtccttggccggatcgaggttcgcgtactgctcgatggtttcgaccacctgcggtagcacttccttcatacgttcggggtcgatgccggtcatgtccagccagacgcagtccttcggaccatccgggtccttcgggtcggcgacgccgcggccggcgtcgatctccgccatgatggagcgggagaccacgtctcgcgcggccagatccctatgctccggggcgtagcgttccataaacggctcaccgtcggcgttcctcaggatgccgccctcggcgcgggccgcctcggacagcaggatgccggtgtgcgcgagcccggtggggtggaactgcacaaattcgatgtcctccagctgcaggccggcggccaaggccaatgccatgccgtcgccggtcaggtcccaggaattcgatgtggtatggaacagtcggcccgcgccaccggtggcaagaagcacgttgcgcgcgtggatggcctgaatcttgcccgaatgcgtgtcaaatgccacgatgccggccgcctgcttgccgtcgtcggtgagcaccaggtcggtcacataccattcctcggcgaactcgacgccggcggccacgcactgctgccacaaggtgtgcagaatctggtggccgatgcggtcggccgcataggcggcgcgcttgaccggggcaccgccgaactcgcgcgtgtggccgccgaaccggcgctgggcgatatgcccgtcatcggtacgggagaaggccacgccctgacgctccaggttgatcacggtctgcggcgcgtattcggcgagcagtttggccgcgtcctggtcgacgagccagtcgccgcccttgatggtgtcgtagtaatgccagtgccagtcatcggactccacattgcccaggctcgcggcgataccgccctcggccgaaccggtgtgcgaacgcagcggctgcagtttggagaccacgaggatcttcgggtccacgccttgttccttgagctcggtgattttgggggagcgcagcagtcccaacgccgccgacaggccggccgctccggcgccgacgatcaccgcatcatacatatcttccaaacgtttcggactcatgggttcgattctcgcacacccgccgaacagtcttcgagccgtgtcatgaaagccgattagccgacacggctgctcagcttgagtatgccggcatcccgctcgatcactcccttcagctccaatgcgccgagtagctcaagtatggtgccgatattgggaatctcgtcgggtaccgtctctcgcgccacacgcaatagtgcgtccggggtgacgatgagatgtcgtttacggcattcacgaatcaatgccactaatgtgcgctccatttccggcagcttggcgataatgatacgttgttgggcttccttctcgggatcgagcttcggcttgacacgaagatccggcatctgatgcgacgagggcggctcttcacccttgctcttgttggcaccggcctcggcagttgcgctcgccggcccatccttggattgaacgagtgtaggctgagtatgcttggtcctaagacgtttcgaatgacctgaatcttgtgacgactcctgtgacgccgatgattccgaggatgctggcgataacggagtcgttgccggcacttccatggcctcctcgttttcggacgagtcctgacctgtggatttcggtatgcctgggcatgccgccataacgggcttatgccgttcatggcatatatcctcagtggatgtggcggcacacagaatcatcgcccggtggtcgccgatcatcttattgcacccggcgttgcaaggctgattgatgtcaccgggaaccgcatacacttcgcgcagcaattcgcatgcccatcccgcggtgttgagcgctccggaacgcaaccgggcttgcgtcacaatcaatgtggaagacatggccgcgataatgcggttgcggagtagaaaacgacgggcttcgggaagcgtccctgggcacagttcactgatcagtgcaccaccctgcgcctcgatacgttcgaacagcgtgcggttacgcatcggtccgatatggttgagcccgccggcgaatacggcaacggttctgcccacattggcgggcattctgccgtgcagcgcattcaacgctccccaatgtgccgccgcatccgtgcccattgcgcctccggacacgaccagatgcccggcaacgactgcctgttcggctacggtgtgtgccacataccggccgtattcggtcacgtcccgtgaaccgacgatgccgaccggtttggcgcaactggtcaatgcgcgtggatcgcctttgatccacaaacacagcggtggcgcccaatcggagcgaatggacaggtcggccaactgcgagggccaacatggatggccggggccgataatccattgcgtgccatccatagtgaaccagtcggccagttggatgatgtcttgcgagggcaggtccatcatgcggttatgccagccggccagtgcattgcggaaggagcgcatcgcattcgccgacgccttgcggccccatcgggtgaggccatccacgaacatgcggtcaatgcgtgacagcgccgggccgcagattccagatggctggcttggatgggattgcgccaacgcgtgccagagggattcggcgctttccgcgcctttgagcgtggcgtacatcatcacatccgccccatcaagacagaacgtgagcgcggcgcggtacaacgtatccgtgggaggcatgggaatggtgcgcgaaacagcgaggcccgtatcggtgtgatccacactgcctgcggtgccgccagattgtcggatatcagtagcgttactcatgtcatcctcgttctcatttcgatgccctgatggacgtcctgctcggtgggggacacgcggccggccagatcggcgagcgtccaagacagacgcatggcgcgatcggccccgcgcaatgtgagttgatgattggacagggcccgattgaccaattccatcgctttcagcgacgtattggcgtgcagccattttcccgaagcttgcgcgttgcacacccatccgtactgtctgaaccggtccttggccacttgacgggcgcgaatcacacgagcttgtattccggcactggactcgccgattggctcgctttgcacggcaatgcgcgagaccggtggcaccgccatctgaatatccacacgatccaatatcggtccggacaatcgcgagaaataacgtatacggtctttttcccggcaagcgcaacgttcgccggtgccgtaatagtatccgcacgggcaggggttggccgccatgatgagttggaatgaggccgggtaataggtgctgccttttgaacgggaaagcgccacatacccggattccaatggttcgcgcaacgtctgcagggcgcgtgcgctgaattccggtgcctcgtccaggaacagaatgcctcgatgcgcgcgcgtgatcgcgccgggaacggcgatgccgttgccaccacccaccaaggccgccgtgctggcggtgtggtgcggtgcctcgaacggcggcatgtcggtgatgccgtactgaggcagtatgccgcacagcgaccgtatcgacgccacctccagttgttccgcctcgttcaacgggcacatgataccgggcatacgtgaggccagcatggttttgccgctgcctggcgggccggtcatgatgagattatgtccgcctgccgccgccacttgcagcgcccatttggcatgttcctgacccagaacctcgttcatatcgccacaatcgttgggatggcttgtgggcgattgatccatggtggtctcgtcggcaaccggtgtatcagtaatcgtataggtggcatcgccgcccatcagttcgatgagctcacccacatgcctcacacccactacatccagtccatccaccatcgaagcctcgtcaagattgcgatggggaacaatcattttgcgcacgccacgttcctcggcatgcagcatgatcgggagcagcccatgaatcggcagcaccgagccgtcaagattcacttcgccgagcacaatggtatcttccaagcaatcatgccctatggcacccgccgcgcataggacgctggccgcgatggccagatcatgcgacgaaccacgtttgggcatggccgcagggctcatgttcacggtcacgcgggtttgcggccaaccgaatccagtggcttgacacgccgatttcacgcgctcgcgggcttcggacaacgatgcatccggcaatccgatgatgctgaagtatggcaagccagggctgatgaaagcctgcacttggacgatgaaggccttaaggccgatcagtccgactgagagagtgctgccgatagccatgtctactcctttcgcaatgtgtttcgcaacgtggctgtttttgggggacgaattcagaaggcgttttcgatgtgatgcacgagtggtctgcccacccgaagcacgatggtgacgacatcgaaacggactgccgtatgcggcacacgattacgccggtcaagcagccaatcgcaggcggctttcctgagattgtgctgtttcgccggcgtgatggcctcttgcggatatccgtaatgcatggaccggcgtgatttcacttcgacgaacaccaccgtgtactcgggattgagcatcacgatgtccaattcgccgtaacgggtatgccaattgcggctcaaggtcgtccaaccgtgttcctccagccacgcggcggcatactgctcgccgagcgcaccgaactgtttgggcgtcagattgcggtcgcccatcgtggccgcaatccgttccgaaggcagcgttgcctgcggatcaggtgaagccagcatgggctggtgaaaggcaagaccggcgtcgatgccggacttcgtcgtcggctgggtaggtggtaaagcgttcatgattccactgtgcgggttacttatgtaagagcacaagcgcaaccggcaaatgtggatactatgacgcggtttggcgtgttgtggataacgtgtggatgaaaacccggttatccaccattagttcagaaggtttaccaaggctccccagccgacttacctgtgacgacagacaacccgccgagttgttcgctgaatacgtcagacccagtgagcggagaggggagccaaggtgcggtcacttcaccaaatcggtgagttcgccgaggttcagttcgaagctgacgccacgatcctcgaaatgcggctggttacgggtgctgaccatggcgtggcgcacgaactcaccggcgatttcggccgactcggccaggccgcggccggccatcaccgcgccgcacagggcagatgcgaaggcgtcacccgtgccgtgaatcatgtatggcagcttttcatgagccagctcgatcttgccggcaacaccggtggaagcgctggccacatagttgacgattttgccatcgccatggtcgatgcccttcagcaccacgttcttggcacccaacttcagcagagcaccaagcagctcgttaaccgtggcctcatcaatattctggccgggatagtcacgcttggtgagaatactcgcttcggtgaggttcggcatcaacacgtcggcaccatcggccagagcgcccattgcctcgcacagctccggtgtgtacgtggggtacatttcgccggcgtcgcccatcaccgggtcaaccagacgcagcgcgttcggatattcacggtagagacgctgaatgatcgccacctgatcgggggagccgaggaagcctgaatacacgccatccagttccacgtcttccttctgccaggcatccaagtaaccggagagaatatccgtggtgtcgtggaacgtgaacactgcatagcgcgtgtgcgccgagaacagggcggtcggcaccgggcacacatcgcagcctgcggccgagagaatcggaatcgcggcggtcagcgagcacttgccgtagccgcacatgtcgtgcacggcggccacgcgcggaatatagttcggatcacggtcatacagtgttacatcggtcatgtctgttcgaatcccttcaccatgttggcggaataattcattggcgatgtttgactgtagtcgttcgtcatgtaaaccatgtaaccgggcggcggaaaaaggaacagacgtcatcgccgagcgggcaaaccgtcttggtgacgggtggaacaagcaatcatcacggacacttgagccatgcgcgaaaggcatggtagcgatatcaccgtgaccgcagtcgaccgtgaaagcgcatgcgtgcggcccggcgtgtcgcgataatttcaacgactttttcgtgacttctgacagtctcccacgtcaatgatcccaaggctttataagcccttataggcaagcccgataacgttcggcttgcgccgcgcggcccaagcgtcgtaacttcataaccaacacctcgccaaccgcccgaacacggcaggcgggtggcaaggaaaaatcctcgcgacctagcacaaccaaggagaaagacccatggccgagaacaacaagaagtaccgttttgagaccctgcagctgcatgtgggccaggagcaggccgacccggccaccgactcccgtgcagtcccgatctacgccaccaccagctacgtcttccacaacttcgaccacgccgaggctcgcttcggtctcgctgacccgggcaacatctacggccgtttgaccaacaccacccagggtgtcttcgaggaccgcatcgccgcccttgaaggtggtaccgctggtctggccgtcgcttccggtgccgctgccgttgaatacgctgtgcgtaatattacccagtccggtgaccacatcgtcgccgccaagaacatctacggtggaaccttcaacctgctgcgccacaccctgccgcgtgacggcatcaccaccaccttcgtttccgccgagaacccgcaggagttcgaggacgccatccaggagaacaccaagctcgtctacttcgagaccttcggcaacccgaacgccgacctgccggacttcgaggccatctccgaaatcgcccacaagcatcacctgccggtgatcgtggacaacaccttcgccactccgtacctgttccgcccgctggagcacggcgccgacgtggtggtcgagtccgccaccaagttcatcggcggccacggcaccaccctcggcggtgtgatcgtcgaaggcggcaagttcaactgggccgaggtgccgggcaagttcccgaccctgaccgagccggacccctcctaccacggcctgaacttctacgaagctctcggcggtgccgccttcgtgacccgcgtccgcgccattctgctgcgcgacaccggcgccaccctgtctccattcgccgccttcctgctgctgcagggcaccgaaaccctgtccctgcgcgtcgagcgccacgtccagaacgcgctgaaggtcgtcgagtacctgcagaccgtgccggaagtcgagtccgtctcccacccgtccatcccgggccgtccggatcacgacctgtacgagaagtacttcccgaacggagcaggctccatcttcaccttcgatatcaagggcggaaaggatgcggctcgcgtcttcatcgacaatctgcacctgttctctctgcttgccaatgtggccgacgcaaagtccctcgtcatccacccggcttccactacgcactcccaggagaccctggaagagctcgaggaccagggcattcaccagggcaccatccgcctgtccatcggcaccgagaacatcgaggacatcctcgacgatctgaagggcggcttcgaagcccttcgcgcttccggcttggccaagtgaggtcgacaggagggttgacggcccgatgagaaggggcgcgatgctaatggggtgcatcgcgaatcatcgagccgcatggggtgccttccgcctgatcgcttgacccaaggagtagaaagctcgcactgacgtcatgcagtgcgggctttcttgcgtctgtatgcctcacactgtttgcgcagaggcatgaatagtgtgagacctgagacgacataatcctcaaggatgagggccggcgcgtggcccctagcccaattcagtctggcgcacgatggggcgcgccgttatttcttcataagttggaatcatcatccgggcataaggcccggcccaatatggagaggcattatgaacgtgcagaacccgtccgcatcgcgcggcatcgctattcaggccgtcgacttggtcaagaactacggcaccggcagcaatatggttcacgccctgcgtggcgtgaacgtgagtttcgaacgcggcaaattcaccgccatcatgggcccgtccggctccggcaaatccacgcttatgcacacgctcgccggcctcgactccgccacatccgggcatattcttttcggcggggcagacctgacccgcatggacgacaagcagctcaccttgctacgtcgccacaagatcggcttcatcttccaaagcttcaacctgttgcccatgttcaccgcagagcagaacatcctcatgccgctgactttggccggtgataagcccgaccgtgcctggttcgacctgctcgtagaaaccttgggactcaagcagcgcctgaaccaccgaccgaacgagctgtccggtggccagcagcagcgcgtggccatcgcccgcgcgctgattaccaagccgaagctggtgttcgctgacgagccgaccggcaacctcgactccgtttccagcgccgaagtgctcggcttcctgaagcgttcggtcaacgagcttggccaaaccatcgtcatggtcacgcacgatgcggtggccgcctcctacgccgaccgtgccatcgtattcgccgacggacagatcgtggccgatgaatcgaatcctactgccgaaacgatgaacgagctgcttatggccgaacgcgaacgcgccacgcgcactgccgtcaccagcacacgcgccgacacgctcgcccgtcttgccggcgtagaggatgtgcccaacctgcccatcaccgacgctccattgcccccagccgggagaaccggcaccatacgccatgcccgcgccgccgcacagcacactcgctgagccggaaagcgagagacaggatacccccatgttttccatcactctgaaacttatgaagaaaagcgccaggatgctgattccggcaggcatcgccatcctgatcggcactgcgttcatcgccgctaccttcctgttcggcaacgcgatgaacgatgcgcttgccgcccagaataccgcccagctcggcggcgcgaactacgtgatcagcccggatagcggcaaggacctgaccgataaggaccaggactacatctacacgcgcacggttaacgacttccagcttgaccgcatccgcgccaccaaaggcgtcaaggacgcacgtgccggctacgcgggttccgtgaccgtaacccgtggcaacaagcatgccagcagctacgtcatcaccaccgccacaaagcgcacgctgctgccggtcaccatcacgcaaggagaccagccggcggacagcaacgagatcgccctgaccaagtccgtagccgaccagctcggcgtcaaggtaggggaccgtgtgaccgtcaactcgcaggcggcgcagtatgcgggcaagaccggcgattcggccggtaataccggtgacgctggtgatgagtcggcccagaacgccgatggcacgagctcgcacgacggtgattccgatgccgcgtccggcgcgtccgccccatccgacggcaccgacacggccgccgactccggcatgaccgtgcgcgtggtcggcctcaccgacgacccgaacggtgcctacgcctactacggtggcgcttccgtgctttccgacaacgtcatcaccgcaatggccggcagcaacgatttcggcaacctgcctgtctacctcgtctatctcgacatcgacgatgccagcgacacggccgcggcatccaccgtaaaacaggtcagcacactgctccctaagcatttcagcgtgcaatcccgtgccgcgctcgtcgaggaatccgtcaaaagcatgagctcgggcgaaaccagcatcaccaccatcttcctgctgagcttcggcatgctcgccatgctggtcgcggcactcgtcatcgccaacaccttccaagtgctcgtggcacagcgccgccgcacactcgccctgctgcgcaccatcggcgcgaacaaaagccagctgtatgtctccgtgctgtttgaagccggtgtgctgggactgatcgcctccgcactgggagtgggcctgggcatcggactcatggccgcactatgccagtcgggcctgatgaaagccaccggcatgaccatgcgactggtactatccggtccggtgttcacggtgcctatggcattcggcatcattatgacggtgattgcctcgctaggctccgcgcgttccgctaccgccgtcaccccgctggaagcgttgcgacccatcgaactgaccgacacgcgacgggccggtgtggtccgcgccgtgatttccatgctgctgattgtgggcggcgtggcactgtgcgcattctctgtatggcagatgtccgagaaaatcgccggacgtgattcaatggccgacaagcagtattcgctggtgctgctcgccgccatcatcggatgtgcattgatcttccttggactggtgctttccgccacgttctggctaccggtgctcatgcgcggcgtgggcgcgctggttgcactggccggtccgtccgccaaagtggcacatgcgaacattcagaagaacccgcgccgcgtggccgccaccggtgccgcactgcttatcggcgtgaccctggtctccaccatcgccaccggtgccgccagcgccaagcaaaccatgaacgaggcgctgaccacgcgctacagcgtcgacatgattgccgctggcgccgatatgactggcaaacaggccggcgaggcagccaaagtcaagggcgttcagagcagtatctacgcgccgacccgcatgatgaccatgaaggatgccgacggcaagagcctgagtgtgcttgtcgtgggcgtggatggcgtcgacgcgctgcgcaaggtggtgcgctccgatttgtccggtgtgaccattgatggcgattccgtactgatgcccaagtattccgccgctacaggcaaggatattccgctggacaagagcgttacgttcacggctggagcggccgaagcacaagccgatgccgccaatggtccgtccggtaatgatgcgaacggcagcgccgaaaacggcaatggacaatccggcggcacacagacgctgacgctcaaaccgcggaaggtggactatcgccgcattgcctccaactacgccgcggtcgccttcgtggacgccagccacttcaccaacggtggaatcaaggccgacgggcatatcatgcttatgcgtattgacgccgagggcgcgggtgttgcgctgaacgacgtattcaccaacgtgcagaatgtgttctccgccagtgctggcgttaccgtgaccggtccggtggccgaacgtacgcaatgggagaccatgatcaacggcatgatggcattgttggtcggtttgattgcggtggctgtgctcatcgccttggtcggcgtagcgaacacgctgagtctgtcggtgatcgaacgcacacgcgaatccgccaccttgcgtgccatcggcatgacgcgcggccaactgcggcgctcgctggcggtggaggcgttgctgctttcgctcgtctccggcgtggtgggagtggtattgggtaccctgttcggctggctcggatcctacatggtgtttagtttgtacggcgacaccgtgttcccgttcgaatgggccaccaacggtgtggtgctcggcgtcgccgcgctcgccgctctgctggccagcgtggcacccgcccgccgggccgtcaaaacgccaccagttgaagccttggccgaagcgtagagcaataagctccctcatcagagggagcttttttgttacaccagcccgttatcgtacgcgaagactacagcctgtacgcggtcacgggcgttgattttggcgaggatatgcgccacgtgggttttgacggtgggaagggagataaagagcttgtccgcgatctcctgattgctcagaccatgggcgatctccaccagcacctcgcgttcacggtcggtaagcagatccagttcgggatcggtgtatgctgggcgtgacgtattggaaccgtcggaagcggccccggcaggggaggggatgccggtcatcgagccggcaccgttgccggccgcaccgccagagacgccgacggcggaaccgtacacggcaccggagcgcgcgacatcgccggtcagcgaaccatgctgcgcgtaaccgtcctgcatcatcttttcgatgagtcgcttggtggcggaaggcgcgataatcgcattgccttggaatacagtacgaatcgaattgagcaacgtttccggttcggtgtccttgagcaggaagcccgaggcgccggcattgatggccgccatcacatactcgtccaaatcgaacgtcgtcagaatgattacgcgcgtcggccggtcgtcagccgattcggccgagacggtcgcgtcggcggccgggctggccgaatcggccgcgttgtccggcgcggcggagagtgaggtaatacggctcgtggcctcaatgccatccatgccgggcatgcgcacatccatcagcaccacgtcgggatgcagggattccgccaacgccacggcttgggcgccgtcggacgcctgcccgaccacctccatatccggttgcgaaccaatgaccatggcaaaaccggcacgtaccagctcctggtcgtccgcaataatcacgcgaatgcttctgctctcgttcatgctctccactgtatccgtttcctatcggagcgccgctccataaacaccctgattgttccctgagttcttattgggcaagtctctcaccggggtaacgttcccgcgtgttgcatctgactatccaacgaagccgccggtcgcaactgcatatccggctgcacaccctcatgggcctcgtcgctgaacccggtttcacgcaacactctcaacagctgacgcatatgagccaatgcggcgcgcccccgagcaccaatcgcggcaaaagccgcttcaatctgcatactatcaggcgcaggttcggcgttgagcatcaccagtccctcgtcagcctgcgcaatcaccgattccagcgtggtcagtacttcggtttgcatcgccgcactaatacggttgcgctctaagttggccgccagcaccttttgccgctcctgctcggctcgcagcgcctcctcgcgtcgcaacagcaccagagcgtttgcgccacgcgaacggctccatcgagccatcgcaatgcaggcaaaaccgaccaacatgattcccgcgcccggcagcaagccggacaaaaccagcctccattttgagagcatggaactaccatcgggcaaaaacagatggaacagctgactgtatccattccacccagccatcaccttgatgcccgcaagccacgaatcggctgccagcgccacgctcacccagcgccaagcggactctcgtccatacaataccgccgaatacacggataccatcgcaaacatattgatggtcaaaatcgatggcaagaacaacagttgcacagcagacagcaccgccatcgccagcgcgctgccctctgggaagcggcgacggaacgccaaaggcgagagcataataatcgtcagcattatagtcggcacgcggttcggcgaatacggggcattgccgatcatttgcaaatcgccatacgtggcggaatcaaatagcgcaatcagcacgatagtggcgataacgtccatcagaagatagtgccgctcggtccactgcgcaaatcgacccacccagttcgactcacgcgtatctccttggtcgagtactttggggcgcgcccgatccatcaatcctcgtatacgcgagataacggttagcaccggatcctccgtatcggtgccagactgtggggcggcaggggagagcggaatcgtagccgccacaataaagccaccattcggccctgggccggcctgcacgctgccacccaacgactcaatgcgttcgtgcataccaaccaatccgtatccgggcttatggccgtctgctgcagacgtcgcgccacggccgttatcggatacggtaatcgacagcacatcgtttgaccagatttcatcgatggtggctttagcaccctcgcccgcatgtttgcgcgtattggtcagcgcttcctgcacaagacggaacacggcggtttccgcgtcggcagacagccggtcaggttgcgctttgccggtcatatgccgggacaccaccagatgaccgtcaaacagcgaatcgatgtcggcatatccggtactgccactcgcaccgaacacattgaacaaacgctgcatatcatgctgcgcgcgttccgcttcatggcgaatcgtacccatcgtgtgcttggcgatggccagatcatgcgcacccgcataccggccgccatccgactgcacaataatcgtggagagcgtatgtgccaccacatcatgcatatcacgggcgatgcgtgcgcgttcggccagcgccgcgatgcgcgtctcctcggcctctttcgccacaatggaagcgttgcgctcgcgcatggccgccagcgtggcgttgcgcgctcgctgccacaaggccatgatgatgacgctcagcacgctcgattcgatgaacgccgcctccatgccgaagtcagcgagcatcttggccccgcagttgacggcgccgcttgcccccacgacgccggtgaccgccgggcatgtgggcatcgtgatggcatcggacagccagccgtcgcggatgacgcgcgaaccggaggaaggtccgtcgaacagcggacccacgttgaaagacaccgaccagaccatcgccgcgaccagtcccatgacgaacgccgtgacgatgaaccgccaggaatgtcggggattgccgtacagaatcaccgaatacaccatgatcagggcgtagaaatcgaaatacatgatcgccgggccgaacacaagatgcgtgatggtcagcgccacgaacagccaggccgccggctccgggcaatacctgcgcagcatcagcggcacgaagaccggcagcgaccacagcgtcatcgacgcctgagttgcgggaaacaatatgccgcccgtcgaatcagggctggtgacgccgatgaacggcacgcagccggcgatcagcgctgcggcgagcaacgtgtcccatagcagtgtgcgggtcgactcccgtgcgcaccatgccctcacgcgcgccataatctccataacgcgcaaggctagcgtgtccggcgacgaaccggtatcactcttcaggaggatttatggactagagtcttgaaccatgacaatgctgagcaaatactacgtgcccggactggccatagaggaccattccatcgatgttccgctcgactggaccggccatgagccaggccaagcgttcgacggcgaaaccatcaaactgttctatcgcgtggtcaccgcgcccgaacacgtgcatgacgacctgcccctgctgattttcctgcaaggcggtcccggcggtgccggcccgcgcctcaacagcccgacctccgacggatggatcgaggaggccatcaggcacttccgggtgatcctgcccgaccagcgcggcaccggccgctcctcgcgcgtggacacgcacgccatggcccgcatcgccgccgcgcacgacgatgatgccgcggccggcgcacgagcccaagccgactacctgaagaagttccttgccgattccatcgtgcgtgacttcgaacatctgcgcctgaccgaattcggtggccgcaagtgggtgacgatgggccaaagctacggcggcttcctgaccctgaccacactgtccctgttcccggccggcgtaatcgccagcttcaccaccggcggcatcccgcacgtgccggccgacgccgctgaagtgtacgagcataccttcccgcgcatggtgcgcaagacgactcagttctacgagcgctacccacaggacaaggagcgcgtggccgccatcgccgacaagctgccgactactgcggaagtcgccgaattcgttggcaaactcaccgattccgtactgaatccgatggctggtaccgatgtggagcatcgacttggcgtgatcgccggcatggccgcccacggcttcccgctgatgccgaacggcgacccgctcaccatcgaacgcttccagtgcttgggatccgactttggcatgaagccgagcttcgagcgtgtccattggattcttgacgacgccttccttgatggcgatggttccgcttctgccgactcgccgttgtctgacgaatttttgaccaaggtgatgaacgccacttcgtcgcgcccgctgtactggccgctgcaggagttcatctacgccaacggtgagatggaacagccgattcgctgggccgcccagcgcgtgcgcgatggcaagcccgaattcggtgctgatgaacgcccgctcaacttcaccggcgaggccatgttcccgtggatgttcgaacaggaggccgcattgcgcccgttcaagccggccatggacctgctcatggaagacacgcacttcggcgtgatctatgacgaaggtcagctggcccgcaatgaggtgccgctgcaggccgccgtctacttcgacgacatgtacgtcgattccggtatgcagctcgacactttgagccgcgtgggtaacagccactactggaccaccaacgaattcgagcatgatggtctgcacggcccgctcgtcttcaagcatctctatgacgaagcccttaaccggggcgacctcgaagaactgttctgactcaaggaagcaagctccctctgatgagggagctctgtatacatgcacgaaaggaaaacgtatgactcagaacctcaccatcggttttatcggatatggcaacatggcccaggccatcgcccaaggcttcgttgacgcgggcgtggtcgccggcggccagatggtcgcctgcgccgcccactacgacaagcttgagaagaccaccgccgaacttggcgtgcgtccgttgcacaatgcgctggaagtggtgacggccgccgacgtggtcatcatcgccatcaagccctaccagatcgccgccgtcgtcaagccgctggccgacgaacttgccaagccgggcaagatcgtcgtctccatcgccgccggctggaatctcaagaagtaccaggacctgttcgccaccgaagacggcgaatccgtcgactccccggacatccatatccagtgcaccattccgaacactccgatggccgtgggcaagggcgtgctcgtcaccgaatccgtcaacaccctgaccgacgacgaaaccgaaaccttcgagcagctattcggccccatcagcctcatcgagcgcgtggacaccgcgcatatgaacatcgccatggtggtggctggctgtgcgcccgccttcactgacatgtacatcgaggccttgggcgacgccggcgtgcagtacggtctgcagcgagccaccgcctaccggctcgccgccaagatggtcgaaggtgtcggcgcgctctacatggccactgaaacccatcccggtgccatgaaggacgccgtctgctcgcccggtggtaccaccatcaagggcgtcgcccagcttgaaaaggacgggttccgcggctcggtcatcgacgccgtagacgccatcgtcggctgactgccaatcagagttcgcgtatattcgcatatcacagtcaaggccttcgagccgtatgctcggaggcctttgcatatggccggttcaccacatgcacgttcaatgtgtccagcttctccctagactggaaccatgtctcttactatcggaatcgtcggactgcccaacgtcggcaagtccaccatgttcaacgcactgacccgcaacaacgtgctggccgaaaactacccgttcgccaccatcgagccgaacaccggcatcgtaccattgccggacaagcgtttgcccgtgctggccaagctggtccacaccgaaaaggtcgtgcccgccacggtgaccttcgtggacatcgccggcatcgtcaagggcgcctccgaaggcgaaggcctgggcaacaagttcctggccaacatccgcgaggcggacgcgatctgcgaggtcgtgcgcgccttcgaggacgacgacatcgtccacgtcaacggcaaggtggatccggccgacgacatcgacaccatcaacaccgagctgatcctcgccgacctgcagaccatcgaaaacgcgctgcccaagctggagaaggatctgaggggcaagaagatcgagccggcctacatggacgcagtcaagcaggcaaagaccatccttgaagccggcgagacgctcgacaaggccgcacgcgaaggccgcttcgacaaggattccgtctacgacctgcatctgatgaccgccaagccgttcatctacgtgttcaacgtggacgacaacgagctggccaacaaggacctgcaggctaagctcgccgcatccgtggccccggctccggccgtgttcctcaacgctcagttcgaggcagacctgaccgagctcgacgaggcggacgcccgcgaaatgctggccgacgctggcttgagcgagtccggtctcgaccaactggcccgcgtgggcttcgacatcctcggactgcagaccttcctgaccgcaggcgtcaaggaagtgcgcgcttggcagatccacaagggctggaccgccccgcaggccgccggcgtgattcacaccgacttcgaaaagggcttcatcaaggctgacatcgtctcctacgacgatttcgtggccgccgacggctccatggccaagatcaaggaggaaggcaagctccgtcaggagggccgcgactacgtcatggccgacggagatattgtggagttcaagttcaatgtgagcaagcattagttttcaatggtttgaaccatgttactggaatagccaccattaacagccaccatggtttcagcgttatggaatattcacaatattttcacatttcatagtgtatgaaaccatggttcaaatggaatggttcagcggattgtgtcatacagacctcaaaaacgcgtttaaacggcattctaacggcttttcatatgaaatacgatgaagtattcaagttcatgctgaaaccgcgttaaaaccgccatagaatgatttcattcaaattccattgttttcaaactcatgtttgatagatatcatggtaatagaggtgagcaccggcgacttcacaaatggttaatccaatcaaaaggggtgtcgggatgcgtcaggcagtcatgcgccgttaatgagatttgaaagcatggattgattggatgaatggcattcattggaatgagcactttcatacagcatttcaatgaaatgtaaatcaggttaacatgaaccgcaatgagattgaaatcatgagaatcaggcagtcatgcgccgtcaatgagattgaaaagcatgtgtatgaaataattgaataaaaggctcgttttccatttgaaagatacggacgggtgattcctaacatttaaaacctttggatgtatgccgtcagacaccgtgtaaataaacatgggtcctcatggaagcggtcgtaatcttgattggtaacattgctatttcatgccgattgggatggtcgtagagccgggctaaggggacggggaagttgctctcggaggaatacatggcgatgttggcggagcttccctttgaaatggctgtattaatccaaagattaatagaaacccgtgaaactcgggaagacgcaactgtatctaatatggatagaatagtgtccacctgacagcggcgcttttaaaaaatgaaaccatgatatttaaacattgtcattaatatattgcggcgtgccggtataaggaacaaaccggcacgccgtttccttttgatagatgattcatgaaaacattcaacaaaggattatggattatgattattttaaatagtattgtctatgcggcggatttggctgatttaagcgcagtatggaacagcatggttcagaaatggataagtcctattgttatcatggtaatgggcgcactatcattaaagttcctgttgaacaggcaatggagtcagttcattaacttcctatccattggtatcggcgttgctgttgttgtatatattgctcctgtgatgttcaatgaaaatagtgatttgattaatagcgccagtgatacggcgaaaatgattaactgaaacgaatatgattggattgtttgatatataatacatgaatccaatccatatccaataatgaaaccggtgagaatacaaatcaccggtttcattgtatttgaatgaaaatatataatattgaaaatccgtgaaaatcgatgccgtccacagggctgaatattacgcgccctgtggacggcatatttgattgaaactatgaaaaaccgcgttcctgactaatgatacttgaaatgttgaaaatcgctgtcagaatcgaaatgagcgtttcaaatagtatttgaataatatgttatttcaatgttgaaatatgtatttaaataccaccgttcaaaagttataatcagatgaacggtttcatacactatctatcaatatttaaaaacgggaaaaacactggattttcattttcaatttcaatggcgaaaatgcggattctcaaatggtatggcttttgaacgcagtttgatagatagatagtgaaaacacacatattctattgaaaggattaataattatgttatatggttatataagggtttcaactggaacgcaggcaatgcgcggctattcattggatgagcagaaacaggctttaatgaatgctggtgtggaagaaaaacgcatattcatggacgcgggcaaaaccggaaccaattttaatcgtgatggatggattaacctcacaaaagcagtccgtgagggcgacacgattgtatgttattccatggatagaatgggacgcaatttcaatgaaattgttcttaatatgaatgtattggaacagaacggcgttaacatacgcactattcgtgagaatgttaacacggaaaccgcagcaggaagaatggttgcgcagattttcagcgccgtggcagaaatggaacacgctttaattttggaacgcacggcggcaggcagagaggcggcgcagaagtccggtaaggtttgtaatcgtccgaaaacttacaacatgcgtaaagcgcgtaaggcattggaataccgtgaacagggctggacgattgatgacatagcagtgcgtttgaaaacctcacacgcgtgtgtctatcgcatgatggcggacgcgaaaaaggaacgggaaaacgcatgataactatgttgaaacggattgtaagtgtaatggtttcatgtgtattcatttcaatggtatgtattccagcggcgcacgctgatgacgcgcaaggttcaataacatttaatgttcagctatcaccggattccaatagtgttcaagcatcaccgcgtatgaaagcgcatgatggcggcgcggaagtccatgatacaaggaagtttcatgatgatactgatttcaaattcaaatattgtttcatggttgaggattatgaaacacatgaaccggtatcagctattcattatagcgctggttcaatgagtttgaaagccagtgaaccgaatgctattaatttgaatttcaatgaggattcaaatgttaaaggcaaatattgttattcattcaatggtaaaaccacggattcatcatggaagtattggacgaatgacatttatgattccaacggcgcattgtatggcacaatgcgggatacaggtgattggaaaacgaaatatggcgaagcgccggatatatggtgtcaaatgaatgaatactatggttatcttgtttcatgtcatggcgacgatgataaaaaggataatgttgaattggattcaactggtatcgtttcaacagtatatttgaaaccgattaaaccggaacatcaaatattatcatcatttccagtaacaggaaaatacgcattaactattgttatttcactggttttaatagcaggaataacaataatattcattcataggtatggaaggaaatataatggttgaacgcagtatatataataaagcacgccgtgttaaggcatggtttaatattaagaatatggataatgctatcacgctggttgaatattatcctgattatgattatgatgatttcaatgtattatttgaacagtatgacgcatggaatattgatgattgtattaacaaaatcctgtgtccgaatccgggacttacgaaaatctcaatccgcaatccgaaaaatattccataacaactaaaaatcatattcaacatcactattgatgtcaacacatggtgatgtttaaaagataccatggttccactttaaatatggaaccattattttaatcccagttgaacggcgcacacaaaaaccaacaataaatacattacattaaacaaatcacacgcgtttcacacatgaaacaagttcatgtgttcacatgtgttcatatgttgtgttccaagaacgcgctaccactcgccacacacatttcatagtattcatcaggttatgtggttatgattgttcgcgcgcgttggaaagttcgcggcggcgcttttttgtgcttattttatttttttcttttttctttttattttttgttttcattgtttattttcatggtttcatcaactatgttgttcattgtttgaacagcagtatcacgcgtgaatcgttcaatggtctcgcgtttcatggttgctgttatatgcgtgtaatgttgcgtcatttgagcgctcatgtgtcccagtatcgtttgcgccattgaaagcggaatgccgtcatatgccattaatgacgcggtgatgtgtcgtgtggtatgtggtttcaaatagttgtcatcggtgagtttgttattccatatttcattgaaataatcgcgttgtattctatgccatatccagttgaaatatgagtatgtcataacatgtttgttctttatgaatatgacatgttcattgttaataatcgttccatcgcgccatactggtgttaaaacagtatgatccagtgtttgaatatggttcatcaatattgcgtaataatccattggtaatggtattgttcgtgttttatatgtgtttgtccggccttttgttcccgcttttaatgtattgttattaaccagtgttttattaatagtcagtgtcatgttcgcatttgaaatttgttcccgtgtgattgctaatatttctcctattcttaatccgagtgtcatgagtttaatgattggatacatatgttgatacttttcattcttttcaacataacgcagtattccacgaaaatcattaacatactgttcaatgttaatattgttttttatttcagttttattctcataatgcggttttaataatgctggtttaaccttaatataatcgcgtttcaacgcatagtttaataccgcattaattaatgatgaatagtgaaatgcggttgactgaggtaatgttttatccagtattatccgttctatggtttcacgggaaactgttttaaccggtagtttttcaatggttttaaaaccgttgttccattcatgaactcgttgtgtgtatgttttttcacctaagtttgcttgttcaaggtattcattaaataccattttcaatgaggggttattcttattcacgcgtggtttattcacgcggcgtgccggttttattattccatccacgccgatttccgcgacgcgttttaaatgtttattgtttaaatccgcgcgtgtgtatgcgtaaacataacgccatgttccggcctgtttccatttcatacagtattgttcatgcccgttatgcgtggttttaaatattgaagccatgctatgagcatactgtaagccaccatgaaaagccaccatttcaaacatgccataccatgaaaaccattggaaatactggaatgatggaatacaagttcaacgtgtccaagtagttttcctcggctccccttcctgaggggagccgtcgcggaaagcgactgacgggagtgttgcggaaaggtccgagcagtgttggttgcccagacctttcttcatgttacgaacctttatgaacctcgttgagatgagatgtttgcgtctacttttcttaggcttccgcgttctcgtcggctcctgtggcgagaacattcctcaatgatttcgccacctgtattttcagcggacgttttccggtctgtacgaccagccccgcggccaagagctcttccacgtatttccttgcgctctgtttggatagtccgatgtgatgggccacttcgtccaacgacatggatttggacgagtcgaacagttcttcctgaatcacgccatagagcaccgagacggcattgcgcgatagggcatgcctcttttcaagctgtgtacagagtatccgacctttgtcgagctgatcgaccttgatactgagttcgtcaatcagctcatcctgggcttgttggatgaatccgaggatggtgttcacgaagagcgtgagttcgccgcagttcagcttgtcctccgcctccatgaatgctttgtagtaggcgttcttgttctccgcgatggtgcgggacagggatagcacggtgggcatagtcaggtcatggttcaggtacagggccaggagataccggccggttctgccgttgccgtcgtagaacgggtggacgtattcgaacaggaagtgcgacatgatggccgactgcagccggggaatctcgtcggaggtcgcgagatggatcatatcggtgaggagtgcgccgatgttgccttcgcctttgactccgttatggatcgcgaggccgtgcggcccctgtatttccacatcgcctttccggaacaggtcgccgtccggctgatcgctctcatcgatttcgtcgagcacgaccttgtcatagatgtcgcggatgtcggcgatgcccgccggcaacgcggagtccttgtccgtgaggttcaggtacagcttggcaaattcgctgaaccgcgccttggagtcgtcgccgtccctccttgccttgtcggccgcgtccacggcgtcctgggtttccttgcgggtgctgcgcacgccttccatctcgttggtggcgaacagttcctcactgatggaatgccgtatgtagtcccagcgcatgacgccgggaatctggttccagagccgtgatacgcgcctttcggcgagaagtatattttccgtgagcagggtcgtctcgcgtggcgtggcggagaacagctcgcccaatggcgtgatgaccccggtcctgaatgtggaatctgcctcaagccgctgccgtgcgagtgccgcatggttattgaaggaatcgactaacctgtcggcatggaacagccttgccaaacttctatacttcatatccatgagagagactcacttcccaaagagcatccttgattatagaaagtataagatagagaaggaaatgagtcaataaacaactataaaatcatggataatacaaaaatatagttgtgcgcatgactgcatgtgagtgacatatggtagtgcccgaaatgcgtgtcagtagtgaaatacttcatgatctgttgttctttctgaatatgtgatggtatgcaatgggttttgccgcggtgcattgcgttgcgactatgccaagaacgcatgctcgtacaggtgcgtttatggggcatggtgcgaatgagtcggctcgatatcaccggcaatgattcagctatgcgtcaatgagaggtgtactgatcagatggcgtgttcgttcacgccgttgctgctgaatgcgatgtgttgatcatggttcgcgcaccataaagtcttacgtccgaatccgtcaaatcacgcggtgtgtgaaatgcccgttgtatataaaaaagtccggtgcaacgcacgatgataatgcgttgcaccggacttactgcagaaacaattgttacagactgtagatctgtgcgccgaacggccagagcgcgagcttggccattttgaacgactggaggccgaacgggatgccgatgatagtgatgcagttgagcacgcctgcacccagatagccgagtgccatccaccagccgaccagcaccacccagaggatattgaccagcgtggagccaacgccgccaccgtattgcacggttttgccgaacggcgtcaaggtaaggcccgccattttgaacgcctgaactcctagtggaataccgataatggtgatgcacagaaacagtccgatcagtgcccagctgatggcgattgccagtccgcccagaatgatccacagaatattgccgatgaccctcatcgtaacttcctcacatttgccggcattgcgccggataccgaatcgaatgctggattccattctattaggcgaacgcgggcgatatgtggggaatcggtgacgggacccctgagcatcccctgaatcgtccctgagccgcatgctcaggtgcctactcgggtgagcattctcacattcggctgatttctagcgaaaacccttgtgcgggcgggctgtggactatagcatcacgacacatgaccactacatcgcagccttctcaggcatctcagtccaccgccaccaaacccgccgccaaccgcgagctgctcctgacgcagtccgaccgcgaccccaagagctaccgtggcgtggaccgcgaccagcaggtcgtggacatcatctccaaactcaccagtgagaaggccacgattccggcaagctgcgtgcagcgcgacgccgccgacaccggtctggaatccaacagcgccgacgtggtgatcggcgaagccatgcttaccatgcagaccgagcgtggcaagcaggcgattatcggcgaggccttccgactactgcgcgccggcggcacctactcgattcacgaactcggcctgcagccggacaacctggacgaatccgtcaaggatgaggtgcgcaagcccgaagcgtaacagcggtgtgccggcccacgatggccggataatggaaaacaagcaaaagcgatgacgcgtatgtgaggtacgcgcgacgaataggagaacatcatgaccgatgagaacgagcagcagaccgtatgcaaggcagggcgcgacgagcagcattgcaagtgcaagcagcgtagggaagccgccgcggcggccgaggcggctgccgccaacggcgaacaccactgcgcctgcaagcacgagcacgccgagggcgcggccgcggagccgggcgcgaagaaggagtgccactgcaagcatggcgaagtcgcggccgctgaagcgggtgaggccaagcactgcgcctgcaagcacgacgcccacgacgccgaaggccacgccatttcgaccgagccgcatcttggattcatcgaagacttggcctcgttgatcgatattcaggaggaggccactgtctcccgtacggtgctgcgcgaggacggcctgcgcgccgtgctgttcggcttcgacaaggaccaggcactgagcgagcacaccgcggccatgcccgtgatcatccaggtgctggaaggcaagctgcgcgtcggcggcgaaggccgtgaagtcgagcttacggccggcggcatcgtctacctgagcgcccgtctgccgcacaccgtctatgccgtcgaacccagcaagatgctgctgcagatgttcgacaaccgcggctgattcggtgaatgactggcaatcacgtatgagaagctgattgccgttagaccattcatgatggcttccttcatatggtgttggtcgtatgaccgtaatatgaaggaagccatttcttagacgttggggagagcttgaattcgacgccatcatcatacggcctcaagggtgcataaacgatgtcacaagtagacgcacgcccgccagccatcccaaacgtcacagcaaacctagaacccgcatgagctgacggccgatattcgccatggctgcatcatcaaccacgccgacttggtatcccagcagtttgcggtcgacggtgacgatcttgtccgtcatcacgtaactcactttgttcaggccgttctccggacttggttccaagcggacccgcgtgtcgatgtcggaggaatcgtatgaggtcagcagacaagtgatgacggaatcgaaccgatcgacggcatcgctctgcacgatgacaaccggccgtggcttgctggcgtagccatcggcctgcaacgtccgaatctcacctcgtttcatcggacatcctcaaggcgagacgactggcatactcagtagcgtcccgctcggacgcaaacggctccacgtcatttcgtggcaaacgcacctcataggggaacccacggtaatcattgaacgcgctgatgaacatacgcagggcatcggccggggtggtacccagctgtcgggtcgtctccttaaacaacgcagcctgctcgtcatcaactcgcgtggcaatctgcatgctcatagccactccttattgctatttactatctttttgcaccaaattgtatcaaatacttgacttcagagtgaagcccccgcgttccaaggcccttgtctatactgtagacagttgttcttcatatgtgaatcgcccgatatgactttggagcgggcttgtgattggaggggccggatatgacgagttacgtgctgcggctctatgatgatccgctgctccggttcgatgcgtcgtatggcgagggcctgctggcgggcaagatcgaggcgcatgtccgctggttcgatgagtcgaagcgcgcgttgctgccgtttccgttggctccggagccggataatgcgaagctgacgacgtggctggagcggcgcacgattccgaagaatcgtgagttcgccacgcaggttctcgcgcaggcggggttgaacattgcgga

SEQ ID NO: 1323 - DNA, 38820 bp, Unknown
  R157_18m  MAG No. k141_13184
cacgcaacacccctcacgcaacacccctcacgcaacactgcgccatctctgtaacatcaccgacaacacggcaatcccacaacgtctcggtgcaatatcctctgaaatggtttggtttttcactccacctcgtcggcatcctgaccaggataggaatatgtgtcgttccgcaccatgtacaaaacgttgtcaactgacaacgttcttcaaatcaattggataagacaaatggccatttcccgccaattcatctgaatcaagacgttgtcaactgacaacaaaatgtacattgcaacagcatgcacatatacatatttccccggtgaacagtaccccccccccaaaaaaaacaaggggggccaccctcagctggaaccacgtccggcgaaccgggacgcagttcagcccgaggggacgcggccaatacagccccgggacacagccacagggggtgcaaacacgggggtgcgaccggggttggatctccccgcctcggcggcgaccacaggagtgcggccaacacagacagagggaagagtagccaatgtaaccaaagggatgcggccagtgagatacggtcagagaacctgagtctccgtaggaatcactggctcgcccttcatgaggctctgcgcggtgatgggcagttcggacaacgccttggcgtggtagtcgtgggcggccatgatggcgtcatggccctgccactgagcgtcgatctgcccatgatccacaaagtcgaccagcaggttcttccacgtcggttcaggcgtgaaaccgtccagcttctcctccgagccggaaatcacgtgttcggcttcggctaacgcgtattcgtaggagcggaatgccagtttgcgaccgggcactgtggccttgtccttggatttcttcatgaccggaaccatcgtgccgtcagcgccttcacgttcggtgagcttgtacaccatcgcacaagtgggagcgccggagccggtgaccagcatggtgcccacaccataggagtcgaccggcgcggtctgcaatgcggcgagcgcgtactcatccaaatcgttggtcacggtaatggtggtgttcgtggcgcccagggcgtccagctggttgcgcacacgctgggccatggcggctaggtcgccggagtcgatgcgcacgccacccagttcgggaccggccacctcgacggcggttttcacggcttcctcgatgttgtaggtgtccaccagcagcgtggtgttcttgcccaatgcctcgatctgcgattcgaaggcgtcacgctcggaatcatgcaccaacgtgaagcaatgcgcggcggtgccaatggccttcagaccatacagctgggcggccagcagattggcggtacccttgaatccgcccactacggcggctcgagcggcggccacggcggcccactcgttagtgcggcgtccgcccatatccatgcaaggacgatccttggctgccgacgccatacgtgaggcggcggaggccactgcggaatcgtagttcagcacggatagaatcaacgtctccagtagcgtgcattcgccgaacgtgccttcgacctgcaaaatcggggagttcgggaagaacatctcaccttcgcggtaaccgcgaatcgtaccggagaagtggaagttctccagccacttgatggtctcggggcttaccacgtgacggtcggccaggaacttcaggtccgcttcgtccaagtggaaatgttccagcgcatccagaatacggccggtgccggccaccacgccatagcgacggccttcgggcaggcgacgcgtgaacacctcgaacacgcacttacggtcggcggtaccgtctttcagggcggcgtcgagcatcgtgtattcatacatgtcggtcatcagagccggcgaataatcgaccattgcaaggcctttcctacataagtggtgaagttgcacctaagtgtagtccgggcaaagccatacagcccactggcgaagcggtagactcgatgcatgagattcatcgtggtgttgtggcgctttgcgatcgccggtttctgcttcgtgggcacatatgaggcatggtccaaaccgcagttctgggtgtatttcacgttccagaccggtttcgtgctgggcatcgtgatgctgtgggccggcgcggccacactgctcaaaggtattcagccgcctgcatggcctaagggatgcctgactgtgtacgccatagtcaccgcactggtggcgttcttcctgatgcctccggacgacccggcatacgtgccacaggttattggcatcatgaccaatacgatgctgcacaaaatcgccccgattatggcggttatcgatttcgtgctattcgatccgcaccggcgtttccgctggcattacatgttctcgtggctggcgtatttccctgcatacttggtcttcgtgctggcccgtgcggcgatttggccgggttccggaccggcggccggcggcagtccgtatccgtacgacttcatcgacctcgacgcactcggctggcaagggttcggcattagctgcggcaagctggccatagcgttcttcgtgatatcgctcgttgtctggctgctcgaccgcgcactgccgagcaaggccttactcggatagacgcgcccacgatcgacgcacatcggtcttagtgcccagccggcatccagctcagcactcgatggcctcagcattcaatggaataggcgcggtttttgtactcgcgccaatccggccagtcttcaccggcgtagagggctgcatatggaactgcgtggccacctgacgaatggtgtaggacaccatgactccttactgcggcgacacgccgaagcgtcgcagccgtttgcattcaagttcacttgaactggaaccttagtatctaagaacacttacgaataccactcgatcggcgtcggtttgcccatcgcagaccagcattcgtaagaacaaaaatgacattgtaaggagactcaatgttcgagccaaccaccacctacgctcccaacccgcaccgttacgacacgatgacctacaaccacgccggcacctccggcctcaagctgccggccgtctcactcggcttctggcacaacttcggcgacatcacgccattcgaccagatgaagtccctggtcttcaccgccttcgacaacggcatcacccacttcgatctggccaacaactatggccccgaacccggccaggccgagaagaactgcggcctgctgctcgccaagtacttcaggcaccaccgcgacgaactcgtcatctccaccaaggccggctacgaaatgtgggccggcccctatggcgacctcggcagccgcaagtacctgctcgccagcctcgaccagtcgctcgaacgcctgggcctggattatgtggacatcttctaccatcaccacccggacccggaaaccccgcttgaggagacgatgggcgcgctggctcaggccgtgaactccggcaaggccctgtacgtgggtctgtccaactacgatggcccgacgatggagaaggccgccgcgattctcgccgacctgcacgtgccgttcatcatcaaccagaacaagtacaacatcctcgatcgcaccgttgaaaagaacggcctgaaagagaccgccttcaagctgggcaagggcctcatcaccttctgcccgctggcacagggcctgctgaccaaccgctatctcaacggcattccggccgacagccgcatggctcacgatccgcgattcctcaacgattccgcgctgaccgagaaactgcacagccaagtcgcggacctcaacaacctggcctccgagcgcggccagacgctggccgagatgagcctggcatggctgctgcacgacggcaaggtgacttccgtgctggccggtgcctccaagcctcagcagattctcgagaacatcggcgcgctgaagaacacccacttcagcgacgaggagctcaagctcatcgacgagatttcggcacgttagaaacgtcctggctcctttgtggttcgtgacccctgagtcggtgtattcaagaattattgacaggcttgacggtgccaacaatccaactgccacatgtcaatgtgggtctaacagggcattccgaaaagcactgtctggattaacgcttgtcatagttttgcagtactagcgcaacgcacattgtcatacgctagcgtttgctgcgatgtttgggctttcgcttgcggtaggcgcgtccggagttgtgcgcgccggtcgattcgcgggcggtacgcacgcgcacgagcacggttacgagcgccaccagtatggcgacaaccagcagcgcgacgatgatcgtggtgaacaccatggtggtcggatcatcgtattgcgtgttgtccggcgtggtcgggttcgggatgcgatgcccgcgcaccagcagtcgatgcgagttcacaccgtagggcgtgcaggttatgagcgtggcgaagtccattgaggtgctgatgttcaatgcgctcaggtcatccggcagcactactttgatctgatcgacctggtacgtgtaggtgtcgtcgagcacgtggaacgcgaaggtgtcgctctttttcagctcgtccaagccggtgaatagtcgcgcggacggcaggccggtatggccggagatcaccgcgtgcgtggtcggcccgccgaccggcagtgaggtgcctgccaaatgcccggtggcgacctgcagcacgccttcatcggtgccgtggtagatcggcagtttcactttgatgcggggaatggtcacgtagcccatgatgccggtgccggtgatgtcgagcgtgttcttgtactgctctttctgtgtggcgttcatatgccagcggtcgctggtggcggcgagtttgaggttgtaggcgtgcgcggcgtcgaggagtttcttcttctcggctttggacatgtctttggttttggccacgtacccggcgacagcgtatgactggtgcattcggttccaccagtcggccacggacgggtaggcgatgaggccgaggccgccgatcagcaccacgactaggaacccgatgatgaggttcaggccgagattgtcttttttgcgttttttgcgcaggtcgacgcgggtcatcgtttccgatgactgggatgcggaatcagattgcccggattggctggacgggtctgccgtgtcagtctgatctgcttcgttggcctggtctgccgtatcggtcaccgcgtcggtgggcgtatccgcagccgtgttttcggtggctgtgttttcggtgtctgggacttcagcggatgcgacgttttcggcgtcgctatccgctgtttgacgttcgtgctgacggttgccggcacgttttccgtgtgtttcgaacatcactcgctatcgtccgaggaaggctgttccgtggaggcctgctccgaaacctgttccaagggctgttccgtggagttctgctccacgtcgtcttccgaagtgttcttcttgcgcacgattacggcgattgcgatgccggcggcggccagtacgactacgatcacggcgatgatggcaacgctcgcaccggttttcgccgattcggtcttggcggtgttggttaccgtgtaatcgttgttttcacggtcgacgagcgcggtgtagttgcccggcacgttcgcttcgaccacggtgtattcgtgcttggtttgcaagtccttccacgtgtatttccagtcgttggcgttgttgagcatgatggaatcgtagatcttgccgtcttgcagcaggttcattgtcacgctttcggggcgcttggactgatccttgtctttccacaccttgttcacgctgatggtggtggtgggcggcactgcgcagtcggctttcggttcgatgctgagggcgcgctggtcgtcgacattcttgtgcacgttcggcagggcgacgagcatggcggcggtctggcaggtgagcacgttgccctggtatggggcgacgaccgcgaggtagaggccgtccttcagttggttaaaggtggcaacgccggcgctatcggttttgagggtgctttccgcggtgggcttgttcactgcgatgtatccggccatggtgttggcgaaatcgcgcagggtctgctggtcggcgttgagaatatcccagtcgaccgggtatttgccgtgatcggcgaagtcgcctgcgggagtgtagccgcctttggcggaccagtcggccagacggtacaggctgatgtcggcgttgttgagcgcggctttctggtattggtaggtgacggtgaggctgccttccgcagtggtgccggatgccgtggcggcggtggcggcgggtgcgctcaagccgatggttgcgagcatgagtgcgaacatgcagcacaacgccatgatgatgcggtgttttgccgttctgttgttcatctctgccctctcgttgtggcttgtcatttctttcccctcgtcggaagttccctagttttcctggtcagggtccttaggatgcggacagctggcaaccgtgttcggcgcgtttgctggccattcgtaacataaggacaagttcagggcacacggctcaacatatgttgtgttgggcgacgtggttgggcacaacgtgcgctgtgatgccttgataggcgggtacaacgtgtgttgtgtgtagtttggtgcggttgggcactgacggccggatccggtgcgtagccggatccgggtcatgtgcatgttaagttattttggctttgccgtggggtggaatcaagcggatgccgcaatagcaggcccaaatcttcacccattgaacgaccactattgaagcatcgcgcttgacccacgtctattttcttggctggccgtggctacgctcagcgagcgttgcgacgacggacagcgaaggcgatgccgaaggcagccaccaggacgatggcagcgccagcaacatacagaatcgtggtgcccatgccgccggtggacgggaggaaggagcccttcttgttcacgacgtcggcctgaacggtaccattcgtcttatcaccgtcagtctgattaatcttcaaagaagtcagcttcggatcgtcagacgaaacatcatgctcagcggtcacagtgaacagcgtgtcggcagccgtgttatagccggccggagtataagattccacgagcttgtagtcgccatcatcaatacgcgggaaggaggcaatgtacttattatcagaggtcttagccacttcaatttccgaaccgacctgtacataaccgttattttcggaaacaccatgggtcttcttgtacagcttgaacttcggcagatcgttatcagccggagtcccctgatcgaaggtcttgttgacattgagctggtaggtgaagacaatgactttatccttcggagtctcgccggtcggagaattcgcgcctgtaccagtgtagttcgggttgttggagtactggagcttcgcctcgttcgggttgccggtggaaccaatcacagccttatcgttcagcgtggaagtgtattcaacaataaacttgccgcctgcagcgacagtaacatcagctttgttggaatccttgagagcaaggctcttgacatcattaatagtaatggtaaaagaaccgtctgccttttccgtggcctgagtcactaccttggtatatgcgctgctatcaagagtcgcggtctttgtcccatccttcgaaacgtacttaacggtgaaggaagagacagaggatcccgcattctcatcatcataagttagacctttagactggttatcagtaaagaccagcttataggtcttgtacgccgcgaaatctttggtatccgtcggcagagttgcagccaattggaacggaacatggtcgttcacatcgtaatcggcggaatcctgccaatcagtcgtcgttccatcagtatcattcttgtccttgaccttcttctggaaggtcggcttatcggccttacgggtgatggtcactgcctggttaccgacaacctgaacgatgtacagagtagctgcatcattaccggttacatttttctggtccttggcgaggtaatagccagccggaacgttgctcagcggcttgccggccgatactgtaccgtacgcaattttagtcatatcaatgaactttttgatagtttcaagcttcgtcgaatcggaagcattgctatcaagtccagccacagtctcggcagctttagcggctgtcaggtcagcaccatcagtaccggctgcgttcttggccttgaagttctggccagctgtaacgttgccaagagaaccatccgtaccgtacgtacctgtgaaaatctggtagacggaataggtgtgggtatctccgtcagcgactttgataccaccagttggatctgccgccatggcggtggaggcgccggcgaaaccggcgacggccatcgctgcggtggctgccacagctacgaggcctttgagaaccttgttcattgttctccctttctttcttgttttgttaaaacttgggttgttcatattcagttattgcctagagggcagcgagttcgctacgttatgggccggtcccccttctcctagacgtttccatcattgccgcctcctgaggctcaaggccagaccggccgcggcaatcgccactgcgaggaatcccgcagtgtacatcttgttcagcccttcgccgcccgtgccaggcaggacaacgccaggggtgttggtaatagatccaccgtcaacggtgaatgccgtattcgcgtcgtatacgccggtggcgttcgcgttgaaaccgctggacgtgtaccattcaccggtcacatcggagccttcggcgggaccaatgcggaacgtgtgcggcgtgctgtccagatcgtatccgtcaggagccttggtttcgacaagctggtactcaccccatgccagtccctgaagcttgaaccggccggcctcaccatcgatgtccgcataggcattggcggaagcggcgcactgcgttgcggaagagtccacgcaatccttgatggttgcgagttcattgttcgcgtccgtgtacgaggccttgccgctcacccaggagaagctcttcgtccaggtcagcttccattcggaaccgtccaacagcttggtgccatcagtcttatcgaccttgttccacgtgaccatgccggtcttgcgggtgttcggcagcttgttgccggccttggcgggatcccacgtagcctgaccgttcttgatggtgatcttgtactcgccgccgacatcgaagccgttcggctcgccggtttctttcagaacgtagtagccgtccgcaagattgctgatgcggaacgcacccggatcggtgtcttcatccttcaactcatcctgagcggcgttggccgcacgactggttccactcgcctgcgtggcagtcttcgcagccttgcgaaccgccttagcggacttggccgaccgcgtgctggcggacacggcgcaaccgttcggagcggtggtgctgtagctagggcctgcggaaatggtcacgttctcagggagtgtggttccactggtgaacttgaagttgccgtcgctcttcggaacattcgcattgcccgggccgtaccaatcactaccgtccagatgctggaagccgaactggctgtccacgctgatcttgtccataggaatccgcgcatacgcatactggccgcaggaaccgctcatctgagtcatcttctgatcggtccaagtgccactgttcaagcggtagtgcacctgcacgtcgttggcgtaccactttccctgattattcgaatcaaagtacaggatgagatacttctgcgccgatgtcacggtaatttcagcggaagcagatgcgccatccgcggtgcttgccgtaatggtggcagtaccagcggaaacaccggtcaccaaaccgttctggccaaccttggcgaccagttcattattagacgaccaagtcacattctgctgggggttgacggtcgccgtaagctgcgtggtcttaccttcaaccaccgtcgcagcgctgggggaaaccgtcaccttggctgcggtggcaccggtcaccttgaacttcacggacgagcagacaccggcatttgatgtcgagcatgccgtaatagtgacgtaatcattgccgctgttggacttcggtgtcacgatgccactaccggcgtcaacagtggcatagtaatcgttcgacgaggtccacaccacgccggacggagccccgctcggagtgacggtggcggacagcgtgaatacgttgttgaccgccttattacccagatcctggccatcggtgtatgccgcgccatccgaaccgacaatgctgacgcctgtcaccgcgaccgtggtgtcatgaatgctcttcggccaaccagattcaacatccgcacgctcctcatcggtgtacttggtcaggttccacatggacccggcaagccttgtatccgtatcgtcggaatcgaccttggaccattcgagggaagcgcccctcttcttgttgacgatcttgccattcatcagaagcttcaccgaagcatcagtcacttcgttaccttgcttgctatagacggcggtgacggttgcggatgaagtgtcttcgttaccagtattgatttgatagatgttttcgttcagctcataatcatagctgccggtcgacgtttccttgatgtaatacgtggcattgggagcaagaccagcaagcgagaacttgccatcatcctcatcgccatcgttccaaccgttatcggtgatggtggtaagcggggtagccgcagtaacagcattgtcttccttaccgtacaccgaccaggtggtgccacccaacaccttgccatcagcgtcgaccttggaccactgaatcgtggaacaggaggatgtcagctgaccgttccagggaaggttgtggcgttcttgatccatatcgatcacggaggaggtcgcgccttcgcccatatccacgccgatgttgttcgggttgtacatggagaagtcgccgccgacatacacacgaccattggtggttacgtggctttcgaagctgccgttcagcaccataatgctgccgagcatggctgcggcggggtcatcccgggaggtcaggatcttggtggaatccgtcgggtaaccccgcttatgataatccccgttaagtgcttgcccgcccttgatagtgagcttgggagtttcggcgaagttccacatgatcttctgcgcggccttgctgtatgcgtctcgcatctctttggtgactgcaccattcacgtcagtcgtcacataaccgttggagatttcctgaccgttccaccagaagcgccaaccattattgaacgtgatcggattttgaccctcgacattgataaccactgatgccgtatcagagatgttcgtaaaggcgaaagagataccactgtagccttcagaatccaacattgaggcattaacatcgaacacctcaagggatgggttctgcgtaccagtgaaggtaatcagcttttccttctgctggtttgcgtcaggagcgccctcaacgaagttgaaatcatacttcgtattctctccatagccgggaacgccgtagcggtagtggtaacgcgaataggtgccagcagacgcagtgcctgcagtaaccgttccagtcgccttgaccttcaggagtttgctggacacaccctggacgttttccgtgaggaacttcgaataatccttggtttcaccattaacactgacgctgcccagtgaaacactgtcattataagtgacgttgcccgtgtcctctgcgctcttgcctgcgtcataaacggatcgagaatagttttggccgttaaggttattgatggcgatactgctattgcccttaatcttggctttgtagtactggctctccgtatcaacattcacgaaaccacgcgcggtgctgccattcacccaaccaccgagagcggatacgtcttgaacaccgttatagttgttatctttcatcgtcagcgtgctattgccgccgacgaccaacacatcgctaccgcttttcggacggtactgaccaccgaagccgaccacgccaaaacggaagcccctgctactccagctttgcttcgcggagttgatggcgagcttgccgttgacaagcgtcagaccttcggcttccacggcatatgatttatcaggcccctgatttttattcagttcggaatagtttcctgtgttggcgcccacgtacatattgccgccaacataagtggccacaccggaatcgaccgtggatttacttgtatcgtcccccaaatcaatggtctgaggcgtgcaaaggctgccatcgggcttgcctgaatccgcattggcactggtggggggggggcaggacgaaggagatggcggccgtggccatcatgccgacggcgacgagggttgcggtgagtgcacgggccggttttatccctcgtttcagcgctacgtgcttcagccgttccacctgatgcctcatcgtttcatgctcctcaaatagctctatgtactgaatgtcatcatccccgttctcaccccttcggcggtgaactttccgcgtcattggggaacgtcgacttcagttatccacaaacctaaatacgagattatggctttcgtttgcattgagcaaatcggcgctcgtgaaattttcatcgccgtttcgcctgattgaacgccgcgtttcatcacacactgagcacatgccacagaagtacgtatttcgctgtaattccaccgtttcttagccatcatcacacacggtttcagcacttgctcaacatatgttgacaaaaaaattattaaactatgtgatttcctttgcctaatttctgctgccatccttgacacgcaggttccaaatgaccacttttttagcatccgctgccatcaatgtgaaaacgttttctgactcggtaaccatgccccttccgcgtcaacagaatggggccgtcgaagctcggcagcttcatcagcttgcacacggccacatacagcacgatggacacgactatgccattgaccggaccaaggaagaatgggtggtcaaggaatgcaagtgccggcaccgaagcaaatgtgccaccggtaatcagagccacgatcgatcccacgatgaacgaaaccagaccaggcacggagaacccgtcaagtggcttgaagttttgcggacgggccttgcgaacaaaccagtaatccgcgatcatcgagcccgcgagcgctggaatcatcgcggaaagtacggtcaggaacatctggaagtagtccatgatgccagccacggcaaggataatgccaagaatgccagcgatggtggtggaaacgcgatagcccttatctcccttgtctgcgatgacggcgaaagcgagtcctgcagagtaggcgttgcccacgttgacggaccacgtggatagcacaagagcgatcaaagcggctccggcaagacccatggatgccatgatctgggaaatatcgccgcccgattcgggcttgacgacggagagcatcgcacccatcataagcaggatgaccatgggtggccagatgccgatgatgctggacagcactgcaccttttcgatcacgcgtgtaacgggtgaagtcgcccacagtggcgccgccgacggcgaagaagcccacggcaatattgataccggctaccagccccatgctttccttgggcacgtaggaggtcaacgtgcccatgcccgtattggacagggaggcaaacaggccataggcgcaaatgatgaacagcaaaggagccgcgatgtagttgacccacttgacgccgtcgaaaccgaggatagcggtgacgagcatcagcgcgcccagcacgatagagcagatttgcggcgaaacgtctagcccgagcttaccgaccatcagggagaatgaggatccgcagactgccgcctgcacaccgaaccatccgatcagtgagacacccaggatgattgagatgatgtagcgtccgcccttgcgccccaaggctgcagtggacatggcggaggtgggaaggccggtgtcggttgcttccatggccacgaaacacatgtaggcgagaatgatgccaaaaccgatgaatgcggcccagaatgcatcccacaaggtcagtcctgcgccgagtaccgcaccggtcatcagggtggacacgttgatggaattaccgatccagacgcaggcgatggacaaccatccgcgcctgccgctatccggaatatgaaggctgtctgattcgaaagccggctcctgtgccggcgcgacggccgttgtctgtgtcatggttatggcacactccttgaactactgatatatctacggtttttatacgagacgagggccggatcatcgtcctcctcttttgatgggaaaaacaatgatccggtcccgacacttcacatcagggtctcgaacttgccgaggaagtcagtgaacgaaagaatgttcgccatgctttcgccgaacaccgagttctgcacgccgaaccatccaaccatggaaatggccatcacgccgccgaagatggcggaacccattttgccgaatccggtccaacgggacagcagactggtggacaggccttcacgcgccgccgcagtacccagcgcccagctaatcacctgcaatagcactgatccgagcattgtcgctcagaacgcgccccagaaactcatgccgtagccgagggatgcaccgagcaccagctgaaagacacagcatatgctgccgatacggattaccagaatcctccagaacggctgcttggcctcggccggaacacgagacagggtgtagccgctgtcctgaatgggctcattctgtgtctgggatatcttgcttgcggaatcctcattgccggcaacttgcgtttgtgaagacgccatatgccactccttttcgagaagacaacaaatatggcgctattgctacccccgtggccaacgtgttacgaaagtatgaagagagtacttataacggctgatcatcggtgatcaaaaaccgcagaaaatagcgaatcctttggtcacatcgtgattccgacagcgaaaatccacataatggacatatccatatacggcagctgaaacacaaaccatcattttcccgcttgtgaatatgtaacactagcgcaacctcagtgtcacatattcgggaaatccagtggacccgcgcccgctactcccctcagtcgtctacgacgacagctcccctcagagaggggagccaagcaataacccgcagcagctcagcgcgtcatttcctcgtagatgcgcttgcagtcagggcagacggggtatttggacggatcgtgcttgggcacccagaccttgccgcacagcgcaaccaccggacggccggtcgcgcgggattccgcgatacggtccttggacacatagtgtgcaaagcggtcggcgtcgccgccatcgtcgcgcaccggcgactccttggtctccggacgttccagcacggaggttccggcaccctggtcggggttgcgcagcggttcggcgtcattggagaacagatcagcaaaagtcatagtgcacttctttcctcgtactgtacgattcaactgcatcccatcatagattcccatcgcaaaccgcgaaaccctccgcatgtaacatgtggccgcacgaagcgcaccattgcacaccattcgcggtaggctataaggcatgactatcgcagtatgccccggctcgtatgaccccgttaccgccggacacttggatgtaatcgagcgctcggcgcggtttttcgacgaggtgcatgtggtggtggccgtcaacgccgcgaaaacaccgatgttttccgaagccaccagagtcgacgtgatccgccgtgcccttgacaaagccggttgcaagaacgtcactgtttcttccaccgacggcctgatcaccgactactgcaagaaggtcggcgccaccgttatcgtcaagggtctgcgccagaacggcgactatgaagccgagctcggcatggcgctggtcaatcgcaagctcgccggcatcgaaaccctgtttttgccggccgatccgattcttgaacacatctccagttccatcgtcaaggacgtggcccgccatggaggcgacgtgaccggcatggtgcccgattgtgtcgtgccgatgctggccgatgccctggccgaggaacgtcagcggaaggactgatgcactaatgactatgagcgatgaccaccccactggatacgtcgatctgaccaaaccgaatgcggacgccgcatcgtccactccggagccgtccgccccggaaccgcccgcgtctacgcaagccgcgccggcacccaccgaagaggccgatgttctcgccggatcgccgcccgccgcgcctacccctactccggcacagatgcaggccaaagcgcaggcccaagcagctcagcagacccgggcacaagctcagaccgctcaggccgccggcactcgcccctcgttcatgaacgaaatgcccgacctgcgagaaaccacggacgacgacccggccacggtcaagagccgcgaggaattcaccacggtgtatgacatcatcgaccagctcgaggcggcactgggcgaagcgaagtccagcatattcgcccccggcatggtgaaggttgaccgcgacgaattcaccgaccagctttccgagttgaagaaaatgctgccggtgcagttggagcgcgcctccgccctcatgcgcgaggccgagcgccatctggaatcggcacagacccagtctaacgccatcgtcgcctccgcacaaagccgcgcagccgacatgatcaaggacgccaacgaacaggcacagttcctggccggccaagagaacgtcaccgagcttgcacggcagaaagcgcgcgcgattcttgaccaggcacagaccagagccgaccatctgacccaaggcgcggaccagtactgcactacggtgatgaaagggctgtcccagcagctcggcaaactcagtcgggatgtgcaggccggtcttaacgtgctggaagagcgccagcgtgcggccggcgaacagatgccgcacctgacgctgaacgactatcccgaagcccagtaacgccagcagcaccagcaacatcagtaacgcgaataacgccagtaacgaataactccagccaacatacgaaaggcaccaagaacataccatggcacgagttgaagattccccgtgggccattccggtagcgcagattgcttcgcgcgccggtcaatccaagccgattgacgccgatttcccggccccttccggcattggcgacagcatcgtcggtatcaaggatggtgagcccgtacatgtgagcgggcagttcgattcgattgtggacggcctgatcttcaccggccgcctggtcgcgccattcgtcagcgagtgcacgcgctgcctgaagccgattgacgaggactggccggttgacgtgacggtgttcttcccgtatgagtcgggtcaggacaaggccaacggcaagggcggcaagaacaagaaggacgacgagatcgacatcatcgccggcgaggacgagtcggaagacacgtatccgctgctggagaacggcgcattcgcggacatcgaggcgatgatccgcgacacgctggtcgaatcgctgccgttgcagccactgtgccgaccggattgcaagggcctgtgctcgcagtgcggtgccgatctgaacgaggatcccgaccatcatcacgatgtgacggatatccgttttgccggattggcggggctcaaagcccagctcgaggccgagcagaacggcgagcaggccgagtgacgcgcgcctgaacggagtttgtacgagccgtgcgttaagataacggacgcttaagctcaattgttcgaacgaaatagaggatactcaaatggcactgcctaagtacaagacctcgcgcgccaacacgcactcgcgtcgcgcgaactggaaggccaccgctgctgcgaccgtgaactgcccgaactgtggcgctccggccctgccgcacatggcttgcccgagctgcggtaactaccgcggccgcacctaccgctccgccatccagccggctcacaccaagtgagtcctgcgataacggcttgaatgaaggccctgccatcgacgggtggcggggtcttcgcataagtgcaccattacgtacaccatcgcatcgcaaacaacacaacacacaacacatcaccatcgcgtgaaggaccatacaacaatcatgagcaatgaaaccccacagcagccgacgccggccaacgagcttcttgaagcgttgggcaccactctcagcccggatctgctcgtgcaggcactcacccaccgctccttctcgcatgagcaccccggcgtggccaattacgaacgcctcgaattcctgggagacgcggtgctcgaactggtctccactgaaacgctgttcaccattcacccggatatgaccgaggggcaactggccaagatgcgcgccaaggccgtctccgaagacgcgctgagtgccatcgccaaaaccaagctcaaggtgggcccctacattctgctgggtcacggggaaaccgagcagggcggcgcggagaagaactccattctgtgcgacatcgtggaatcgctcatcggcgcgaccttcctggaacacggcatcgacgaggcacgcaaggtgattcaccggcttattgacgacacgctcgccgaagtggccaccgagggcccggcacttgactggaagacctcgctgaccgtcaaggcgcacggcctcggcaaggatgagccggtctaccatatggaggtctccggcccggagtacgcgcagatcttcaccgcgcgcgtctcattgggcgagaacggcgacatcatcggcatcggtaagggctccagcaagcgtaaggcgcagctggcggccgccgaagcgggctggaagtcactggactcgctcaagacgcggactaagtaagcccgctgtcagatttgcgaatagactgataccaacatgagcgacgagtcgtgccggggccacaagtctcggagaagcgactggaatcagacacgcgggcacccggccccatcccaaggtcgggcaggttcgcggcaaaatctatgaggtgagaggaatcatggctttacccacgcctttgcaggcattcagcggcgtgccgaaaatcaacgcggcccccgataagcagaccatcgtcgatggcgagaagatgactggcgcccaagcgctggtgcgttcgctggaggatctcggcgtcgaggacgtcttcggcattcctggcggcgcgattctgcccgtctaccacgagatcaaagacaacacgaagttccgcttcgtgcttatgcgccacgagcaggccgccggccacgccgccgaaggctacgcactggccactggcaaggtgggcgtgtgcatcgtgacttccggcccgggtgccacgaacgtggtcacggccattgcggacgcgaatatggactccgtgcccatggtcgtgattaccggtcaggtgggcgtgcaggccatcggcactgacgccttccaggaggcggatatcgtgggcatcacctacccggtgtccaagcactccttcctcgtgacccgcgcgcaggacattcctcgcgtgctttccgaggcgtactacatcgccaacaccggccgccccggcccggtggtcgtggatctgaccaagaccgcacagaccggcgacatgtactactcatggccgcagcgcatgattctgcccggctacaaccccaccaccaaggcgcacggccgtgtgctgtccgacgcggcgaagctgttctctcagtcgtaccgcccggtgctgtatgtgggtggcggcgccgcccgctccaacgccggcgcacaggtcaaggctctggccgacctgaccggcgcccccgtggtcacgaccctgcccgcacgcggcatcattcccgactccgacccgaagaacctcggcatgctgggcatgcacggtacgattgccgcaaccggtgccgtgcagcgcgctgacctgcttgtggccatcggtgcacgtttcgacgaccgcgtgaccggcaagctcgacgccttcgcaccgaccgcccgcgtgattcatattgacatcgacccggctgaaatcggcaagaaccgtcagcccgacgtgccgatcgtgggcgatgcggctaccgtgctcgacgacttgattcccgaaatccagcgcacgcaggccattcagggcaagccgaatctggccccctggtggaaggcgatcgacggctggcgcgaggaatacccgatgacgtgggatgagccgaccgacggatcaatggccccgcagtgggtcatcaaaaagctctctgagatggccgatccgtccaccatctgggtgaccggtgtgggacagcaccagatgtgggcttcgcagttcatcgatttcgagaaccagcacgcttggatctcctccggaggcctcggcacgatgggctacggtctgccagccgccatcggcgcatccgtgggctcggcccgcgagttcgagggcaagaagccggtgtggctgatcgatggtgacggttccttccagatgacctctgaggagctggccgccgcgttcctggaccacgctccggtgaagatcgcgattctgaacaactccgtgtacggcatggtccgtcagtggcagacgctgttctacgagcaccactactcgcagaccaacctgctcgatggcgaggcgcacggtgccgatggtgcggcggcactggtcgacggcgatgcgccgctcgaagtgcctgatttcatcaagttggccgaggcatacggctgcgtgggtatccgcgcgttcaccgaggaagaggcgattgccgccatcgaaaaggcgaaccagatcaacgaccgcccggtactgattgatttccgcgtgtggaaggatgcgatggtgtggccgatggtagccgccggcgcttccaacgacgaggtgacgtacaagcccggcatcaagccgctgaccggcggcaccccggctccgggaaccggtccggacgagcatgcgaccggcgtgttcgagcacgagaccgccgctgccgctgcgagcgagcactgaggagaggagaacactcatggctaactatcctgcatcccagcctggttcccagcgtcatacgctgtccgtgctggtggagaaccgcccaggcgtgctggcgcgtatcgccggcctgttcgcccgtcgtgcgttcaacatcaactcactgtccgtctcccccaccgagcgtccggacatctcacgcgtcacggtgaccgccgacgtggaggccgtgccactggagcagatcatcaagcagctcaacaagctgctgcacgtgctgaaaatcgtggagctcgacccgaactccaccgtggaacgcgaactggtgctcatcaaggtggccgccgacgaatccaaccgttccgacgtgctggagatcgtgcgcctcttccgcgtgcgtgtggtggacgtgaatccggaatcgctgaccattgaggccaccggtgccgaaggtaagatcgatgcgctgctggggcttttggagcattacggtgtgattgagctggtgcgctccggtgccgtagccgtgacccgcggcccgcgcgccctgagcgaaaaggtcgtcggttccgaggttaccgggcgctgattcggcgactgcggggagacccagtccaagctcaaagggcggatgtgcatgatgcatatccgcctttttcatgcgtgcatacctcatcacccgtgctgcaagcaaaatgacagcaccttatgctagcattatgacagcaacaaggaggtgcatcatggcaacattgaccatccgaaaaatacccgatgagcagattcaacagctcaaagaagtggctgagaaaaacaaccgctccatggaatctcaggtgcgatccattcttgaagaatggctggccggcacggtggcgcatgaaatcacacgaaagaccaatttctacgacgagatccgcgaattcatgaagaacatggattttgagggactcgacaagggggaactcccactatccgagcgaaattccgccgattcccgaccgccagtatcttttgaataggaatcggccatgattattctggacaccaacgtcatcagcgaaatcatcaagaaacagccagacgaacacgttgccaattggctgaggaaccaagatacaagcaatctggcaaccaccgccatcaccgtcgccgagttgttggtcggaatatgtcgcatgcctgaaggcaaacgacgaaagtacacagatacgaccgtcaagctggcgcttatgacattagaggacaggacgttcgcatttgacacccaggcagctgcggattatgcccatatccttgtcgaacgcgaacgcaggggcacacctaccagtattcaagacgccatgattgcggcaattgcctgttcctgggatgcggccatagccacgcgcaatatcaaggacttcgaaggtaccgacgtggaattgattaatccgtgggagtttgcatagcggtaggccccggcaaactaccgaggccttgtgaacgttacggtttctcccgctactccaattgttcggagagttcgagccattcggcttcgagattatcgctttcagtattgacggcggtgagttgttcattgagcttgttgagaccctcgtagtcgctcgggtcatgggcggccatctgtgcctcaagttcggtcttccgctcttccagtttggcaagcttgcgctcgatggcattcacgcgcttggatgcctcgtggaaggccttgccggtgagcttcgaggtggagtcctcaccgttattggctccctctgacgagggagctgtccgcgaagcggactgagggagagatgcagcaacattgacggcggccgccttacccctaccagacttcgccgagctgctaccggtgcccgcgaagccaggcgtgtcagccggcaatcccttgccgttcttaatagcctcaaccatatcgaggtaatcctgcacaccaccgggcagatggcgtaccttgccgccaatcagcgcgaactgctgatcggtgacgcgctccagcaggtaccggtcgtgggatacgacgatcaacgtacccggccaagtatcgagcaaatcctccatgacggcgagcatatcagtgtccagatcgttgccgggctcgtccatgatgagcacgttcggctcgtcgagcaggatgagcagcaactgcatgcggcgcttctgtccgccggagaggtcgcgaatcggcgtcatcaactgggcggattcaaagccgagacgctccatcaactgtcccggcgttacttccttgccatccacaatgtagctcggcttatagcgggaaagcacttccttgatcttgtactggcccagtttctccagctcatcgaggcgctgcgagagtacggcgaacttcacggttttgccgatgttcacatggcccacggtcggagtaatcgaaccgtcaatcaacttcagcaatgtggacttgccggcaccgttcgcaccgacgatgccgaaacgatcgccggggccaatcagccaagtcacatcgtcaagaatctcgcggccggaaaccgtcaccttgcgtgcagccgaggtgacaccggctgcagcagtgccatcatccgaattcgttgcagcagtgtcaccgccgatggtttcaccacccgtgttcatgcgacgaacctcgcgatcgtcagcaagctgcggattgccgctctcagcctcggccttcttacgcgcttcctcagcggcctcgacggcttccggcacgccggcgtccaccaggcgcaggtcagtcatgtcggtgaccgccacctcaacggaaccgtgcagctgcggctcggcgtacatggcgttgaccacatccacgcgggaagcggacgcggagagcgccgccacatccgggtcgatatcggccatgccctgcggtttttcgaaaatctgcgtcacgtcgaccaaatcgaccacctgtttgccgaggcgtgaggtggccatttgcttcagttcaagtgtgttacgcatcggcggcacatcggcaatcaattcgcgtgcggccttgacgtggaacttctgcttggtggaacgggcacgggcaccgcgggaaagccatgcgagctccttgcgggccagattgcggcgcttcgtttcacgcacatcagcctggcggtcgcgttcgacgcgctgcagcatatatgcggaatagccgccctcgaacggctcgatcacgccatcgtggacttcccacatcgattcgcagacctcgtccaagaaccagcgatcgtgggtcacgagcaacagagcgccctggcctttggaccagcggttcttcagatgttcggcgagccagtggatggtgaccacatcaaggtggttagtgggctcgtcaagcgcgagaatatcccaatccttgagcagaagtcgggccaaatcggcgcggcgacgctggccgccggacaaggagccgaccttggcatccagactcatgccgccgagcaatgcctcgacgatttcacgggaagtgttatcggacgcccattcgtagtcggcgcggccttcgagcgcggcttcgcggatggtggcgttgtcgtcgagcggatcgcgctggtcaagcatgccgaacgtgagtccgccgcgcttcgtcacgcggccggaatccggctcctgggtgccgcggaacaggtgcagcaacgtggatttgccgtcgccgttcttgccgacgatgccgatgcggtcgccctcgaaaacaccctgcgtcacatcggtgaagatggttttggtggcgaaagcgagcgaaacgtgttccagtccaatgtcataagtcggcatgactcaccaatgtagcgccacgcttgcccagcggcggcccacaaacgttatttgttcagcgtctgagcgtaggagttgcagcgggccgcaaaaccggagaacacttgctcggcgagcggatgcagtagctgatcgtattgggcgaactgctcgcgcaattgggacttggacccacccgcggccttgagatccttgaccatgctcggctcatccagccattcgtccagcagcgagccgcacacctcaagatggaactgcatgcccagcgcggatcccagtcggaatgcctgcaccttggtggaagacgaacgtgccagcagctggcctccctcgggcaagcccaccacgtcgttatgccagtgcagcaccgtcagctgcttatcccacatggagaagaagtcatgcttgtccacacgcttgatcggcgcgaacccaatctccggcgcatcgcccttgcgcagctgcgcaccaagcgcagtggcgataatctgatgccccaggcatacaccgagaatcggcttgcctgaagccacggcggcacgtgccaacttggcttccgccttcagccccggatacttgtcgtaatcaagcgctcccataggtccacccatgattaccacgccagccagttcgccgaaatcaggcaagtccggtttctttttgtcgacgatattcatcgtcaccgtctcaagaccgatgtcttcgaggttcgacaatatgcgtcccggacgttcccatgggacatgttgcaaaatgagcacttgtggtgtggccatgacttctattgtggcacgagcgttccccgtttgcgtaacgagcagggcaaatccatgaatctcgcagtttccgcagcggtcaaagacgtattctcgcgagactgttgtcccgcttctcatccgtctgtcacctcgttcgggccccgcctgtgaagcgttcatcaaactcttcgagtaacgattcagcatgtctggttcggaccctacgcttgagcgttatgggaaacagccaagaaccgcaggatttcaacatttccgtcatgccttcaagcctgacgccggtgcatgtcgccaaggccgcagaaggcctgaatctgtatgacaccgcctcgcaccaggtcagccatttcgtgccgctcaagccgggcgaggtcggcatttatgtgtgtggcgccaccgtgcagtcgtcaccgcatatcggccatatccgtgccgccgtggcgttcgacatcgtgcgccgctggtttttgaagctcggttacaaagtcacttttgtgcgtaatgtgaccgatatcgacgacaagatcctcgataaggccgcggccgccggccagcgttggtgggcccgcgcctattactacgagcgcgaattcaccgaggcgtacaacacgctcggcgtgctgccgcccaccgtggaacctcgcgccaccggccacatgtcggacatgatcgacctgattcagcgcattctcgacaacggccacggctatgtggtcacggatgcggacggcaagcccaccggcaacgtgtacttcgatgtggcatcctggccgcattacggcgaactcacccaccagaagcagacctccgaagtcgatgaggccgccgccgtggccgaccgcatgggcccgtccgtggacgccaccggtgccgacaagtacaatccggtcgacccggccgacgcctcccccgacaagcacgacccgcgtgatttcgccctgtggaaggcccccaaggacaccgatcccgaggacgcccgttggtcgacgccgttcggcgtgggtcgccctggctggcacatcgaatgctccgccatgtcccaccgttacctgggcgatggcttcgacattcacggcggcggtttggatctgcgcttcccccaccacgaaaacgagatggcgcagacctgcgcggccggctacccctctgctgcgcgctggatgcattcggcatgggtgaccgccaagggcgagaagatgtcgaagtcgctgggcaccggcctgtccgtgccgagcgtgctggccgagcattccgcttgggtggtgcgttacgctttgggctccgtgcagtaccggtcgatgctcgaatggtccgatcaggcgctggtcgaggcgcaggccgcatacgaccgcgtctcgaacttcatcgaacgagccggtgtggcactgggcggtcagccttctcgcgaggaggttgctgccgtctccgccgacgatttgcccgccgatttcgtggccgccatgaatgacgacgtcaatgtgtctggtgcaaccgccgcgatcttcaccgccatccgttccggcaatacgttgctttcacagctggctgaccgcgccgattccgaaaccgccaaggccgaggtgcgtgaggcgctgctcgccgtgcgtgccatgctcgacaccttgggtctcgacccgctggccgagccgtgggtgtctgctggcggtgccgctgatggcacggccgagtcgcccgaacatgcggcgctggaggcactgatcgccgagcagctcaacgcccgcgccgaggcccgcaaggccaaggacttcgccaaggccgaccagattcgcgacgccctgaccgaggccggcatcgccatcgaagacggcccgcagggttccacttggagcctgaagtagccgctttggcactggaatagcgctacttccgtttcaaggggctgccgcccaagtagaagcgcactgaaaatggcttaacgacggtgtcgttaagccatttgtactttcagtctgacgcttagacagcccctcgaaacggaagtagatgtccgggaaagacgaaatcagcccctcgaagcggcaaaagccgcttcaaacccatcaatcagtcaaacacgaagtccacgtccacgatgtgcaggcgcttgatgagctccttctccagcgagcgcttgcattcgatgaggtcagctacatcaatggtttcgccgatgccgctcagatacacgtcaacggtgtagttcataccggtcttgaagatcagcgtctgctcgtagtcggtgttggcaggcagatggcgctgtgcctcggcctccacgtaggcgttggtctcatcgtcgtcatgcacgccgccgaccaattccacgaacgcctctttgagcacgctgaacggctccttgatggtcaatgccaccaaagccacggtgatgaagaaatcgccggtgtagtgcaggaagtcaagcggaccgccggccggtagcagcatcaggaagatggcaaccacgccgatgccgaacgacatcgatccgtcgaccaacgtgctcttgcactcggcggtgagcatggtgctggaatcgccgatggagcggttggaacgccggtaatacgtgtataggctgaagcacacgattacggtcaggatctcgtagatgaccaccgggccggtttcaatgcgttcgccggacccgaacacgaagtagtcgtacgctactcggcacacgtcaatcagcgaatacaccaacaacgacatggtgaaaatggccttgcagatcgcgtagatgggttccagtgcgaacatgccattggggaagcgctcggtggttcgcaccgtgcgcgacgagaagtacaccgccaccattccggacaggacggaaatcgcggtgaaggagaagtcgaggaacatggccttgaggccggtcatgaagaacacggccatgccggctaagacctgcagcacgttgatgacgataccaacgattagggctttgcgttcgagtagtttttgggtgggcatcagtgggccttccttattgcacggcatgtctgcgttggcccgaacgtcatggttcggagcgcacggcagtctgcgtataagcggtgtccagcgattttcaaaacagcgtaagcattccaaaaaacacaggattctttacggtttccatggtatcggaagcactcgattggctttgccacgagcggacggcacggcatttgccgtctgaatgcccaacatccctgactactacgcgacgcattccccggaaagcgtcgtccccaacaccgcaatttcccgcgtggcggctagactgttgcccattatggcagctttttcatctttgacagacagactctcgaatgcgttcaagcatctcaagagcaagggcaagctttccgaggcggatatcgacggcacgatccgtgaaatccgccgcgcgctgctcgacgccgacgtggcgctcgacgtggtgcgttccttcaccggcaaggtgcgtgagcgcgcactgggaaccgaggtgtccgacgcactcaaccccgcccagcaggtggtgaagatcgtcaacgaggagctcaccgacgtgctcggccaaggcgtcgatcgtccgctgaacttcgcgaagaacccgccgacgatcatcatgctcgccggccttcagggtgccggtaagaccacgctggccggcaagctcggctactggctcaaggattccggccacacgccgctgctggtggcggccgatttgcagcgtccgaacgcggtgacgcagctgcaggtggtcggcgaacgcgccggcgtgcccgtctatgctcccgaaaagggcgtccaatccgatggcggcgaggccgtcgcagctccgggccagacctccggcgacccggtgaaggtggcccgcgattccatcgaactcgccaagcagaagctctacgacacggtgatcatcgataccgccggtcgtctgggcgtggacgaggagctgatgaagcaggctcgcgacattcgcgatgccgtgcaccccaacgaaatcctgttcgtcatcgacgcgatgatcggccaggacgccgtcaagaccgccaaggcctttgacgagggcgtggacttcaccggcgtggtgctctccaagctcgatggcgacgcccgcggtggtgccgcgctgtccgtggcgtccgtgaccggcaagccgatcctgttcgcctccaacggtgagggcctgaaggatttcgaggtcttccacccggaccgcatggcctcgcgcatcctcgacatgggcgacatcatgacgctcatcgagcaggcgcagaagcagttcgatgaggaagaggcccgcaaggccgccgagaaaatctccgaaggctccttcggcctggacgacttcctcgatcagctgcagcaggtacgcaagctgggctcgatgaagtcgctgctcggcatgattccgggcatggcccagcaccgcaaggaactcgagcagttcgatgagaaggaaatcgaccgcaccgaggcgatcattcgctcgatgaccccggccgagcgccgcgatccgtcgattatcaatggttcccgccgcgcccgtatcgcctatggttccggcgtgacggtttctcaggtgaacgctttgctgcagcgtttcgagcaggccgcaaagatgatgaagcgcatgtccaatcgtggcggcatgggcggcggcatccccggcttcggcggcccggctatgggcggcggcaagaagaagggcaagaacaagaagaaaggcggcaaatccggcaatccgatgaagcgcgaggccgaggagaaggcattgcgcgacaagctggccggcaaatcctccggttcgaccggcggttccgccttcgccaagaagccgcagaacccggccctgcccgccggccttgaacagatgatgggcaacgtcgatggtggcactgaactgccgccgaacctcggcggaggccttggcggactgttcggccgctgatctcacaacttggctcccctcgcagaggggagccaagttatatctcggttcaatttatatttcgaaaggaacttccatgacgacaatcttcagcgcggtggcaatcatcgcactgttatggacggccttaagcgcgctgcccgccggtctcgaggcccgtatgccgcttccgtacatgattgccctgactccgctgctgtgggttcctttgatgattctggccgcggtcgccgcatggcaacatgaatggactgcgatgtcgtcgcttattgtggtcgcgctgattgccagctcacagcgcatcaactactggggtacgtcaatcgacccagccggcaaacgcagagaatcccaccgtgaaacagcccgtgaaacaacttcgccgacgctgtcaaaaagccataacagcaatacatcgagcacctcaaacactccgaaggaaggacccgaaacagtccccgatgggcaccgtgaaacaacgcgtgaaacactctcgccccagttctcggttatgacgatgaattgtcgatacggacgcgccgacgccgctgaaatcattcgcaatattcgcgaacgcaatatcagcgtattggccttgcaggaagtcaccgacgacctcatcacacgtcttaccgaagccgacatcaacgaactcctcccctaccatcagttcggagacgccaaagagaccgataacggcggattcaacgtgatctattcccgctacgagccgagcgcagcggtgcccaacgtggtctccatccctgccgccgacgttcccgccatcaccctcaaaacctccggtaatcgcacggtgacgctttgttcggctcacccgaaatcgccgatgcgcggctgcgcggattggtcggccggcattctgggtctgcgagaactcgcccgtgcaaaatccgtcagcaatcgcaacatcgtcgtcgttatgggcgatctcaactcgagcaccgaccacccgagcttccgtgcgttgctcaagtccggattcaaggacgcgagtctgattcaagccgccggcccgaatctcaccttcccgtgctggctcaagtggccgcgcatcgaactggaccatattctgttcacccaagggctcagaccgtccggcgtgacgtccttcgaagtgccggacaccgaccatctggctttggccgcaacgctcaccctgcggtagcgggcgcggcgatcgatcgggccttggccgtgtggcgcgaagcgggcgggaacgtctggaagacccccgcccgcagccgggtggttcgccgtcagaggtccatggagcggatcagattcaccatttcgatcgcgccctgcgcgcactcggaacccttgttccccgctttggtgccggcccgttcgatcgcctgttcgatggaatccgtcgtcagcacgccgaacagcaccggcacaccggtgtcgaggctggtctgcgcgattcccttcgagacctcgttgcacacgtaatcgtagtggctggtgctgccccgaatgaccgcgcccaggcagatgatcgcatcgtagcgcttgctcttggccatcttcgacgcgatcaggggtatctcaaaggcgcccggcacccaggccaccgctatgtcctgttcgcggacattctcccttttcagggtgtccagcgcccctgccagcagttttgaggtgatgaactcgttgaacctcgccacaacgatgcctatcgtgatgttttcggctaccagatcgccttcgaacgtgtgcatttattcctcctccatgttcaggatatgtcccatgcggtttttcttggttttgagatagaaactgtcgtaagcattggcttcgatttcgattggtattctgtcgcggatctccattccatagtcttccaattgatacactttgtcgggattgttggtcagcaggagcatggaccgtatccccagatccctgagaatctgcgctccgatgtagtactccctcgcgtcaccggggaatcccaacgcgagattggcgtcgagcgtgtccatgccctcgtcctgcagacggtaggccttcagcttgttgaccagaccgatgccccgcccttcctgacgcatgtacagcagcacgcccgagccatgctccgcgatcgtccgcatcgccgcgtccaactgctgaccgcaatcgcaacgcaacgagccgaagacgtcaccggtcaggcattccgaatgcacccggcacaacacatcgttcccgtcgcccagattccccatgaccagcgcgacatgatgctcgccgttcaacctgttcacatagcagtgcgccgtgaattccccgtatcgcgtgggcatcgccacggtcgagacgcattcgacgagcgtatcgtgcgctttcctgtattcctgcagttccttgatggtcaggagcgggatctgatgctcctgggcgaaccgggtcaggtcgggggtcctcatcatccggccatcgtcgtccatgatctcgcagcacaggccgcattcacgcaatcccgccaaccgcatgaggtcgacggtcgcctccgtgtgcccgttccgttccaggacgccgcccttcttcgccaccagggggaacatatgccccggtctgcggaaatcgaggggttccacgtcatcggagacgcacatgcgagccgtcaatccccgttcttcggcggagatgccggtcgtggtgccacggtaatcgatggacaccgtaaaagcggtttcatggttatcggtgttgtgctcgaccatgggcggaagcatcagcttgtgggccagttgctcgctcatgggcatgcagatcaatcccttggcgtgggttgccatgaaattgacgttccatgtggtggccgactgcgcggcacagatgagatccccctcgttctcccggtcctcgtcatcgatgaccagaacgagcttcccttcccgcagcgcctgcaacgccgcttgcaccgactgatggttcatgattcatacatcctttctcagaacccgcaccgggacagcagatcctgcgtcagtcccgtccgggtcgtcatcatgttccgcacgtattttcccaatacgtcgttttcgagattgaccacgtcgccgacccgtttctcgcccagcaccgtctgcgccaaggtgtgcgggatgatcgatactgagaagtccctttccgtgacctccgcgaccgtcaggctgatgccgtcgacggcgaccgagcctttctcgacgatgccttcgagtatctcgtttcgcgccgcgatccggtaccacacggcattgccttcgcgccgcacggaggatatgctgcccgtgccgtcgatgtgcccggtgacgatatggccaccgaaccttccgttcaccggcagggcccgttccaggttgacgccgctcccgtggcgcaatacgccaagcgaggttctgcgccacgtctcattcatcacgtcgacggtgaagcgtcgccggtcgaaatcgacgaccgtcagacagatgccgttcaccgccatgctgtcgccgatatggaggtcctccatcacgttcgtggcatcgaccgacagcgtgcagttggcggcgctcctccgtatgtccgccaccgttccgacttcctccactattcccgtgaacatgaatacaccacctcgctttccaccagataatcctctcccactcgggagcaggcgcggggccggagcatgacggcgtcggaaggcagggcgactccttggccgcccaccgggcttttcgcggtgccgccgaatatcttcggcgcgatgtacacgtgcgcctcatcgacgatccgctgttcgagggcgctccaattcatcgcgctcccgccttccagcagcacgctgtccatccgcatatcccccaggcgccgcaccacgtccgccagatcgacgtggtcgcccttccttccgacggcgagtatttcgcagccgtgccgccggtagtcctccgccttgcgttcgtcatcgcaggcggtggcgatataggtcctgacgtcattcgccgtctgcacgatccgcgaggtgaggggcgtcctcaatcgcgtatcgcagacgacgcgaaccgggttccttccgtgtgccatgcggcatgtcagcaacgggtcgtcctcgatcaccgtgttcacccccaccatgaccgccgcgacggatcgacggagctgatggacccgacgcctcgactcctcgccgctgatccaccgtgattgattggtatgggtcgctatcttcccgtccatcgtcatggcgtatttcatgatgacatacggcgtatgcgtggtgatgtatttgctgaacacccgtatcagatgccggcactcgtcggccagcacccccacatcgacccgtatgccgtggtcctcgagcatgcgcacgcccttgccggacaccacgggattgcagtccaaggttccgacgacgacccttgcgatgccgctttccacgatcgcctccgtgcatggcggcgttttgccgtaatggcagcacggctcaagcgtgacgtacaacgtcgccccggcgggcgactgcgtgcaatgccgcaacgcgttcctctcggcgtgcaatccgccgaacatctcgtgatacccctgcccgatgatccgattgtccttgacgatcaccgcgccgaccatgggattggggttcacgtatccggcccctcgcttcgccagctcgatcgcgagtcccatgtactgcgcatcgtccatgtacgcctccaagcatgttgcgcccatacgctatccaaggcatacaaaagaaggttcatgcgaacacgaaaacgccctgaaatgatatggcatcatttcagggcgtacgacaaagcatgaacgtactttcatcttctctcatccagactgtactgtcggctttggaatctcaccaaatcatgccttgcggctcgtgggctgtaccaccggtagggaatcgcaccctgccctgaagatagttattcgttttgtccgcgattgtactcgccgacgctccccctgtcaacggaagcggcctcacgcagcgcccgggccttctgcatcgtctcgtcgtactcgaagtcgaaatcggattccacggtgatgcctccgcccacgccgagcgacgtctcgcctccctcccgcacgatggtgcggatcacgacgttgaagtcgcaatcgcccgtatcggagaaatacccgatgctgcccgtgtacaatccccggggcgcgcgttcgagctcgtcgatgatctgcatggcgcgaaccttcggggcgccggtgatcgaaccggtggggaacgcggcgcgaaccgcgtccacggcgcaacgatccttgcgcagcgtcccctcgacggtcgcgacgagatggaatacggaaggatacgtctcgatggcaaagtcggggtccgtgccgacggaacccggttcgcagacgatcgacaggtcgttgcgttcgaggtccacgaccatcagcagttcgctgtggtccttctcgctgcgggcgagttcctcgcggttcgcccgatcctcgtccggcgtgccgccgcgcggccgggtccccttgatgggccgcgtcaccacatgccccgagcgaatctccatgaaccgttccatgctcgaacagcacacgtcgagacccggtgcgcgcagataggcggaaaacggggccgggttgtgggtgcgcagataacggtagatggcataggggctctcggacgtctccaggcgcaggcgctgcgccatgttgacgacgtaggcgtcgccggcgcgcagatgatcgacgagacgggccagggcgtcgccgtacccggcccgcgtgaaatcggaggagcatggggcgagcgaacgtcggcgcgcgggatgaggggcgggcgggcatgaatccaccaggtcctgcgcccatgtcagggcgtgggcggccgtcatcgtccgcccctggcagcaacagaacaacgcccgcgaccggacgtcctcgatgagtagcaggtcgtagaagaccatgctcgcctccggtgtggccgcgacgggatcgtgcctggtcggcacgccgcacgattcgcggccgaaatcgtatcccagatacccgatcgcgcctcccgtgaggggcagacgcggatcgcgcgcgccatcgcagggtccaagccgcttcttcacgacatcgaggaaatcaccctccacggcaacgccgtcgacgaggcatccgccccgcccgtgttcgatcacaagataggggaagagtcccaggatcgagtagcgcccctgcgcccccggcatcgaggagtccaggaacgcgaagcgttcctcgccgcgcacgcgctccacgatgtcggcaagcggtcggaacgtcctgagcttgaacacctgcgcgctcaccggaactccttcgtctgcgcccgggcccgcgtccgcgccaccatgcgggcataggcgtcgttcacgtcgcgcgacacgctccccggttcgaattccacgccgccgataccggccacgggcatggcacccatcagggagttggtgaggaacacctcgtcggcccgaagcagctcgtcgggcatgatcgggcgttcgacggcccccgtgaacccgatcacggcatggcgcatgaccccgggcagcagaccgcaggagacgggaggcgtcacgacgtctcccccgatgacggcgaagatattggaaacggccccttcggcgacctcgccccgcgtattgaggaacaacggctcgtcgacggcgcggtcacgggcgcgacgcttctccatgatgttttcggcatacgccagcgtcttcatgcgcgcgaggggggaggattcgttcctgcgcacatcggcgaagtcgcagcggaagacgcgcttcgcccccggcgcggcatacgggttgcgtctcaacgagacgacgcggttgcgctcggtgaccgtgagcttgagggccgaatcgtccgatgcgccgagtccggcgcatgcgcggagcaccatcgtctccagatcggcgcgacgcgcctcgatgccgaggtatcgcaacgtctcacccaaacgcgtcagatggtcgtccaacaacaagggcgcgccgccggataccgcgatggtctcgaaggcccccatgccgaagaagaatccgtcatccgcatccacacgcgcccgggcaccggggccgatcacgcactcacccatcgatcagcgccccctttcccgtctcgcactgccatcaatcaggctatcagtcatgaagacggtaggtgcgccgccgacacgccgtccgtccggcgattccgtgcgtcacgaccggaccgatgcgcaatatccggcttccgcgttacactagtacggttattcgcgcgcgcgtggcgccctctacaccccgagccgcgaggacacgtggattccggccggtcatgccccacatggcaaaccgagaacccgcacacctagcattacaaggagagccattttggcaaccaagattcgtctgaagcgacagggcaagaagttctacgccttctaccgtgtggtggtcgtcgattcccgcaagaagcgtgacggcaaggtcatcgaggagatcggtacctacaaccccaacacccagccctcgaccatccagatcaagtctgaccgcgctcagtactggctcggcgtcggcgctcagccgtccgagcccgtcttcaagctgctgaacatcaccggcgactggcagaagtacaagggccttgaaggtgccgaaggcaccctgaagaccgttgaggctggcccggacgccgaggcccgcatcgcggccgttgagaaccaggctcagaagctgaaggccgccaaggccgaagctgccgccaaggccaaggctgaagccgaagccgctgccgccgctgaggaagccccggctgaagaggccgccgaagaagctccggctgaggcctgagcggaaacgaaaggctagctatgcttgcacaggctgtggaacacctcatcaagaacatcgttgattttcccgacgatgtttccgtcaagtcccatgagaacgcgcgcggcgaactgcttcgtgtacgcgtgaacccggaagacatcggccgtgtgatcggccgtagcggccgcaccgccaacgcgattcgcaccgtgattcaggcactgtctgatcacaaggtccgcgttgacatcatggacgtccgtcgataaccgataaggaacaattcacagcatggcacagcaagacatgcacggcgaccctcagcagctcgagttgctgagggtcgctcgtattggccgcgcacagggcctgaagggcgaagtcaccgtgcgcctgtacaccgatgatcccgagtggcgcttcgagccggactccgtgctctacagccaggatgg

SEQ ID NO: 1324 - DNA, 18263 bp, Unknown
  R157_18m  MAG No. k141_13269
gtagcggggcatggatttgaaccatggacctctgggttatgagcccagcgagctaccgagctgctccaccccgcgtcggcttgtctctcagacagctctatctacaataggtgcagattccagaaagtcaacatcggcgtgtcgtgtcattttcccacggttttaaaacgtgaatcggctcacgcagcgaggggtttggggcggagccggagtcggggtgataacgcgccataaatggccgttataggaatgccctgaaccgttatcccgaatattgacataataggaacatgcctatcaagatccccagtggcctgccggccagagatatcctcgattcggagcgcatcttcgctctggagaagcccgaggcggagcgtcagcgcgtccgcccgctcaaactggtggtcctgaacttgatgcctaagaaaatcgagactgaaacgcagctgctgcgtctgatttccaagtcgccgctgcaggtcgaaatcgacttcatgaagacctccacgcatgaggccacgcacgtttccgccgatcatctcgtcaagttctacgaaaacctcgatgcgttcaaagacaactattacgacggttttgtggtcaccggcgcgcctgtagaacatatgccgttcgaagatgtggactactgggacgagttcaagacgattctcgactgggcctccacccatgtgttctccaccatgtacctgtgctggggtgcgatgggcgcactgtactaccgctacggcatccacaaggtggattaccccgagaagattttcggcgtattcccgcagtacctgcaggacgaatactgcttcctgaccaatggcttcgacgagattgatctgcagccgcactcccgcctcgccggcgtgaacgaaaacgaggtacgtgccaaccatgatctgcagatcctgacctggggtccccagtccggacccggcctaatcgccacacgtgacttctccgaagtgttcgcgctcggccattgggagtacggcaagtacacgctcgccgaggaatacgagcgcgatatggccaagggcatgaccaacgtgcccttcccgaagaactacttcccgcatgacgatccgaagctggaaccgttgttcgtctggcgtgcccacgccaatctgctgtggcgcaactggctcaactgggtgtaccagaccacgccgtacgacctgaccgaggtgccgcagctcagggctgagaagaagctgggtaccgaccgttcgattcggcatgagccgggcgggccacgtgaggatgacttcaagccgtttgttcatgacggatacggggttattcagggctgagcgttcgcaccgtggacggcaatccgtccacgatacggacaacctgatgaacataatgccacacatccgccatatgcgaccaatagcgcgcgaagccggcgaaacgcccgggaaagccttgcgccagtaggcctcggaaaagactcgccggtgtaatattgactttgtctagacacaggcaaataatcactcttcagtcattcggagtcgaatgcccagcgtcgactccccgtccgcgcccggcatgctccatccgaggggcgcgaaagttacgagtacgtcacattcgcacatctcttgggtttaaactgacacctgatattgaagaagcaggaggcgtgatatggtcggttcgctcggcgcaggattgctgttggctgacgaggcaggcgctcatctgccctcggttggtgacttccttcccccggagattctgttccagggaactccgtttgctatcaaccgcattattttgattcgtatcgtggcaaccatcgtgctgttggtggtgctcggcgtgaccgcaaagcgcgccaagctcatccccggccgttggcagggcgtggtggaatacggtcttgacttcgtgcgtgacaaggtcgtctatgacgtgatgggcgaggttcgcggcaagcgctacgtgccgatgatcaccaccatcttcttcacgattttcatcttcaacctgtgtggcatcatcccgggtatgaacatggcggccaccgccactgtggtcatgccgctggtgttcgccatctggaccatggtccagtattggatcgccgccgcacgttcgcaaggtcttggccattatctgcgtcacgagctgttcacccccggtgtgccgtggccggtctacatcctgttgaccccgattaacatccttgagttgctggtcatccgtccggcctccctgaccatccgtctgttcgccaacatgatttccggccacctgatggtcgccacctgcctggcattcgcacagtactggatcgtcgatgcagccaacaagctgcaaggcatcccagtcggcgcgatgtggttcgtcagcggtcttgccatgacgtgcttcgaggcgttcgtcgccttcctgcaggcttacgtcttcgccattctttccaccgtgtacatcaacctaagcttcccggaggagtgaggttcaaccccctctttcggaacccggcctcgcctaggtaggcaggaccgaacgaaataagatttataacgtcgccaagtacgttagaaaggaaacacaatggatatcatcaccctcgcagcggtcgccggcaacctgtccgtcatcggttacggtctcggtgcggttggccctggcatcggtctgggcatcctcttcggcaaggccatggaatccaccgctcgtcagcctgagatgtccggcaagattcagaccatcatgttcatcggcctggctctgatcgaggtgctggcactgatcggcttcgttaccgccctgatgttccactgatcgaacgttttctcagtcgaatacagaaggcaaaacgaatccaccagtgaaaggaggacttcataatgacgctcgcagaaggcggaattgatctgttcattcccgagacctatgacattgtgtggtccctgatcattcttgtcatcgttgcggtgttcttctacaagttcttcatgccgaagttcaatgcgatcttcgacgagcgcgccgccaagattgaaggcaacatcgccaaggcggagcaggctaagaaggacgccgacgaggccaaggccaagtatgaggcccagctgagcaccgcccgtgtggacgccgccaagattcgcgacgacgcccgtgcggaagcgtcccacatcatcgccgacgctcgttcccgcgccgagtccgatgcggcccagatcaccgcatccgcacagcgctcgatcgaatctcagcaccagcaggccatcgtctcgctcaagggcgaggtcggcgcacttgccaccgccttggccggcaagatcctcggtgccaagctggaagacagcgacgtgcagtcctcgatgatcgattcgatgatcgacgacctgggcgccaagaagtgaccgtgaccatccgtaaccagaaagggaggtgaccatgcgaggagaggcatcacgtattgcagaccgcgagtcgcgtgattcgctggccccgaaactgcgcgacacccgtgaggacgcgtggcggatcggcaacgaactgttcacgatcaccaaggtgctcgatgacagcattcagctggaacgcgcactgaccgacccgtcccgcccggtcgccgacaaggtggccgtcctgaagggactgctcggtgacaacgcgcatcctatgaccatggagatcatgaccgacttggtctcccgccgttggagccgtgcgcgcgacatcgccaacgcggtggaggacttcggcgtggacgccatgatgtactacgctgacgccaccgacgccacgctgcaggtatccatcgagctgtccgagctgcattccgcactgctgaacctgccggtcgtccgctccaagctgtacgactgccaggccaccagcgaggcccgtgtgaagctgttccgcgaggtgttctccggcaagaccctgaacaaggtcaccatgaggctcgccgaacacgccacctgcaacctgcgccgccgccgctacttggagaccatccagtggctgatcaacaagttctcccgccacatgggcgagtcgatggtcaccgtgaccaccgccaccccgctgaagaaggagcagattgagcgactggtcgaggtctactccgccaaggtgggccgccaggtgcacatcaactcggtggtcgatccgaccgtactgggtggcatgcgcattcaggtgggcgacgaagtcacggacaacaccgtggtcgcacagctgcagaacctgcatcgcaaggtgcagacggaggcgactccggcctgaccggccgagccaatccgtccaacaccacacacaagcaaagacttgactgaacaataaccaatagaaggagtgatcatggcagaactgaccatcgatcccgcctcgattcgcaaggccctcgacgacttcgtgtcgtcgtacaagccgagcgacacccccacccaggaagtgggctatgtcgccacggccggtgacggcattgcgcacgtgacgggattgcctggttgcatggccaatgagctgctgacgttcgaagacggcacgctcggcctggcgttcaaccttgacgcccgtgagatcggcgtggtggtcctcggcgatttcgcaggaattgaggaaggccaggaagtgcgacgcaccggcgaagtgctctccgtgcccgtcggcgacggctatctcggccgtgtcgtggacccgctgggcaagccgatcgacggcctcggcgagatccagggcattgagggtcgtcgtatcctcgaagcccaggcccccgacgtgatgcaccgccacccggtcgacgagccgctgtccaccggcctcaaggccatcgacgcgatgaccccgatcggccgcggccagcgccagctcatcatcggcgaccgccagacaggtaagaccgccatcgcgatcgataccatcatcaaccagaaggccaactgggaatccggcgacccgaagaagcaggtccgctgcatctacgtggccatcggccagaagggctccaccatcgcctcggtgaagcagagcctggaagacgccggcgccatggagtacaccaccatcgtggcctccccggcagccgattccgctggcttcaagtacatcgccccgtacaccggctcggccatcggccagcactggatgtacaacggcaagcatgtgctcatcgtcttcgatgacttgtccaagcaggcagaggcctatcgttcgatttccctgctgctgcgccgcccgccggggcgtgaagcctacccgggtgatgtgttctacctgcactcccgcctgctcgaacgttgcgccaaggtctccgatgatctcggcggcggttcgatgacgggtctgccgatcgtcgagaccaaggcgaacgatgtgtccgcctacatcccgaccaacgtgatctccatcactgacggccagatcttcctgcagtccgatctgttcaacgccaaccagcgccccgccgtggacgtcggtatctccgtctctcgagtcggtggcgccgcacagaccaaggctctgaagaaggtctccggtacgctgaagatctccctggcacagtaccgttcgctggaatccttcgccatgttcgcctccgatctggatgcggcttccaaggcccagctgacccgtggtgcccacctgaccgagctgttgaagcagccgcagttccacccgtactcgccggaacaggaagtcgtgtccgtatggaccggcacccacggcaagctcgacgacctcgacctgaaggacgtccttccgttcgagcagggactgctggactacatcgaccacaacaccgatatcctcaagaccattcgcgagaccgaggaattcaccgccgacaccgaggctgccctcgataaggccgtggacgagttccgttcgacgttcgtctcttccgccggcaagccgctggtcgagaagaagccggacgttgacaaggccgcgccggttgatcaggaaaagatcgtggcgggagaaaagtaagccatgggctcgcaactcgcattgaaatcacgcatccactccaccgagtcgttggcgaagatcttcaacgctcaggagatgatcgcgtcttcgcatatcgccaaggcccgtgatgtggccctgaacgcgaagccgtacaccgatgcgattttcgattccgtgcaagcgttggtggcccacacccatatcacgcatccgatcgcggtgaaggacgagaagaacccgcgcgtggctgttctcgccctcacctcggatcgtggtatggccggcccgtacacctcttcgattatccgtgaaacggagtcgctgctgtcccgcctcgatgcggcaggcaagcagccggagctgttcgtgtacgggcgtcgcggttcgacgtactacaagtaccgtaatcgtgacatcgcggcgacgtgggaaggcgacaccgaccagcccggcgtggaaattgctgaaacgatctccaacactttgatggacgcctacatgaagccggctgagaaaggtggagtttccgaactctacatcgtctacaccgagttcatcaacatggtggtgcaaaaggtgcgcgtgctgcgcatgctgccggtcgaaatcgtgaaaaacgagaccaaggtgcccgatcctgatgaagaggcaccggctactgcggatgtcgctccgctgtacactttcgagcccagcctcgaaaaggtactggacgcgattctgccgaagtacattcagtcccgcatccacgagtgcctgctgaccgcggccgcgtcggaaaccgcaagccgccagaacgccatgcacacggcaaccgacaacgcacgaaacctgatcgacgaccttacgcgcaagctcaacgcttcccgccaggcctcgatcacccaggaacttaccgaaatcatcggcagcgctgacgcgctgaccaagaaggaagagtaggaacgcatatggctgacaaccagaccactgcggccgagcctaccaacggtcgcgtcacccgcgtccagggctcggttatcgacgttgaattcccggtgggtcatctgcccgacatctacaacgccctgaaagtaacgatcgtcaacaccggcgccaaggaagaaggcgaggcgaaggagaccgagatcaccctcgaggtcgaacagcacctcggtgattccacggtccgttgcgtcgctctgaagcccaccgacggcctggtccgtggtgcctccgtctccgacaccggcgccccgatctccgtgccggtcggcgacgtgaccaagggccacgtcttcgacgtgtccggtaacatcctcaacaagaagccggatgagaccatcaccgtctccgagcgttggcctatccaccgcaacccgccggccttcgatcagctggagtccaagacccagatgttcgaaacgggcatcaaggtcatcgacctgctgaccccgtacgtgcagggcggcaagatcggtctgttcggtggtgcaggtgtgggcaagaccgtgctgattcaggaaatgattcagcgcgtggctcagaaccacggtggcgtgtccgtgttcgcgggcgtcggcgagcgtacccgtgagggtaacgatctgatcggcgaaatggccgaggccggcgtgcttgagaagaccgcactggtcttcggccagatggatgagcagccgggtacccgtctgcgtgtcccgctgaccgcactgaccatggcagagtacttccgtgacgtgcagaaccaggacgtgctgctgttcatcgacaacatcttccgcttcacccaggccggttccgaggtgtccaccctgctgggtcgtatgccttccgccgtgggttaccagccgaacctggccgatgagatgggttccctccaggagcgcatcacctcgacccgtggtcactcgatcacctcgctgcaggccatctacgtgccggccgatgattacaccgacccggccccggccacgaccttcgcccacttggatgcaaccaccgagctgtctcgtgacattgcctccaagggtatctacccggctgtggacccgctgagctccacctcgcgaatcctcgatccgcgttacgtgggccaggctcactacgactgcgccaaccgcgtcaaggcgattctgcagcgtaacaaggagctgcaggacatcatcgccttgatcggtatcgacgagctcggcgaagaggacaagaccaccgtgaaccgcgctcgtaagatcgagcagttcctcggccagaacttctacgttgccgagaagttcaccggtcgccccggctcctacgtgccggccgacgagaccatcgaagccttcacccgcatctgcgacggcgtgtacgacgacgtcccggagcaggcgttctccggtatcggcggcatcgatgatctcgaagagaagtggcacaacatgcagaaggaactgggtgcgtgatggctgcggaaaaaaccacgatgaaggtcaacatcgtcgccgctgaccaccctgtgtggcacggcgaggcgacgagcgtgaccattcccgcctctgagggcggcatgggcatcctgcccgaccatgagcctgtgctcacggtgatcaagcagggtacgctcaccgtggttgagcccgatggcgatcgccacatgttcgaggtgaccgacggattcatctccttcgactcgaacaaactcaccgtggcggtcgagcgcggccacgacgtccagtactccggcaccgccgagtgatctgaaccaactcctcaaggggctctctggttttccagagagccccttttgctatgtatgccatgtgttgcgctacagtggtggcctatgcgagttattgttgccgactgttcggccgagtattcgggccgcctcaacgcctcactgcccctggccaagcgtgtattgctgatcaaggctgattccagcctgttgattttctccgaattgggctcctacaagccgctgaactggatgaccgcgccctgcacgattcgtgagatcgacccagccgccaaatccgcgcaacattcccgggaaagtgtcgctggtggggctgtggatggtgattccgcgacgcattccccggaaagtgtcgccgctggtgagccggaaaaggtgctacgtgtcagcgccgacaagggctctgacattcttgaagtgacgctgcaacacatctattccgaccaaacctatgatctgggcgaagatccgggtctcatcaaggatggcgtggaagaccatctgcaacgctatctggccgagcagatcgagcgtatcggcaagggagccaagctggtgcgtcgcgaataccctaccgccattggtccggtggatatcatggccgtgaatgccgagggcgagcatgtggctgtggaaatcaaacgtcacggcggcattgatggcgtcgagcagttgactcgctactgcgaactgctcaatcgcgatccgctgctggccccggtgcatggcatcttcgccgcacaaaccatcacgccgcaagcccaggtcttggccaaggaccgcggcttcacctgcctcatcctcgattacgacgatatgaaaggcaccgaggacgacagtctcaggctgttctgattgttcttggcttccctcttgaaggggagttttcgaacgtacatagagagactgaggggaggcctcacggtatattccgtgaggcctcccctcagtcagtttcgctgccagctcccctcttggggagagccatcgagattgtttagtacgcggcgagaatatcgattacgaagaccaacgtggagttggcgggaatcgaaccttgctccttatctccataggcctgatccggcggaatcaccagcagaacctgagagccgacggtctggccgaccagacccttctgccagccctcgataacctgatgctggccgctggaatcgctgaacagatcggcgtcgattgtggaatcgcgatcccaggacgaatcgaactgcttgccatccgtaagccaaccggtgtacttgaccaccacggtgttcttgtcggtcagcttggcgccgttacccttgatcagcgtctgcgagatcagcgaatcaaccgaaccctgaccgttcatgtcaatggacggcttgccgttcttggctcgcgtcaccttcggcagattggccggcacatccttgacttcctcgccagtggccttcttcaggtccttggacttggatacaaacgtcatcgccaaaatgtaagagtatccggacgaatcctgagcgttgacgccaaagccgatcgtggtgttgatcttggcacccttgatctggttgtagtaggtcgaggagagggtcttggaatccaccttcagcgagcaatccggcgtgttcttggtccaggtgtccatgagctcggtgccgtctttaacgttgagcgcgatgccttgggcgcagacgcggtcgccctcctcgattacgtcgccatcgcccttttgcagcaccacataggagccgtcggacacggtcatcggcgtattaaaggagatggtcggcttctcgccgagcttgcccttggcggtcacgccggcaatttgccccttcttgtcagaagagtcggaagaggatttcgagtccgagctcgaactggagcaggcagccagcgatacgcacatcgccagcgagcaggcaagagcaacggccttgccgagaggggataacatagatttaacagacttacgcatgacacaccaccctactggtgaaccttgattttctgcgctcctaggtaataaacaggtgaagattgtagaatggttaagttatgagtgctgaagaacagactacaagaccggataagggcgccaagcgtccatcccgtcatgccaagatcatgcgtggagtggtgacgcctatcttcggtctattggccgtggcggctgtggtgttggggtacatgaatgccacgatatggaagccctccactgaaatcaccgcttccgcaaccatgagcggctcccggtatgccgtcactgatccgaatgtgctgaccttgttggatcagaacgccacgataaccgtggactcgggatcctctcaggacgaggcgtgcgtggcgttgggtccgtccaaggatgttgccggatgggtcgcgtccgagaagtcctatacccgtatcaccggattggcgtcatggagcgagctgagcacccagaagggaagcagcacgagtcagggagcgcctgccagtgccgatgacgcggtggcgttcaaggattccgatatgtggactgccgtgaaatgcggcaccgggtccgtttcgctggagagcaagaagaccggcgcctcgacggtggccattgtggatttgggtgaaaatgccaccaacgccaaggtgcagctgcactgggtgcgctccgaagtgccggactttgcgatgccgttctatctgtccggtggattgctggccgtgctggccgtattgtgcgcctccgtgttcgccatgccgccgcataagcgccgcaagcgcatggtggaaggcacggcaagcgccgtaattgaggaagaggcacccgccagcatcgcagtgtccgggaagccggatggtgcaagtcgacgtaatcgtcgccgccacgccacaaatcggcgttcgggccgtgcgtcctcgcaatctgaagccaccgaaacaccggttatcatcgacccaagttcacgtaacctggtcgccgaccagcagactggtgccgagagcggcgctgagaccggcttcagcgccggcgataacgaatcgacttcggtaatcacccctgacgaactgcaggcctacttctcccgcttggcccaagaggtcaataccggagacgactcggccgatgacggacaggaggaaagctgatgaacaagcgatggaacaaactgtgtgtggccgccctcgcctgcgtggcgttggtcgtgccgttgaccgcctgtgaaggccggctgccgacgccggctgctgatacctccaccaaggttgcgccggatttgaccgaggcacaggagaagaagattcgcctgaagattctcaagacgatcgatgaagccgatcaggccaagaatcccgatggatatgcggccgttatgggcgggccccagctggacattcgcatcagccagaccacgatcaaccagcgcggcggcggtatgtccaaatacgcgaccattcccaaggacatcgcccagacggtgattcccatggacgacggatggcctcgctcggtgttcaccatcacgaccaccaccgaagatcagcagtccaagcgtttgctggtcttcgatcaggaatccgcccagcagaattacaagttgatggccatggctcgactgtttgagggggccaagctgccgaagttcgagattccgactattggctcgcggatgggcactgcaaaggatgagaagctggtggccactcccgccgatgccttgacccaatacgccgatgtgctgcagaacggctccaagagccaatacgcttccaagttcgcagacgatttgctgcgccaggaactggccaataccacggccaaggtgcaggaaggtatgcaacgcaacaacggtacgcaggagcagaaattcaccgttgtgcctgaacagatgtgggtgatgcgtgctgcagacggtgccggtgatttggtggttggccgtattaacggcgaatggactcgcaaggcgggggatggccgcgaatcgcagccggcttccgacgacgagaaggcgctgttcaatagcgacaagtacaccagcaccatgaaggtcacgtatgtgaacgtggtggccttgtacattccgttggcaagctccggtgagcaaatcaccgccgtgggcgccgaccgtcagccggtaaaggtcgaagcgctgtagttgttgccgccgcccaccgtgcggttaacgccccaccacgatatgattcatccaccacgatgtcggtaagttttacctttcgcacaatggtgccgttttgagtcacatcgtggtgggcgttttgctacgtggtgggaatttcaccgcgtagtggaagaatccctacgtggtgggaatcggcattacaatcaatgtcagcaaatgtgattgttgttgtacgcgaatcgcgtggaatcgggaggcattatggcagagcagcagttcaatccgggagtctcattggcgggcgccgtcgatttggaggcgctgaagcatcaggtcaaggccgagcccggccaggcgggtggcgctcctgccgctggtgggtacgtgatcgacaccaccgaaaacaccttccaggcaatggtgcagacttctgcgaccttcccgatcctgctgctcctgtggataccgaccgatgaccgcctgttcccgatggcccgtgcgttgggcgacgcggtgaacgccctgaacggccagattcagctctcccgtatcgatatctcgtccaatccttcgattgcccaagcgttgcaggtgcagggcgcgcccgcactgttcgcgttgattgccggccgtccgatgccactgttgcagggccttccgggtgacgacgagctcaagcaacttaccgacgaggtgattccgaagatcattcaggccgccgcgcagtctggtgtgaacggtaccgcgccgtactcgggtgatcctgattccgatgccgccaagagcgctggtgccaccggtgccggcgtgggtgctgagcaggtgccgccggagcatgccgaagcccatcgtttggccgaggagggcgattacgccggtgccgccgccgaatacgagcgcgtgctcgaatccgacccgtccgatgcactggccgcccgcgaacgtgcgaaggcgctgttgctggcccgctccgggtccgctgatgtacgtgacgtgcgtgccgctgccgccgcagcgccggacgacgtggaagcgcagttggctgtggctgatatcgacatgatcggtggccagattcaagacgctttcgaccgtttgctggactttttggccgccgggcataaggccgatatcgagccggttcgcaagcgtctgctcgaatacttcgccatccccgaacccaccgacccgcgtctggctcgcgcccgccgtcgcctagccaccctcatgtactgattggttttggctcccctctttgaggggagctgtcaggcgtagatgactgagggaagcgcgcgaacgtacttgattgcttcccctaaaccatccgattcttcccgaaatattgctggaaccttggcccctccagcgccagttcctcctcgaaatcatccgcccacttgcagaacggacggttggcgagaccatcgttattgaatcgcgcctgatcggtgatttcggtgatgcagaattccggaatcgtcagattggtaaccggcccggatcgttcggcctcggctacgatgagcggcgcgttcggcccgccgaacacgtccacgctccagccgtcttccgcaatccacacggaataccggttcttgatgattaccgagccgccgcgcttgatgagttcggcggcgatgcgcgtgtcgatctcgcgctcgacctcgtagcgcgtgccacccacggacggacctttgacggtgacatacgcttccgagaaccggtcgcggtattcgtccagcacggccaccggatttacgtcgggcgtcatgtcgacgtgcaccttgtgcgagaccagccgcacgcgcaaggcgtaattgtcggcatgcacgtagtagctctgaataatgagggccggggcgtcgccgtcgtcgtattccgccggcagctcgcggcagaagaagcggcgttcgtattcgaagtcatctgtaggttccgacataacctcattgtagagccgatgatggcgattttctcgttattttggcgacgtatgtgcctcatgcagcgtgatgtggtgtacagtaaagaagttgctcgggtttgtagctcagtggatagagcgtctgtctccggaacagaaggtcgtgggttcgatccccatcaagcccaccagcatggctttcggctagccgccggaagccttttgcatattcggcgcgtgatattaagcgcgtgcaaagctggtgctggtgctggtgctggtgctggtgctggtgtcggtgctggtgtcggtgctggtgctggtgtcggtgatgccggctcgcttgggtcgtggaaaaaccgcccggtttggcgagaacggtagtcgaatcgtctggaatcgtctggaatagcaaggaatagtctgttgatggccgtatgccgggcatcatgcgcgctaaacgcgacttcgctcagtagactgctacgtaatcggcattgccaatcgttgccgatcgtgcgattggtcgtagccggtggtgatgtgtaccggcgccggccgcagcaggtgggcgcccccaagatgagaaggagcacaatatgagcgaaaagatggaagccgtagccacttccgaggcgccggccgcgctgggcgcatacagccaggcggtgaaggccaatggcttcgtgttcgtatccggccagctgggcattgatccggccaccggcgaactggcgggcgagaccgctggagagcaggctgcacaggcgctgaagaatattaagcacattctcgacactgccggtaccggcattgagcatgtgtgccgtgccaccatctacctgaagaacgtcgaggacttcaaggaagtggacgcacgttacgctgaggcgttcatcggctccgtcaagcctgcccgcgtggcctttggcaacaacatgattcccaagggcgcgctcgtggagatcgacgccatcgcggtggagtgattcgaacgttttcccggcggcccgtctgcgcgcatggtgtgtgcagacgggccgccgcgtattgtgcgacgcattccggggaatgtttcgctgggcggggggtgcgaggtgtggttccgcgacacgttcccgggaacgttgcgctggaatcgttgggcggtggtccgtgccacaatagagaccatggcatccaaaggaaaaccgtcgccgcgttcggccgtaagcccgctgagtgatgagcaggtcaagcgtctggccgcccgccacacgcttgtggactcgacacagtattacccaaccggccctcgcacgcccaatcagccggaaatcgacgcccagaatcccaaggccaccaaacgactgctgggaggggtgtccattgtgttccgcgccagctgcaagaccaaggcctggggtctggaacaggtgccggaaaccggaccgttcatcaccgccgccagtcatatcaccatgtttgatgtgttcgtgccgatgatgagcctgttccacatgggccgccgcccccgttacatggccaaggccgagatggcgaagtggccattgatcggcaagtggttccggttggtcggcatgcagccggtgcagcgtcattcgggcaaggccaagcagatcgaagagacctcgattgatattctgacgtccggccgcccgctgacggtctggccggaaggcaccgtgacccgcgacccgaaaaagtgggtgatgagcattaaggagggcgtgggatacatcgcccttgaatcctcgcgcagactggggcatcaggtgccgctgtacccggcggtgacgtggggtgccgcctccatcaaccactggtggccatggccgcgcaaaaacgtggtgatgtgctatgaccatgcgctcgattactccgatctgcttgccgacatggactcatggggtgaagagccgcctgccgaggccgtgaacgagctgatgtggcgcgtgctcaaacgcatgaacacagtactggaggaaattcgtggcgagcagttccccgctgaaggctactgggactaccgcagcatgagtcgcaagccttggcctgaagccggcggcccgttcccggctgagaagtagccgcaccggttcccgtacggggagcctaggcgagtagcatggcacaagattgtaccgatgaagttgcgcgacaagcgaaggtaggaatttgatatgggtaaaaatataacggttctcggtgcaggagcatggggtaccgctttcggccaagtgctggcggacgccggcaacacggtgaccatgtgggccaaggagcagcggattgtcgaggacattcgcgatcgccaccacaacgccgtgcgcctgccgtccgtcgaaaagttgccggacagcatgaccgccaccggggatcgcgccgaagccgtcaagaacgcggacatcgtggttgtggccatcgccgcgcagttcgcgcgagtggcactcgtcgaattcaagggactgattcccgatcacgccatcgtcgtcagcctgatgaagggcatcgagcgtggcaccaacaagcgtatggacgaagtcgtccgcgaatcccttgacctgccggccgaccggttcgccgccatttccggaccgaacctgtccaaggaaatcgccgatcgtcatcctgccgccaccgtggtggcttgtacgaacctcgataatgccacgaaggtggccgaggcatgtaccacctcctatttcaagccgttcgtgaccaccgacgtcatcggcctggaaatgtgcggcagcctgaagaacgtgaccgcgctggccgtgggcatggcccgtggtgccggctacggtgagaacaccgcagccatgatcgaaactcgtggactggccgaactgaccgcactgggcgtagccgctggcgccgatcccaagaccttcttcggcttggccggtgtgggtgatctcatcgccacctgtggctctccgctgtctcgtaactatacgttcggcgcgaatctcggcaagggattgacggtcgaggaggccaccaaggtcagcaacggtgtggccgaaggcgtgcccaccacggatgcggtggtggctcttggcgagcagcttgatgtgccgaccccattggcgtatcagatgagccgcgtgctgaacgaaggcatttcctgctcggagatgcttgccggactgttcgggcacgaggttaccggcgaataacgagagaagcgacgtatacgtggcgtatacgtcgtacgtgcaaagtcgtgtggtgtatacgtcgttgacgtgcgcgagtagactggtgtgcgtctcttgtgcgcggcggtccgagcgcggttcggtccggttggcggtgcaaagcataggcttgaaaacggttgtagtttcaataaaaggatggttatggccaagaagcgtgttgtggtgctctatggtgggcgtgcagacgagcattcgatttcctgcatctccactgccggtgtgctgggggccatggacactgaacggttcgagccgattccggtcggcatcaccaaggacggcaagtggatcatcaacggcgaagatcctcgtggctggaa

SEQ ID NO: 1325 - DNA, 4717 bp, Unknown
  R157_18m  MAG No. k141_13274
acaatctggtggccaacctcacggccaaggagaacgtggagctcgcctccgaaatcatgaaagacgcgcaggaaccgacccaagcgcttatcgacgtggggcttcaggaccgtatcaacaacttccccgcgcagctttcggcccggacatgcaaataaccggcaccgacttctttaatcagaacaatctcgctgacataaccgtcatcagcgattatggcctgaccaaagctgacgaaaacattattcgcagcgcgccgaagtggccaaggcgatgaggggcgggtccgtctccgagtccgcgccgatctactacgaggagatgtcgaaagtggccggcaaggagaacgacaaacagtcgattaccctgatcgccactgatgacgcctacaatttcggcgactacatcaccctgcgttcgcgcaccgggcacaagccgcaggtgctcaccgaccgtggtgcgatcatctccgaacgtatggcggggatgatggacgccaaggtaggcgacacgattaccgtcaccgattcgagcggtaccgagcgcaaggtgcgcgtggacggcatcaccgaaatgcatatcgggcatttcatgttcatgacttcgggtggctataagcacgtgttcggcgaacagtaccagtcgaacgcctatatggtgaggctcaagaaccatgagacctccaatgtggagtcgcgtagcgccaagctcataaagttggacggcgcgaagggcattgtgcagaacacgacttcgaagaaacaggtggccacaatcgtcgacttgccggatcagatcatggaagtgctgattctcgcggctgagctgctggccgtggtgatcctctacaatctgacgaatctcaacgtctccgaacgtatccgcgaactgccgaccatcaaggtgctcggcggactcggcgtgctggtctaccggcggttgaagacggtcgacatgctcggcgccctgaagtcggtggaatagcagcggaatagcaaatgagatcggctttgaagccgatcccattcaattattcgctcactgctttctgagccttctgcgctttctgctccttttggcaatcagggcatagtccgaagacctccagggtgtgggattcgacggtgaagccgtggccgtcggccactttgcgcagccaagcctcgctgggcggatcgatttccacggttttgccgcaccgcttgcacaccaagtggtggtgatgtccgtcgtcgccgcataggcggaacagctgctggccgtccaggcggatcgtgtcggcggcaccggcatcggccaaggcgttgagctggcggtacacggtggccaagccgattttcgagccttcgtcctccagcctgcggtgcaggtcctgagcggagatgaactcctcacagtcggccaaggcggcgcgaatcgcgtccttctgcttggtctggcgttcgatatgttcaaccatcgataaggtcacgccttctttttcaggtcgtcccagcagccggtggcctcaaggtcagcaaccgtggcatcagggttgtcggtgagcacggtgatgtggcccatcttgcggtcgtggcgcacttcggccttgccgtagtcgtgcacattccactccgggtgggtggcgatcagcgcgcgcgtcggctccacatgctggccgagtacgttgaccatcacggccggcgagagcagcttgggcttgggcatgggccagccggcgatgccgcggatgtgggcgtcgaactggtccatcgagcaggcctcgatggtgtagtggccggagttgtgcgggcgcggggcgagctcgttgacgatgacctgatcgtccttggtgatgaacagttcgatggccagcgtgccagccagttcgaagcccttggccaagcgaatcgccagttcatgcgcttcgcgagccacatgttcggacacttcggcgggggcgatggtcatgtgcaggatgttgttgcggtgctcgttacgcacgatggggaaggtgacgaagtccttgccgttgccggagaccaggatcgaagcctcgaatgcgaagtcgacgaagccttccaagatgctcggcgggaagccgccaccacggtcggaacgggagcggatcttctccaagtcggcgtcggaacgcagcacgagctgaccgtggccgtcgtagccgccggacacggtcttcagcacggccggataatgaatatcatccaatgcggcgtcaagctcatcgaagttgttgacggcgcgccacggtgcggtggcggtgccgtggtcgttgatgaaccgcttctcatgcacgcggtgctgggtcacgcgcagcaggtcggtgccctgcggggtggcggtgatgccgcgcacctcgtcgatggcatcggcgtccacgttctcgaactcgtaggtgagcacgtcggactgcacggccagatcatggatggcggttttgtcatcgtattcggcggtgatctggaagtcggccacctgaccggtcgggcagttcggcgtcgggtcaagcacgccgacgcggaagcccatgtagcgggcggacaaagccatcatgcggccgagctggccgccgccgatgatgccgatggtcgatcccggcatcagcatcgaaacacgaccgcctgtttcctcagacaagctgggcattggattcagccaccttttctttcagttcgttacggtaatcctcaagcttgtcggccagttcgggctcgaaggcggagagcatctgcacggcgagcaggccggcgttggtggcaccggagttgccgacggcggtggtggccaccggaatgccgccgggcatctgcacgatggacagcagcgaatcccagccggacagggcgtgggagcgcacgggcacgccgattacgggcagtgtggtctgcgcggcgatcatgcccggcaggtgggcggcaccgccggcaccggcgataatgaccttcaggccattggcgcgggcgttgtgcgcgaactcggccatgagctcgggcgtgcggtgcgcggagatgacctgcttgtggtaggcgacgccgaactggtcgagaatatcgcaggcgcgcttcatggtctcccagtcgctggaggatcccatgaccactgcgacttcgggcttggattcatttgccattatcatttactccctagttattgagaataaggcccactgtactcctgatagcggagttaagccacgcagcgaatcgttctcaatacataattctgtgaggcttacagctcaataacgatcttgccgaacatgtcgccggcgatcattctggcgaacgcctcgagggcggcgtccaacccgctgaccacggaatcgatcaccggatgcaggtcggcgtgctccacgaagcgcagcagccgggcgaaatcctcgcgcgaacccatcgtgcagccctgcacgcgaatgtcctggaagaacagtcgcgtgagctccgcaccgggctggtcgccggtggtggcgccgcagatggcgatggtgccgccgggacgcaccgaccgcaccgaatggccccatgtggccgcccccacggactcgatcaccgcatcgaccttgcgcggcaaccgcgcaccggtctccagcgcggcgttcgcgccaagtttcagcgctttggcgcgcttgtccgcgtcacgcgaggtgacgaacacctccagaccagcggcatgggcgagctggatggccgcagtggacacgccgccgcccgcgccctggatgagcacggagtcgcccggcttgatgccggcggcctcgaacaacagcgagtaggcggtcagccagctggtgccgagtgcggccgcctcggccgtggtaaggtttgcgggcttggcgaacacgttggcggacggcacggaagtcttctcggccatcgtgccggggtatttctcggagaggatcgtacggcgctcgcccggggccacgcccgccccatcggtgccgacgaacgtgtacagcaccacttcgctgccggccttgagcccatgcttgccggggatgtcctcgtccagaatgcccacggcatcggtgcccaggatcatcggcgtctgttcggcggcgagacccacaccctgtagcgaccagacgtcgtgatggtttacggtcaccgcgcgcaccgaaacggtcgaccagaacgggcgggcctggggttcgggctgctcgcccaccgccaacgcggcaagcggatcgtcatggttgacggtggatgcgtatacggccttcattgcgcgctccttggtatcaaaaggaattaccgcattcattgtcccacatcgcgcagcgaacgaatcacccatttacggagatgttgggggcattgattcgtcatgtggacctcggacaatgccgggcgttagcattcaacttcggaaagactagcgaagggagattcgagggtatgcgcaacgcgtcaggaaacggatttgattcaagcgattccttcgccgtctccggtgctgccgagggggccgcgcgccttcacgacatccccccgagcattaccccttcccatggcgacgactcccatctgctgagccgcattgccagcccggccgatgtcaaggcccttgcccccgacgagctcgccgaactctgccgtgagattcgcgccacgctgctggcatatggccaccaacacggcggtcatatcggctccaatctgggcatggtggaggccacggtggccctgcatcgcgtattcgattcgccgcgtgaccg

SEQ ID NO: 1326 - DNA, 12512 bp, Unknown
  R157_18m  MAG No. k141_13506
ccagtaccaatcttagaggaacaaagctgaacattccatgaataggatcgatcggctcgttctgctcatcgcaaagcgtaacgggcgtttccaccatgcgcgtggcatgcacttgagattcgattggcattcgaccgcagcttggaccgccgcgcgattcactgcaacgtgaaggcatgcgtcaccttggtgtcttgatccgttgataggaacgaagtgacatacaccgtaatcggcgaatcgtcttgcagcacatagcccaacgccgaaatcgcctcccgtatgtttatctcggagcgtacggccaaggcgcatctctcctccgcggcggacaagctcaatatgggccgcgtacagatggcgaggctggtggagcgggccgatttgccggcgcgactgtaacacgtcgggttatcgagccatatcagtcataatggagaacatgagtgaagcgattattcgaacgttacgtaaagacgattatccggcgctgatcgacctggtgcgccgcacttggtacgccgaatatgatgagcggaccggcttgctggcagccgaggccgattgggagaactgtctggcacgtgtgaccacggcctttgtcgcggagctggaagataaacccgtcgcattgattgtggggcgtatcgacgagctcgaccatcgcagcccgctgaacatgcaccggcgtcattcgttgcgcaagctattgcaactggcgtttgcccacgacggcatggcagctgcgagcgagattctcgggactcttcatgtcgataggcaactgcgtaagcaggcggcgaacattggccatgagtattcggctgaagtggtgctgttcgtacttgatccggcggcgcgcggtcacggtctgggccggcgcatgttcgagacgatgatgagcgcattccacgcagccggcatacgtcagtacttcctattcacggataccacgtgcgatgtcggattctatgtacatcgcggcctgacgcaggtgtgcgagcagtcactgcccgcatccgggccgggagaaaacccgtcttcgttctacttgtacgaggggtcggtgcccgagccggcgtgatgcgcccgccgccgggcgaacactggtaggcttgagcacagtcggcacgtcggcataccgtccagaggccggcgacgaagggattgacatggcaatcagcgcgaaggaactaccactcgggaaagtgttcaccccggatttccggttcacaatcccctcattccagcgggcctacatatggaaggccgagaacatcctgcaactggtaagcgacttggatgacgcctgcaagtcacccggtaccccgtatttcctcggctcgctgattctggtgcgcgagggcgataaccgttatgacgtgatcgacgggcagcagcggctggtatccctgtcgatcatcatcgccgtgctgcgcgatctggagcgagacccggacctcatgtgccaactcgacgcgctgctggtggagcccggcgacaagctgcgcggcatcgtcaccgagcctcgcctcacgttgcgcgagcgcgacgcggcgttcttccgcgaacatgtgcaggaggacaacctcgaatccgtgttcgacatgaacgacgacgatctggcgaccgctgcgcaacgcaacatcgtcgccaacatccgcaagacgtacgacgagatctccaattggtcggcatccgaacgccagcaattcgcgcagtatctggtcaacgaggtgacgctcgtcatcgtgaccaccgacgatctcgacggcgcgcatcgcatcttcgacgtgatgaacatgcgcggcctgccgctcaccccgtccgacgtgttcaaggcgcgcgccacggccagcctgtcgaccgccgaacttgacgtgtacgcagcccgttgggatgacatcattgacccgatcggcgacgatccgcatgactgtgaggaattcttcgcctatctgcatctcgtgctcacgcacaagccggccaccgacaagctcatcgaggatttcctggccgacgtgctgcaaccgtacatcgacaaaggcacggtgcccacgttcatcaaccaggtgctggcaccctacgcgatggcgtggcggatcatcgcgcgccccagcgataccgtactgcccgccgaggtgcgtagccggcttgagggattggacgattaccgcagccacgagtggaagcccgtggccatgtgggcgttggtcaattcgtatcgcgggctgggcgacgccgatttgtcgccgttcgtggttcgtgcctcgcgtaccgacagaaccacggccacgctggaatcgttgggtgcccatgacgagcgtcggctgttggaaattctgaccgcattggaacaggtgacgggcatccgtacgctgaatcgcactggagcgttggagcggcgcggttatgcgaacgccgccatccgtgatcttgacaagggctatttggtccagcgcgtgaacgggttgcatgtctcggacggcgaccgtgaaggcgcattggtccgtttgcatggcgagatgcagggtgacggcgatttggtccgtctgctgctgattcgcgccaacgagcagaaggccggcatgcagttggatcgaccacgccggttcagtgcgctgccgattatgccgttggatatcgaacggtcgaaatcgtttgcggactggccgcaggatcagcatgatttctggatgtaccgactcggcaatatggcgctggtgcagggccctgaggatcagttggacaggttgagtgaatatccggcacgtcgcgaccgcatgctgttgcgcgcggattcgcgccgtttcccgctgaccaatcagttgaaggatttcgctgactgcacacctgccctgctggaggcgcggcaggaagagtcggtccgactcatcgtggaatactggggcatccggtatgacaaggacgcccgtgatctgaccaagcagaatgtcgatgagttgtcgaagacctctccacggccgtctcatagttcgcggcgcgtcacgatccggcaggtgattgacgctggtctgctggtgccgggcgagcgtctggtgtgggagcggccgcgcaagggcgagcgctggttcgccacggtcaccgaaaacggtcgtctccgtctggatgacggctccgaatatccgactccgaccgccgcggcccgtgccgccgccggaggacgtcgcggcggtggtctggacgtgtggaagcgcacgcgcaacggtcagaagctcagcgacatctggaagcagttccgtctacaggcgcagtaggctacagtagccggcacatcattggtggctcccctccgtgaggggagccacacgctcatttattccagcgccgccacgatttcagccggtgttttgcaatattcgggaaaatgactgattaattcggcatccgatgtgaccacacagttggcaccggattgttgcgcggcaacgatgatcagatcatcttcaaaatcccgatgccgtttttgcagggaaaaagccctatcacatgtcgactcatcgacagcgacgatgtcacacatctccttcacctgctcgatacaacgccatggcacccgtgacgacagaaagccgcgagtgaaattctccacttccgattcattcggtttgaattcgctacgaatcgccgatgatgataggtatgcgatatccttcagcgacagtgacgcgcacaacaacgtaacgttgttcttcgcgccaagttccataaccgcttccgccatcttggcgtgatcatcgcgatggagcaaatagtccaacagtacattagtatcaagcaaaatacgctgcatggaaacgtcggtcatcaatcggccctcttcatgttgtaatacgcatcaagttgctcgtcgtacattttgtcgcggaactgcttgtaggtaaggccttccatgaggtcggtgtcttctgagatcagtccggccttgaccagttccttgtgcacgtatccggcaccttctcgaatcagtttcagcttgcgctgcttttcctcctcgcgggcttgctcttcggcggtcgtttccaatgccggcacttccttgcggtcggcgatgtataaccacagcgaccggattacgtcactcaccgatacgcctttgcccttgaggacttcttcgacctcgttcttcagtttcgcatcaatgcgaacgttcatttggaccatggtcatggcaacctccatttcgaagatgctatacagtatagcattttggcatgcgtggaaaaggccggtatccgttggcggataccggccttgctcccctcagtcagcttcgctgacagctcccctcaagagaggggagccaagaaggtggttacttcatgaggttgcgcagcacgtactggaggatgccgccattacggtagtagtcggcctcaccgggcgtgtcgatgcggaccaccgcgtcgaactcggtcttggagccgtcctcgtgggtggcggtgacgtggaccgtcttgggggtcacgccctcgttgagcttctcgacgccggcgatatcgtaggtctcggtgccgttgaggcccagggactcataggattcgcctgccgggaactgcagcggcagcacgcccatgccgatcaggttggagcggtggatgcgctcgaagctttcggtgatcacggccttgacgccgagcatcaccgtgcccttggcggcccagtcgcgcgaggagccggtgccgtattccttgccggcgagcaccacgagcggcaccttgttgtcgatgtagtcgcgggaggcttcgaagatcgtggtcggcttcttggcgaggaagtcgtaggtgaagccgccaggcgtcacctcctcgcccacggaggcgagcagctggttgcgcagacggatgttgccgaacgtgccgcgcaccatgatctcgtggttgcctcggcgagaaccgtaagagttgaagttcttcggctccacgccgcgctcggtcaggtacttgccggccgggctggaggccttgaacgcgcctgccggggagatgtggtcggtggtgaccgagtcgcccaggagggccagcacacgggcgccgtggatatcggcgaccgggtccggcgtggccttcatgccgtcgaagaaggtctgcttgcgcacataggtggacttgtcgttccacgcgaacagctcgccttccggcacgtcgaggcccttccagcggtggtcgccgtcgaacacggaggcgtagtccttgaggaacatctcgcggctcacgctgccgtcgaccacggcggcgacctcggagttggtgggccagatgtccttcaagtacacgtcgttgccgtccgcgtcggtgccgagcggctgggtctcgaagtcgaagtccatcgtgccggcgagcgcgtaggcgatgacccgcggcggggaggccagggagttcatcttgtcgtccgggctgatgcggccttcgaagttgcggttgccggaaagcacggcggtgacggtcaggtcgttggcgttgatcgcctcggaaatctcgggcagcagcgggccggagttgccgatgcaggtggcgcagccgaagccgacaagctggtagccgagtgcatcgaggtcgtcctgcagccccgcggccttgaggtagtcggccacgacctgcgagccgggagccagcgaggtcttgacccagggcttgggcttaaggcccctggcatgtgcgttgcgggcgatcaggccggcggcgatcatcacggacgggttggaggtgttggtgcatgaggtgatcgaggcgatggccacgtcgccgttttcgatgtcgaaatcgccacggaagtcggtggacacggccaccggatccttgacggtcttctcggtctcgtaggcgggggcggtcttctcgaacatgctcttggcttcggacagcagaatgcggtcctgcgggcgcttcgggccagcgatggacggcaccacggtaccgaggtcgagttcctcgtattcggagtactgcggttccacgtaatccgggtcggaagcgtcgccccacagcttgttggccttggcgtaggcttcgaccagggcgacctgctcttcggagcggccggtcaggcgcaggtagtcgagcgtgacattgtcaatcgggaagatgccgcaggtggagccgaactcggggcccatgttgccgatggtggcgcggttggccagcggcacggaggcgatgccttcgccgtagaattccacgaacttaccgaccacgccgtgcttgcggagcatgtcggtgatggtcaggaccacatcggtggcggtaacgccctccgggatggagccggtgagcttgaagccgaccacgcgcggcacgagcatggagatcggctggccgagcatggcggcctcggcttcaatgccgccgacgccccagccgagcacgcccagaccattttcggtggtggtgtgcgagtcggtgcccacgcaggagtcgaggtaggcgagcgtgttgccgttggcctcggccttgctcatgaccaccttggccaagtattcgatgttgacctggtggataatgccggttcccggcggcaccacgcggaagttcttgaatgcctgctgaccccagcgcaggaactggtagcgttcgccgttgcgctggtactcgatgtccatgttttgctggaccgcgtcggcgatgccgtacttgtcgatctgcacggagtggtcgatgaccatatcggactggacctgcgggttgatgacctccgggtcgccgccgaggtccttgaccgcgtcacgcatggtggcgaggtccacgatgcagggcacgccggtgaagtcctgcatgatcacgcgggacggcgtgaactggatttcgtggctgggttcggcgttcggatcccagtcgagcagggtcttgacgtgctcgtcggtgatgttggcaccgtcgatgttgcgcaccagattctcgaccagtaccttcagcgagtacggcagatgatcgatgccgtcgagattggcgatgttgtagtaatcgaagtccttgccggctaccttgagggtagccagctggtcgtcgcgtaaggacatgcttcctccgaaatcatgaatcggcttatgatgccgctgattatccgctacacatggtacgggcacgttaccgaggctctggcgtgtcggcttgaagtatgagacaatcgcgccgccgtctcaatgccgacgcgagagcttgcccgtcagtccgcgcacgaacggcgccagccacaggcacagcgcgaagatcagcgcggaaccggccaacgcgatcagcgtggccaccatcgtggcgccggtcggcagaatcagggcgaagaagttcgccacgaacgggacgaacgcgccgatcacgcccgccgccgcgaacaccgccaccagcacgccacgccaaccgttgagtggtctggccacgcgggccagcacgaacacgcccatcgcgaacaggatgatggcgctggtggcgcgcagggcggacaggtccgcggcatcgccggtcacgttccagcccatgaccggcggcagcacccaagcggccagcagcaccgacagcgcagtggcgatgccgcccggcagcgcgaacgtgaccacgcgcttgaggaatcccggaatatagcggcgcgtgttcggcgcgagcgccaggatgaacgcgggcatgccgatggtgagagcgccgatataggtgatatggcgcggcaggtatgggtatgggatttgcgtcagcactacaccgagcgagatcagcgcggagtacacggttttgacgaggaacaggctggccacgcgctccatattggccatgacctgacggccccgcgccacgacgtccggcaggtgcgagaacttggaatccaccagcaccacctgggccacggctttggtggcgggtgccgcgttgcccatggcgatgccgaggtccgcctccttgatggcgagcgcgtcgttgacgccatcgccggtcatggccaccacgtggttctgcgtgtgcaacgcctgcacgatggccttcttctggtcaggcagcacgcggccgagcacatcgacgttttcgagcacgcgggccagttcgttcacgtcctcgggcagttcgcgcgcgtccatcgccaccggctcatggtcgccggtgagtttgaccctgcgggcgatggcacccacggtcactggattgtcaccggaaatcacacgacagcgcacaccctgctcacggaaccaagcgagcgtccgctcggcgtcctcgcgaatcttctcagagcacaacaccaacgccaccggctcagcctgcacatccagttgcgggtcgtccgagacattggatccctcaactgcgtccctcagtccgcttcgcggactgaggggagctgtagaccgcgcaaccagcaacacacggttgccgtcattggcatactcgttaacctgctgcaacaccgacgaatagtcaccctcaagcgcagaaataatcacctccggcgctcccatgtaccaggtctcgccggatttacgcaccgcactccatttgcgcgccgaagagaacgggacacgagactcaaccgcacctgccccatatccttgggccttgagcccggcgagtacggcttggccggtgccgttgggctgctcttcgttgcagcagtcgtagagggcctgcgtggctgcctgttccgcagccgcattggcggaatcgagcatcacgagccggttgaaggcgataccgccatcggtgatcgtgccggttttatcgaggttcagcgcgtccacgcgagccagtgtctccacggattcaagctcctgcaccagcgtattgtgacgggcgagacgcatggcggccaccgcgaagttcagcgaagtcagcagcaccaagccttcgggaatcatgcctactacgccggcgaccgcggaaaccacggcttgccgccattcgccggtggagagtgccgtgccccaaccgccgaccgtatgaatctgcgaaagaatcagcagaatacacagcggtaccacgaggaaggtcatgaatttcagaatcgtgttgatgcccttgttcaggtcggacacggttttcttgtataccttggcctgcgcggtgagcgtggcggcgtaggaatggctgccgaccgcattgaccttgaccaatgccatgccggagaccgcggtggcaccggaatacacctgctcccccaccttgtggcgcacggtacgagattcgccggtgagcatggattcgtcaagttccagtccccaggtctggatgatctgcccgtcggccggcacctgttcgccggcacggatccacagcaggtcgtcgagcacgatctcgttgtggggcacctccacgtccctgccgtcacgatgcacgaggaattcggaggccacaaggatggaaagcttatccaacgtgcgcttggccctgagttcggtgacgatgccgatgcccgtgttgatgatgatgacgaaaccgaacaccgcgtccctccaggaaccggtgatcagcaccagtaccatcgcggcgaagatgatgccgttgaacagcgtgaacacgttggctcgcacgatatcttgaaccgaacgcgaggtggatgttttcaccgcattcgattggccactttcgatacgctgcaccacttctttggaggtaagaccggttgctccgatttcaggcatttccacggctgttgttgcactcatattccccagcctaccgcgtcttgtttcgcaatccactaaggctcagggatgattcagggtgctttctcagcttcaagggcctgattcggctcaggaaacggtgactttgatctcgcgttcgtggggttcatcgcgcgtgatggtgagcacggcgtcagtaatagtcattggcctggtatcggcagtgtcgccagaatcggcactgttggtgttgaggtgaaggatgacggcgtacagcagttcatcttcgggcgcatgctttggatcaatgagagcgactggaataccggcttcacgcgcattggtcaacgtctggttccagctctcccggttggcgtcggtaacgtcgatgccgctgataaccacgattttgaccgcgcgagctacgaaatcggcaacaccctgctgtgcggtggccgcattcttgtcgacgccagtatgagcatccatactatcggcaccgttttcgctggtagtgccggcgtcagaagattcggtttcaccggatacaccatcagttgcgtttgccgagcttgcggatgtttcgagcgaggcatagtagacattgagtttgtcatcagacagcgcattgatggcggactcgtctgcggcggtgtcagtcgaccccacaaagccgactgtgacatccgtgggatgtgtggaatcgtgggcgacttccggcatgctgtcttgggtatcgccgaccgccctaccggccggcgtgcaggcggccagggacaacacagccgccatgcaggccagcaatccgagaattcgtcgtgtcatatgctcacctgtcagcgggtaaacagggccaccgtctcaacatggtgggtcatcgggtagatatcgaaggcacggatgtctttgagctcgtagccttcgccgatgagtgtcgcggtgtcgcgtgcgaggctggtgggatcacaggcgatgtagaccacgctggatgcgccggccgcggcaatctggcggcagaccttggcacgagcaccggcacgcggcggatcaagcactacgacattcggcttggccagatgcgccggcacatggtccagcgtgcgcgagacgtcacccgcgcgggcgtccacgtcgttcaggttcatggcgcgcagattgcgctgggcgttcttgacggccacacgcgcgccttcaacgctgagcatgcgggtgcgttcaccggtcattgtggccagcggcagggtgaacaggccggaaccggaatacaaatcccagattacggcgtccgccgctgactgcagctgcccgttgaccaggttgatcacgtgcgtaccgagggcgatcggcgcttggcgatgcacttgccagaaaccgttggcgtcaacctgatagtcgaaggtcgtgccgttgatggtcacctgttcggtgagcagctgggagccggcgcgcagttcgccgtccacaagtacggcgtaattgtcgtctgctgccgcggtatcgacgatctcgccgcgcggttcgggcacggaaagacgaatctgggagccgggttcaaagccgccttcccacacgtgttcgcgcttggcgacgtccagcagcgtgcgcgtggcaagcggcatggtgtcgatggccacgcggttgtgtgtgccgcgccggcgcatggatggcatgccgttgtcgtcggcaatcatttcgatgcgggtacgccaattgaggccgccggctgccttgtcgccgggcatgcgctcgatgggaacggccacgtcgatatggccgagtcggctcatctgttcggagacggtgatggccttccacttgagctggccgggcaaagagacgtgcacgagatccgcgccgcccactcccccgcccatcgccaagggaccggcaagtggccatgccggggtgactcggtcttcggacggctcgagaacctcgacgacttcgccggtccagaaccggtcgtcccggtcgtggggctcgtcaagttcgactcgcgcgagttcgtcgggcaaggcgaagcggacgaacaccacacgaccgtcgatatgggccacgcagcggccttggtcggcgtatcgttcgatacgaacttcagcttgcatcatcgtcctttccggttgcgctcggttcaagttcggcatcaacagcgacttcagtctgtatcttcctagccgcgaccttatgccggtgcatcggcgtggcaataatgaggtaactcacccaaatcgccaatgcccagaacggaatgcccatgagcaggcgggtcacgccgagtgcagccacatggttggtcagatacagcggcacctgcaccaccagccgcagcaggaacagaccgacccacaggccggtgacaatcatataggcgcgtttcagggccttgtcgtccatccagtcatggaaccatgccttgaaatgctcggtgggcaggctacggatgaattcgacgaccaaacccagtccgggcacgcgcgcaatcagcgacacggcaagcaacgcggcatagccagcattggtaatgaatccgaagatgtagtaattgcgggcctcatgagtctgccatgcccaaatcaggcagatgcctaccgccaccagaccagagaccgcgcccattaccgactggcgctgaatcagtcgcacaataacctgcaataccgccaacacggccgaaaccgcaatggtgagattcagattgctcgtggccacgaacagtacgacgaacaccacgccaggcagcatggattcgatgacgccacgcgggccaccgatggcgtcgatgacggagaaatcctcgccttcattgccggcgtcggctagagcggacaggccggtgcgtttgttgtctgccaagtctcttcctataaatcagcgaacttcggagaacatcggg

SEQ ID NO: 1327 - DNA, 28443 bp, Unknown
  R157_18m  MAG No. k141_13806
aagccgaccacgaaacaggacgcccagccctctacgacaacgctatcgacaccgactacacccactcaatcggcattcaaaaaggccaaatctaacccccgcgacacgccgagccagacacacattttgacccttaacccgccgaacatgatggagaagatcggcagatcacggccgcgcgacttataggcgctttcgaattcgtcctgatgatcggagttggagcggccgtcggtcatgagcacgatggcggtggtgtattgcgaggcttccgactcgctgggcagctcgtcgagcgcgctcagcaggccttcatagatatcggtgccgccgctggcatcggtggcatcggcctcatgcagcaggtcgctggtgcttgtgccagtggccttgaccgggcggtgggcctcggtttcaaacgggatgagaatgttcacgtcgccgctggcgggctcgatgtacgacttcttggcctggtccgggtcgagcgccgcgttcaggcctttgaccacgccgttcttgccctctccagacatcgaaccggagtaatcgaccacccaaatggtccagctgggcttcctgagcgcggtctggtagacgttgagcgcgctgtcgatcaccgtggcggaggtcatggagaacgtgagtttgccgtcgctgaccgcggcgaggatgtccgcggtggagacgggcttggtggcgccggagtcgtcagcccagccgagtttgacggccttggatttggcgatgccgaacacgatcggcgtggtggaggtgctggccgcgtctttgacgatgtgcttggtgtctcccatcgaaatccacatcgaggaggcaggccagacggcgtcgtgatcctggccgccggccttgagcgcgttcataatctccagcgaacccatgtagtgcatcgtcacggctacgttggattggtcggccgctttctggatggcagtggcgacttccttgttctcggagccggaggcaatgctcagggtggcggtcggtttgccgccggacggctggaaggtctgcgtggtggcggacgtgccgttgccgtccgctgtgccgtcatcggaattattgaacgccgtgcaaccggtcaacgcgagcacgccggcacatgccgcggccgcaaccgcggcggcgcggcggcggagagaagacattatgcccataattccatggctctcccgccatctaaagcgggccgggccacaaggtgaccgcacggtgaacaatgggtgaagagctacatcagtacgcggcgcaggcaatcatggggtcgtcgtagaagccgaggatcttttcgaggtagggcttgtaagtgctgttgggcatggagaagatttcgtggcgcgattcggggaagcgcacgatgttcgcctcgccgccgccgtccttgaccagttggacgaagtgattctgcggcttattgagtacccagatgtcgcgtccggactggaagagcagcaccggcgtctccacttcggcgcaggcggacggattcagtatggcccggttgagcttcaacgcctggcgcacccattcgaacgccgcgcagtaggtctggtattcgctattctcgcaacgcagcttgaagtaccagcgttcacgcgcctcggaagcgccctcgttgccttccatcgagaactccggcgtgaagtccgactgcccgaacacacgcttcttgccgaagccgagtccgcacagcgcgccgaccagcacacgggccacgcccagcggcatgccggtggcgggggcgaccatcggggcggagagcaccgctttgtcgaacagggtggggtatcgctccaacacggccgcgccgatgccgccgcccatcgaatggcagaacaggttcagcggcatgccggccgcgtactgctggccgatggtttcggcgaagccggccagatcggccacgtagcgctgccagtcatcaatccacaccatgcagcggttgtccacgtcgcgcgcggacttgccgtggccgcgatgctcgagtacacacaccgagtagccggcaagcaggaagtaccagacgagctcgtcgtacttttcggcgaactcggtgaagccgtggctgatgacgatggccccgcggaaggtggcggtggcgccttgctcgcgaatcgcgtcgaatttggcggagtcgtagcacaggtagtgcagctggcccgagcggccgccggtgtccataatgccggacagcggctcgatcccggccgaacgttcggcggcggacggatcgaaccagccctcctcgcagcattgttcgagcgcgggcagcaccacgtcggtcatcgtttcggcgtacttgttttcgtcgatcatcgtcacctgcatggctcccatcttaggacaagcctcacgcccacacctcgcacccacaccacgacacattcccgggaatgcgtcgcaagcctgcgcgccactgaccgcacaggcgcgtaggttgtgaggtatgagcgaaaccaatgatgtcaatgacgcaatcaagcatttcccacgcctccgggcgcgcacgctgcgcttcggctgcggcgcaccgcgctccgcacagaccgtgggcgacggctcgcgggccctgttcctgcgctccgacggccccgaggatctggtgaccgcactgtggctgagctggttcgacgagtccggcgaacaccatgagaccaagctggccgacccgcgcgaactgctgggcgcaaccgccgacagcgaggacgtgccggccgaggagaaggcccgccgcgagcgtgcgcgcgaaggcggcaccggcatcgtcggatactccgcagatgacgacggcaatcgcatcgtgttcaccatcaacggccgcctgttcctgaccgacatcgattggaatgacgagaccggcgcacccgagccgcacacccgtgaactggccggcgaatggctcgatgaggacccggcgatgtacacgccggtgctgaacccgcgcatcgccccggatggcgagcatgtgctgtacaccacgggcagctacctgatgctggtcgatatcggcggcgagctgggtgaccgcatcaccgcggtctacggcgtgagcgtggaggatgaggacggcaatccggccgaaaacacgtggaaaatcggtctggccgagttcgtggccggcgaggagatggaccgttacgacggtttctggtgggccccggattcgcagcatgtgctgttcgaatccttcgacaccgccgacgagccgacctggtacatcagcgatccggccgaccccgagaagccggccgccggccgccgctacccgcgcgcgctgacccgcaacgccgacgtgtacctgaccgtgatcacgctggcgttcgatgagaacgaccggtacgcgggcatcaccggcaacgctgatgtggattgggatcgcgaggcgtacgagtatgtggccgccgtgagctggcgtcgcggccacgatccgctggtgctggtgcagaaccgccgccagacccgcgaccaggtgctcgaggtggcggtcgcggcggatggggccgcgctgggcgccacgcgtgtgcttgaggagcacgcgaacgagcagtggatcgacttggttcacggcacgcccgcctacacgccggatggccggctggtgtgcccgctcaacgacatggccgcggacaccaaccgtctgacggtggacggccgaccgttcacgccggccgggtggaacgtgcgcgcggtgctcgacgtgaccgacgacgacgtgctggccgtggtgcagcgcgcgcccgaaatcgcgcctgaggtgccggacgcttgggccgatgcggccgccaccgagtccgtattcggcgaccacgacgcccgcagtttcgacgtggtgagtatcgattacaacggcacgatcacgccggtcacgaccgatcccggccagtggaccgcctcgcgcggcgagcgcggcatcgtggtctccggccgcgatatgcgttccgcccgcgcccagatgcggcatattctgggagaacagagcgccactatcgcgtccacggcggccgaacccggctttacaccgaacgtcacgtttacgcgactgggcgagcaccagctgtacacggcgatcatcgcgccgagcccggaaagcccgtacgcgcacgccgagaagctgccggtgctgatgaagccgtacggcgggcccggcttccagcaggtcatcgcctcgcagtccttctactgggagggccagtggtgggccgaccaaggcttcctggtggtcacggcagacggccgtggcaccaccggccgcggcccggcatgggaccgcgagatcttcgaggatatgaaggacgtaacactggccgatcaggtcgaggccgtcaacgccctgcccgaggccgtcgcccggctcaacgccgatgtggaatcacgtgcggcacagccggctgcgggcgatcaggcagacgccgagaaccacccaccggcgcttcgcgccacctcccgccagcgggaggcgattcccatgccggacctcgacaaggtgtgtatgatcggctggtcgtacggcggcttcctgtccgcactggccgtgctggacgcgccgaacgtgttcaaggccgcatgcgccggcgccccgcccaccgactggacgctgtacgacacgcactacaccgagcgctatctgggcctcgacccggatgtctactaccgaaacggcatcgtgcaggacgcaccgaaactcgagcgcccgcttatgctgatccacggtttcgccgacgacaacgtcaccatcgcccacagcctgcgcctctcgcaagccctgatggcggcgggtcgcccgcacaccttcctgtcgttgacgggcatcacccatatgaccaatgacgagaccgtggccgaaaacctgctcaccctccagcgcgatttcctgcgcgacgcgctggcctgacaaatcgataacacgcgcatcccacccgaggtgctccaccggtaaagcacctcgggtggtgcgccgcacccatttccgccctgaatttttggatattttgcactcatcgtcacgtgaaagaccggttttttgtctcatattcccatcaccgcgtaggatgggtgaagattagaaagggaggactatgagcgttctcgaccgttttgaaaaaagcgtggagggtgcagtcaacggagtattcgccaagtttggctccaaagacctgcagcctgtcgatctttccagcgccttggagcgcgagattgacgccgaggccatgcccgtgggccgtgaccgcacggtggccccgaatgaataccgtttcaagctcagtactcctgacttcgaccgtatcgaggcatggggtagcgagaccctggccaacgaactggccgataacctcaccgagtacgcgaagagccagcattacgccttcgtgggcccggtgatcgtgatcttcgaggaagaccttgacctgtccaagggcaacttcaacctcacctccgaatccgtgcagggcaatgccgtgccggtcaccaccgatgcgcagaccgaggatagcccggtgctcgaggtgaacggcaaccagtacctgctcaccaaagacaagacggtaatcggccgcggttccggttgcgatatcgtcatcgacgatccgggcatctcccgcaagcacctggaaatcgacatcacggataacggcgtgatcgcccgcgacctgggttcgaccaacggcacgtacgtggagggccaccaagtgcccgccgccacgctgctcgacggcaacaccatcaccatcggccgtacccgcatcctgtactgggcctccgcccaagcccaggagtagtcgagcacacgcccgaaagtcgtccacttatgaccgaactgacattcgccctgctcaagtatggattcctgatcctgctgtggatattcatctggctggccgtacgttcgctgcgcaaggacatcgagacgttcagtccgcgaccttcgcgcgcgcgtcgtcgccgtgagcgtgaagtgcataaggccaaggccgaaacgccgcaggcagctgcgccgcgcccgcatcgccagcccagcgcttccgcgtcgtccgccgcctcggcgcagcctaccctgttggtcatcatcgatggtccgcttgccggcagctccgtgccgctggccgaagccgacatcacgcttggccgcgccgcctcgaacaccgtggtgctcgatgacgaattcgtgtcttcccaccatgcccgtgtctaccgtgacacgcgctccgggcagtgggccattgaagacctgaactccaccaatggcaccgtggtcaaccagcagcgcatcaaccgccccaccattctgcccgctcgtattcctgtgcgcatcggcgccaccaccttcgaactgaggtagccgcatgccaaaatccgccgcttcacaaccgctgttcctgtattccaccacggtgtccgatgtgggcaccgtgcgcgcgaacaatcaggattcctccttcgccggcgagcatctcatcgccatgtgcgacggcatgggcggtcacgccggcggcgatacggcatcctccatcgccatccggtcactggcccacatcgagcaggacgacaccggtggcaacgtcgagacgatctcccgcatgatggagacctccgttatggccgcgcatgacgccatcgtcggcaaggccaagcgcgaacgcaagcttgccggcatgggcaccaccgttaccgcagtggcattggtggccggctactgggtcatcgcccatatcggcgattcgcgcgcctacctgctgcgcgacggacacctgagccgcatcacgtgcgaccacagctacgtgcagcacctcatcaacaccggtcgtatcaccccgtccgaagccaagaaccacccgcagcgcaacgtcgtgatgcgcgtgcttggcgactttgacattgacccgcgcccggatatttcgattcgccgagcccaccccgccgaccgttggctgctgtgctcggacggtctgtgcggtgtgctggaagattccaccatcgaagagacgatgaccacgctgtccgatcagggcgaatgcgcgcagcgtctggtgcagatggcactgcgggcgggcagcaccgataatgtcacggccgttattgcggatgccacgttggcgttggatgccgatgcgttcgatctgccgcaccaaacgccgttggtcggcggtgccgccagccgtaatcttgagccgattgccgacatcgtcaacgagccggtggctaccgcgcccgcactgcgggaggatgattcccccgcccagcgcgccgcagcattgattcagcccgccagcgcgcacgaggcggagaccgcgcaaaccacggccaaaccgtcgtccacacgcgtggtgcagccgtccaccgtccgcgaggagaccggtgaacgagccaatcccgataccggtgagattccggtggtgcaaaagccggatgggcgcctgtccgccgaccccaacgacccggatgtggccaaagccatccgcgatgagcaggtcgagcagaagaaggccacgcgtaccaagaagcgccgcaataagcttgcggtgattattacctgcattcttgccgtgctggcattggccggcgctggctggggcgcgtacacgtggagccagacgcactactacgtgggagatagcaacggcaccgtggccatttatcgtggcgtgccgaccaatctctttggacttgagctttcgcacgaagtgcagaccaccaatatcgccaccgcggacctgcctcagacatggcgtgaccagctgagccaaggcatcacagtcggttcgttggacgaagcgcagtcgcatgtgggtattatccgcaccgaaatgcgcaaactggccaagcagcaggaagccgacgccgccaagaaggccgaggcgtccaattccccggacagttccaaagacagctcccagagcgattccaaggacagcaccgaggattcgtccagccagtccggctcctcgtcagacaagtccggttcgtcaagctcatccgattcctcggataaatccggtatcggagcggccgacaacgcggccacgggagattctcaatgatcgttacccgtctacgtcagatttctttgttgctgattgccatggcaatcagtgcgttggcgttcatccagatgttccagcgcaccgccggcgaattccctatgcaatacgccggcatgctggcattggccgtagtgctgtttctggtgctgtgggggctgattgtgcgcttccagccgtacgccagccagtcgattctgccttgcgtgctactgctgaccgccaccggcgtgaccatgatcgctcgcattgaccagagcgaaggttgggcggttgcccaacgtcagctgatctggctgtgcatcgccatcgtgctttccgcgctgctcatcatcttcctgaaggactaccgcgtgctgcggcgcttctcctacgtgtcgatggtggtgggcttggtgctgctgctcgccccgatgctgccgtttgtcggtcaggaagtgaacggcgcgcgcatttggatcaggattccgggactgggccagttccagccgggcgagttcgccaagctgttccttgcgttcttcttcgccgcctacctgttcgaccatcgcgaccagctggccgtgggcggtaagaagatgctcggtctgcagctgccgcgtatcaaggatctcggcccgatcatcgtggtgtggatcgcctcgatgggcgtgctcatcatgcagcatgatctgggcacctcgcttatgttcttcgccatgttcgtggccatgctgtacacggccaccggccgtaaaagctggatcatcatcggtctgatcgcgttcgccgcgggtgccgtgctggccgcaggcatgttcagccacgtgggtcagcgagtcgatgcctggctgcacccgttcagcaacgagcaatacaacaagacccccggcggctcctggcagctggtcaccggcattttcggcctggcatcaggcggcatgctcggcaccggtctcggccaaggccatccttcgctcgttacgtttgcgaactccgatttcatctacgcctctctgggcgaggaactcggtctgatgggcgtcctggccattttgatgctctacctgctcatcattgcctccggctttatcaccgccatgaaaatcaaggatggcttcggcaagctgctcgcttccggactggtgttcaccatggccttccaagtgttcaccgtggtcggcggcatcacgctggtgattcctctgaccggtctgaccctgccctatatggcggccggcggctccagtctgatcgccaactatattctcgcgaccctgctcatcatcatctcgaactcggccaatgcgcccgagccggaactgacctcggatacgttccagtacgaggctttggccgtgctgcgcaacaaggaacttgaggcccgagcccgcgccactgagccgatcgttcagcctcgcagcgcgtcggctacggcgtcgcagtccgaggcggaatcgtttgacgaccccattgtggacatcaccaagcacgcgccagacacacttgaggcacccgaagtgcccgcaattgtgacctctgcgggctctgctgcggcccccatcgccgagcctattgtggatgccaccactccggcgtatgccggcgccgatgaaccgtacacgcctaccggtacgattcccccgcttcctcccgttaacggaggcactcgcgtatgaacaaatatcttcgtcagcttttcaccgccgtggtcgcgctgttcgtgattcttggcctgtcgtccaccatcatcatggcggtacgggccaacgcgctgaacaacgatccgcgcaacgcccgttcgctgtaccaccagctcggtgcctaccgcggtgccattctggcctcggacggcacggtcatggccaaatccgaaccggtcaacgacgcgttcaaatacctgcgcacctattccaacggtccgctgtatgctccggtcaccggcttcttctccatcaaccagaccgccgatcgcggcctggaagcctcccgcagcatgctgctcaacggtgaggccgattcattgatctggcagcgggccaaggccatgctcaccggcactacgaatcagggcgcgtccatcgaaacctccatcgaccccaagctgcagcaggttgcctacgatcagctcggtacgcgcgatggtgcggcggtggccatcgaagtcaacaccggccgtatcctcgccatggtgagcacgcccagctacgatccgaacaaactggcgacccatgacgccaaagccgcgtctcaggcctacaacgaactctctgcgggccaaaatagcccgctaatcaaccgcgccacctcgcagctgtacccgccagggtccacgttcaagaccatcgtcgcctcggctgcgctggaaaccggcgattatcagacggacacgaagattcctgcaggctccagctataccttgccgggaaccgccacacagctgccgaacgacgaggcacagggcgatggcgtcaacggacagatctccctgcaagaggccgtcgcatggtcgtccaacaccgctttcgcccagcttggcgtgaaactcggcgcgagcaaggtttcggacatggccgccaagctcgggttcggcagcaccatcaccattgacggcaccgaatccacgggcaccccgatgacggccaccgcgtccacattcccctctgatccgaccgacgacaagcttgcgctggcatccatcggccaaggcgacaccacggccacgccgttgcagatggcgatggtcgcgcaggcaatcgccaacaatggcaaactgatgcagcccacgctggtcgatcgtgtgcgcgccgccgatctcaccgtactttcgcagaccaaaccgcaaaccatggccaacgcgttcagcaaggattccgcagacaagctcaccacgatgatggagagcgtggtgaccgaggccaatccgcagctggtcgacggcatcaaggtggcggccaaaaccggtaccgcacaaatcggtatcgacaactctgccatcgacggctgggtgatcggtttcgcgccggcggacaatccgcagatcgccgtcgcggtgttggtgcataacacagatgtacacggttcgctcgccgctggcccgatcatgcgcgcgatgatgcaggaggctttgcagcagtgaaacttatcgaaggacagcttattcaccgccgatatcgtcttgattcgcgtcttgcgcaaggcggtatgggcgaggtctggaaaggctacgatattcagctcggacgtgaagtggccatcaaggcgctgcgctcggacgtgaccaacgccgaggccaagctgcgccgcctgcgtgccgaagcccataattccgccaatctggcgcacccgaacatcgctgcgttgttcgaatactacgagcatgacggcatcggctttctgattatggaatacgtcccctcgaaatcgttggcggatctgttccatagcaagggcgcgatggatcccatcgaactgctgcccattctgattcagaccgcgcgaggcctattcgtggcccactcgcacggcgtgattcatcgtgacgtcaagccggccaacatcatggtttccgacaccggcgaagtgaagatcaccgatttcggcgtgagctactccaccggccaaggccagatcacccaggacggcatggtggtgggcaccgcacaatacatctcccccgagcaggcgcagggccagcaggccacgccgcaatcggacatctattcactgggcgtagtggcgtacgagggccttgccgggcatcgtccgttcaccggcaccactccggtcgatatcgccgcagcgcacgtgaacaatcccgtgcctccgctgccgaactcggtggacgtccagttacgcgaatttgtcatgtcgatgctggccaaggacccgttggatcgcccgaaagacgcgctggtggtgtcccgtacgctggcacgcatcgaacgccgtctgctggatcagcagaccgaaatggccgacaccgccatggccacgtccggcaatcgactgccgcgccgagtgaccagcacgccacgcattgttttggaggccccggcctcaagattgggagggaataagcaatgagcaccagtatgcccaccgcattggccggcggacgctaccagcttggccagctcatcggtcgtggcggcatggccgaggtccacgtggctcttgacacccgtctgggccgtaccgtggccgtgaaaatcatgcgcgccgatctggccaacgacgacatcttcctggcccgtttccgccgcgaagcacacgccgtggcccagatgaacaacccgaacatcgtgaacatctacgattcgggcgaagaactggcttcttccgaaagcggcgataccgagcgtttgccgtacatcgtcatggaatacgtcaagggccagaccctgcgcgacatcatcaaggtcaacggcgcactcagccagcgcgactgcgaacaggtgatgttgggcgtgcttaacgcgctcgactattcgcatcgcatgggcattatccaccgcgatatcaagcccggcaacatcatgatttccgagcagggcgcggtcaaggtcatggacttcggcatcgcccgcgctctggacgattccgcaaccaccatgacccagtcgcagggcgtggtgggcaccgcacagtacctttctcccgagcaggcgcgcggcgagaccgtcgacatgcgttccgacctgtattccgccggctgcgtgctctacgagatgcttaccgggcgcccgccgtttaccggcgattccgctgtggccatcgcctaccagcatgtctccgaagtcgccacgccgccatccgccgtggtgccggggctgccgaagatgtgggattcaatctgcgccaaggccatggccaaggaccgccagaaccgctacgccacggcctccgaattcaagaccgacatcctgacctacatgaacggcggcgtgccggtggcagccgcgttcaacccattgacggacctgtcgaatatgaaggcccgcaaggaagccgaacgtgatttgcccaccacgccggtggaaccgcagcagcagcccacccaggcattcaacccggtgaccggtcagttcgagcagattccaccggccaatggtgccaactcagcggcgttgcagtcccgtgcgcagcagcgtgcggcggcggccaaggccaagaagcgcaagaagatcatcatcggttcggcgatcgcggcgattgtcgcggtgctcgtcattgtgggcatcatgttcgccatgaacggctccggcaacaagtcctctgaagacaccgtcaccatccctgaagtgtgcaacgcttccacgtccaaggacaacatcaagctcaagcttgagagattgggcttgaagatgaccgaaaagcaagacaccgactccaccgagccggaaggcacctgcaccaagatgagcccggacgccggctccaaggtggccaggggatctgccgtgaaggtgtggttctccgcaggcccgcagtccactcaggttccggatgtcaaggagcgcagccaggaagaggcgcgcagcattctggaaagcgccgggttcaaggtgaacgccaccgtcaaaaccgaagacagcgccgacatcgccaaggatatggtgacgagaaccgatcctgccgccggtcagtcggttcccaagggcaccaccatcaccatatatgtttcttccggcatgaccaccgtaccgagcaatttggtcggtcagtcgaaggacagcgtgctacagcagtatgagggcaagttcagcttcaccgtggagcaggaaagctccgatacggtggaggccggtctgattacccgcgtaagccccgattcgggctcttccatcgcgcagggcgggtccatcaccatctgggtgtccacgggcaaggaaaaggtcgctgtaccgaatatcaccgctggcactgactacgccaccgccgaactcatgctcaaggccgtgggcctcaaggctcaggccagtggcccaaccgacagcaccgctgtggtagtcagcatcaatcctggcgctggcagccaagtagatgcgggatcgaccgtcaccattaccacgaaggccggcagcaccggaggcgacaccggtaccggagacggtggcaacggcaacggtgccaacaacggcaacggggggcggaacccgtgagtgagtgagcgccgggcgtgtgtgttgcgcatacgcaacgcacatagcgcaacacatgcgcaacgtaaacacgcaacgcaatcacacaacgcaatcacacaacgcaatcacacaacgcaaaggggaggggcttctgcacccctcccctttgctgtataaagagctatcccagcgcaacattcccgggaaagcgtcgccgcgcgcggaaaagctacttcgtaaccttgggctgaaggccggcggacttggccacggcgttgtcttggccgcagaccttaagccagttggccagcagacggtagccgtcctgggtcatcacggattcgggatggaattgcacggcgtacatcggcttgcccttgaccttgatgccctgaataatgtggtcgccctgcgtccacgcggtaaccaccagcgtatccggcaccgaatcgggctcgacggccaacgaatggtagcgggtggcggtcatggggttggccacgccctcgaaaatctcgtcatcgatatgttccaccaagctggtcttgccatgcatgatggtgggcgcatggcccacagtgcagccatacacctcggcgagcgcctgcaagcccaggcacacaccaaacatcggcacgccgctggccgcgcacaggcgaatcatatcctcactggcaccggattcggccggagcgccagggccgggagaaatcagcacgccatcgtaaccgtccagtacacccggcgcggctgggtcgatagcgtcgttacgcaccacatcaacagtggcgccaagggtttgcagatagcctacgatcgtgtagacgaaggaatcgtagttatccaccaccaaaatatgcgcggaatcggtcatagggctctccttgagggacgtgtactgcaagctatagtactaggctgccgtcagctcactgccacgaagttcgacatctgctgtaggaatgggatattggcggcggcccaagggaatccccactggaacagcgccgcggcggctgcgaacagcagcagagccagcagcagccatcgaatcggtgccacgccgggctgcaggcgcaacagtccgccatagatgctgacatccgggcggcgacgctcacccgcgcgaatctcgcgcagcaccggccagcgccatgccaccgcagcggcgatgaacagaaccagccacactaccagcgcgccgaataccaccttgtccagcgagccaatgcgggaagcgatcgagggggtttcggtggtggagaacttcactgcaccggacgaatcagtagtagccagctctttgggcacgccatcagacactttggtccagtacgccaactcaccatagctgatccatcgatgggtgggggtggagtatttcggctcacaggtagtcagtgtgatcatgcgtttggtgggattggcagtggagtcttccggattgggcgcgatcacatacacgtccgtgggcagcacaatctcgtaccgggtgtagtggtagacgtaccagtaatccttggtacgaacgatgatgggatcgccttcctgcaacttgtccacatcgcccaacggctgcccgtagccgttgcggtggccggcgacggcgaagttgccgacctgccccggcatctgggtggtgtcgtaatggcccagaccgtggcgattgagctgctcgagcgtggtgccttccacgatgttgcggtgccattgggagccgaagcgcggaatgtagatctgcgcaatcaagtcgccatatttcgcgtctttcggctgtactggagcatcgccctcctgggctttggcgatggtgaccgttcccccgttgttgctggggtcgctccagtcgacggactgggtggtttcgttctgggctcgctccgcctcgacaccggtccaccacatctgccagacgatgtacagggcgcaaatcacggcagcggtaatcagcagttcggcgcagatgccgagtgcctgccagatcaggctccgctggggcgaagacgcgccgcgtactgcggcacgacgggaccttgccctgctggcattggccgggtctgccgccattcgtgcggcgtcgtcctcggggaagggctgtacgtccgacacggacgcgagatcaatgggcgccggtgcgccgctgttgtgcctgccgtgtctcattgctgagtctgctcctcatctgtggtctttgacgtatcgaccgtggcatatttcaactgctgcagcaaggcggcggtaccggggaactgaaggccctcggcattctccaccttgtagccaatgccaaacgcggtcacatattgcttaagaatggtaatggcttcggagtcgttcaacgctgcgcgaagtctttgcgggtcaccaatcgcggaaatggtgaatggcggcgagtatttcttaccgtgcaacgacagcacgttgccggaacagatgaccgccgaattgaacagcacccgctgatccataatcatcagcgcatcggcaccgccggcccacaaggcattcaccaccgattcgacgtcctgctgatgaatcacgtaatcgttgatattggcggtcgtgccattgttgttgacggcgttctcccataacggagaatcatccagcgttaccgttacgccgctgccgctgagcgcgggcagcatcaggctggaatccacattgctggagtccttgccttggttctgcgtgctgtcagtaccgtcggtgccatcggccttgagcgcgtccgtaagattggcgacctgttcggtcagatcgctgacgtcctgctgcagctggttggcctcgtccacgccttgctccaccagatcggccgtatcgttggtggcggcaaccgtacgattgaccctcacgttggtgctcagcagaaaaccggtcaaggcaatgacgacgaataccgcgacaccaccccatagggagtgccgtgcgccgtgcttacctacatgtctggccatgaatttcctgtcttcttgccgactctggtcgccgctttcgagtgtagccactattatgacttttagcctattgaatggagactatgctgatggctgacgaagagctgcacgagaccgactcgaacaaccagaaggactggcagagcgagacctcatccagcaccgctgctgacgagaccgccaacaaagacaccgagcagaacgcagagaacgcttctgccgaggaagacgcggcttacggcgtgaatatggagcaggtgcaggccgtgctcaacgccactgccgataaggccacgctgaccccgcagatgcagcgcatgatgaaccgtcaggcggagaacaccaagcgtgttgaagaaaccattaagggcaccaagtcgaacccgcgttggttcgtgccgctgttctgcgcgtttatgatcatcggcctgatttggtgtgtggtgtactacctctccccgtccggctcctggccgattccgaacatcggcgcgtggaacctgggcatcggcttcgccctgatcatgatcggattcctgatgacgatgggatggcgctgagttccgactcgttgcgcttatctatcggtagatcgttttttctatcgttaggttgttcttagttcttatgcgaaaggccgacctcccgtatgcggaggccggcctttttcgtgccttcacctgttcatccacagctatccaccacttatccacgacttatccacgacttatccactacgttatccacagcctgtggatgaatcacacccatgtagttttccaccgaatgtggaaaaccatgtggataagtggtggataagcggcgtttctcggtgtatatctcgtgcataactttggcttggcatacatcgccacagcgagggaacagttatacacccgagttatccactgcaacaaacccagtaataccgcggcattcctaacttatccacataagttatccacagtcttatgcacttttctacacacttgtgcacaagtcaccattgtggataactcgttatcgtggataactcgtcattgcgcgcatctcattactgtggatatcttcattactgtggataccttcatacagcgcatgcccactcaccgaatgacgatatccacatcgctaatatccacatcgccgctttccgtacatacactgatgccgggcactgcatgttccgcaatacccggcatcaatcgttttttacagccatatcaagccatatcagtgcagggagccgaaactcatccacccgtaaggattggccatattgcacaacagaatcaacacaacgaccagcaccaccatggcccagccgtaaacctgcatacgccatttcaggcttttacctcgccacgccggcacaccacccaccagcagccatgtgagtattccacccactacaaagccgccgacatgcgcctgccacgccacgcccccgaccacgaacggcaaggcgaagttcaccgccatccagatcaacatggagcggatatcggcgccgatacggcgatataccaccagcaatgatgcaaacaggccaaataaggctccagaagccccataggctgccatctgccagccgatgcctcccggagccaccgcagcccacaccataagtcccagagagccgccaaggccggaaatcacatacagtcccaagaaccgccagtggccgatcattcgttccagcactgggcccacggaatacagggcgatcatgttgaacaggatatgcaatagcgagttcggcgcatgcaggaacatcgaggtgatgagcgtccacggctcagccaccagtctgaccggagccgccatgccgaggtacatcaaccaagccctcaggcccggggcaataaatcccagcaatacctccagtagccacactgccacgcacgcaccaatcagcgcccaggtcatcaccggaccaccgcgctcccactggtatcgaatctcccgttgtgtaggaatatgcatgcaatccactgtatcgaaggtctcggatgcgtttcacgcgccgcgaagatgctgagccggccgagggcatgcgggcgtggatgaatcgcccacgaatgtcattccacccaatcgtcacaaacagcggcctagaatagggagcagagtcggtctgaatgggcataccgaccagacgatccctagggaaaggagccgtcatggagaacaagtcttctaacggttggaagttcttcgcgctgctgttcggcggattgctcgccgcgcttgttggcttgtacatctacaagcagcagaacccagattacgatccgtgggaggagccgtgggagaacagctcctcgccggtcgacctgggtctgaacaaggccgaggatgaggccgatggcgaggcggaagccgccccggccgaagcctgatagggcggtctttcaacgcaagaagccccgcaaccgatggatgtcggttgcggggcttcttatgttctggttcccctctccgaggggagccgccccaccgactcagtcagccagaggagcagtgcgccagatgtgcggagccgttaagcgggaagcccggcgggcttcccgtaggcgacgccgagcggcgacagccgcgaggcagaaaccagcacgtagccggcgcgctgctccggcggccgtcaggccagaggagcagtgtgccagatacgttccaaatagtcttccatggagcggtcggagctgaagtagccggagttggccacgttgagcagggccttgcggttccattcgagctcgtcggcgtagagggcttcgatctcggactggatgtccatgtaggcggagaagtcggccagggtcatgaaccagtccttggtcagccagtcggccacgagcggggagtaggcgttgcggtcgccgttggagaaggtgccgtcggccaccagatcgatggcctgcttcaggcgcggatcggcctcgtagtaggaggcgggattgtagccctcggcgtacttcttctcgacctcgtcgacggtcatgccgaacaggaagaagttctcggcgccgacgcgctcacggatctcgacgttcgcgccgtccagcgtacccacggtcagggcgccgttcagagcgaacttcatgttgccggtaccggaagcttccttgccggcctgggagatctgctcgtcaagctcggtggccgggatgaggttctgagccatctcgacgttgtagttcggcagcatgtggacggcgagcttgcccttgacggccggatcgctgctgatcacgcgggaaacgttgttgatcagctcgatggtcatcttggccaggtagtagcccggagcggccttggcaccgaagaacacggtgcgcggagtgatgtcctcggccttgaccttgccggacttgatgtcggcgtagttggagatcacggcgagaatcttcagagactggcgcttgtactcgtgcagacgcttgaccatggtgttgaacagggtgttctcgtcgatatcgatgccgtagtggtccttggcgaagcccacgaatgcgtgcttgttggccttcttgacggcggcgaacttcttgacgaactcatcgtccttggccagcggctcgaggcccttgagcagttccagatcggcgacccacttgtcggtgcccaggccctcggtgatgaggtcggacaggcgcgggttggcgagcttgacgaagcgacgcggggtcacgccgttggtcacgttggtgaacttgtccgggtagacgtcggagaagttcttgagggtgacgtccttgagcagctgggagtgcagctcggcaacgccgttgacgtgggagccgccgtaggtggccaggtaggccatgcgcacggcgtcgccggtgtagatggccatgtccttgatggtgtcggcggcaacgcccttggccttgagctcggcctcgaactgcgcgttgatcttctcgatgatctcaaggtgacgcggcagcagctcgccgatcaggctggccggccagacctcaagggcctccggcagcagggtgtggcaggtgtagttgaaggtcttggtggtgatggaccacgcggtatcccagtcgtagccgtactcatcgatgaggatgcgcatgagctcggggatgccgatcaccgggtgggtgtcgttgagctggaagacgatcttgttcgggaaggtcgtcaggtccggcttgtcctgccccgggtagaagacgcggatggcgtcgtgcagggatgcggagacgaagaagtactgctgctcgaggcgcagttccttaccgaccttggtggagtcttccgggtagagaatcttggagatgttctcggccttgacctgcggggccacggcgtccatgtactcggaacggttgaaggcgagcagatcgaactcgtcgtagctcttggcggtccacaggcgcagggtgttcacacgctgggacttgtagccgggaaccatgtagtccaccggcacggcgcgcacggaccaggccggttcccaggtcttggtgccgtcggcgttttcgacgaccttgccaccgaaggagaccttctgatcacggttgtagtcggtgtggccccacggctcttcgttggccagccagtagtccggggtttcgacctgcttgccgttctcgtcgaacttctgcttgaagatgccgtacttgtactggatgccgtagccgaaggccggcacgccgagggaggcgagggagtcgatgaagcaggcggccagacggccgaggccaccgttgccgaggcccggctcgtattcggcgtccacgatgtccttcggcttgaagccaagggcttccacagccttgtcgaactggtcggtcaggccagcgttcagcagtgcgttctccagctgcttacccatcaagaactcggcggacaggtagccgacggccttggtgttgccgttgacggtgtcggcctgggtcttgaaccaggagtcggcgaggtggttgcgcacggccttggatgcggcgacatacacgtcagcaggggtggcctgctcggcggtgacgttttgagtgtatttcagttgttcacgaatctcgtcggcgaattgttccgccgtgacaggagacttcggtgcggtgatttcggtcattctgactttccttccgggataagtgcccgtgtttattatgccgcgcgataggtatcgtcgcatagacgtaagcatgaactctccgtaacgacgatggcggagcgttcttgcatacgttctcattgagagcgtatcacatatctcacggttccgcatcctacagtatgccatcgtttgcataccttgcggtttcgcgtgccggtgccatgatggagcatatggcagtaattctcgaaaaagacttgaaacgagggcacgacgcactggtgcaatggcgtgccgcagccctggaactggccgacaacacaccacatcgcctgaccacctcccccgttctgccgcgcccggtgtgggcgatggctgtgcgctactcgctgttcctgctggagcggcgcgcgcccggccctggcgtggaggtgcgcgttgcgccgtggggtgcggtcaaaatcctggacggcccggaatcggacccgcacaacctcactccaccggacgtcatcgaactggagcccgaggtctggctacggctggcctgcggcatcaccacgtgggcagaggaaaaggacgccggccacatcagcgcggtcggagagcgcgacgatctgagcgacctgctgccgctgtaaatcgtcggatgcccggtatcggatgccctttatcagaactgtgcgatgctccaacgctggatgtgctcggcccagcggtccggcgtgggtagggtgatgaggctgcgcatcgtcagcgcgtaagcggcggcagctaccagtacggtggccagaatcaggcaggtcggaccgtagccgatggtctgcataccccagccggcgagtgccacggccacgccataggcaccgtactgcaacaccatgctgcccgctccaacgcggccgagcttgtccttgcccaccaaggtattgctgaggcctccaagcaccgcgttgcccgcgggcaatgccagtaccgagcaggccacaaatatggccttgccaactatggagggcaccaacgcggcaccggtgaatcctacagccagcaagacgaacatcacacccaccagtacgccgccgggcacacggttgaccagttgcgaggccaccagtgcgcccagcaacatgccaacggcggaggcggcgttgatggatccggcggatatcagctggctgccaccttgggagatgtccagcgcggtcagcagtaggaaggcattgctggcaccggtcaccatggccgctgcgatgatgagatggcgttggaaccggtcgcgcagcagccagatcatgccgtccagtgcgtcgcgccagcgtggggcggagtcatcggcatcatcggcgtccgagacggccccgacctccgaaccggtatcaacattgcccggacggccgctatcgctcacagtcgcacgtttccaatagcggcggatacgccatgcggacaccatgcccagcacgctcagcaccgcgctggtcaggaacggcaccgcatgtcccacggtcatcagcagaccgcccaacggcccgcctgccagcgtgaccgtcgaatccctggcgtcgttcaacgccatcgcgtgaggcagctgctcatccggcaccacgccacgcagcatggcattcgatgtattctccaacagcccatcgcgcaccgaaaacagcacgacgatacacagcagcgcgatcggaagcacgtgggcatacggtccgccgaatgccggagcgtttgccccgttaaccccatggccgctcgtcttcggcgcattgccgaacagcatcaccgctgtcgccgccaccgccgagagcaccacaccggacgcaccccagatcagcatgagcgtacggcgatcataccggtcctgaatcacgccgccggcaaggcccagcaccgtctgcaccaccacgcagatgctttccgtcgtggtggcggcggcagaggatcctgtcgtggcgagcatcatcagcggcaccgcgaacgcgatcaggctggcaccgaccgcaccggacgtgtccgcagccagccaccatccgtaatcagttccccgccataattccgtatcacttgccatcgttgccctccctgggattggtccttatggacgccaccatagggagccgccgccgagcagaacacccgcaatcctcggttatggggacatggctgcggtcgtcgtcctcatttgtgaggacagggcacaatcagcgccggacgccggacatcgcagcttctgccccatcagccccgcacgcacgggatgcgcacgtaaatcatccatacgccatcgtccgaacgggcggtcaactcaccgcccaactcctgcacatgggtgcgatgcatggccagcccacgccccgaccgctcctgcgcggacaggccactctgcgcgtcggcatcgtcacggatatcgttggtctcgcgaatctcaatccattcgggagacagggtgacgaatagcaggtaggaatcagctcccgccggtgcatggcggcggatattcgtgccgatctccgtcatcagcgacagcgcctcggccgccgcctcggggtccacgaccatgacgatgccgttgaccgcggccgtcccccgatagccctgcgcctccagaaactcctcggtatcggtgatctgcgccttcacatgcgtgacgaaggattgcggcatgcccgctgtggattgcgtacggtcatcgccaccggcgttctcgggcacggcattgtcaaccacctcattcgcaatcgctggacagctcccggcgcctaccgggtcacgagccagggcggattctttcgtcggcgaatcaacctgccctgattctgcagtcgccacctcagatgtcccggtgccaccgaccggcaaggactcgtcccggaagccggcgtccattccgctctgctcggtcagaaaatcgatgatgccatgcacttccgcaaaggcacgttggctgcgatccagcacgcgctgccagtcgccaccatcgatgccggctggcgcggccagattattccgggcgatggtcgagatatacgtcagatcgttggacagcgtgtcgtgcagttcgatcgcgagctggttgccgtggcgcagatcggccagcgccgattccatctgctcgttttcgttctcctgattcaccacgcgcttgcgccagcgcaacgcaatgcccagtaataccagcagcacgcttgccgtcaacgccgccgacgccgtgaccagccacgacccggtcaccgcatagacgatggccgccaccgcaagcacaccgatcgggccgaacatcgccagcggatgattgagttctatatcgatatcaatctgatgatgcttcttgccgtcggcgtgaccatacgaatacgacgaatgccgcgaaatgataatcggacgtttcaccggcccgctccccttatgcgccttgcgcttcttctaccgtgtccccacacacccatcggcgccttcatcagtgcaggttcatgcgaatccatgcgccgataagttccttgagattgccggcgccgagcttgtcggccgcacgcatcagatgcgtgcgcacggtggtttcggtgatggacagttcggcggcgatctgcggcatggtccggccgcgggaccacagttccgcaacctccatctcacgcgcgctcagacggttgtccttctcggccttgatgcgcgcggacgcaacggccgcggtctcgaaccgcacgtcgccaccatcgccccatattttgccggtctgcacctggcggatagccacggcctgcaatcgcacatcatcgttcttgctcatgatgccctgtgcgccggcccgggccatctcctgggcatgtcggcccacaatcgaggcggtaatggccagtatcgccgtggtcgcgttttccctgcggattgcacgcaccacatccggaccattgatgtcgttcatcgcgatatcggccaatagcacagcaggcgggtgtttggtggccgtgcacagctgaatggctttgctgccctcgctcaccggcggcaacaattcgaagtctggcagagccttcgacaaaatcgactgtaatgccatcagggccatgcggtcgttgtccatgatgagcatggtgggccttggaccatcctgcccgctgatatccggcatatgcctacgtgcgcttagctcttcttcggcttcagcgctgagggcatgggcatcggaatcggcttgcgtggggccggcttcggcttgggcgcggccggcgcggaggccgggaactcgccgctggtcgcctttgcggcggcttcggctgcccacttggcgtactcgtcgaggtcgtcctcctgcgcggcgggcgagaccttggcggcgtcggcgtcagcagcagaatccacatccttgtccgcatactgatcatcaatatcggcgaacgggtcaggagagcccgttcccggctcctgctcgctcagctcttttgccagctcatcgtaatcggtatcggtggtcaggtacttgagctttcgggcaattttctgctgttttgctttttgacgtccgcggcccatctgaccccctgcgattactgtgctgttcgattcatcaacaatagagagtaccactaatagtggcttgttcgttgtcggctcacacttttaccataaaaagcgtttatctgagccctatttaaaggattttcgcatgaccgacgagcagcaactgacagcggcaggcaatgagataagcgcgagcttcctcgcggccaaaaagcgttcggacgaaacgctcgccaagctggaggccaagccgtcgtccttcaccatgttgaccggcgaccgcccgaccggccggctgcacctcggccactacttcggctcgatccgtgagcgtgtcgccatgcaggagcgcggcgtcaacacgaacatcatcatcgccgactaccaggtgatcaccgaccgcgacaccaccgagcacatccaagacaacgtgctgaacctggtgctcgactacatggccgccggcatcgatccgaacaagaccatgatgttcacccactccgccgtgccggccgagaaccagctgctgctgccgttcctgtccctggtcaccgaggctgagctgcaccgcaacccgaccgtgaagtccgagatggaggcgtccggccacgcgctgaccggtctgctgctcacctacccggtgcaccaggcgtgcgacatcctcttctgcaaggccaatgtcgtgccgatcggcaaggacaacctgccgcacgtggaaatcacgcgcaccatcgcccgccgtttcaacgagcgttacgccaagaagaacccggtgttcccggagccggccgccattctgtctgaggcaccggagattccaggtctcgacggccgcaagatgagcaagtcgtacggcaactccatcatgctgggcgccaccgccgaggaaaccgccaagctcatcaagaagagcccgaccgattccgagcgccgcatcaccttcgacccggttgcccgcccgcaggtctccgccctgctgaccaccgccggcctggtgaccggccgcgacccgaaggacatcgccgaggagatcggtgattccggcgccggcgcactcaaggcatacgtcatcgaatcagtcaacgagttcctggccccgcaccgcgagcgccgcgccgagctggccaaggacatggactccattcgtgacatcctgcacgacggcaacaagcgcgccaacgccatcgccgaggagaccctcgaccaggtgcgcgaggccatgggcatgaagtactgattttcccgccgctcgtagcaagacgccatgtcagccccaactgggcaactgacacggcgttttttgcattgcggcgtctgctgtgtcctatcttcacttcgaggggcggatttctcgttttccggaggtctatctccgcttcgaggggctgttgctcaagtaggcgaggcacaaaaacggcggaatgacgctggcgtgaatgggattttatctgagattgagcgcatgaccagccccttgaaacggagatagacctccggaaaggctcaaatccgccccttgaaacggagaatcaagcgttagtaactctcaattcaaaaaacacaatatgttttccgtgcaacgcggctatcaagacggacctctggtcacttcatgccgatggcttgcatcaatacgtacgctccccgcacagcaatgtcattacgacgtgttgcggcatagcgcgcatggcttccggagtatcggc

SEQ ID NO: 1328 - DNA, 14937 bp, Unknown
  R157_18m  MAG No. k141_13821
cgcggaggggtgcgttgacggtgacgtattggcgacggtgaacatatcggcggcaggagaagataagctgttctcaggggaacatcagcacaacaaaggagttacgcatgcgagatttcattttccataacccggtgaagatctacttcggcaaagggcaggtgcgccatatcgcacaggaggtggagcgtgtcgagggcgccgttctggtggtgtatggcggcggatcgattaaacgcaacggtgcctatgacgatgtgatggctgcgctggcaggaaccgggcgcaaaatcatcgagctgcccggcgttacgccgaacccgcgattggacaaagcgctggaaggcgtacgactggtcaaggagcatggcgtcggcctgattctggccgttggcggtggctcggtaatcgactgcgcgaaattcatttcgttgggttccggcatcggtgacgatgaggatttgtgggatgactatatcgaaaccggcaaaccggcacctgaagggctgattccggttggcgtggtgctcaccaccgcggcaacgggctcggaaatgggagatgcggccgtgctcaccaattgggaacgtaaccgcaagctcggctatacgtcgttcccgctgatgcccaggttctccgtgctggatccaagctacctgatgacattgcccgccgaacagacggtgtatggcttcgaggacatgttctgccacacgtgtgagcagtatttctcctatccggtggacgacaacctttccgacgaaatcgccgagggaatccaacgtcatattctgcgttcgtggcgagcgtgcttgtccgatccgaaagattatgaggctcgctccaatgcaatgtgggattccacgttggctctgaaccgcattatctcgcgcggcaaggaagaggattgggtgacgcacggcatcgagcacgcgctgtccgcatacaccgatatcgctcacggtgctggtctggctgtggtccacccgcattggatggcatacgtgtatttggtcaacgatgaggtgacggctcgctttgcccgctgggcggtcgacgtgtggggtgtgacgcccaccggcaaaaccgatcgcacggtggccgaggaaggcattgatcgctatgtcgatttcctgcgtcgcgtaggtgcgccgctgactctttctgaggccggcgtgcccgacgatcccgcctctctcgacatgtacgccgatcatgctggtgaggccggcggctcattcgtgcagattcaccgtgacgatgcccgagcgattctcgaggcatgcaaggaaccggtgtcgttctgacggttggactaatcccgtgatttgagccgccgcgtgctgtcccgcaccaccaaagacgtagaaagaaccacgcgcttctgaatcttgcgtccttcattggtatcgatgaccatgcgggctgcagtggcggccatgtcttgcaatggctggcggaccgtggtcaacgccgggcccatgtacgcggcggtctgtatatcgtcgaatccgataacggacagatcttcggggatacggattttcagttgacgggccgcctcgtaaacgcccatggcctgtaggtcattgcctgcaaagatggcggtcgggcgactttgttcgtcttcaagtaacgccatggctccttcgtaaccgcctggcgtggtgaaatcgccttcggtgatgagttcgggagaggtggggatattgcgttcggcgagggccgccgaatagccgtcaagccgggcacgtgagcagagcatttcatccggtccggtgatgatgccgatgcgcttgtggccgagttccagcagatgacgggtggcgatgacgccgcccatccagttgtccgcctgtacggagagatcatctaatgccggattgccggaagggtcgaagacgacgaaaggaatgccgtgtgattggaacatgctgcgttccttgtccgtcaagttggagaacaccagaatagcgccaatgggctggcggtcgatgatgccttcaacccaggaagagtcggggtgctgccggtcgccactttccgcaaccatgacattgatgttgtgcggcttggcctccgtgatgatgcccctgagcacctccagcgcccaaatggtctcaaaatcccgaaataccacctcgatggtgcgttgtttacgggagggggagacgcggcgaatgtagccgttgtctttcagggctttgtcaatggcctgccgggctgcctccgaaatatccgccttgccgttcagggctttggacacagtggccagtgaatagccagtctgtttggcgatgtctgcaagtttgaccttgttctcgtcgttgcttttgcgctgttctgccgacgccatcattgaccgccttcatcagagaatgttggtatcagtatattcgaaactttcgtaaagtcaatttgacgataaagaatggtatgtatagataaaaaaggttggaatttcaacgattttgatagtaaaaaagccgatataaatttcgtttgaccgtcaaactaaggctctttatgataaaggtatcgaaaacataaagcgagttttcggtaaagttgaagaaggctgatggggtaggtgaaacggcgaagtttcactgaaaacatcattaattaccagctgttagatatgtaactggctgatatacctttcgaaactttcgtaaatcgcggatcggtttcatgctggtcaagaacaataaggagacgacaatgaagttcaagtccgtggccgccgcacttctggcggcggtaacctgtgtcagcatggccgcttgcgggagcggcagcgacacgaacgccgatggcaaggtggaaatcaccatgtggcacaactccaccactggcgacggcaaggcatactgggaatccgccgccaaggcgttcgagaaggaaaacccgaacgttaccatcaagatcgaagccattcagaacgaggatatggacggcaagctgcagaccgctctgcaggacccgaattccgcccccgatatctttatggcgcgtggtggccagaagctacgtgatgtggtcgaagctgggcaagccatggacctgaccgacaagatctccgacaccgtcaagaaccagatggccactgctgaagccaccggcaccatcgatggcaagatctacagcgtgcagcagtcagtgcttcccggcggcatctggtattccaaggatctgttcgagaaggccggtattactgaaactccgaagacctgggatgagttcaagaccgtggtgcagaagctgaaggacgccggcatcacgccgattgccgtaggcggtaaggacgcctggccggccgcccactggtggtactggttcgcactgcgcgaatgctctgctgacaccttcgacaaggcccagtccgataaggacttcagcgataagtgctggacccgtaccggtgatgatgtgcaggcgctgctcgacctcgatgccttcaacgatggcttcctgaccactccggcccagcagggcgcaagctcctccgccggcctgctcgccaaccacatggcagctatggaactcatgggcggctgggagcccggcgtgatcaaggacctgactccggacaagaaggacatggccgacctcggctacttcgcattcccgaccatggacggtggcgaaggcgatccaactgccatcatgggtggttccgatggcatggccgtgggcgaatgggcgcctgaagaggctgtggacttcctcaacttcgtctccgagaaggaatggcaggagaagtacgctgaggcgttctccaccatcccggccaacaaggaagcccaggatgtggtgaccaacgaggctctgaagcaggtgctgaccgtctacaacgacgcatcctccgtgtccatgtggctcgacaccgtgttcggtcagaacatcggcaacgcactcaacgaaggcgtggtcaacatgatggccggtcaaggttccgcccaagacatcgtcaagggtgttgaaaccgctgcggccaagggctgattcgctctgacccgaccgtaattcccgggctgcgcgaatgcttgcacagcaacaaccgcggcccaatttgttttcttaggaaggcctcaacaatgtcagtttcagcaggcgcgagggtacagcgccgcacgtcgggcttaagcgacaaggctcgcaaacgtatcgaaatcaccatcctttcgcttcctgccctgatcatgttcctcggattcgtcatcctgccggtgttcatggccggctactacggattcttcaagtggaagggctatggcaagcccaccgtcaacggccagttcatcggttttgaaaactacaagatcattctgaccgacccgaacttccagcaggcattggggcacacgctattcgtggtcgtcgcttcgctcgtcatccaggggccgctggccatcctcttcgccctgctgctcaaccagagattcaagggccgcgcactgattcgtaccctgattttcgtgccgtacgtcgtttccgaagtcatcgttggcaccggctggggcctcatcctccagaccacaggcgcattgaatgcgctactcaagaaaataggacttggcggggcggactggatctccgatccgaaaatcgccatctggacattgatgttcatcatttcgtggaagtacatcggcttcgccgtcatcctgatgattgccggcatgcagtcgattcccgaagacctctatgaagccgcgaaagtggatggtgctggattctggcgtcagcagtggagcatcaccctgccactgctcggccccaccattcgtatctgggcattcatgtcgattatcggttctctccagctgttcgacttggtctacatcatctggggtcagtacgtgtcgtctaccgcaggaacgtccaccatggcaacctacatggtgcgcgaaggtcgactcgccaacaactatggttacggttccgccgtggccgtggtgattttcatcatctcgctggtcattgccttggcctaccagcggttcgtgcttaaccgagatctcgaaggtgcgctcactgacgagagggatgccaagcgtcgtgccaagcgtgcggcgaaggaagcggccaagcttgccaaggtcaatggcaatgccgcagcagttgcaaatgaggtggtttcacaatgacgaccgcagtctccccgtccgtaggcaagggcaagaacaagacctatgatccgtatacactgagaaaatccgcaaagaccccgtggggcaacccggtcgtctacttcttctcactgctgcttgtggcgctgtgcgttggcccggtgctgtacatcattatcggcggcttccgcaccaattcgcagattacgagggacccggccggctggcccgatccatggaactttgagaattacaagacggtgttcacttcgaacatcttctggtcggaactcgtcaactccctgatcgtctccattggcacaatggtgggcgttgtggtgctggccttgatggtgagcttcgtcattgcccgatacgagttcaaattcaacaaactgctgtactcgctgtttgccgccggcatgatgttccccatcaccgtggccatcaccccgttgtatctgctgctgcgcaatctgcacctgatcaactcgcatctgggcattatcctgccccagatagcattcggcctgccacaggccatcatcatcctggtgccattcctcaagtccattcctaaggaactggaagaagcggcagagctggacggctgttctcgcatcggcttcttcggccgtatggtgctgccgttgagctggcccggcgtggccaccgtcggcatcctgagcttcgtgagcagctggaacgcctacatgctgccgctgttcctgctcaacgattccagcaagtacaccttgccgctcggcgtgcagatgttcagctcccagcattcggtcgataccgctcaggtactggccttcacctcgctgtcgatgatccccgcgctgatctgcttcaccattttccagaagaagatcgttggcggcctgaccggtgctgtcaagggctagtcgcagcaaccataaccgtgccgtggaaaggtacatggctctttgggccgattcctttcaacctcttcctttcctcctttccacggcccctttcttttcaatgaggagaagaccatgaagatctccaatcccgtactccccgggttcgatgcggacccctcgatgattcgcgtcggcgacacctactacatcgcaaattccacatttgactggtggccgggagtccgtttgcatgaatcccgcgacatggttcactggaatctgctgcccgggcccttaaaccgcgtttcccagctggatatgaagggcaatccctccggtggcggcatctgggcaccggacctgtcttatgcggacggcaaattctggcttatctacaccgacgtgaaaatcgtcaacggcgcgttcaaggattgcgcgaactatctggttaccgccgacgacattcgtggtccgtggagcgatccgattcgggtcaatggcgtcggattcgacgccagcctattccatgataccgatggacgcaagtatctggtgcagcaaacctgggacttccgtgaatatcatcatccgttcgacggcatcaccttgactgaattcgatgtcaaaaccatgcaattgaagccggaaacagctcgcaccatctggcgcggcaccgatgtgaaattggtcgaaggaccgcacctctacgccatcaatggctggtactacctgttttgtgcggaaggcggcacccaatacgagcatcaggagtccgtggcccgttcgcgtaccttgggtgagctttcattcgaaagcatgccgagcaatccgttcctctccaacttcgatacccccggcacctacctgcaaaaacaggggcatggggcgctcgtggatacgcctagcggcgaatggtattacgcttcgctgtgcggcaggccctggcggcacgagaacgagccggctcatggtgtgcgcggctggtgcacgctcggccgagagacttcgatccagaaggtcgagtgggatggcgacggttggccgtacgtggtcggcggccatgggggagagcgttacgtcgaagccccagccgacgccatcgcaaccgaggcccctacgaatcatagccagcatgacgagttcgaatcaaacaaactcgacctcaactggaacaccctgcgcgtaccattcaccgagaccatgggccgcgtgggcggcggctcgctgaccttgcgtggtcaagggtcgctggcaaacctgtttgaactgtcgctggtaggacgccgttggcaggcgttcgatttcaacgccgaaaccaaggtgacattcgatccaagcaactacatgcagatggccggcctgaccaacttctacaaccacctgtgctggtcatgggcattcatcacctgggacgagaagcgaggacagcgcgtaatcgaagtcgcccagaacgatttcgatacgtacacgtcgttcctcaaagacacagccatcgccattcctgatgacatcgaatccgtatggttgcgaaccaaagtgcgtacgcgtacctacacctacgagtattcgttcgatggcaagacatggcatgagattccggtgacgctggacgccgccgtgctctccgatgatcatgtggcccaacgttatggcggattctttaccggcgcgttcgtcgggttggtggccgtggacctttccggatacggcagagaagccattttcagccatttcgattacatggaaatatgatgacgccaggcggctttcctgataatcagggaaagtcgcctgactattcggcactggggaatgaaaggcgacacttgtggcaagcgacaatgaacattgcggcgaccgtggccgcgaatgtaccataaccgtctccaacccggtgctgcgcggcatgtacccggacccgtcctggatctgggatgcgacgcgcgaggaaatcgtgctggtcaactcctcgtttgaattggtgccggggttgcccattcatacgacccgtgatcttgtgacgtggacgcacacggcgaatgcggtggatgaggcgatgtctcatcgactgctcattgatggcgtcgaggattccggcggcctgtacgcgccgaccattcgccgtatcggcgggcgatatgtgatcgtatgcaccgtggcccgcgtgaatgaggtgaaggcgctcgctgcaggatgctcgcaggaggatgtcgatggctgtcgcgccgcccaaggcaatttcgtcatcgaggccgatgagttgaccggaccatggcgcggcccgtactgggtggccggggccgaaggcattgacccggacatctttgaagacggcgatggcacagtgtggtggacgcaaacgcgcccggcattacacccgcagtgggatggtcaaaccgagatctggacgcagcccatcgccccaggcacgtggacgttgcaagaccataaaaccgtgatttggcgcggctatggcatggatgcggtatgggctgaagggccgcatttgtaccgggtgggcgattacctctacctgatgaccgccgaaggcggcaccagcttcgagcacagtgagatgataatgcgcacgcacgcaccgcgcggattcgcggcggcgctcgccggttttgagaagaaccttgccgcgcaagatatctggattgagccggcgcgtgacggtgaacgaagcgtggtgggtcacgataaccggctgtttgaggcttgcaaacgcaatccgatcctcacacaccgtcatttgggagcgggggagccggtccaatgcgttgggcacgccgatctgctgctgcatccgaccgtcggctggctgctcgcgtgtcttggcatacgtgagactccgggcgaggaacccggagaaacgttcagctactgtggccgggaaacgttcgtggcaccggtcgtatggcagcacaatccagtctcgtggaagctggacggtggggagccgaataagcgtatcgatatcgacgatcccggttggccggtcgtggctccggggcttggccggcttcccgagaagttggtcgtggacgttgacgaggatggattgccatgtgcagtgaggggtgtggattctgcggggtgtgattgcgctgctggtaataatgccgcatgccctgctgagctcatccagctcgacgatacccgcctagtcggcgttcgaggccgtgacgattaccggttcctgcgtgtcgacgggcaggaatatgccgctttcacccggcccgaatacacgatgatgatacatcaggattccacccatgctgtcatggtcatggcggaagcggaatccggccaattgacggccgaaatcaccgataggggagataagcggtgcattgcgcttggagcgcttggagccaacgaatggttcggattgcgcttgcatggcaatcgtttggaattccttgccgggcagcctgcatctgacagcattgatgagggaacaatgcctgatattgcactaattgcgcacgcggacgttacttatgctcgtatcatggcagattgtgatgcgcgattcctcagtaccgaatgggccggcggattcgtgggttgcctgatcggcgtaaaacggcggtaatggtctcagcccgctctacaatattgtgcaatcatattgtttaatcgttaaacaaatgcaagggggcaatcgatggcgcacgatctcgaacaactcaagcaagatcacccggatgtggcgaaactgttcgccgatgactggttgcagtaccgtaagtcggagattttgccggaacttacgcgcgaggcgcagtccacgtgcgatcgcatcaatcgcatctactttgaagacaccgccgaagctgagcgactgttccgcgaactcgtgcccgaggccggcgagggcgtggacttccgcccgccaatccggcttgattacgggctgggcctgaaaatcggagaccgtacgttcatcaacatggacctgctgattgtgggcggcggcccgatctccatcggctccgattgcctgatcggcccgcgcgtgagcatctatacgccaaaccacgccatcgcccgcaagcctcgactggaaggctggcagcacaacgccgacgtgaccatcggcaacaatgtgtggctgggcggcaatgtggtgatctgccccggcgtcaccatcggagacaactcgattatcggtgcgggcgcagtcgtcacccacgatattcccgccgattccatcgccgtgggcaatccctgccatgtgattgccgaagtcccggatgactggactcctgaagagcgggccgctgccgagggtcggtaggtttgctgctctgaccaactgttacggcgaaaccgggatacaggagagaaaggaacaatgcaatgacgcaatatcatgtttccgcgcaggcggcgaagacgaacggcgccggcagcgcggccgacccgtttctgaccatcggccaagcggcggccatcgcccgagccggcgatgaggtggttgtgcatgccggcacctatcgggaatctgtcgacccccgattcggcggcgagagcgccacgaaccgcatcgtctatcgtgcggccgcgggcgaaccgcgcccggtaatcaccggctccgaacgtatcgacacatggcagcccgaaggcgatggcgtgtggaaagccgtaatcctgaacgcattcttcaacggatacaacccgtacgtggaaaccgtattcggcgattggaccgtatacccggacccaaaggtcgaggtacgccacctgggcgatgtgtatctgaatggcaaatccttctacgaagtcgcctcgctggacaaggtgcgcaacccacagcgttgggataccggccgtgacgccgccaccgattccatcgtgccgctgattgatccggataccaccgtgaacgtgtggtgctgtgcggtcgatgatgaggccacaaccatttgggccaatttccatgaagccgacccgaatgcggaacttaccgaaatcaacgtgcgcgagacctgtttctacccgagccgcccgttcgtcaattacattacggtctccggctttgaaatggcgcaggcggcctgcccctacacgccgccgactgccgatcaggtcgggctggtgggcccgcattggtcccgcgggtggattatcgagaacaatcgcattcatgacgcaaaatgttcggcgatctcgctgggcaaggagatctccaccggcgacaacgaatcgacgcgcactcatcgcaagtccgggtaccaataccaaaaagaggccgtctacaaggcgctgcatgccggttgggagaaaggcgtagtcggcgggcacgtggtgcgcggcaacgtaatctacgactgcggccagaatggtgtggttggtcatatgggctgcgccttctctctgattgaaggcaaccacatataccacatcggcaccaaacgcgagttcttcggctgggaagtggccgccattaaaatgcacgcagccgtcgacgcggtggtgcgcggcaaccgggtgcatgattcggtgctgggcatgtggcttgattggcaggcgcagggcaccgtggtggattcgaacgtgttctaccgcaacacgcgagatgtgatgaccgaggtgacccacgggccgattacgtttatgaacaacgtgtttgcctctgagttcagtttcgacgactatgcgcaaggcgcggcgttcgtcaacaatctgttcgccggtcgcattcgtcacaccgccgtcttggaccgatccacgccataccatttcccgcacgtcaccgatgtggccggcgaggcattcgtctacggtggcgatgatcggtacatcaacaacctgttcttggctgtgggcgattccgccaaaccgttgcgtaccgcggatgccgccggtgcggccggtatggcggaagccggaaccgcgttctttgacggctatccgtgctcgcttgcggagtatgaacagctgattgaagaggccggccttggcgatgaggagttgtatcgcagcgtgaagcagccggtattgctggcttcgaacgcctatgtttcgggcgcgaaggccgcttccagcgaagccgaggctgtggtgagtgatgacggctcttcgttggcattgcgcgaaaccgatgatgagctatggatgaccatctcgttgcccgaatcgattcggtcggcgactggaccggtgatctccactgctgatcttggccagccgcgcatcgttgaggagtatttcgaaaatcctgatggttcgccgattatcgtggaccgggatgtcaccggtgccgtgcgcggcgagcgttcggcccgaggcccgttggcggaatatgacgatagggaagtacttatctggtcgaaatgacggaatctgcggtttacggtttgcagcgcgacatcatgatctggttgctggcctgttgaatggccttggcggggtcaatctgccagtgtttggcaggttggcttcgctgaggggtgttgtgtggggtcgttttgccagtgtttggcaggtcggccccgctgagaggtgctgttggagccgggccgccaatgtttggcaaatcagcccttttcggtttgcattggtaacaaattcgatatatggttaaatcaacgaactaaatattgtaagtccatgcgtacctacgcaacgtcaatggagatactgctatgcgcgcacatcgtattttgctgctctcgctctgcctgttggccgtggcctatgccgtcctgctgtttgttgcgccggccgccgcgccaatcggcatcgcactgaccgccgccggtctggtgctggtttcgacacgctatgcgtggcgtgccaagttcctcgcgttattcaacgaagcgtgattgatgcatcacggtgattgactggttcggttcgtcctaggactcccatgcaattcccggccaattcgcctgtcgcattatgtatcgtgcggttatatggagtcatggccgcaaggcctgacaattgaatcttcatcctctcttctcctttgaagcccggcccgccgctgggctttttctttggtcggcatgtcggggcagtgactggtatttttgtgaccgatctcatggcttcagtttcggcgtgtcgttatttccgacgaatcgtatcgataaaattcatgtttcgtatggtctataaaaatgccggaaaatcagcgttgttaccgctcacatttagttaatcgaatgaatcaagtatgccataatccgctcagttgtggggaaaataggcgatatcaaattgttaaatcaaaaaactaatggtatatttttatgcaggttcggcaagggttgcctgaccaaaaggaagaggaaacaagttcctatcaatgtcgaaaggaattcccatgaataagtggaccaaggtgctcggtgtggttgctgcaaccgccatgctcatcccgctggccgcctgtggcggtagccgtggcacgaccactgccggtggcaacggcggtagctccgacaccgtcaaggtcggtatttcgatgcctgagcagatgctcgagcgttggaagatcgatggcgagaacctgaagaagcagcttgaaggctacggctacgacgtcaccctgcagtatgcagatggcaagaccgatctgcagacctcccagattcagaacatggccaacaacggcatgaactacgtagtcatcgcatccatcgacggcactgcgaccggagctgctgccgagcaggtcgcctccaacggcggcaaggtcattgcctacgaccgtctgatcatgaacaccgacgccgttgactactacgccaccttctccttggaggatgtcggcaagatgcagggcgagtacatcgagcagaagctcggtctgaaggatggcaagaagggcccgttcaacgtcgaactcatggccggttccccgaccgataacaatgcaggctactacttcaagggcgcttgggacgtgctcggaccgtacttcaagtccggcgtgctgcagtccaagtccggcaaggttccttcctctgctgatgattggcagtccatcggtatcgataactgggatcgtcagaaggcccagaacgagatggagaaccgcatcaactccttctacaacgatggcaccaagcttgacgccgtgctcgcccagaacgacgccgaggcaaccggtacctacaacaccgtagaggccgctggctgggactactacccgatcatcaccggtcaggacgccgagaaggccaacgtgcaggccatcgtgcagggcaagcagtccatgaccgtctacaaggacacccgcgagctggccaaggccaccgccgaaatgatcaaggacatggtcgatggcaaggatccgaaggctcctgacaccttcaacaacggcactaaggatgttccgtcccagctgctgaccccggtcaccgtggacaaggacaacctcaaggaaatcctcgtcgacggcggctacatctccgccaaggatgctggcctgtgatccgcaggatcgctgattcgattcatccaacggcctaacggctaacagataagggggcgccgcgctgcgtggttgcggtacggtgccttcatcatgcacaggggcattactatcggaggaggtaactgtggctacgaacggtgacgtgattttggagatgcgtcatatcgtgaagcgtttcggcccggtcaccgcgttgaacgatgtgaatatcatggtcaagaggggccagatgttctcgatctgcggtgagaacggtgcgggcaagtcgactttgatgaacgtgttgtcgggtgtgtacccgtacggcacgtacgagggcgacatcgtgtacaacggcgagacgtgcaagttcaggacgattcgcgattccgaggagaagggcatcgtgatcatccaccaggagcttgcgctggtgccgtacatgtcgatccaggagaacatcttc

SEQ ID NO: 1329 - DNA, 24067 bp, Unknown
  R157_18m  MAG No. k141_13952
acgctcagcctcttccttggccttggccaatgcttcttcttccagagagggcaggccggcctttgcgcggcgagcattctcattacgatgatcgcgcttctccttgtccgccgcagccggagagccaggggtcgggaatgcatacacctgccacagcgtacggcacaagttgcaaacgttgttggtcagccagtacaccaacacggcgaacgggaaggaaacacccgagaagatgtacatcaccgggaagagccacagcatggccttctgcatggtctcggtctgcttgttcatcgaagcagctgccatgttgcgcttcatgttgatgtactgaatgagccacaagcagaagcacatcaggaacacgaagataccgatgaccaccttgcctgcagtagatgcgcgggtgaagttatcggtcacactgacaatgccgaacacatcggtttgggtgaattgcttggcggttgctacgtcgaacgcgcccaacgcatcgcgtttaccgttggcaatgtatggaatggccgacagcgtatagaacatggacatgaacaccgggccctgaatgagcataggcaagcaggagccagccggattggcgtcattgtcttgatacagtttcatggtttcacgactcatggcttccttggacgcctgatccgtcttacctttgtacttgttctgaatgcgctgcatcttcggtgccaatgcctgcatcttgcgcatcgacttcatctgcttgtagaacagcgggaagatacaagcctgcaccaccagcaccaggatgataatggcaagcacccatgagacaccaatcgggctcatgcccagcatcgcgaagaagtcatgcacgatcttcatgatccaggtctgcaaccactcaacgggagtcaggattttatatagaaatccccaaaacccgctatcaagcagaaattcatttgagttcatcgttgggcctctctttgggctgtggccaatggtgtcagtcggggctcttcatgagccttcgaccacgaaaatctgtaaaaaatggaataccgttgtggaacatcgtcgattcccccacgactccacggccggcaacgcagtaatctcagcatggcgagcactccccctttgaacgcgccataccgttccaatgcctcaatggcataattcgagcacgttggataatacttacaacaaggcggtgtgtttgccgagatgtgctgttgataccagcgcaccccaccaatcatcaccgccttgaaagaagctgtcatgcctcagccaccttatgcgccactgtggcaaaagccttcgcgatctgctgatctagcgaagcgaacgatgcggtcgcggcactgggcttggcgcgcaaaacgatatcgcaatgcgcgggcagcagatcctcatgggctctggccaagacacgaaacctacgcttcaccgtattacgggtgaccgcatgtcctaccgatttggagacagctaatcccaaacggcgatgcaccgtccggtcgtcatcatcatgatggtcgtcgggcaccaaatagtgcacgacgatatccttgccacctgctttgcgccggcgtttcagcacggtgacgaaatcacgatggctttgaagccgctccacctcgactatgcctgtggcactgatcggaatgatcaggcggagagggacttgcggcccttggcacggcgacggttgatcaccgcacggccagaacgggtgcgcatgcgcaggcggaagccgtgcttcatgtggcgacgacggttgttcggctggaacgtcctcttcataatccattgctcctaggtctattcggcaacgcttcgcgctgccctcacgtgagtcaagctataccaaagtactctcacccctaccctcaagtcaaaacggacggagtattttcacatttcgacacgttgcgagacacgcctcaaatctcttataatcggcggaataccaaccattcacggccaaaagttatccacaaattacatgtctgttattcacaatccagttatttcaacacgcgacacggtggataacttgtctaaaccagagtaaatattatctgttgtacagatttcgccacaccgatagaaggggccaccatggttaacgcttccggcgaccccgtaatcgaggccgcccacatctggtcagacacgctgacggtgctcaaacacagcgcttcgctcagcccacgagaaaaaggctggttggaaggcgttgttcctgaaggcgtcttcggttcgaccatcgtgctgtgtgtggacaacaacgatacgcttcaagccattcagggcgatttgaacgattccctgcttcaggcattgcgtacggtaaccggcgaaaatatgtttcccgcgttcaaggtcgtgccgaaaaccgagtccgaaccgctttcggcggcaaagccggcgcagccgtatccttcggaaatttctccgaccgtcgccgagttcggtaaagaatcctatggtgcaaagccggtagccgcaccgcgggaaccgatgcccgccaccgagtcgcagttcccggtcggtcagcagaagatgaatcgcgatcccgagactcatctcaataagaacttcacgtttgattccttcgtgcccggcgattccaaccgttttgcccgtacggtcgcactggccgtggccgaaggttccggtcaggatttcaacccgttgtgtatctatggcggatcgggcctgggcaaaacccacttgctgaacgccatcggcaactatgcactggtcaaggatcccgggctaaaggttcgatacgtcacgtctgaggaattcacgaacgaattcatcgacgcgctgcaaaacccgaaccaaagccagggtcagattgctgaattcaaccgtcgataccgacaggttgatgtgttgcttattgacgatatccagttcctcggcggcaaggaagccaccttggatcagttcttccatacgttcaatgcactgcatcaggcaaataagcgtattgtcattgcttccgatgtggcacccaagaatttgaagggtttcgaggctcgactcatctcgcgcttcgaatccggcctgaccgtagacgtcaagccgccggatctggagacccgaatcgcaattcttcgtatgatcgcctcgatgaacggttcgaaaatccccagcgatgtgttggacctcatcgccgaacgcttcaccgagaacattcgcgaacttgagggcgcgcttacccgtgttacggccgtggcctcgctgagtaatcagccggtgacccgcgccttggccgagcagacgttgcaggacttcttcaccaccgatgtggaaatcaagcccacggacatcatcagtcaggtggcgaagtacttccacctgacgtttgaggatcttgtcggtaaatcacgaaccaaaaacgtggctgttcctcgtcagatcgccatgtatctggctcgcgaaatgaccagtatgagcctgatggatattggccaggtctttggcgggcgcgatcacaccacagtaatgcatgcctgcactcgaatcagtgaccgaatgcagcaaaaacaggagatctataactacgttatggagctcacggttcgcctcaagcaaagcaacaccaactgacacaacgcttctgagagacgaaaaacggcacttttcggactgactttccgaaaagtgccgtttttggttgctcaggcggattctggtggatacgtcgaggcaacggattcgagacatcagattcctcatggctcccctttgtgaggagagctgtcgtcgcagacgactgaggggagtatcgaaggggaacacgcaaaaaacccatgaaacgagagaatcgattctgaggaccgattttgcgggtttgggcgagcgagacgaaaaaagtgccgaaaacggtctccagaatcgattctcctcgacgaaaaacagccttcaacacgccgtgcgaaagtacgaaaaccaaaaaagttatccacacagttgtgcacagatgtgggtaaactcggcggataactcgtggattacccactgttttgttgtggaaaactcgtgcataaccgcgacctcgatgtggaaaactcaaattcgacgaactggctgtggaaaactcgcccacttatccacaagccatgcagaatttgtccacaattttcagggacttatgaaccgttgcagttgtagggctcagccctacttatccacactatccaccggccttattatggcgattacttactcagttacgtgaaaagcatcatcgccacagtaacagccagtcacccatcgtacgtaagttcgccacctaacggctagaatattcctcagccaatccgacgaagggaacaatcacacatgaaagtcgaaatcgataccgcagccctggccgacgccgtagcctggacctcccgagtcatcgacgcacgtccctccaacccgattctcgctggcgtcaagctggaagccattgacggaacgctgcaattctccgccttcaactacgagatttccgctcgccaccacatcgaagccggcgttgacgaagccggttccgtactggttcagggcaagctgctggccgatatcaccaaatcgctgcgttcggagaaaacgtacctggtcaccgacggctccacgctgaccatcacgtccggcaagtcgaagttcaccttgcagctcatgcccgacaccgagtacccggatctgcccgtggtaccggccatgctcggccaagtcgatgccccgactttcgttcaggccgtgaaccaggcgtgcgttgccgtctcccgcgaagaaaaccgcccggtactgaccggcgttcgcatgcaattccaaggcgacaaggtcgtcatgacctccaccgatcgcttccgtttggcccgcgccaccttcacttggactccgcagaacccggacgtcgacaccaccacgctggttcgcggctccctgctcaaggatgtggcccgtgctcttgacgagcaccagaacatccgccttgatttcgatgccgatagcccgacgctgctcggcttcgaaaacgccggccgcgtctccacctcccagctcatcgacggtgaattcccggcggtcgaccgcctgttcgccgacgaatacccgattcaggccgtagtcaacaagcaggatctgctcgacgccatcagccgtgtggctttggtcgccgaacgcaatgctccgattcgcatgaccttcaccggtcaggaagtggcgctgtccgccggatcggtcgacgaggctcaggccaacgaaacactggacatcgacatggatggcgacgacatcaccgtggcattcaacccgtcctacctgaaggagggtctgtccgccgtgaccgaaccattcgtgcgcatcaaaatgacgaccccggtcaagccggtcgagttcaatggccagcaggaagctgattccgacgagtccatggactaccgatacctgctcgtgccgatgcgcttcaacaactgagatccctgaatttccaacgattcgctaatgcacatctcccgtctcgcactcgaccactaccgctcatggagtcaggtagtggtcgatttcgtaccaggcgtgaatatcctgttcggcaagaacggtctgggcaaaaccaatctggtggaagccgtcgaagtgctgtccaccggatcgagccatcgcgcgtccagcacgttgccgctgatcgaacgcgggcagaccacggccaccatccgcgcgaacgtcgctgatgatgccggtcaaaccactacgtatgaagcgtcgattcatgcgcgtggtgccaaccgagcccgcatcaactcggggtcgtcgctgtatctgcgcgatatcatcggcaagattcccagcgtttccttcactcccgaagatcagcggttggtgtccggcgatccgggagcacgccgcgtcatgatgaatcaggctgcggctctgctcgagcccggatacatgcagacgttgcaacagttcacgcgcatcgccaaacagcgtgccacattgttgaagcaattgaatgccaatgccaacaatggccagccgatggatgcggttctgagcggtttggaaatctggaccggccagttcatcgaagccggtgtggcgttgacccgtatgcgcgctcatgtgatcggtctgcttgccgagccatttgccgcgatttacgccgacttggccggtgccggcgagcaggtgacgctcacttatgcgccttcattcgacgaagtgctgatgttcgacgatccgcatccgcagattagcgagcattttcaacgcatctaccccggtgaagtggctcgcggcgtgaaccttatcggtccgcagcgcgatgacatgaaccttgagttgggcggtattcccgcccgcgagttcgcttcgaacggcgagatgtggacgatggcgttggccttgaaaatggcattgttcgaaatagtgcgtgaccggttgggattgcagccgattgtgattctcgatgatgtgttcgcccagcttgacgacagccggcgcacgcagattcttgatttcgccagaaaacaggatcaggtgctgattaccgtggccgctgaaggcgatgtgcccgactatgaatcggcccatcgtatcgacgtggccgcactggacgaaccagcttccgtgatattgccaactctgggcaatttgtccgattcgcgggaaaatgagagtttgggtgggtatgacgaaaaaaccgcggtggacagcgcgtccgtagaacggaaagtgtcatgaacccgccgatcgcccgccaactcaacctggacgagaccaaactgccggccgaaatattcgagcggctctcccgtcgcggggcgaccttgaaggactacagacgccgccgtgaggaggccatcgaaaacttcggcaaaccggggcgcgatccggctgaactgggcagcgtgatgaccaccatcgccggcaacggcgtctggacggcgaatatgaagcttgcgcaattgcgcaaccattgggaccaagtggtgggtcaggccatcgccagccattcggcagtcgccgatttcactgacggcgtactgaccatccgcgccgaatccacggtctgggccacgcagctgacctaccttatcccccaactcaccgataccatccgtcgcaatctcaaaggattgaccatcaccgagattcgcgtgaccggcccggccgccggatacacacgcaaatgggctcggcggcggtagccaagataccaaacaaattcgcagaagcctcgctatggcgctcgtcgggttagacgagtaaaatcacatgcagtatggtcaaatggccagaagagccctttacgggcctcgtaagccatatcgcctccgtgaatgaccttcatgacggaggttgaccctgtagtcacggaaggaagcctgttggcagacgaaaccagcaaagaggagcagctgaaggcggctgcggaacgcatcaacaatgcggaattgaccgaaggcgaacttgacgaatccatggcccccgagcattatgaggcctccgatctgagggtgctcgaaggactcgaggccgtgcgtatccgccccggtatgtacatcggttccaccggcccgcgcggtttgcaccacctggtctatgagatcgtcgataactcggtcgacgaggcgctggccggatacgccagccatatcgaggtcaccattctgccggacaacggcatccgcgtggtggacgatggtcgaggcatcccggtcgatgaggtgcccggcgagggcgtctctggtgtggagaccgtgatgaccaagctgcacgccggcggcaagttcggcggcggcggttatgcagtatccggcggtctgcacggcgtgggtatctccgtggtcaacgcactctccacccgcgtggacatcgaagtgcgccgtcagggcttccactggacccagacgtacatcgaccagcaccccaccgcgcccttgaagcagggcgagccgatgaccgaaggcgagtccaccggtacgtctgtgactttctgggccgaccagaagattttcgagaccaccatctacgacttcgagacgctgcgttcccgcttccagcagatggccttcctgaacaagggcctcaagatcagcctgaccgacgagcgtgagaacgaccaggccggcgacgaggtggccggcgacgccgcggacgagcccggcgcaaagcaccagaccgtcacctaccagtacctcaacggcatcaaggactacgtcgactatctggtcaaggtgcgcaaggccacgccggtggaagaggacgtcatcagcttcgaggccgaagacctgaagctcggcatctccgccgaactcgccatgcagtggaccactgcctactccgaggccgtgcacaccttcgcgaacacgatctccaccaccgagggcggtacccacgaggagggcttccgcgccgcgctgacttcgctggtcaaccgttacgcgcgtgacaagggcatcctcaaggacaaggacgagaacctctccggcgacgacgtgcgtgaaggcctgaccgccgtgatctccgtcaagctcaccaacccgcagttcgaaggccagaccaagaccaagctcggcaactccgaagccaagaccttcgtgcagcgcgtgatgaccgacaagctcggcgactggttcgacgcccacccggccgaggccaagaacatcatccagaaggccatcgaggcctcccgtgcccgtctggccgccaagaaagcccgcgagaacacccgccgcaagtccatcttcgagtccgccggcatgcccgacaagctcaaggactgccagtcctccaacccggaagagtgcgagctgttcatcgtggagggcgattccgcaggcggctccgccatccagggccgcaacccgatcacgcaggccatcctgccgctgcgaggcaagatcctcaacaccgagcgcgccagcctggaccgcatgatgaagtccgacaccatcgaatcgctgatcaccgcggtcggcggcggctatggcgaggacttcgacatctccaaggtccgctatcacaaggtcatcatcatggccgatgccgatgtggacggtgcgcatatcgccaccctgaacctgacgctgttcttccgctacatgcgcccgatgatcaccgccggctacgtgtacgtggccatgccgccgctgtaccgcctgaagtggaccaagggcccgcacgacttcgtgtacaccgacgccgagcgcgaccgcgtgctcgccgaaggcaaggccaacggacgccagctgcccaagggcgaaggcatccagcgctacaagggtctgggcgagatgagctaccaggagctgtgggagaccaccatggaccccgagcaccgcattctgaagcaggtgcacatcgaggacgccgccgcggccgacgagaccttctcgatgctgatgggcgatgaggtcgaaccccgccgcctcttcatccagcgcaacgccaagaacgtgcgttggattgatgcgtaacggaatcctccaacctccctcgtcagagggaggtacacaacggacttagacaactaaaggaacaacagtggcagatgaaaacaacaccggcgacgagcagttcacgccggacggctcgatggagccgttgagcccgcaggaggcggacaccaccgactacggcctgatggacaccggcgaacgcatccagcgcaaggacctgcagcaggagatgcgcgagtcctatctggcgtatgccctctccgtgatcgtcgagcgcgccctgccggacgtgcgcgacggcatgaagcccgtgcatcgccgcgtgatctacgcgatgtacgacggcggctaccgccccgatcgcggctacaacaagtgctcccgcgtggtcggcgacgtgatgggtaagtaccacccgcacggcgacgtcgccatctacgacactttggtgcgtatggcccagtcctggtcgatgcgcaacatgctcgtcgacggccagggcaacttcggctcccccggcgacgacccggccgccgccatgcgttacaccgaatgccgtatggccccgctggccatggaaatggtgcgcgacatcgacaaggacaccgtcgacttcgtgcccaactacgacggcaagacccaggagccgaccgtgctgcccgcgcgcttcccgaacctgctcgtcaacggctccgccggcatcgccgtcggcatggccaccaacatcccgccgcataacatgcgcgaggtggcggacggcgtccactgggcgctcgaccacccggacgccagccgcgaggaactgctggaaaacctgatccgcatcatcaagggaccggacttccccaccggcgccaccatcctcggccacaagggcatcgaacaggcctaccgcaccggccgtggcctgatcaccatgcgtgccgtggtcaacactgaggagatcaacggccgtatgtgcctggtggtcaccgaactgccctaccaggtcaacccggaccgcctcgtcgtctccattcgtgaggccgtgcgcgacggcaagatccagggcatcgccgacatgcgcgacgagacctccggccgtaccggccagcgcctcgtgctggtcttgaagcgcgacgccgtgccgaaggtggtcctgaacaacctgtacaagcactcccagctgcagcagaccttcggcgccaacatgctggcgctggtcgacggcgtgccgcgcacgctgagcctggacgccttcatccgccactgggtgaaccaccagctcgacgtaatcgcccgccgcaccgcgtacctgaagcgcgaggccgaagagcgcgaccacatcctgcagggctatctcaaggccctcgacatgctggacgaggtcatcgccctcatccgcgcctccgaagacaccgacaccgcccgtacgggccttatggggctgctggacatcgaccaggtgcaggcggacgccattctggccatgcagctgcgcacgctgacccgcatgaaccgcgacaagatcgtggccgagcatgaggaattgcagcgcaagatcgccgactacatcgacatcctcgccaagccggaacgccagcgcaagatcatcggcgatgagctcgacgagatcgtggccaagtacggcgacgaccgccgcaccaagatcctgccgttctccggcgagatgaacgtcgaggacctgatcgccgaagagaacgtggtggtcaccgtgacccactccggcttcatcaagcgcaccaaggccgacgaataccgcgcccagcaccgcggcggcaagggtatcaagggcaccaagctgcgcgaggacgacgtggtggatcacttcttcctgacctccacgcacaattggctgctgttcttcacgaacaagggccgcgtctaccgcatcaaggcctacgagctgcccgagggttcgcgcgactccaagggccagcacgtggccaacctgctgcagttcgcgcccgacgagaccatccagaccgtgctgtccatcccgaactacgaggtggccaagtacctggtgctcgccacccgttccggcaaggtcaagaagaccccgctggccgagtacgattccccgcgccaaggcggcctgatcgccgtgcgcctcatggccgacgagaacggcgagaacgccgacgagctcatcggtgccgcgctgtgcaacgccgaggatgacatcatcctggtctccaagctcggcatgagcctcaagttccaggccgacgacgagcagctgcgtccgatgggccgccagaccgccggcgtgcagggcatgaagttccgtaacgacgacagcctgctggccatggatgtggtccctggcgactccgacaaggacctgttcgtggtgaccaacgagggcttcgccaagcgcaccgccatcagcgaataccgtctgcagggccgtaacggcttgggtatcaaggccgtgcaactggtcgagggccgtggtgccctggtcggcgcgctcgtggtgtccgaagacgatcaggtcatggccatcatgaagtccggcaaggtgattcgttccaacgtggacgaggtcaagcgcaccgggcgcaacacccagggtgttaccttcgccaagcctgacaagggcgacacgattctctccatcgcccgtaacgaggagaaggacgagcccgaggacagtggcgatgccgcggcgaacggcaccgccgagaccgcacaatccggcgagaatgtgaacaacgcggacgaggcgtgagcagcgtcctgaaaagctggtagcctcgcatacagcagaggctaccgccaagcctgttaaggagaaacgatgagcgagaatctcgaagacaacgagccccggatcataccgccggcagtcggcaatacgcagaacgatcatgtcgagccgctgatcggtactgagcacgctccccgcgtggcacgctccgtgtccagcgatccggaagaatccacgttgccttcttcaggtgccgccactcccgtgcgtccggcacctcgccgtagcgcccccagggctcgccgcatgagcttgtcgctgacccgcgtggatgcttggtccgtggccaaagtgacgttcatgctgtccatcgccgtggcgattattcaggtcgttgcctccgcgatcgtatgggtgctgcttgatgtggtcggtgtattcagccagattacgcagattgtgtcttccaccggtcttgatgcaggcggtttcgatctcaagaacgtgttgtcccttaccaccgtggtctccggcgtcaccatcttctcgattgttgaagtggtgatcttcaccctgctggccaccattgcggcactgatctacaacgtggtcagctcgctggtcggcggcgtgcatgtcacgctcggcgacgactgatatagctatactggcagaactcccctcagtgaaccgcaccccggttgttggactgaagtaattcagattcgatgatcggaggtgcggtttcttatgtgtggggttcgtaggcgtcgttgctgggccgagacttgggactccggcgacgctgggggtggcaggcgtcggtgttgggacaggttttgtatctctgacgacgctgtggagggcttaccgtcgtcagcggtacagatcttggagttctgccgatgctgagggtgtgttctgtgtcgtttgcgtccaattcttggccctctgccgacgctgggcacagcaagcgtcgttgctgggccaagttttggactgccgccgacgcagagaatgcacacagcggtgttggtctgccagcgtgtggcagcttggcgccgttgaggaaggtctatgtggtgtggttccgccaaaggactggcaggttggcgctactgaggggactttatgggctcttccggttttggcgtgtaggggccgtgcggtttcattcactttttcaatcacacaccgaatcaaaccgcacggcccctacgcaccaaaatgcgaagagccggtttcgctaactagtgcctatatgcctgcaatcaggctgatttgtgctgtcaggctggctggcgtcagcggttgatctgccgatgttgctgctcgtcagtctggactgttgggctttcgttttgacagcggaaggaagatcctcctcgcggtagggcaacaattatcagtatcataattaaggtaatcgtgattacattaaccatgatactcttattattgggcggtaggcggatcggagggctgcaatgtttgtcgcacgagagcacgagttacaagtgctggaaaagctgtttaccagcgattcgttcgaaatggtggtgctgtacggtagacggcgtgtagggaaaacggcgttgatcgacgaatttgtcaaagataaacgcgtgctgtacttcacggccatacagcaaagcgccaagatgaatcttgaagatttctcaagagcggcattgtcgttctttggtatgcctgattccaccccgtcgtttggcgggtggtctgatgcgttatcgtttgttgctgaacgtgctgcacagactgacgaacgtatggtgttcgtattcgatgagttcccttatgcagctgccgccgagccagcattaccctccatgttgcagatagcaattgaccatggattcctcgccacaaaagtgacgatgattctatccggtagtaacgagggattcatggaaaacgacgtattggggcgtaaaagcccgctatacgggcgtcgtacagcacagattcgactcctgccattcgactatgcggatgcggcaaaatttctaacgaacacatctccgcaagaactggtccaatactatgcgactttcggcggtacgccatattatctggcccgtatacaggaagccgatggctttgaatccaatgtgctgcgcttgatgttcgacaacttgggcgtactgcgtgaggaacctatgatgctgttgcgtcaggagcttcgtgaaccggcatcgtattattcgatattgcaatctattgcgggtggtaattcctcgccaaagcttatcgctgaacatgcgggtgtcggatctgattcgattggagcatatctgaaaacgctggtcgatttgcgcttaattgagcgaaaagtgccgtttggtgaagatccgagtaaatcgcgcaagggaatgtatgtggtgagcgatcccttctttgcatattggttccgctttgtggggcgcaacatgagcattttggatggtaatatcagcgaggaggttacgagcagactcgcttttggaccagcgtttgatacctatgttggtcaacaatttgagacgatttgcctgcaatggcttattcgaaacaacgctatgggcaacctcccctttgttgccactcagttcggcaaatggtggggcaatgatccgattgctcacgagcaaaccgatatcgatgtgattgctgcggattcgctcgataaaacgattctgttcggtgaatgcaaatggcgtaattcattcaacgaaacggaggctattgaaaagctccatcagcgtgctggcttagtccgcggctatcaggcaggtaatgcgtggcttatgctgttcaccaagaatccggtgagtgagtccacgcgaacccgctacatggatgatgaacgaatggtgttcgtttccgcggaagagttatacactgcgtgatgcattactgggtgattgtgacgcggtatctagagtcctgccgacagccacgtggcaattacgccgaatcacgcaccaccaaatcggtgttcaggtgcatcacgcgcggtgaagagactccgttgatggctttgatgaccacgtcggccatggtccagcgcgctgatccatgtgctgatcgacggtggtgagttccggggttatggaggtggaagctaagttgttatcgggcttacgtatttggggatagcacttgttgctcgttgtacatatagcaatgcccttgcctcctcacgggaagcaagggcattacgctactgcttagtactgctcagaggcaagcgtcacagcacgccctgggcaaccatggcgttggcgaccttgacgaagccggcggcgttggcgccgagcatcaggtcaccctcgtgaccgtattccttggcggcggccagggagttggcgacgatctcttccatgatggacttgagcttggcgtcgacctcttcgaaggtccaagacagacggtagctgttctggctcatctccaggccggagacggccacgccaccggcgttggcagccttggccgggccgtacagcacgccgttcttctggtagacctcgatggcctccggggtggacggcatgttcgcaccctcgacgaccacggtcacgccgttgtccacgagcttctgtgcggattcgccatcaacctcgttctgggtggcgcacggcagagcgatgtcgcccttgacggtccacacgcccttgctgccctcgtggtactcggagcccggaacgcgctcggcatattccttgatgcggccgcgctcgacttccttgatctgcttgacgacctcgacgttgatgccgttcgggtcgtagatgtagccgttggagtcggagacggtgacgaccttggcgcccagctgctcagccttctgagcggcgtaggtggccacgttgccggagccggagatcacgacggtcttgccctcgaaggagtcgttgcgcagcacgcgcagggcttcctgggtgtagtagcacacgccgtaaccggtggcctcggtgcgggccagggagccgccgaattccagacccttaccggtcaggacgccggagtactcgtcgcggatgcgcttgtactgaccgaacaggtagccgatctcacggccaccgacgttgatgtcgccggcgggaacgtcggtgaactggccgatgtggcggctcagctcggtcatgaaggcctggcagaagcgcatgacctcggcgtcggacttgcccttcgggttgaagtcggagccacccttgccgccgcccatcggcagcgtggtcagggagttcttgagaatctgctcgaagccaaggaacttgacgacggactcggtcacggtcgggtggaagcgcaggccgcccttgtacgggccaatggcggagttgaactggatgcggtagccgcggttcacctgaaccttgccctcgtcgtcaacccaggccacgcggaacttgatggcgcgctccggctcgacgatgcgctccagcacaccggccttctcgtactccgggtgcttctcgacaaccggctgcagggtctcgaagacctcgcgaacggcctgcaggaactccggctgatcgccgtcacgggcaacgacctggtcgtagacacgcttgatgtactcgtcagtgagcatgattctcctcgatttggtagggaattaagacggttttattctatgcgcgcaggcccttgctgcatagagtctcgctcggataacgggaaagctttcggcgtggttatggagtggctcaagtttccgtttgttagatttttcgggcgattgttggatgtctgtctatgcgtgaatcgggtcgaaatggaagccgcatcacaccggaggcacgttcatatagtggacataaaggcggacttgggtgatgtcagatgtgtctgttggggatcgtgcggtctgtggggtttgtggggtgtggctggaccgtggggtcgtatggtttttgtgacctgtggggtttgtggggtgtgtggccgcaggtcttcggcgcgcaggttaccgggttcgcggtcagtgtgcgaagtaggtctgcagaatcatcgtggtctcggtgcttaccggcaccgtgcggtggatgagattgagcagttcttcaagtgcggtaggggaagccacgcgcaccaccagcacgaaactgggggcgccggccaccgaatagcaggagacgatgccgtcgatattgttcagcttgtccggaatcgaggattcggctgagtagtcgagcggggtcacgttgacgaacgcgctgatgggcaagccgcgctgctcttggtcgatgatggccttgtatcccttgatgatgccgcgcttctccagcttctgcacgcgcgactgggcggcggagactgacagtccggtcgcctgggccagttgcgcgagcgtggcgcggccgtcggcctccagcatggtgaggatgcgctggtcggtctcgtcaatcgcggtcatgatgtcttctccgttcgttgtgctctgtgttcactgtacctgttgccggaatgcgatggctttccgattttgcctggtaatttcagtagttcttcctgtgttttctgttgtgtggtggaatgtttacgtttaaagtcctaattggatgtaataattccttttgaaataagagaacgacgaaataattccattgaggagggatgatatgcagaagttttccaacatgtctctgtccgaagttgcatctgctgctgcgcctgctactatgcctgctgccggtcgggttgctgtgccgaccgccgagcccgcgagcctgtccgacgaagccctgaatatcccgcgctccggcatccgagacgtattcgaccgtgtagagcgcgtgcctgacgcgatttcactgaccgtgggggagcccagcgccacggccgcgccgcatatcgtggcagccgcttgcgaggccgcacaggctggccgcactcggtacaccaacgtgcttggcatccccgaataccgcaaggccgtggccgattactccgcctgtgtgaagggacttacttatgatcccgaaaccgagattcaagccgttgacggtgccacgattggcctgtttctggcgctgaaagccgtggtgggcaccggcgatgaagtgattattccctcgccgttcttcacttcctatgacgccgaagtgatgctgtgcggcggccgcccggtcaccgtggcgctgcgtccggagcacggcatgcgcgtgaacgcggcggacatcgaagcggcgatcaccccgcgcacccgcgccgtaatcatcaactcaccgggcaatccgaccggcgcggtaacctctgccgccgaactggcgcgtattgccgaagtatgcaagcagcacaatatttgggccatctccgacgaggtttaccatccgttcgtgtttggggaaacgttcggggaaacgcttgggggagaggcagccgtggcaccatcgatcgccgcggtgccgggcatgaaagagcgcaccattgtggtggaaagcctgtcgaaaacctatgcgatgaccggctggcgcatcggctacctgctggcacccgaagcggtcatcgaacagaccggcaaaatcgccgaactcatgcactcctcggtgaactccttggcgcaatacgcaggcgtggcagcactggctggcccgcaagataacgtggccgccatgcgcgaggaataccgcgccaagcgccagatcgtgctggacggtctggccggatgcccggtattgcgtctgatcgaaccgcaaggcgcgttctacgcctttgtggacgtacgcctgactggccttgactccggtgaattcgcagaccgtctgctggacgaagagcgcgtggctgtggtccccggcgaggccttcggcgaggaggggcgcggcttcgtgcgcctctcctacgccggagatgccgacgagctgtgcgagggcgtcgcccgtctgcgcgcattcgccgaacgggtatggaaccccatcaccggccaccacaccgccacctatcaccccatggaggtgctggcctgaggcttaaagcgaggctaggccgccattcggcctcgtcggcgcgagcgatggcctgcttcttggctcgcagcaagatgtagccgagtaccagaacgttggccagagctcgatgttggcatcgcgtcaaaacaaccgcattaaggctgccgcgtctcgtatcgttacgcgtaggggctggctgaggcgtaatgctgaagagtaacattgaagcgatggcaatcagaccgatttgagggagagaggcacacgatggcgtactgcggccactgcggaaatagagttgatgggccggcacgattttgcccggcatgtggagcgtctgtagacagcgcaccagttgcgacggcaccagtaccggccgcatcgccagccgtaccgcctgcgtcgataccggcacctgctgtgccggcgtctgcggtaccaccatcgataccagccgcgccggttgccccatcggtttacgccgcgtccgctgccccacagccggcaccaaccgttcccctgccggctttgccgattcccgctcctgccgcatatcaggcgactgatgcaaccgccgtcctggcaccgcagcgcaaatccagcaagaagctgatcgccgctttctgcgcattgcttgcgacgattctggtggcggccttggcgttcatcatccccaacttcaccgccgtcaaagcgatgctgggcttccggcccaccaatccgctggtcgtcaccttcgacgcgatcaactcgctgtccactctgcgcagcaccaaatacgaactcagaacccacagcatcactgacgattctcttgacgtgcggatgtctggcatgtattcgctgggcaaaaccaccaacgaatcctccgcgtccttcactagcaaaacagacgaatatgcaacgaccttcgcttggtacaaaggcgcattcgccgagaaattcgtttggcatgacgacgacccctactacatctactacccggccgaccaatatgaagatgacttaaggaacggcgttggtagtgatgtggcggacttgatattgaacgtcaaggatgcgttggtcaagaacggtgcttgggacatcaccggcgcggagcaaacgttctacgatcagctggacaagatgaacgacgatgggtactcgaacgacatcgaccgggtcaagggcacgaaaacgtctgccgaggtgaaggccgaggccagcaaattcatccaacaatatttcggcgtggagctggaagataagaatgtgcgcagccagctgttcccgaagacatcgtctgccaagtctgccggcaatacgcagctgtcgtaccaaatcgatatcaaagcgttgtctcagcatttcgtgaattactggatcagtcatgaagcgcagtatccgcatctgaaatcctgggtgattcagcaaatcgaggatgccggcgtggacgatgctgaagatgagtaccgtcaggcgctcgataatgtgcgcaactgggatttcggcacggatgaagagccggagatgccgactatcaccgtggatctgaactacggcagaaagcgtctgatgaattcgattgccataagcgtgtccggcaaggacgaatacggcgactcctataatggctcgctatcgttgacgctcagtcagcagaacgcggtgtctgtggacgaccccgatttgactgatatggtgagcaaagccaaggacaacaacggactggatttgtcctgaatatggtgcgtgggatgttgcggcggcgctaatttcctcggtgggctatcacgcactcttcccgcttgcagcggtctgctcgctgattggcgcggtgctgatcgtcttcatcaagtcagtgaagtaaacatacttattcatccctcttccttccataacaaacgagcggaggggttgggccattgttttgcggtgtgcccagtctctccgctcgtttatttgcttgattctgtggaatggaaggggcatgctctatgtcaaataagataatgcggaagggctgttctgcgtgcatatatcttgctgaacgtatttgagggtactttctggttaaagacacgccctatggtgggcagaatgctgccgttgtgtctggcgtcggtcgcaggacatgttgtatcatgagggcacaagcttaattcagccgtcctcaatctgattagtcgtcgggtcggattggcgtgatcggcttgcagggaatcatccggctcttccggttttggtgtgtagaggggatgcttataggtgggcttgtatggtgtgtctgaagccgccggtgtggaggaggctgcgggtgacgtagttgtcgaggttgcggaagccgagggcgatgccgcgtagggtctcgggcctgccgttgatggcctcggtgggaccgttggcggtgccgtgggcgcggtcgtcggatcgatcgtccccggtgccggcaccgtggtcggcgcatttgtcggaacggcgattggcactggagccggatggctgataagtagcggcttagacgcactttacgacaatcaggtgcacagaggcggtggagatgacccgggcagtcatttcaaggataatctcgggttttggaagtgggggtatctgttggcgttgttcactcggtatgtgttggtggggcgtcttgaggacggggcgcaggtgttctgggacacgctggagaagacgccggtcaagcgcaagctggatttcggcggcgattccggctgggcgcgggctggcgcggcggccggcggcgctgccgccgcggctgcgcccggcctgatggtcatgatccacggcatcgcccggctgctcaccccggacacgaagacgcaccacacgcataccgatgacgtgacgctgctggcttttctcagaccggtcactatatcccgcgacgcatggaacacgtacgtggcggtcgccgtgatgtggctggccggactcctcctgtactggggtttctgccggctcgtgttcggccggccgaacacctacgtccccgcctcgctggaggacttggcattcgcctcctccgtgcccgccacgaagctgcgctacatgttcggcggccccatcgtcggcacgctgttcctcatcgcgatatcgggcttccccatagcgatgacatggatgttctggtcgagcgcgcaatgggtcgacaccggcagatccacacctgactggattggatggttggctttcttctgggcgttcctcgccacatgctccccgattctgttggccttgcgtttcgtcggaccgtgggactggcggggacgtttcagcccgcgcgcgggcgccgaacgctggagccggctgaaatgagcacactgctgatgggggccgggatgggcctcatggtcgcaatctcgctcgcattcatcctcgcgttcaacatgtcccggctccgctggctcatggaccacgacatccacccgctgctcgaggagcacggactgcgcgaacccgacgacgggttcacgtcctccggcgccaaggagcgcatggccgcgttccactcggacgtcgcggaggcgctggcagcgccggaacgggaacgcgaagcgagggaacggcgacgattcactgtgttcgacccgacggtcgacaagttgccgctgccggcgggcccctacccgttcgaccgtccgacggcgtcctgggcacgcgacatctacgaggaaggcgattgggcgtacgccgacgcatgggtcagggggcggaggaagccacgcgtggtgcgcgagcaacgctacgactcgtggcgcaacgaagtcctcgcccgccacggcctgaccgacgcgccatccgccacgctcgaacacatcgaacacgccgctgcacgcatccgcgccctccaccacaccagcccagccgaagcctacaaacaagcctgcaaggaagccaccggcaacacggtcaacgacgaaaccaccggagaaggaaaagaaaacggctcttccggttttggcgtgacccgcagcctcctccacaccggcggcttcagacacaccatacaagcccacctataagcatccccctacacaccaaaaccggaagagccaattatctgccggtaccttccacccgagaggaaggtgtagtcctccgggtccgggcgatatcgccgcaaggcgaaggattctcgtgtaccgttccgtgaagacggagcgacaatgaccacgcggttggtctgaatcctcgaggggtggtccttaacaggaccacccctttttcgatggagagggccatggcggactgggagaatccctcgaacaagaacgcaaaaaccctcagaatcggtattattccaagggttgtctgtggagctagccgggttcgaaccggcgaccctctgcttgcaaagcagatgcgctaccagctgcgctatagccccgtgagaaaaaaagagcggctcgcagccgcttcattttttctgtgggcccgggaggacttgaacctccgacctcatccttatcagggatgcgctctaaccagctgagctacgggcccgatccatacgcttcaaaagcgcacaagtaattacaataccattgaacggcggtatgtcaataacggcgtgtcgtgattgtcgcttgcgccatgattgccggctcgacggtcaatgcccagcaacgccacagccaatgcccagctacgtaaccttgcgttctcacaccgtaatgctgcggttacacctccctctctgcgcagaaatgtccaatacatatgaggcttctgctgttttcgtgggttgggttcttggttgtggtgggcgtatgtcgagtccgccgcggcgaagcatgacgagggcgatgggattgttcgcgtggtggaagccgtaggccatgcggatggtgaccttgatcctgttgtcggacgcctcgagcctggcgtttgaacagcccaattcgattgtcccgaggatgtcgggcccatga

SEQ ID NO: 1330 - DNA, 5296 bp, Unknown
  R157_18m  MAG No. k141_14144
cactcaaggttggtacgaaaaaagggtcgccgaaggaaccgtaccctatgaggtggtgcgcccctccgtgaccctaatcacgcgatattcggttatcgcgaacggaagatgagatacgccttgcggcgtgaacaacccgtctccttacggcggcattacccgcatcaagtcctcggtcgaagctctatgagctccctctcagcctttcggctcccgttcggttgtgccttcatcttcgcgcacgcacccgacaagcttgcgccggttcacgttgggttagtcttgatgtgaacatgtgcgaatcggctgcgtgcttgcaaggaaggggaagatgatgatgaacggtgagttggcaggatttacgattcctcggctcggcatgggaacgatggctttggcgattgaggggcgcccggatcgcgataccgcgattcgtacgattcatgccggtttggacgcgggtgttcgctatttggacacggcttggtcatattatctgccgagcgagcctggcaccggcactgcggaagaccttggctacggcgaaaagttggtgcgtgatgcgctcacttcgtggaatggcccccgagatgaagtgttggtcgccacgaaaactggctatcgacgcaccatggaggtccccgcttttgttgctcctgtgtccgattctggagaatcggacaaacagggtgccggatttggggtacagatgtccgattcaccagaatcggacactcaggggcgggattctgagggatgcagccatcggcctggcgaggaacgccagcatttgcaggcggcgggcagtcaatacggttggattgccgactctcgccccgaaaccatgattcgtgacgccaaggagtccgcgctgcacttgggcgtcgatacgctcgacctgttgtattcgcatggccccgatcccgcggtgccttacgaagaccaatgcggcgcgttgaagcagctgctcgacgaaggcgtgatcaaatatgcgggcatctcccgtgtgaataacgagcagatcgaccttgcgcgcagcattatcggcaatggattgatcgccgtacagaaccaattctcgccatcgcaccctgatcctgagcgtacgatggagcactgcaaggagttggggctttcattcgtttgttggagtccgctcggcggctttcttgacgcgttcgaccagcacgcgtacgacccgttccgtgaagtcgcaggcaatcatggctgctcctaccagcgcgtggtgctcgcttgggaactgagtcgttacagccgcctattcaccattcccagcgcccgcaatcctcaggagatcaacgattcctttgccgccgccgaattgacgcttacaccggacgaactgacgatgttgaacgcgtcagtcgacgaccgtcgcggctgagtttcaaacatcccgtacggttggccgcgcccgattccgcacaataattgcgattcgggccgcggccattttcgtctcttttgtgatttccgcggctttcgtaccatctcagccttctgcgcaccgcagattgcccgaaaataacttacgatataaattgtttacactataagatattatgatggcgattgcaacgtaaggaggtgccgcgtgggttttgaagaggaactattccacgaattggcgaccagcacatgggataaacgctcgcgcatgcagcaggagatggtgaaaggcgcgaagggtgaaccctttgcggtgcaggaactgtataggaagggtccgctgacgccatcgcaactcgccgcttcgatgaaaaccaccaccggacgcgtgtccgcactgttgtccgcactggagaaaaaaggccagatcacgcgcgaatccgaccctgacgatcgccgtgtggtgcacgtggaccttaccgaagccggcagggagcgcgccgaacgtcagcgcgaaagcatgcgcgaggcgatctgctggatcttctcgcaaatgggggagcgccgcgcgcgcgaattcgttgagcttaccgaggaattcaccacgtacatgtcgctgtgcatgccgggcaagccgcgcccgaccccggaggaagtcgccaaggcattctcagaaaacacacaggaagttgcataatacttcacactgcaagaaatttacagtgtaaacaatcgcggttcgataatcgcaaatcagctaaccgaattaaccaagccaacaaaacgtaagagaaggaaccaagcatgcttcgcattgtgcgatacctctccaaagcggagatagtccagatgctcattgcactggtcagcatcgtcggtcagatctggttcgatctgacgctgccggattacatggccgacatcacgcagctcgtagaaacgccgggcagcgaaatgagtgatatctggatagcgggcggcaaaatgctgctcgtctcgctcgggtcagtggcgtgcgcggtcgtcactggcttcatcgccgcgcgcgtcggcgcgtcattcagccaacgtctgcgctcgctcgaattcaagaaggtggaaagcttcggaccggcggaaatgaaccgtttctccaccgcatcgctcatcacccgctccacgaacgacatcacgcagattcagatgttcgtgaccatgggcctgatgatgctgatcaaagcaccgatcatggccgtgtgggccgtgtgcaaaatcgcgaacaaaggccttgaatggacgttcgccactggcatcgcggtagccgtgctgctggcggtgatcggcgtgatcatgagctttgtcatgccgaagttcaaggccatgcagcgcctgaccgacaacatcaatctcgtggcgcgcgagaacctcaccggcctgcgcgtggtgcgcgcatacaacgccgaggagtatcaggaagacaagttcaccgaggccaacaaggaactcaccgagacccagctgttcaccaaccgctccatggccatcatgatgccgttgatgaacaccgtcatgaacggtctgatgctggccgtctactggatcggcgcctaccttatcgacgccgccgaagcgctcgacaagctcaccaccttctccaacatggtggtgttctccagctactccatccaggtgatcatgagcttcctgctgctgagcatggtgttcgtgctctggccgcgtgccgacgtgtccgcgcagcgcgtgctcgaagtcatcgacaccgatccgatggtcgcagacggtgtgaagatcgccggcaagcctggcatggaaggcgaaatcgaattccgcaacgtgagcttcgcctaccccgattcgcgtcaagcgatgttggaaggcgtcaatttcaaagccaagaagggcgagacggtcgcattcatcggctccacaggctccggcaaatcctcgctcatcaatctcgtgccgcgtttctatgacgcgacgcaaggcgaggtgctcgtcgacggcgttaacgtgcgcgactatacgctcaaggcgttgcgcgacaagatcggctacgtgccgcaacagtcgttcctgttcaagggcacgatcgccagcaatgtcgcgtacggagatacggaacgcaacgacgccgacgtgaagacggcatgcgaagtcgcgcaggccacggaattcatcgacaggaaggacaagaaatacgattccggcattgcgcagggtggttccaacgtgtcgggcgggcagaaacagcgcctgtcgatcgcacgcgccgtttaccgtcatccggaaatcctgattttcgacgactccttctccgcgcttgatttcaagaccgatcgcgccgtacgcgacgcgctcgaacgggaagcgaaggattccacgaaactcatcgtcgcgcagcgcatcggcaccattatgaacgccgaccgcatcatcgtgctcgacgacggcaaagtcgttggtcaaggcacgcaccacgaactgctcgacaactgcgaagtataccggcagatcgccgaatcgcagttgagcgaagacgagttgaatcgctgaaggggaggaccaacatggcaagaggaccaatgggacgctctcgcggacccgtggaaaagccgaaggatttcggcggtgtgatgagcaaactggcgaaattctgccgtcgctacattcctgtgatgattttcgccctgattctgggcgcggccggcacgatttgccagattgtcggaccggacaagctcaaggacatgaccaacgagattacgaaggggctgccggccatggtgcatggcaggccggtcatgcactcgatcgatatggatgctgtttcgcacatcgcatggctgcttgtcgcgctgtatgttgggtatgcgctgctgagctacctgcagagctggctgatggccaacgttacgcagcgcaccgcgcaggagctgcgtgaggcgatcagcaagaagattaatcgcctgccgctcaaatatttcgacaaggtcagctacggcgatgtgctcagccgcatcaccaacgatgtggacgcgatcggccagacgctcggccagtcggtcggatcgctgatcacttcgatcacgctgttcgtcggcgcgctcatcatgatgttctacaacaacgtgatcatgacgctgtgcgccatcggttccgcgttgcttggcctggtggtcatgggcgtgatcatggtcgcctcgcagaagtacttcacccggcagcagatcgcgttgggagatgtgaatgggcacgttgaggaaatgtacaccggccacaccgtggttaaggcgtactgcggcgaagaggactccatcgaacagttcgagaagtacaacgatgatttgtatgtctccggctggaagagccagttcctatccggtctgatgatgccgctcatgaacttcatcggcaacttcggttacgtggtcgtgtgcgtggtcggcgcggtgctggccatggacagcaaaatcgagttcggcgtgatcgtggcgttcatgatgtacattcgcctgttcacgcaaccgctttcccagttcgcacaggcattccagaacctgcagcgctgcgctgccgcctccgaacgcgtcttcggcttcctggaagagccggaactggccgacgagaccggcaagaaagcactgctgggtgtcggtgcggacggcaagccgcagccggtgcgtggtgatgtggaattcagccatgtgcagttcggctacgacccggacaagacgatcatccacgacttctccgcgtcggtgaaggccggccagaaggtggccatcgtcggtccgaccggtgccggcaagaccacgatggtcaacctgctgatgcggttctacgagatttccggcggcacgatttcgattgacggcgtcgacac

SEQ ID NO: 1331 - DNA, 24576 bp, Unknown
  R157_18m  MAG No. k141_14285
atggatggtcgcatgataggactcgggatgggtcagcggcagcccgatgtattcgtcaagcgcgaaaccacgcacgcccgaaacgtcaatggcctcgtccttgacgatcttggcgagcgcctgataggcggccagcgggctggagccagtggccaggcccagcacggcgtccggctttgctttgatcaggtccgccacgcaacggccgtagatctcgccggcctcggcttcgttcttgacaatgatgatttccggcatcggtttcctccagttccgtgcggcccgcccgatgcgagtcgctgtaccgccgcccgtcttgcggataatggcaacatccttgtcacgtccgggtgcgcgcggcgttccaaccaccgttcggcgtagcgccgattggtgattcgctatttgttaatgatagtaacaattttggacctcatgaacactcacggtgtttcctgacgcttcacacaggtacactggaatttattagtgaagtttcataacagtttcaacgacgaaattgcgcttcaccgtctaagctgtgtatggaacaacaatcgccgtccactcgctcaccatcaggtaggaggaaacatgtcatatctcggtctcaacacaacgaccgacgaccatgcggccaaggcttcccccgccgatgtgcgccgcaagaaccgccaacttatcttcaggttgttgttccccaccaaccagtattcgcgcgccgagctcggccgacgcaccggattgagccgcgtggccgtttccgatgtggtcggtcggatgctggaggaaggattgctgcgcgagaccggtcaggcacccagcggcggcaaaggcaaacgaggcacactgctgagcatcgatatcgatcgactgcgcatcatcagcatcgacctgacgcaggagcacctgctgcacggcgcagtcaccaatctgctcggccagccgctgcgtcacgccgaagtcaccctgaacaccggctcattcgtttccgtggatgtgatcatcgagctcattgagaagatgctgggcatgtccgatggcgaggtcatcggcatcggagtcgcctcccccggcgtggtagacaacggcgtggtccgctcctccacgatgcgcggctggaacaatctcgacctgtccacgccaatcgccgaacatttcggacttgaagtaaacgtcagcaacgacgccaccgcagccatgctcaccgaacgtttctttggccaaggcgggccgaatatgcttttcgtgcgcatcgaaagaggcatcggttcggcgattctgctctcggacacgccggtaatcggcgaactgcacgcggctggcgagctcggccatatttccatcgatcttgacgggccgctgtgcccttgcggcaagcacggttgcttggagacgatgatttccggaaccgcattgaagaagcaactcagcgcggcagacatggagcagcatcagggtatccttgctcgggcgggccgctatcttggccaagccctggccatgcctgtgggccttttggatatggcagacgtatgcgtctatggccagccgaacatcatcaacgcgacgttcatcggcgcggcccagcaatatctggatgccgccacatcctcgtccttccacaaacacacggtgattcggcgctgcgaatgcggacctgacatcaccgtacagggcgaggccatcgccgtggtcttccaacacttggccaaataaaagccggtcaccccggcaacgaaacgcgcaagaccaagcgcggcacagcacgacataaagcgatataggactgcgcgggagatggggcctcggagacaaatctgaggcctcatctcccatgccccggcactatgccaggctacgccgccatggcggcaccgatggctccgactggttggccgacaggtgccagacgtagccgggccggcaggtccagcgtttcgaggaatcggcattgcgattcgcgccggcgcagctcagccgtgatcacctcgaccaatggttcgccggttttggccatgccaccgcccaagatgatgagtcgcggatcaacggactgagccaggatttgtatggtgtcgccgatggcgcgcactaccatgtccagcacatcgacggccttggcctcccgctttttcgcgcgacggatcaggtcgggcatcggcgggtcggcgttgggccacagacgccccacggatgcgcccgagcagactgtttccaagcatccgtattgcccgcaagggcacttgaggcgatgaggttcgactgggatatggccgatttcgccggccgcgccgctatagccatgcatcagcacaccgttttcgacgatgcccgcagccagtccggtgccgaagttcaggaacgcaatggtaccggccatgccgtccgcaccgcccaatacggtggccgcgccgacggcggcggcattgacgtcgttttccacatgggccggcacgcccgaacgctgcgagaccaacggccccatatccagcgagaccacgtcgagattcacgatattgcccacatgcccgctggccgaatccaccgtgcccggggtaccgataccgatggccctcacctcgtcaaaacgctcacccgctgcctgatgtgccacagcgacgatgtcttcgatcacggcatcgttgccatgcctggcgggaatacgggcggaatccaataccgtgcccattgcgtcgaccagcacagcttcgatttttgttccgcccacgtcaacaccgattttgagattgttcatagtgttctcagacatcagtcctcccctgttcttcatcgaacgtttcgcttgatatcagtgtgcatccgactattgacaaccatcttaacaaattcccccaagacgacactcacatgcacgacacaccgaatgacatattgattgcgtcaatcaattaacagcgttaatatcttaatcaagttcagattcaaagatgagcggaacaactcgcagcggtacagacaaggaggacttaagaccgatggcaacaaacaccacccatgccacttcccaagccagtgtctccgaatccaaccgctcccgcatcgtcaagcacctgtatcacaacggcatcagctcccgcgcgcaaatcgccaaggcactggaactcacccccgcggccatcaccaaaatcaccgcacgccttatcgaggccggcatgattgaagagaccggcgatttggaaggttccaagaaccgccgttccatcggtctcaaactcgacaccacgcggttccgcatcatcggcatcaaattcgcccgctcgctggtgcagatcggcgtgttcgacctgtgcggcaacaccctgagctttgaaaacctgcccacggtgtacgacaacaccatcaacggcaccatcgtcaccatccaccagcgcgtcgaacaactgcttgacaacgacccgtccattgtggccatcggcatggcggtgcccggcccctacctgcgtaacgtaggccgcaccgccgtggtgtccagcatgcagggctggcgcaaaatcaacttcatcgacgaattcgccaccgctttccgcgtgcctgtgttcatcgaacaggacgcccgcgccggagccctcgcacattatctcttcgacccgtcggtgcacgccgacggcaacctcgcctattatctggtcggcgaaggcgtgggcctcggcgtcatcgacaacggtcgtctcatcaacggcttcctcggtgccgccaccgaaatcggacacatctccatcgacgtcaacggccgcccctgcgattgcggcaacgtcggctgccttgaacgctactgctccacccccgccattcacgacatgcttatcgccgatggcaccgtggttcccggcgcggccgatatgacccacaccgaagccgcccgcgccctgttcgccaaagccggcgacggcgacgaagcgtcaatcgccattgtccgcgaagtcgcccgatacgtcggctacggatgcgtcaccatcttcaatggatacaatcctgagcacatcatcatcggcgacatcgtgtccgaagccggcccgatactgctcgatgaggtgcgcgccacggtggccgaacgggccatccccgaaatcaatgcctccacttccatcagcctatccaccctgtccgccgacgcggcggtctccggtgccgcagcagtggcggtgacccaattcctcgaacacccctcggtgttcttcgacgtctcctaaaccaagcgccgacatcacaagatgttccatacgaaacacccggtaaaagaaacaaaggaaaggaaaccaaccatgactaccccgatcgttctgagcctcggtgaactgctgtgggatatgctgccgagcggcaagcgagccggcggcgcccccgtcaacttcgcctaccacgcgatgaagaacggcaccgaaggctgggctatcagcgcggtcggcgaggatgagctcggcgacgaactgattgccaaggccaacgaggccggcatcaacaccgtcatccagcgcaacgcctggccgacctccaccgtcgaggtcgcgctgaagaacggcatcccggagtacaccatcgtcaagggcgtggcttgggaccacatcctgtacacccgccagctcatcgacgtagtctccaaggctgacgccgtctgcttcggcaccctggccctgcgctcccccgaatcgcacgccaccatcacggagctgctcaagcacaccaagccgggcgcgatgaagttcttcgacatcaacctgcgtggcgaccactactccaaggacctcatcgaggaactcctcaaggcggccaccgtcttcaagatcaacgacgaggaactcctgctgctgcgcgacatgttcgacatccgcggcacctccggcgaagacgcctcccgctggttcatcgaggaattcggccttgactacgtgattctgaccgccggctccgcctactccaccatcatctcccgcaagggcgaggtctccacgctggacactccgcacgtcgaggtgaacgacaccgtgggtgcgggtgactccttctccggcaccttcaccgcccgcatcctgctgggcgacacgctggcagaagcccaccgcaaggccgtcaacaccgccgcctacgtctgcacccaggccggtgcctggcccgagtacccggccgagatgcccgactatctggctgaaatcggcaagtaatccacccatccccttatccgccattcgtgcgacttcacgaatcgactgatcgcaaccggtgagattctccgaacaggaaatctcaccggtttttcatatggtgcgctcacactcatgctcttcacatcctttcgcgtgtcatgaactaaagcggtttagaataatgctgttcccttgatatgcatatccctcaaacaaagaagttgaatttatgacgaccaccgcgataccgaagtcggtctcggatttcatgcagcacatcacggacctgtgcggcaccgaacacgccgcctgggccgagaacttcaatgcctgctttgccgacaccctgaccaccacggtcaaacggcatgacgacggcaccacattcctgcttaccggcgatatcccggccatgtggctgcgtgattcgaccgcgcaattgcgcccgtatctggcccttgccgccgaagacagcgatattgcgaacctgatcgccggtctgatacggcaacagttccgctacatcatcatcgacccgtatgcgaatgccttcaacgaggaaccgaacggcgcctcctgggacaaggacgaccggtccgatttctccagcccttggctttgggagcgcaagtacgaggtggattcgctgtgctaccccatccaactggcttggatgctgtatgcgaacaccggcaacgccgatcacttcgatgccgaattcattgccggcgtcaagaagattcttgacgtcttcgagaccgagcagcatcatgaacgctccccgtatttcttcatccgcgacacggacatccccaccgaatcgctgagcaatgacggcaaggggtcgccggtggcgtacaccggcatgacctggtccggcttccgccccagcgacgacgcctgcacctaccactatctggtgccctcgaacatgttcgccgccgtggtgatgggctatctggaacgcatcttcggcggtgagattctggatgacgccgatatcgccgcccgtgccggcgagctgcgccgcaccatcaccgaaggcatcgaagcccacgccaaaacgacgaaccgcaatggcgagacgatttacgcgttcgagaccgacggcctgggtcacgtcaatatcatggacgacagcaatgtgccctccttgatggcggccccttacttggggtactgcgcaccggacgatccgacgtatctggcgacccgacgcacgctgctcagcgacgaaaacccgtactattacgagggcgagtatctcaagggcatcggctcaccgcacaccccgccgcgctatgtgtggcccatcgccctgtctatcgaggcgatgaccagcgacagcaaggacttcaaggcgcatatcctcgaccgtcttgtaaccaccgacgccggtacacatctcatgcacgaaggcatcgacgtggatgatccgaccaagtacacgcgcgaatggttcagctggtcgaatatgatgttttgtgaactggtcatggactatttcgacattcgtgtgaagcactaagacgtgcccgctgaatgctcattgcgcacccaccgcatgttctcgttaaggaaaggaacaatcattatgaccaataacccacggtatacgctcggcaccgaagccaaccgcattttcatggcttccgaaacctatgagctgctgaagttcggcaagggcttcccagcgccgaacggcggttccggctggctgaacgccgacggcacccttgacccatcccacggcgtcgaaacgtggatcaccagccgtatggcccatgtgtattcgattggcgacatgctcggatatccgggcgccggggagctggccgatgcggcgctcaagggattgaccggcattctgcatgacaacgagcacggcggctggtatccgcaggtgttcgcggacggcacccatgcgccgggcaaggtctgctatgcgcatgccttcgtgatactcgccgcgtcctccgccctgctggccggacgtccgggtgccaaggaactgcttgacgaggcgcttgccacgtatgacaagcatttctgggatgacgaaatcggtttggccgtcgatacctggaataccgaattcaccgagctcgacccgtaccgtggtctcaacgccaacatgcacaccaccgaggcattcttggccgtggccgacgccaccgggaacaacacctatcgcgtccgcgccggccgcatcatcgatcatgtgatcggctgggcgaagcacaacgagtggcgcatccccgaacatttcaagtccgattggtcgctggacctcgaatgcaacgtcgacaagaaggatgatcagttcaagccgtacggcgccacgccgggtcacggcatcgaatgggcccgcttgatcacgcagtgggcgttaagctccttcgccaaccttgacggcgcacagccgtacgtcgacgccgccgagcatctgttcgcgcgtgccgtggccgacgcatggaacgccgacggcaccgtgggactcgcctacacgaccgactggaacggcaagcccgtggtcaccgatcgcatgcattggacgctggccgaatcgttgaacacttccgccacgctgtatgcggccaccggcgaggagatgtacgccaactggtacgccacattcgcccagtatgtcgatgagcatgtcatcgaccacgagggcggttcctggttccatcagcttgacaagaacaaccacgtgatcggcacggtctggccgggcaagtccgacctgtaccacgccttccagtccacgctgattccgttcttggacccggccgtgtccattgcgacggccgtgaagaacgctgaataatcgacagcatctaagcctctatatccttttttcttcctctttctcaacggcgttggcccccgtggaatacggggggccaacgtcgtactggtcgcatgtcattgtctgcaagccgatgcaatgaccgttctacgccatggtatccatgggcttggcggtgctgtcccgaatcaccagtttcggggtgaggattcgccggttgccgctcacctgctctccggcaagcactttgagcagcagtttggccactttggcaccgtattcgctggcatcacgatgcgcggcggtaattgacggatacgccgcctcacaaatgaaactgtcttcaaaactgacaatggcgggcagcccattcggatagacttccgcatggccctcccccgcctccatctgccgagcggaataatcttcggccatggcgtgaagactggccgcggcgaggatctccgtttcatagatgaacgcggtaggcggcttcggtgaatgcagcatctccaacgtgagcatcgcggcctgttccgcaacaaaatcggtgaattcgatgttgatggattccagctttcgccgtttggcaaatgcgcggaacgccgcgacacgcccctgtgaataatccaggttcggatcgccggaaagataggcgattcggcggtgtcccaatgacgacaaatgttcgagcacggttcccatcgtgcgtgaatcatcgatggacagtgacggcacataattgttcgggtcgggtcctccggcaagcactgcgcgcacacccagattcttcaacaattccgggcgtggatcatcggctcgcaaatcgacgaggataacgccatccacgcgcttgcgcgacgcccaatccttgtatacgctcatctcctcgttcaggaatcggcatgggcggtacagcaaaccatagcctttggggctgagcgaggcgtgcacacccgccatgaagtgcagcatgaagctttcatccgtgagcccctgcgtggatcgtgcgggggcaaagcctatggtcatggtcttcgaggatcccagtgcttgtgcggcgtagaccggcgtccagccgagcctggctgcagcctctttgacccgacgtttggtttccgcggaaacgccgggccgatcattgatggcgaaggataccgcggtctgcgagatgcctaattcatctgcgatgtctttcaggctcacacgctgcgtgccgtcagacgatgacgatgcctcgcgagcagatctcatgaacactcctttttacgaccgcattgcgactattgcgatacggttgacggcacccccgcattgggccatatgcatcaaccgtgcgctaactcttatgatatcaataattttagtcaaataactaaagcattttagtcactggtctcggcatatgtcttgcgacaaaacaaacgggatttaggggggcacccattgggcaacccctaaatcccgcttatggcacgagtatcaacacccgtattgcgacgaactactccgtcttgccacgagcgcgaagtaccaccgcacccgcgccaagcagcaccaccatggccgccacaatcgcaatgaccgacgaacccgtggcactcaacgaagcgccattcttgtcattgttcttgttgtcgttctggctgggcttgttcggcttggtatcgccaggcttgttctggtcgccgggcttgttcggcgtcaccgcgaccttggtgaattcgacggtgacgcccttgccgatggcattgccgttcagcacggccttcaccgtgtacttgccgaccttcgtggacacgacgttcagcgaagccacgccggcggcatcggtcttgacggtggtgtttccgccaatggccgagacgccttcgggcagttcaaacgccacctcggcattggccagcggattgccgaacgaatccttgaccgttgcctgcaccgtgcggatggccttgccgtcggccacggccgaaccgtcgaccgcggtcagcgtggacttcttggcatccggctgggtggggtcggcgaccgtgcacttggccagttcgtcggcggtcggaatcttgaccggatcggtcttgttgccgctgtaatcctcgacctgcacccgcagttcatggccgtcgggaatggacttggtgtacgactccggagtggtgcggccacgaataatgccggtaatcggcggagtgttctgcgaataggcgtacttggcacccagctgcttctcctgctttttaccgttctcgtcggtccacttctcggtcatgtagaggtaacgccaatcctgagtctcgggacgaatcagcgacacattgtcgccattccacgtcactgagcaagccgggtatggctcgatggtggcatcggcgaatgcacctgctgccgtggtggtagcgccacctgcgttgtcgacagtcaccacataacgggaaccgtcaaccggcgcattcggaatcgtcacgtcgctcttgtcggcagcgaccttgacggtctgggagtatggctgaccggcgtaacgccacgaaccggtgtcggacttaacggttacggttttctcgccggagacctgcgggttggtccaggagaccttgacgttaccgtccttgccgggctcaaccttcacgctggacacggccgccgcttcgttcagcggcgcttcggcagccatcgagcgcgaaccgtccgcgcccacggcgtacaacttcagcgtgccggtcttggcaggcaggtgcttgacgtacagggtgtcgtcgtagcggccaccgaggaaggtgttgtccaagtacagcaggtagttcttggtggtggcgtagtcggcgagatcccacttgacggtcaattcgtcggaatccgcgtaggcgcgctcgaccttgaagccggtcggggcggccggcgtgtaggcagcaccgtcggtgacggtaatcttgccgatgttcacctggtagttgtcgatcgggttcgctccggccttgacgatcaggcccagcgtagcgattttcttgcccgcgtactgggagaggtctacggttgcggtcttccagccgttgctcgccgcgccatccgccacgtccaccggcactacggtattggtgtcgtcggcgaagatgaggccgagttgcagcttggaatcgtcactgttgagcttgttgtaggtcaattcgatcttggagccggcagtgacgctcaagtcggtcttgtagagacggacggtgttgtcgctggagagcttgccgctcagcaccagcgaatcgccgccttcgtagccgccgaccttggtgtagttgaagcgcggtgccgtctcatagtccttgccatagtcgaagtcggcttgcagcgggtcggaatcggcatcaatccaccactgccaagtcggcagaatgtcttgcaggttgatgttgccccactgctggttgctggtctgttcgccattgtcccgccattcaagaccgtgaccggtgttgaatgccgtggagaagaccgggccaccgatgacggagcgttcggcgatctgtgaggcgaagcccttccagccgtcgctgctcgtaccatcatcgatatacggatcagagatatccgtcgtgcccttctctccggtggatgaaccagtccacaagcgacgttcacggtcgaacacctggttttgatacttcggatagaccttcttgtcgtcacccagctcatgggagacgaagtcggtgccgagcgcggcaaggctcacatacggtttaccgtcagcatcaaggttgacgttcatataatccgcgttgctaccgatactgccgaatttctgctgtccggcctcgatgcctgcgaacaccgcatacttcggatcaatgccaaggctcttagcgtggtcggccgaatctttcagcatgtttccgctgaaccaatagttcaggaagatcgaatcggagattttgccctcggccccatcttgcacccacggtgagtttttctcgttaaatctgttctggtagccgatattaccacccgggtatgttgcagagtcataccactggatgtaaatgccctgattgacgatctgcttcatgaaatcccgataggctggaacatcatcggagtttacattggattcctgattgacgaagtaaccatcaaagccgtagtacttggcaatttccaccaacttgtcggccaccggataggtgccatcggcacgcttgccttgaagcaaatccttataggtctgttcaccacggtcgttgcccgagtagaaaatcgtcgcaatcgacttcgcgccattcttatgcgcggcgttcgtgtacgctgcatttggcaagttcagcgtaccgaattcaaaccatttctgagtccaatcagactgggccttctcatcgtagaggctcttcggcacgttcgcggtcggctggccatgccaggtgccgtaataatccgtgtactgccagtagttgaacaggtactgcgagaacacattgttgtcatggaacgactcaaagaacgcgttgccatagtcgccggcaaggttgaacatctccgtatcggccggaaggttcgggtccttctgcgtcgcggcgttggcggcgatgcgggtctgcaacggcacgcgggaacgcaggtactccgaatccttatccactgccggattccagttcagaatatctagaccggtgtaaccatgctgatacggctggttggctcccgcagcctgctccggatgactggtatcggcatactggcctccccacggcatggtgtcggtagcgcttgccggtgcagccagtgccgccagcgtggccatcgacagcaccgcggccaagccagtccgcagccatttcctgtgttgagtccaagcagaagcacgcccagcgggatcgcctgatgacaatctcatctataatctcctttgatttcctccgactcacgccggaaatcaaccgtctatgcggcttgcgtagacggtggctcaaaccggtaggacggtttgagccacgggatacggcgatatctcaccaacgccatatcccacattctctttttctctcacccgccgaccatatcggccgcaatgagtaggtcatgagacttacggaacatacccctctccgacttgtctcatgcacatcgtcagcgatgtatcacgatgcttacgctggtatcgcagtcgtctgtatgtcgggtatcatcgctattcaaagcggctgtcagggcaaacgtcacacgcacattgtcatcagcttcgtccatcagccgttcaaagggtaccgagaacgataccgcgtggctttcgcccgcctcaagcgtcagagcaacggaatcgaccagcactgccaaacgtgggatacgacgaccgccactgacgtgtgcgaagaggttcaccgaaccggccgtcttatggtcgccggcatatgctgtcacctgcaccaacacctcattcgtgcgggattcggcatcggcatgcatcccactaaacgtcactccagccaaagaaccggctccgtagccaaactcgcgcaataccggttccgccgcatccttgtatacatgggcggcactttgccggtcgttgtatcgaaccggaatggctgcgggatgcgcaggcagcgttacaggaaggcagcccggcaaaccggcaccgtcaatcagcacatcagccacggcctgcggaccatactggccagcatatccggcccaaatcgtcacagcggattgacccattacatgagtcagcacatgcgccctgccgcacaccgccaccgaaacaactggagcggtggtcaatgccacgacttcgtccagcatttcatcctggtgccaaggcagacggatgtcagacaagtccacgccttcgccgcaggtggcaccgtattcggttacggccttcgccgcgccattgtcgtcgaattcactgtcatagctgcgttcgctggtgctgccgcatacgaataccacggtcgacgcacgcgcccattgatcggccggcgcatcgctcggcttggcggccaagagaacccggtcctccccgagacgtgccaccaattgccggtagacgcttgactgttcatcggcgggcagaggggcggtgtaatcgcccaggaagcagccgaaatcgtcggcgaacgggccggcgacaatcacagggccggcttgagcatcagctatgacgctgcggatatcgtcgagcgtggcggcagactggccatcattgatcagcgttatcgcctcgcgggccatgcgcttggcctgctcacgcccatccgcagtggcctgcgcgatggcgtcggcgctcggcatggcaattgcggcggtatcggcaccgtcttcgggcaagagaccgaacatggctttgagttccagcacccggcgcaaggccgtgtcgacagcggccactacctgttcgtcatccgcatattcttcgaggcgggtgaatccttcatcccacagggagacgtccacgccggcgagcagtgcggcacgccctgccgcgggaatggagccggccatgtcttcgagccgatccacggccaggccatcggccatcacgatgccgtcgaaaccgagctggtcgcgcagataatccttgagcagccacgggttggcgcagcaaggtacagaatcgatatcgttgtaggctgccataaagcccaaggcaccggcgcgcacaccggcggccaccggcggcagatgaatttcatgaagatcgtgcgggcccagtacggcggactgtccgttgcggccgcccacggcctcgccttgcgccgccagatgcttgagcaccacggccactcccccgtggccgaccttgctgcgatgctcaccctgcatgccggtaacgatggcctcgcacatgcgggcagccatcagcggatcctcgccgaagcattcctcgcaacggccccagcgtgggtcacgggcgatgtccaaaccggataccaatgcgatatgaatgccgctggcggccagttctgcggcaaccgcggcttccgcttcctgcaccccctgcgggtcaaacgtagcgcccaaacccagattggtgggcagcaccgtgccgcccagcgcctgatgcccgtgaggcgcctcttcgctgagtaatacgccgatgccgtgcgcgccacgttccagcacagtttgctgcaccacggcaatcgcctcagtccgctcctcagggcgtatgccgttaccccaatgttgaccagaccatgggtcggctcgcaatagaccgtacagggtgccgagtccaccccatcggtcaatctcctgcttgagctcgtccgaggccaccagccgtcccgcagcattgcgttccacggacttccaaccgagcagacgctggttcaactggccaactttctgcgtgaagctcatcgaatcaatgagtcggtccactgcggggcaattgatgctcattgagcgctcccccttctcgtatattgtcttctcgttcttctcgctcttcggcgagtaccgggtcttatgttttgccctgcgcactgcaattgtgcgcactgcaattgaaaatatccggctgtggaacaaggagtagatgattccacaaccggatatcggtttaatcagccgtttcgaacgatgggtccgaaaccgcagtgtagtaacgggcggcataggggtgttcgtcagcgtgcaattccagaatgccacgctgcgcgagcgcctcttgattggccgccacctgcgaggtgatgatggtcgggcgctggcccgccacctgcagcttcatccacaggtcgcacaccgagcctcccgggccgagcgcactgcggttcaccgggtttccggcctcatccacatcaatcaccacggcgacggtcttcggctgagccggcaatgcggaacggtactgtgcggcgagttccccgaacgtacggccgatcggcttcagctggccttgctcgtcgaacaagcccagagagtgctcgaagaacgggaagtcttccatgctggcgggcacatcgtgcgagcaccaccacgtcacaccccacaggttccggcaatccatggcacgttcaacggtcttgcggcagaattccggcgtgtagtcggtttccagcacattctccggcgcaccgacttcctggagccacaccgggcgctcggaatccttgccgaacgccttggccagctcggccaggtacagtgcgtacgacgagcactcctcactggtggcgccgtatccttgcgcgatgccgttgaacacccaggagtgaatcactgtcatatcacccttggtggcggactgcaccggagtgaacgggtgcccatcgatgaaccaggtgccatcgttgacgctgtacagcgcgttgtgcccttcaccggcggcggtcggaagcagcgcgtccagccatgcgtcgatctgccggtccgtggcgctcatcttcgtgggatgcggcctgtcagacagctgattgacctcgttgcccaaggtcagacccttgaacgcgggttccttggacagctcatcggtcatggtcttgaccagttcacgctcggccgcaacggcgtccgcatcggtgaacatgttgcccgcatgccaggtgaccagccatgaaggcaagaagtcgaagctggacagatgcccttggaacacgtccacataggcatccaaaccgtgctcgccggcgatgtgcaccatgcggcgcacatccgccacgcccttcttgttgatccaggtgcgattaggttgcagatacggccagatcgggaagatgcgcacatggtccatacccagttcgccgatctgcttgagatcgttgtcgatgccgtcccagtccgggtcgagccatgcgtggaaccagccatgcgacggcgtgtagttgactccgaatttcattggagtacctcctttttccagtccgctcagcccttgagtccaccctgttccaggccacggaagaagtagcgctggaagcagcagaagaagacgatgatcgggataagcgagacgagcgcaccggcggcgatcagtcgcggatcttggatgaacatgcccttgagtcggttcatgccgagggtcaaggtgtacttgctttcatcggagatcgcgatcaacggccacaggaagtcgttccaggcaccgacgaatgcgaagatgccgacaacggtcatcgtgcctttgacctgcggtacacagatgtggaagaaccgctgccataggttggcaccgtccaccatggccgcctcttcgagttccattggaatggatttgaaggcgttggtcatgagcaggatgttgatggcgccgcacaggccaggcagtgcgactgccagcagtgtgttctgcaggtggatggagcgaatgatcaggaactgggagatcatcacgccttcgatcgggatgaccatggtgcccatgaacatggtgaacaccagtccgcggccacgccacttcaggcgtcccagtgcgtagccggccatcgtggagaagaccacgttgccgaagatggagatcaggcagaccaccagcgtgttgagcatgtagtggaataccgggacctgcttgaacacggaaatgtagttgtccagcgtcggggtcttcggcatcaggtagggaggcacggcgtagacgttgtcgcccttgcccttgaacgacagggacagttcccagacgaacgggccgacgagcagcaggaacatcagaatcagaatcagatactggacgactttgccgacggtgaccttatgcgtgttggtattcatcagtcctcacctcgcttttgtacgatctgctgcacgatgagcatgacgccgacgatgacgagcacgacgatggagatggcgctcgcgtaaccagtgcgggcctggataccggtgccttcgcgcttgataagcatcgacatcgtcatatccatgccgccggggcctgcggagccgttggtcaacacgtagatttcgttgaagactcggaatgcggcgatggtggacagcatcatgatgagcatcatcgtggagcgcacgccgggcattgtcacgtagatgaactggcggacagggccagcgccgtcgagggaggcggcttcgtaaagggattcatcgatgttggcgagggcggtcaggtagatgaccatgtagtagccgaggcccagccagattgtcacgaacatcgagctgaagagcacgccccatcgatcggtgaggaatggaaccggcttggagatgatcttcaatgccttgagcacggagttgaccagaccggcggaatccagcaggttggtccagatcatacccaccacaacggcggacataaccaccggcatgtagaaggcggtgcggaagaagcccatgatgcgggagttgcccttgaccagataggccaggatcaacgggaggatcaccatgaacggcactacgcagatcacgtagagtgtggagttcagcagtgccgtgaggaagtactcgtcatggaacagtttgatgaagttttcgagtccgacgaaggttcccggacggagcagtgtggagttggtgaaagcaagcctgaaagtgttgagtgccgcaaggacgatgaatacaaacacaatcgcgaacgctggcagaacaaacaggtagggggcaatgatggtgccgaagctacgattctgcttcttgccgtggttgaggttcatcggttcaggccggtcggaggccgtgcgggcctccgacctgtcagcggcgagtgccgcgttgctcactgtgcgagcttctcgtttgcgaactcgacggacttgtcaagggcttccttggcggtctgcttgccctgcatggcgagggcgatctgctgctggaagttcttggagccgttgttgtcggtgaactcggacggacgagagccgtagccgtccttgacctggtcgagcgtgatcttcagagccttgccctcaagggtgctttcgtcgatgctcttgtagtagtcgtcatccagaccccccttggcggacgggaacacggaggccttcttgtcgaactcgatctggttcttctcgttggtcacgaatcgggcgaagtcaatggcaacgtcggggtgcttcgagttggcgctgatgccgagcatctcgtaggccacggaagcggacttgccgtcgttgctgatacgcgggccgactgcgaggttcttgtaaaggtccggagcgttctgcttgaagccgtcagcggagtaggcggagccggccatggagaccaggttgccacgctggaagagatcggcggcctggctccaggaggagtcgagggcctccggcgggatgccgcccttcttgtacagctcaacgaagcggctgatctgcttgacaccggcctcatcattgaaggtgtacttgctgtggtcatcgttcatgaaggacttgacgcctgcggtcatcagatcttcggtgttgtaacccatcgtggtgcccaggtagacatccttgcagttctgcacgatggtgtcgccggcggcgaagtactcatcccatgtggtcggaatcttgttcggatcaaggccgcacttctgcatcagctcggtgttccagtaggtcgggccatcgttgacataccacggcaggccgtaggcacccttctcgatgccattgccctgcatggtcacggacttccatgcgccttcgtagtagtccttttccgcatccggagcctgcttggagacatcgagcagcgcgccggccttggcaagaccgtacaggatggagttgccgccgtcgacgatgtccggcagttcgccggccgcagcctggctggacagcttgtcttcgtaaccatcggacggggcgtcaagccacttgacggtgacatccgggtgatccttctcataggccttgatcagcgcctcgaaatatggggtgtacttgtcgttcttgaggttccaggtctggaaggagatctccttcttgccgccgtcatcccccgcagttccgctaccacaggcagccactgatacgagcatcgcaccggcaccggcgatggcgaggatcttcttcatagaaaacatgatgttttcctttccttttggttcctttttcaccccgccctgctgtggacggagaaaaactagtcgttgctatccagcacagtcacctgtcgcggtaatcggcttgacgtcacaacctttattcgctcatcgctgagactaaaccgctttagtttccggccagttgcgagcctgcaaactaaatcggtttagcaagaatataacacaatcgaaacatgcacgcaacgaattcatcgtcgcgtgtcgcattgatatttgcccaacgggatcgctctccctcttctcatacaataatgggccgcgcccaaccgtatggcagagccggtctgtttcggttccgttacggttgggcgcgacccaaaatatcgagtctaggcccaatatcccttatcggcgaatacgcagcgtggcgagctggaatggcgccaacgaaacgaccgcaccgtcggcaggcattggttcgtcaccggcgagcgcgcgcggcagttcggcatccagctccggctcctccatgagattcacctcccgcacgctggccttggcatcggagagagcggcgtcaaggcgcagtgtggccgtggcattgccgccggcggcctcgtacaggcgcacgatcagatcgctggaaccgtcatcggcgagcttgatccagtccaatacgatgacgccggtggcgtcggcgagcgagaccagcggcgccatatcaggcaactcccctattacggggctgttgagtcgcgccgcttcgtccagcaccgcattcatatcggcgtcagcgaccagagaccacgcgaaggagtgtgcgccttggtcggtgcgtgggtcggggtacaacggtgcggacagcagcgagagccgcaccatggtgccgcggccggtgccatgtgccgcatcggcgtggatggggctgacgtcggagccgtaggtggaggcgttgaccacagcggcggcatagtcggcgtcggcgatacgcacgaagcggtgcgtgcagctttcgaatttggcatcatcgctgcgcgtgttcttgttgatggggcgttcgaccagaccgtattggcattcgtattgcgcgttcaccgcttgcacggtgaccggcatatccactttgaggaactgttcgacggcatgccagtccacatcggcggtgaagtccagtgtggcggagcccggccttaaggcaatgcccgtacgaatttcaacgcccttcgcgcgagtgacagcatgcacgacggccccaccgttggcggtttcgtccacgcttgcaatcgatgcctcgctgagcgcgttggcggtgaggaatgcatcgcgttgaatatcccaagcgtcccagtggaagggttcgtctttgagcatttcgtagcggcccagtcgggtgccggcgggcaccagttcacgattggttcgctgatcgacgattgacgaaacggtgccgtcggcttcaatgcgcacgtgcagtcggccgttgtcgagcacaatcgtatcgccgtcatgggtaacggcgacccgagccatggatgcggttcccgcttcggctcggctcgaagccgggcgtaccacccacgtctcacaggcttggcgggaatatggggcgattacggcgtcggttatggttgcgtcattgggttccacgactgcgatcgcgcgcccggcttcaagggcgatctcgttcagccgagcgatgtcacgcgcgtattcggtccgcgcctgacggtgtacccatgcgatggccgaaccgggcagaatgtcgtggaactggttcaggagcagcgttttccaaatacggtccagctcttcgcgcggatagacatagtccgggttcttgatgcgggccgcggcgcacaggtattcggtgacgcgcagcatcgactcctcctggcggcagccgcgcttcatgtcctgctgggcggtgagggtagcgcggtgcagttcaaggtacagttcgcccttgaacaccggggtctccccttgcgcatcgtcgacgatatccttacgcacacggtcgaacagttggtcgggagtaccgaattcgatcttcggcgcgccggcgagatcatggtcgcgccggatgcgcgcggtcatctcacgggtgggaccaccaccgccgtcgccgtagccgtacagcagtatggcgttgcgggagaggtccttgtccaggaagttgcgctgcgaatacatcagctcgtgcatgctcatccacgagcagtaggtatccgagggcgggaagtgcgtgagaatacgcgtgccatcgatgccctcccacatgaacgagtggtgcgggaacttggtggtgtcgttccacgagatcttctgtgtgaggaaccagtcgaatcctgcacggcgggcgatctgcggccaagagccggtgtagccgaaactgtccggtagccagatgccgcgcggcgcgacgccgagatgctccttgaaatatcggcggccgaacgtgatctgccgcaccaatgattcgccggaaggaatcatgttgtcggattccacccacatgccgccgaccgggatgaagcggccctcttcgatgcgccgcttcattcgtgcgaacaggtcgggatgctcctcttccagccatgcgtactgttgggcggaactcatcgcatacgtgaagtccgggtcttcgtccatcaaagccagcacgttggatacggtacgggccaccttgcggcgggtctcgcgcaccggccacagccatgcggagtcgatatgcgcgtggccgatggcgatgtgtttgattgcgctggaggcggccggttcggcgagtacgccggcgagcgccgcacgggctgccgacacggtttccaagtcgcgttcatcgtagatgttcagggagcgttgcagtgctttggcgagctgccagtagcgcgggtcgtcgtccttgagctcacgaatcagcgaggagacggtttccagatccatgtagtaggcgaacacgtcttcgttgaagatggtgacgtccatacgactcagtgtgtatgggaagtcacaggtgccggtggcctcttcgccgagttcggtgggtgagaacggggtggggccttcgacgaatgggttggcggcggcttcgatatagacggtgaagtcgccatgttcatcgagttctacggtgctgctgccgtccgcgtagacgagtggaatccagtggttgcgtgggttcgcggatttgatggcggtgccgtcggcacgatagacaagtccctcggattggaatccggggccgcggtgatcgagccagccgaggtctaccatgagttcgacttttcgtcctttgaccgccgccatgtcgatgtggccgttcacctcgaaccatgtggtgccccatgtggtgccccagacgccgggaacgcggaaaggttcgaagggcacttggccgttgcgcactttggctagaaattcgctggagggcaccggttcgccgggattgtggaacgaacgcaaggtgcatgcggcgagtgtggtgtggatatgcggtttgacgcgctgctgcatgacgcggtcgcagcgctccaactgctgatcgggcagaagaaacatggagaattctcctttgctgtgtctggtgggaatgatggaaatgatgggtgtggtggtaatttggaaaaccgtaatacgacatgcttctgcctcctcatggttcgaggaggcagaagcgtcaggcgagaattcagcgcgtgacgcgcagggtggcgagctggaacgggccgaagtgcagtgtggcgccttcggcgttctgtgtgccgtcttgcagcgcgaccggcaggtcggtggccagatcgtcgccttccaacacgttggtctcatgcaccgaagcgcctgcgagcgccgggcagacgtgcagcgtggcatcggccctgccgccggccgcctcataggcacgtacgatcaggtctccggagccatcatcggccagcttcatccagtccagcaccacggtgccattgacggactcgatcgaggcgagcggcgtgatatcgggcacatcatggagtaccggtgcgttgagcacaccggcggcgccaagcgcacggcccaccgtggcgttggccaccacggaccagtcgaactcatgcgcaccgatatcggtgcgcgggtcggggaaggtcggcgcggagagcagcgacagtcggaacatggtgcccgagtcacgaccttcggcggcgttcccggcgatcggtgaggcatcggacccgtataccgatccgttgatgacggccgcggcgtaaccggcatcgccgataatggcgaaacggttcgtgctgctctcatacttggcttcgtctgatgcggtgtttttgacgattgggcggcggaccagaccatactggcagtcgtaggtcgcctgatcggccacaatgcccagcggcaaggcgaccttgaggaaacgttcgcgctcatgccagtcgatatcggcatggaaatcaagcgtgtgcgaacccgggtgcagcgtgatggtggtggtgatgacggtgtcatcgtcggcggtgcgcacgcgaactcgtgccgcaccgttttcggtatcgaccgattcgattgatccggtcatggcattcgccatgagcagggattcgcgttcgatctcccacgcatcccaaacggcgggttcgtccttcaacagctcgtatcggcccagtcgg

SEQ ID NO: 1332 - DNA, 4188 bp, Unknown
  R157_18m  MAG No. k141_14452
gatccggatgcgttcctgtgccgacaagtgggaatacactttcctcatgggcgcaacaccttctccagttagaacctgaacacttccaaccatagagcgggtgttgcgcttctatctagaacccgggttcggcccggggcaaaaccgaaaaacgtagaatgaaagggcaacgttccacctactgaaagaaggaacattatgacacttgcatttgttgtgccgggccttgatgaagcggccagtgagaaggccatcgccatcctgcagaaccgactgagccaggagcaggaggccgctctggtcctgaagcacgcacactggaacgtgaccggcccgaacttcatcgccgttcacgagatgcttgaccccgaggtcgaggccgtgctggctcaggccgacgagaccgccgagcgcatcgccactctgggcggcaccccggacggccgcgcggacgccatcgtgcgcaaccgcacgtggaagtcgttcgacgccgagggccgcgtgggcaccgaggagtatctcaaggcgctgatcgagtactatgacgccttcatcgccgacgaccgcaaggccatcgccgagctggacgagctggatgtgatcagctccaacatcatccaggaccacgtgcaggaactcgaaaagttccagtggttcatgcgctctcacctggcataagtaaaagcagtattccgtggctcccctcaaagaggggagccactttcgtctcacgtgaaatagagagtctccacatacataagttggaaaagtgtataaaactccccattttgaggttggaaaacgtagccaaaaccgcattcttatggttggaaaagtgtaaaatatgcgctataaacagttggaaaacgtgcccagcatagatgcaaggcctacaaatgactggagattctcatgctgcgaagaaaaatcgagacacagctggaagcttggagatccgcgccgaaacgcactgcactgctggtcaccggagcccgtcagattggcaaaacctatatcatcaggcactttgcccaacagcattacgaccatatcgccgagctcaatttcatcgagaaccctgacctcgttgcattattcgatcggccccgggatgccaaaaacctactgatgaggctggaactggccgtaaatacgccattagtacccggcaaaaccctgattttctttgacgaggtccagcgttgcaaggaaatggtcaccgcaattaagttccttgtagatgatggtcggttcgattacgcgctttccggctcgctacttggagtcgagctcgaagatatacgctcggtaccggtcgggtacctgaccgagctggatatgtatccactggatttccaagagttctgctggtcgcagcatatcggcaacgacgtattcgatatgcttgccgaatgctttgccaagcaccaggaagtggatgagttcattcatcaaaggctcatggagctatactccaaatatctggtcatcggcggcatgcctgccgcagtcgactcgttcgtggcaaacggcagcgttgcggacgtgcgcactatacaagagaacataaagcgtgaatatcgccgcgatatcagccaatacgcgcgcaaagaagaccggctgcatatccgcgctatctacgatttggtgcccagcgagttaaataacccaaacaagcgctttaccttcgccaaaatcgaaaagaacatgagattccaatcggttgcttccgatttcgattggctggtcaatgcggatgtagccgtcgccgcgtacaacgtggacgaaccgtgcacaccgttggagatgagcaaggaacgtaacctcttcaaactcttttacaacgacgtgggtctgcttaccggctcgtttctcaagaaaaccgcgctcgacgtactcgacggcaaccctgatatcaactacggttcaatctatgaaaatgcggtgacccaagagctacgcgctcacggatttgacctgtactactacaacagtaagaagcttggcgagctcgatttcctcatccaagaccgcaacgatcacgtgctgccgattgaggtgaagtccggcaaatcctacaaacgccatcgcgcaatggacaacgtgctcgcccaccctgaataccatctcaatacaggctatgtgcttggcccgtgcaacgtctcagtcgaagggaatgtaacctacctgcctgtatacatggccggcatgttccataacgaatgacgggccgcacacttagtcaacaagtacatgtcggtcagatggttcggactggtcagagggcccgctctgatcagttaggtcggtctgaacggactggctgggctggtcggcctgagtagcccgtttggaccgatccggttcgcccttgctggccttcacactgcttcagctccagctgaagttcgctgatgcgccgttcgagttcgtcgatgcgccgtacttgtggcgaagtgagactgaggggagcctacaaaatgctcacaggccgagggcaccggccacggccatggcctcgtgttcgggatcggcctggccgatgtgtacgttgacgtgaatttcgtcatcgcccggctcttcgagaatgtcggactgggattgcatcatgctcggcttcatgaagtggccttggcggtgggaaaggcgttccatcacctcgtcgaatgtgccctgcatgtagacgaacaccacgccttgacggcgcagcttgtcgcggtagatcttcttcaacgccgagcaggtgaccacggcgggctcgccggcggccacgcgctcgccgatccacgcggcgatggtgtcgagccaaggccagcggtcttcgtcggtgagcgggtgtccgacggccatcgagatggtggcgcattcgaaccatgcgaacgaatccgatcaggccatcagccacatcgccggcactgaagcctgacctgtcatcgtcacagcaccacgcggcggttgaggtcgcggcgtagcgtcttccagccgggtaggtaggcggtcatgcggcgttggaatccggcgccgtggccgctttcccacagatgcgtcatctcatggaccaagacgtattccaggaattgcggttccatcactcccaattgaaggttcagacggatgcggccggttcgcggcgtacacgatccccagcgcgaggtcatgacccgtagcgtgatatgtgtgggctgccggccgatgaccggcccccacttggccagcagctgtggcaacgcggcgttgatcgcggccgccgcttgtcgtttgcgttcgtcggtccagatttgggagcggtcaaaatacggttggacattcgtaccggcttggcccggcccggcgtcaccaattcccggacgactgatatcaccggttttcggacgaccggcaacgcctccatcatggccgctggcaccagctacgccacgacctccgttctcgaagccggcaccctcgttcaatgccatgatggagcgccgttgcgcctcagccatgcgctgctgctgggcaagaatccacgaatgtcgctctttgacgaaatccgcgatacgactctcgctcatccgcatcggtgcggagatttcgacgcggccgctcggcggtttgatgcgcagatacaggtttttgatgggtttgcgcgtcaggtgcagatggatgccgtcaatgtccaacgactgcccggcggcagcggaccgaacggatttcggcgcaccggacttcggagcggtggattgacgacggcgataaggcatgcaagtcattcttacacaacggcggacaacaagcggcacacaatgccgcccctcacgaatcggcaaccggcgctgctacattcaatccgcataccaactgcccacaccggagaaggtcgcgcaggagaaggcctcgctgctcgagatcgacgacagcttccagaagatcgtcctcgtacgcgacgtggtcaaacccgaccgcgacgaacacggcatcctcacgatgagcgtctacgatttcctcctcgacccggacagcctgacgatgtgacgccggacggccggcaaatgccccggaacgcagcccccccactcctcgaacaccgccttcgcggtggccgaggacaccatgacgagacagccgagcatgatggcacccagcagagggtgccgaagttcgcgatgacgtactgccacaggtccgacccgtccgtgtagccgtcga

SEQ ID NO: 1333 - DNA, 41284 bp, Unknown
  R157_18m  MAG No. k141_14481
cacgatcaggaagatgaaaccaagcgtgggggcgacgcccatggagatccagccggcgatcgcggtgcgcggatccttgagcagattaatgaagaagttgataattcccatggaatgctctctgtgagtaccttacatctaaacgttcaaaattacgtggttcaggctgcctgtggcggttggcctgaacttccgcacgcctgcggaaccaatgtcagcctaccagcgcccctctaatgcagtgcctagtaacgtccgacgggtggcaaatctgcacaaaccgtcaatgtttacggtggctatggctctgctcaatcagcatgattccggtggtctgcaggtgcatcggaaactcgttggcggtcgtccgacctctgccagcgaacccgaccggagggcatccgtttggtcggcagatgtcacgccagcaaacaccgggtgggaaccgtccgtgtatgtcggcgactgtggcctgattcatgagtctcgtccgctgaagggtctttttcccgttcgtcaggttcgaatctgcctgctgatgcgggtggttgcgtccgtaggttgcgagtatcttgcgactactcgatggctacggcctctaaatcgacgttttggggccgtagctgtcgaggagaggcctgctgctcacagatggtggtcttgtagtcgcaagaaggtgccgcctttagcgtgtcgaaacgtttgacatattttctgtgggggggggtatggctattgaaacgttccggcgaaacgattcgattagtgagatcgaggggtttcgccagtggcgactagcgtcgatgcaacgcattgcagcgttgaaggacgcgaaagacgatgtcgagaacgcagggaagccgaaggggggggcgatgacgatggcaggcatcaaggatgtggcctgtgaagcggggtgtccgtcagcaccgtctcgtatgtgctttccggcaaacgttcgatttccgccaagacgtccgacaaggtcatggcggcggtggagaagctcggatacaccccggacgccagcgctcgcaagatgcgtggcatacgttcataggtcatcgcattaagtgcgccgattcgtggcgacattaatcaggccaaatacaacgcctacttcctgcataccgcgtgggtggcgaggaatgccggttatgatgtgttgctgctgaccggactggacgcggtgaacgacatccgtcgtgtgacgcaaaagcaatttggttgatggcgtggtgctgctcgatgccgagcaggatgacgagcgcgcgacctcatccggcgatttctccaaaccctgcatagccatcagctacccgcaggcgcatgagggttgtgcctgcgtcgacatcgatttcgccgaggccgggcgcaaggtggtggattttctattcgacaaaggccgccgtaaggttgcgttcctgcgcaacaacgaggctgattatgagtgtcgttccggttatgtcgtgatttttcgcgaaagcatgctgtcgcgtgcgaaagaacgcggcatgacggttgttgaatcctcgcgatataaggatgaccgtttcgacgcgattcgctttgtgcgagagacctttgctgatgaggatcgtccgacggcgataatcaatcaggctaacgtcaatgtgctcaactgggtactgcaggaactgtcggtcgcagggctatcggagccggaggatgtttcggtgctgtcatgcggcacgtattttgacggcgaactgatgatgtcgcgtccgattaccgagatgccggtcatgccagagaagttatgcttgcaggccatggggcttttggtctcggcgattgagcaaggcgtcaagatcaagggtgatgtcgagcttgaggctcccgcagtgaagcttcgcggttccgttgccgagataaatcccggcgaaaggactttgaaggtggcttcgcggtaaaacggcgaagttttcggtgtgattcacacggcataacttcataggcgtaatcgaaacgtttcaacaatcacggtttttggagcgttgcaaggaaggcgctctagaaggaaaacaaagagaaaagaaatgaatatgaaaagaggactggccacgatggccatcgcagcactggcgctgatctctctcgctgcatgcggcagcgacaaccgcgcaagacgaggaaacgccagatagcctgtcgttctggtattacgaagaggacgatgccggctagacctaggcttggaatcgtgccgcggaagcctttgaaaaggaaaccggagtcgaaatcaagttcgaacgcaaatccttcacgcagatcgcccagaacggtagccagttcctgaactccgacgaagcgccggatcttatggaatccaatcgtggcagctgtggatgtggcccgcacgttcaccaagctcaaactttcgctcatgccgtatctgttccagaccggcctgcagccgcatctgaacggcaccccggtcatgcgctctatgttcgtggagtttccggatgatcagacctgccgtacgctcgaccgccaatacatattcagcctgaacctgttggtggctccggtgttcacctactccggtgacgtggagtattacctgcctgctggcgtgtggaccaactggttcaccggcgagaaggtggcttacgagcatggtgtgtggcgcaatgagcggcatggcttcgacaccattccgttgtgggtgcgcgagggcagcgtgctggttaccaagccgggtgccgagaagccggattacgagtatggcaaggatgcgttggtctccgtgttcctcgatggcaccgatgctgccgaggtcgtggtgaccgagacggacggttcctccgtgacattctcggctcgaaagacggccaatgacgtgaaggttttcagctcggacggatgagcgttcaccgcacgtctgggattcggggaggtcgtggccgcttcggaaggcaaggtgatgccgtcgtaggactgcccggttcggaaccgtcgtttccgaaccggatgggcgagggtcgaaacgccgctgggttgtgctcagtggcgttttgtgctgagtagacggggtgtactcgtagcttgcggactttaaccgggtgtttggggccctgatctgcgagtgccgcagggttcttcgcaaatcaggacctctaacatgcgtgtttgagatcctggttgttgagcagcggtgcggttctcgctgatgagggccttacataatcgtgaagagggcaggcggtcgcgttccgcgcgctcgggggatgcgcagatacgggttattggatggaggcgctgggcaacgagtagtcaggcttttctcgcggcgtgttcgggtcgccgctgacacgctggaacgcccgcagatagagcagcgacttagcataggccagccatgcgaagccgagcaggatgaataggaatcgcagatacggcgtgaatgcgaagatcgcacctgcggccacgtcgatggcgaggatgccgagcgtgtatccgaaacaggtccaaggcatcatgaaggagttgcgcagcgtctgccggaaggtgttctcatagcgagcctgaagtggatagtagtattcgaaggtcaggaacgtgagcgcgccgaagatgatgaggatcggaagcgttatgtaggcggcgttggtgtcgagtgcgttccagaacacgatggcgaacacgatggcggcaatcagcaccacgaagatgatggaagagctgatgccgcgcttgaattcgcgtttgaagcgtcggatatattcgcggccgaggttaatgtcgtcattgtcgctgaaggcaaacacggtgctgtacagtgcggctcgagctggtccgatggttacgatcgggatgatggagatcgagaagaacaggttgaggatgaaataccgcaggcagagcgagacgaactgccatacggggctattgggattgtagtgcattggacctccgttttcgttgatattccaagcatactcgccgttgagtgcgctgaattgacaagttggtaagacgaatatactatagctcctaacagcttatttattaagcaataaataagaaggttaccagatggggcggcatcaaggaagtgttgcgttcctgaaggggccatcggatgcatcgccgaaccaaaggaggaatgatgcagtcgcaagaggggatggagagtgtggtgacatctgctgatggcagtggttcaggtgctatgacgctttccgataaaaaaacacggcgagccgtgcgtaaggccgagaagctgagccaacagcaaagcgacaggaagcgccatggatttaagctgttcctgttgatttcgccatttttgattctgtccgtgctgttcagctacctcccgctgttcggctgggtttacgcattctatgattatcagccgccgattccgctgtcccagagcgaattcgtcggtctgcaatggttcaagatgatggtgcagaacccggcgcagcttcagaccatcggccaggtgctcatcaacaccttcgccatgtccggcctgaacatcctcacctcgttcttcccgttgttcttcgccatcgcattgaacgagattcgcgccaagtggttcaggaaccttatccagacgctgaccacgctgccgaacttcatttcctgggttctggtctacgcagtggccttcgccatgttctccaccaccggcatgctcaacgagatgctgcagaacttgcacatcatcagcgagccgattaagttccttgattccgattcgcacacttggctgaagatgttgctgtggggcctgtggaagggccttggttggggctccatcatgtacctcgccggcatcgcaggcattgacccggaactgtacgaagccgcccaggtggatggtgcgaaccgcttccagcagatcgtccacgtcacgatcccgcagttgctgccgacctacttcgtgctgttgatgctgtcgatctccaacttcctgaacaacggcatggatcagtacttcgtgttccagaacgccttcaacaccaagcacatccaggtccttgacctgtacgtgtacaacgttggtatgggcaacaactccctgtcgtatgcaaccgcaatctccatgctgaagtcgctggtcagcgtaggcctgctgattgttgtgaactggctgtccaagcgtacccgtggcgtatcgatcgtctgatgaggaaagagtaaggaagcaatcatggcaaagaaaatcaagcagggtatcgcaccggctatgaggcgcaccaagggtgaggaagtctacaatgtcttcaacatcctgttcttcctcgtgttcgcattcatctgcgtctacccgttctactacctgatcatcaactcgatttccagcaacaacgcctccgcggcaggccaggtcaactggtggccgcagggcatccattgggagaactacaagcaggtcttcgcactgagcggcctgaccacctcggccttcatctccgtggctcgtaccgtcatcggcaccgtgctcaccgtgatcgccagcgcgttcctcggcttcatgttcacccaagagaagatgtggcaccgcaagttctggtaccgcttcatcgtgatcaccatgtacttcaacgcaggcctgatcccgatgttcatcaccatgaagaacctgcatctgaccaacaatttctgggtctacatcctgccggccatcgtgcagccgttcaacatcatcctggtgaagaccttcgtcgagtccatccccgcctccctgcaggaagcggcagaaatggacggtgccggtacgctgacgatcttctggaagatcgtgttgccgatgatggccccgattctggcgaccgtcggcatcttctccgccgtcggccagtggaactccttccaggacaccctgatctacatgacggattccaagctctactccctgcagtacgtgctttacacctacatcaaccaggcgaatgcactggctgcttcggtgcgagcgagtgcaggtagtgccatgaacgtagcggctctcgcaacgcagcagacgcctacctcgatccgtatgacggtttccgtaatcgtggtgctcccgattctgttcgtctatccgttcttccagcgcttcttcgtcaagggcatgatgctcggtgctgtcaagggctgattcgtaacggttcggtactccctatagccattgtgggccggcgagacctgccggtcggaccggtcccgcaatctcaattcccatccctgcaaaataaaaggaaatagagaaaggaaggacgcaatgtccctcaaaaagaaggtaaccattgctgcggcagtgacgcttgcagcaatgatgtcgctctccgcctgcggagggtccggcagcaccacggccgccgaaaaggatgataactccctgatgaccgttgaggtctttgacggtctggcgaactatcagggcgagcagaagggctggttcgccaaggtcatcaaggacaagttcaacatcaagctcaatatcgtggctccgaacgtcgcaggcggcggcagcaccctgttcgatacccgcgcggctgcgggcaatctgggcgacatcgtgatctacggctatgacaccggtaagggcgccaagctggttaaatccggcctgatcgaggacatgaccccgtacctcaagggcatgaagtacatcaacaagtacaaggatgccaccgattacgtcaacgaacagatcggtcagaagtccggtgtgtggggcgttccggcatccgtggtcgacaccctgactcccgaccagccgtccgaaggcctcgaaccgaccttcggcccgtacctgcgttgggatctgtacaaggaaatcggttatccggagatcgacactctcgaggacctcatcccggtactcaagcagatgcaggacaaggctcgcgaggagtccggctccgatgacatctatgccatgtctctgttcaaggactgggacggcaacatgatgaacaacgctaagcagcccacctgcttctacggctttgacgaagtcggcttcgtgctggccaagggtgacggctccgacttcgagtccatcaccaaggaaggtggcatctacgagcgcgtgatcaagttcttcaatgctgccaatcgtgccggcatcgtcgatcctgaatccaccacccagaactacgacaccatgaactccaagtacaagaacggcaaggtgctcttctccttctggccgtggcttggacaggcagcctacaacaccaacgccaacaaggctgagggcaagggcttcatgctggctccgctcaaggacatgaagatcttctcatacggcgccgctcctcgtggcgataagactatgattgctctgggctccaaggccaagaacaagcagcgcctggtcaagttcatcaactggctgtactctccggaaggcgtttatgcttcctccaaccagaccggtggctccgctggtccgaagggtctgaactgggagatcaaggacggcaagccggttctgaccgaattcggttccgcggtgctttccggcgaatccaagaacgtgccggaagagtggggcggcggctcctactccgacggtatttccgctctgaacttcaccaccgtgaccgtgaacgacattgatccggataccggttacacctacaacccggtcatgtggccaagcgagatcgagaaggccaaccagaacccgctgaacaaggattggcaggagcatatgggtgcctccaccaccatggagtacctggagaacaacgatatgctgctcgtcggtgctggctccagctatgtccagccggaggagaactcccagatctccacgttgcgtggctccatcaagaccgagatcgtcaactcctcttggaaggcgtccttcgccagctccgagtccgaatgcgagaagatcttcaacgagatgatcaagaccgtcaatggtctggacatcgattccgtgctgaaggtcgacatgaagaacgccaaggatcaggacaaggcccgtaagaacatcctgaaggagtatcagaacaaggagaagtcctccagctccgattcctcctccgagtgatgaggcgttagtccccaccacgtaatccaaataactgaaagaggcggggcgccagatgtgctgaaccggtatctggcaccccgcctttctttacataccaacccatcaatccgaccgttcatatgaaccgagcgctgttacaacgccgtatgacaccaaaggaatcaaagttgattttcgaaaagcactcacgcattgttttcgtaggcgattccatcacggacgccgaccgcgaccgtactgctatccccggaggctggggatatgggcatgggtatgtcaacacattgcataatcttcttacggccgtatatccggataaggcattgtgcaccatcaacgaaggcatcaacggcaacgatatcgtcgacatgtccgaacgctggcagagtgacgtcatcgacatgaatccggactatgtgtccatcatgatcggcgtgaatgacgcctggcgttatttcgacggtccgctgtggcaggctcgcctcaacaccgtgggaacttacgagcgtatctatgatgagcttattgcacgcgtgaaacaggatgcaccgaatcttaaggggatcatcatcatgtgtccgttcatgttcgagccgaacccacaggatgccatgcgcgccaaggttgaggagttcgcggccgcatccaagcgtgtggccgaacgtcatggcgcgattttcgtcgatacgcaggcggccgtggaccattggctcacccagttgcacggatgcttggccagccaggatcgtgtgcatccgtacgagcgtggtgcgatgatcatcgcccgtgcatggtgtcaggccgtgggtttcgattggaacaggaccacgttcgatgattgatctgagcaccgtcgaggcggtcatcgcctccgggccctacgccgacacctgggagtcgttgagccaggctccggctccggcatggttcaccgatgccaaattcggcatcttcacgcactggggtctctacaccgttcccgaataccgcaacgaatggtattcacgcaacatgtacatcgagggctacccggaattcgaacaccacgtgaacacctatggtccacagaacaagttcggctatcgggatttcattccgatgttcaccgccgaacggttcgatgcgaacgagtggctcgatctgttcgccgccgcaggcgcgcactactacttcccggtctccgagcatcatgacggctatcagatgtaccgtagcgaattgtcgcactggaacaccttcgaaaccggtccgcatcgcgacgtgctgggggagttgcgtgacgccacgcgcgcccacggcctgcattttgccacgtcgaaccatcgcgccgagcactggtggttcatgggccatggcaaggacttcgactccgatatcaaggagcagttgcagaagggcgatttctattggccggccatgcccgaaccgaacgaattcgacattcacagcactcccacgccgaccgccgaatatctggaggactggctgctgcgcgtctgcgagatcatcgacgattaccagccggaactgctgtatttcgattggtgggtgcaacacgaatcgttcaaaccctacatgaggaagcttgccgccttctactacaatcgtggcgtcgagtgggggcggaacgtctcgatttgctataagtacgacggtctcgcctggggcgcgggcatcgtcgacgtggaacgcggaggttttgccgatgccacaccgttcgtctggcagacggataccgcaatcgcccgtaattcgtggtgctacacgaactcgctggagtacaagacgcttgccgagctgatcgtcgcgttggtcgacgcggtatcgaagaacggcaatctgctactgaacgtaggtcctcgcgcggacggttcgatcgccgaccatgatcgtgagctgttgctcggcatcggcgattggttgcgcgcaaacggtgagggcatctacggcacccgaccatggaggctcacgcaggaagggcctacgaagcaggccgacggcatgttcgccgatcagaagccgaccgaatggaccgccgaggattggcgattcaccacgaagaacggtgcgatctacgcattctgcctgcatcccaatgacattgcggatagttgtgaaacatcatgtgaaacacttgcagtgtcgacattcgccgcgtatcacgacgacgtcaaaccgccattcaacggcatcgtcgaatcggtggaacagctggggacggggccggtgcgcttcaaacgcggcgatgaggctttggagatctccccgctgccaagggaacccgatcagcaaggcctgccgatcggattcaagataaccgtcggttgacgagaagaacaacgtagcgaccactttcagccagcctcccgctggcgggagcgaagaaagaagaagacatgaccgtaatcaccgaagccaacaagaccaaggccagggacctgaccgccaaactcacgttggacgaaaagatcgccatcgtgcacgccgccggcctgttcaggaatggctgcgccgaacgactgggcatcccatcactcaagatggacgacggcccgatgggcgtgcgggcagagctgcataacgacaactgggcgccgctgtacaacacccgtgactatgtgacctacctgccttccggttccgccgtcgcctccacatggaatcccgatctggcccgcgcgaccggtgaggtacttggcgaggaagcgcgcggccgcggcaaggacgtgattctcggaccgtccatcaatatcaagcgtagcccgctgtgcggtcgcaatttcgagtacatgagcgaggatccggtactgaccgccacgcagggcgtggcctacattcagggtgtgcaggaatccgacgtggccgcttgcgcgaagcattacgcggtcaacagccaggagaccgaccggcttgacgttgacgagaccgtaagcgagcgggcattgcgcgagatctacctgccggctttcgaggcggcggtgcacgatggcggcgtgctctccgtcatgggcgcctacaatctcgtcaacggcactaaatgctgcgaacacaagcaactgcttgacgacattctgcgtgacgaatacggtttcgacggcttcgtcatctccgattggagcgcggtgcgtgacaccaaggccagtgccgaggtcggcatggacgttgagatgtcggtgacgccgaacttcgatgattactatttcgcgaatccgctgaaaaaagccgtcgagaacggtgcggtcaaggaaagcgacgtcgatgtgaaagtcgaacgcgtgatcgccgtcatggatgcgttgcacatgctgggcgacgcccgtgcgacccgcaagccgggacgttacgccaccatcgaccatgccgcgaagacattggagatcgcccgcgaatccatcgtgctattgaagaatgacgaaaacctgttgccgcttgacgagcgcggtatgacccgtctgctggtgatcggcgcgaacgccgatcgcgttcactccaacggcggcggttcggccgtgatcaaggcgctgcatgagatctcgcctctgctggggctcaacggcgagctcggcggcaacgtcgacatcgagtatatgctcggctatgacgccaagcaagtgaatcaggacgagtcctggcaggaggaaagcctcgagaattccaagggttccgacgccaaggacgagctgcacgcacgcgaactgcgcgaagaggccgtggccaaggcgcgcgaatacgcagctgccggtgattcggtgctgttcatcggcggtcttgaccacgagcatgatctcgaggggcgcgaccgcaccgacatgcgtctgccgtacggtcaggacgagttaatcgaagcgttgctcgaagccgctccgaatacgattctcgcgttcgtggccggctccccgatcgagatgccgtgggccgacaaggccaaggccatcgtgtggaactggtatgcgggttgcgaatccggcgccgcgctggccgaggtgctgttcggtcgcgtaaatccgagcggccatctgccggagaccttcccgatcgcgctgaccgacgaacctgcgcacaggatcggcaccttcggactcgaaggccacgtcgactatgcggaagacatctatgtgggctaccgttacttcgataccagacaggttccggtgctcttcccgttcggacatggcctgagctacaccgacttcgcattccgcgatcttgacgtgcgtcagatggacgacgagatccgtgtcaccttcaccgtcgagaacattggggattgcgccggtaaggcggtcgctcaggtgtatctcggtcttgaaggcaccggcgaggaccgcccggccaaggaactcaagggattcgccaaggtcgagctggacgcaggggagttccgcgaagtcaccgtggcgatgcctgctgctaaggcgttgcgttactggtccaacgaatccggagcctacgctctggcgccggaggcaagcgtgtttgtgggagaatccgtggaagatatccgtctctccggacgtgtcgcataacgcttatctataaacttataaataaagtaaaatgaaataacgaacgtctttggaggatgggtcgcggaccgatcctccaaagcggaatcccactaatgcaaaggagcaatgtatgaagttcctcaacggcggctggctcgtcaaggatggcttcagcgtcaagtatgcggcaaacatctacaccgccaacatcgagccgaagaagctcactctgttctgcccgttcggttctccgatctacaacgccggcatgaccctcgacggcggcatcctgaccatcgaggtgacgtcgcctcgcgaagacgtgatcaccaccaagctgatcaacttcaagaaggatcgcagcaactgcccgaaattcggcctgaacgaaaccgatccggatgtcgaaatcggcgaaaccgacgacaagtggaccttcatctccggccgtctgacactcgagatcgccaagggtgagaccatcgacttcaagtacctgtacgacggcaaggtcatcgcgcattccggctggcgtgccaagggcctcgtcaccgacccggaaggccagctgcacgtctccgaacagctcgacctcggtgtgggcgagaagatctacggccttggcgaacgcttcaccaacttcatcaagaacggccagaccgtcgacatctggaacgaggacggcggcaccggcaccgagcaggcctacaagaacatcccgttctacctgtccaacaggaagtacggcctgttcgtcgacaatccgggcaaggtcagcttcgaagtcggctccgagaaggtctcccgcgtgcagttctccgtgccgggcgaggaaatgagctactccgtggtcggcggtgagaatctcaaggcgattctcaacacctacaccgacctgaccggcaaggccccgctggttccggactggagctacggcctgtggctgtccacctccttcaccaccgactacgatgagaagaccgtgcttgagttcgtcgacggcatggccgagcgcaacatcccgctgtccgtgttccacttcgactgccgttggatgaaggaactcgaatggtgcaacttcgactgggacaagtccaagttcccggatccggaaggtctgctcgagaagctgcatgatcgcggcctgaagatctgcgtgtggatcaactcctacatcggccagaagtccccgctgttcgaggaaggcgccaagaacggctacttcatcaagaacgaagacggctccgtgtggcagtgggacaagtggcaggccggcatggccatcgtcgacttcaccaacccggaggccaccaagtggtatcagggctacctgaagaagctcgtggccatgggcgtcgactgcttcaagaccgatttcggtgagcgcatcccgaccgaaggcgtcaagtattatgacggttccgatccggagttgatgcacaactactacacctacctgtacaataaggccgtctacgacgtgctcgtcgagaccaagggcgccgatgaggccattctgttcgcccgctccgcaaccgtgggaggccagcagttcccggtgcactggggcggtgactgctcctccaactactcgtccatggcggaatccctgcgtgccggcctgagcttcggcatgtccggcttcggctactggagccacgatatcgccggtttcgaggaccaggcgagcccggacctgtacaagcgttggacgcagttcggcctgctcagctctcactcccgctaccacggctccaccgcctacaaggtgccgtggctgtacggtgacgaggccgtcgacgtggcccgcgagttcaccgagctcaagctgcagctcaagccgtatctgctcaagatggctcaggagacgcacgagaccggcgttccgatgatgcgtgccatggtgctcgaattcccggatgacccgacctgcgaggatatcgacacccagtacatgctgggcgacgacctgctggtcgccccggtgttccgcgaggatggcgtggcccgcttctacgtgccggacgacggcaccggccaggcgtggaccaacatcatcaccgataccgcatacgagccgggcaagtggtacaccgagcagtacgactaccatactctgccggtgttggcacgtccgggcaccgatccgttgcacgtgtgatcgcatacgccgtgcatgccgtaaatgaatgacaagagcgtgcggacaaaaggtgtgtccgcacgctcttgatgcattgtgttggatgcgtggcctacgaactcctcgccatccaacccacgttgacacaacagtgtcgatgaaagtgtaccaaccagctgtcgaagaggcctgtgctccggtgtttgtagagcgatggctggccggtgcctatcagaaagggaaaatagtgttgttgcatacgaggcacgaagttgtgccgcaagtcatgggaaggaacggccgccagcggcgcatgagtgcgctgctgaccgtggttacggcaatgttcgccgtgcttctcatgatggctggcatgacgacacccgctttggccgccgagcagcatgccgcgatgaccatcaacgccgaacgggttgccgccggcgaataccggctgaccatcaccaacaacggtagtgaaaccatcgtcaaggcaaccggtgtcaccaccgtgccgcaagagattctcgcggatggcgccgcagccagctacgcatggcaggtgagcggactgcaatccggcgcatccgcggtcgcgcagcaggacggtaaggctctgaccatccacatcaaggaggggtccacttccggcaaaaccaaggagcagatcacagacaacaccgccgcaaccgtatcgacggatacgcagcgcaaaacaaccgacaacaaggccgttaagaaaagtgccggaatccttggcagcacaggctccgcggtgtatgcgatcgcactgattgcggtgggtcttgcaggcgtcggcatctcctacaagtgggagaacggccgtcttgccgtacgccgtacgattgccgtgctgggaaccgtcgccatgattgcaggctgcatgtacgccgttccgcaacggcaggcatctgctgcgcagcacaccgccacagtccaaggcgtcacctcggcgattgccgtgaacggtaaggaatatcagcttgcctccgacgtgaccattacctacgagcaagttgccacgttgtcttccaccgaatatgccaaggccatgggcgccggctggaatctgggcaattccttcgatggcgtcaacactgatctgagtgccgaagacaagggtgaagaggcctggggcaatccgaaggtgagccgcgagctcatccattccgtcaaggagaaaggctacacgagcattcgaattccgatgaccgtctaccatcgttccagcgaaaacaaggatgcgaaggacggcgaataccgttacgtcatcaacgcggattggctgcagcgatacaaggaagtcgtggattgggccgtggatgaaggcctgtacgtgatgatcaacatccatcacgattcctggatctggctgaagaactggaacggcgacacctccgccgccgaataccaggagttcaacgactattggaaacagatcgcctcctatttcgccgatgaaccactgtccgtatgcttcgagaccatcaacgaaccgcagttcgcggatggcgacgcgcaggccaagctcaatgccgtcagcaaggcggcatacgacatcatccgcgccaccgcaggcaacgagcaacgcatgatcgtaattccgacactcggcaccgcacatgacgacaccgccaaactgcaggcgacggtcgacttcatccacaaggatctcaagaacgatgcgaacgtcatcgccaccgtgcactactacagcgaatgggtgtacagcgccaatctcggtcgcaccgatttcgacgaatccatctacggcgacgagcgcaccccgcgcaacgtcatcgattccttcgctgaccgcatgaatcagtacttcaccgagaacggcatcggtctggtaatcggcgaatacggtctgctggcctatgattcttcctccgacggcgcgctacaggcgggcgaggaactcaaatactacgagtacatgggcacaatggccaacgagaacggcttctcctatatgttctgggataacggttcgggcatcgaccgcaccggctaccagtggaagaagccccttgccggcaagatgctcgaagcgagcatcaacggccgttcttcctatgcaaccggactggacaccttgtatctcgaagaggatccgaccggcgacgtcaagttgctgctgaccttgaacggcaacgaattcaagggcatcgagggactgactgaaggctccgactacatctacgatgaagccagcgccacaatcacgctcaagcagggctatctagccaagatgtacgaggccaagggtggttacggcatcatcaccgacctgacgctgaagttctccgcaggtgccgactggcacgagtacgtagtgcattccggtactccggccgtgaacgccaccggaaccgtgaccggcaccaagagtgaaggtctgacgattccgatggccttcaacggtgccgagctgaaaaacatcaccgcgaccgaaaacggtaatcgcgtcggaccgaactccggctggtggcagtacctgcagaacagcggatcgtttagcgtgcactacgattccgccgaccgtgtaagcggtacgctgaccgtgctgccggccttcttcgacgacggttcagtgaccgacggcgacgtgaccttcacgatcacgttccaagacggccaaacgctcgacgtcaacttcaatattgccggcgaaacggtggcgttgaagtaggcaacataaccgaatccatatgactctcgtcgggtggaagacccaccaaggtcttccacccgacgagaacgtcagcagtaccagagaggaatacgaatgaccacggcacttgagtttgtgcgcggcctcggacttggctggaatctgggcaacaccttcgacccggttccgctgaacgacgaacgcaacaagacaatcaccaccgggggagtgtggacgcccgaagaccagcagcgactgtggtttaacaagccgttcacccgcgactgcgccttcttcgtcaaggaagcgggtttcgacaccatccgcattcccgtcacgtggaaggattggcaggacccgtacaccggcaacgtcgatccggtatggatggctgccgtgcaggaagccgtcgactggagttacgaggccggattgaacgtgatcgtcgacgtgcatcacgacggcggcaacggcccgttcggatggatccgcaccgccagcgaggactatccgggtgtctgctcgcgcttctccgcactatggcatcagattgcggaacgattccgtgattacgatcatcatctgattttcgaaggcggcaatgagatctgcttcccgcacgctgcccatcaggacaccgcctacgagctgctcaaccggctgaatcaactgttcgtcgatatcgtgcgcgcctccggcggcaacaatgccgaccgattcctcctgatccccggttacaacaccgacaccgaactgaccggcgacgaacatttccgactgccggaagacacggtcgacgatcacctgatcgtgtcgatccactactactcgcccgccgaattcgtgctcgccaaacatgacagcgactggtgtacgccggtcgacgtgtggggcagcgacgaggaagtggccgcggtcgaagccgacttcgccaaacagaaggcacgtttcatcgacaacggcattcccgtgatcatcggcgagtacggtcttctgaccgaacccgtcgaccataaggatcacgacagcaacatcaagtggctgcgtaccgtcatccgctgcacgctgaccaatggctcctgcccgatcctatgggacacctccaccaaggaaatgtgcttcctcaaccgcgaaaccggccgtttctttgaccccgaggtcgaagccatctaccaagaggcgcgcaccatgtcggtggcacaataacacaacccataacgaagaaagttccctgcaatgacccttttcaacgtaaccgaagccaagcgtatcgcgtcaggtttccatccggatccgaccatctgcgaaacccctcagggtacgtattacatggttaacagttccttcgaagtctttccgggactgcccgtgttcgaaagcgccgacggcgagcattggcggcgtatcggcaacgcaacggacagagagtcccagttctcctatgaatccatgggtaacagccaaggcatctacgcgccgacgttgcgctaccatgacggccggtactatctgatcgtcaccaacgtcaacaaaggcaacatgatcctcaccaccgacgatccgtataacggatggtccgatccgatctgggtggagggatggccgggcatcgatcccagtctgttctttgatgacgacggttcggtctacatctgcggcaacgaaggttccgagccggatgacgacggtgaacgcgaacccgcgggaatctatctgtcacgcatcaatgtcgccacaggaaccgtgctgaccaaacgtcagcgcatctgcgggggcatcaccggatcgaatccggaaggcccgcacatgtacaagcgcggtggcacatactatcttatgtgggccgaaggcggcacggaatccgggcacatggagaacattgcccgctcgtccagtccgactgggccgtacgagatgtatccgggcaatccgctgatcaccaaccgcagcacacatttgaccctgcaggccatcggccactgcgattgtgcccatttcgatgccgatcgaaccttgatggtgttccatggcacgcgcaacaacgacgagtatcctgcccaaggctggcttggccgtgagccgtatggagtgtggttcacgtggaaggacggttggcccgatcttgccgaccagtcctacgattgccctctcgacggttgcggcgaggctctggagcatgagatcgcatggaccacaccgagcatcgacaaggcgcatcgctttacgatgaacgatgcgggctcgcatatcaccgtcacggccgcgcggcaggatttcggtttggaggcgggagcgccgatgatcggcacacggcagaccgatttccgttgtgcattcacggcgaccgtcgccgatccgacgcaaattgtctccggaacggccggcatcgcgatttacgcgaatgccaactactatatgaccatcgcagtgcatgccgtcgaagccgataccgtcgcgatcgatgcaaccgtacacaatgcggatctgatatcacgggtcggtggtgtgcatgtgccagcgggtggaccggtacgactgatcgtccgaggtgacgattacggctacactttcgccgtcggcaccgcttccgacgaaatcacgctcggcaatgctcccggcaaagtgctgagcttcaccaacgccggaggattcaccggaatcctacttggcgtctatgcgcatggtgacggcgtcgtcgatttcaacgaagtgcactatcaggcaggcagtggcgtcgccgatgagtaacggcagctgttgccaagtgaatacatacaagattcagtctgaagaaggagaaccagatgaagccgatttatgaccacttcctgttcggcggtgattggaacccggaacagtggccggaggagacttgggagcatgacatcgaaatgctcgaagacgcccatatcaacgaagtcaccatcaacgtgttctcgtgggcgctgctgcagccagccgaagaccgctacgacttcaccatgctcgacaagatcgttgcgctgctcgtcaaacacgatttcaacatcgtgatggccaccggcaccgcggccttgcccggctggatggtgcgcctgcaccctgaaataatccgcaccgaacagaacggcactcgccacgtgttcggaggccgacacaacttctgtccgacctcgccgtacttccgcgaagcgtcccgcgcgctcgccgcacatgtggccgaacgctacaccggcactccgggtctggtgaactggcatgtgtgcaacgaatacggcggaggcggcggcctgtgctattgcgaccagtgtgcggagtccttccgtgcatggctcaaggccaagtatggcaccgtcgaagcgctcaaccaggcgtggtgcgccaacttctggagccacaccatcaccgaatgggccgacgtggtgccacccgtcagctatggcgatggcatcggcgacgccaaatgcgtggtttccggcctgcagatggactatcgtcgcttccaaagccaggcgcagctcgcatgctacaagaacgaacgtgatgcgattcgtgaatacgatgccgtcacgccgatcaccaccaacctcatgggcacgttcaaggatctcgactattttgaatgggccaaggagatggacgtggtcagctgggataactacccgggcatggacactccgtcgagcttcaccgccatgtgccacgacctcatgcgcggcatcggcggcaacaagccgtttacgctcatggaacagactccgaaccagcagaactggttcccgttctgcaaggtcaagcgccccggtgaagtgcgaaaactcagctggcaggccgtggcgcacggtgccgacaccgtgcagttcttccagatgaagcagtccatcggtggctgcgaacgcttccatggcgcggtcatcgcgcacgatggcactgaagattcccgcgtgttcaaggagactgcggcgctcggcgacgaactggcgcacatcggcaagcggatcatgggttccgagattcgcgcgaaagttgccatcatgttcgattggcagagctattggtcgcttgaaggttgcgtcggtccgactgccggcttctcgtatccgaacgaggtgcatcgtttttaccgtgcgctgtggcgccgcaacgtgcccgtcgacatgatcgaaagcactacaccgctcgatgagctcaagaagtacgatctggtcatcgcgccggcacttatcaccgtgctgccgggcgttgccgaaacgttggaacattacgtgtcagacggcggtagcttcgtgaccggctatatggcgggtctgcatgacgagcatgatcttgtggtgccgggaggatatcctggcaagttccgcagactcatgggcgtatgggtcgaggagatcgacgcactcgcgccgaacgaaaccatcgaagtgcacggcgacatggtcgatgccacgggcgagatcgtggccagcatcatccatcgcgaaggtgcacgccggctcgccacctatggtggcagcgaattctacgcgggccattctgcgctcaccgtcaacgatttcggctccggcaaggcctacttcgtcggcactccgctcgacgaaaccggcatggatgccttcatgacatcaatcgtgaacgaactgggcttggggtcgatcggcaccccggaaaacgtgagtctgtcggtgcgctacgccgatgacggtacacgctatgcgttcctcatcaacaatggcaacaccgacaagcgcctgtgcgtcagcgaactcaacggcggtgaggagctgctgtcgggcggccgcatcgacgatgcgatcgaactcaggccgtacggcgtcaacgtcatcaaactataggttggtgtgcgcgagtgtcggggatggttctataatgaagaagcaccatcgggcgaatatagacgggttagatgacggaatgacggcgaagaagcatatcctcgtattcgaaatcggcacgttcttcacccgttatgtggtcttcgaagacggccgtatgggcatccccggcactatcgcgacgccggcggacagtgcggaatccttctatcgggcactcgcgcacatcgccaacaaccaacgtttcccgctcgacggcatcgccatgagcatgcccggattcatcgatatcgacaggcagctggccgtcaccgctggcgcgcttggcacgctgtataagcatgaaatcggcaaagagctgcaggaatatctcgataatccggtgctgacatggatggaaaacgatgcgaattgtgctgcgatggcggagaaactcagtggcagtgccgtcaagctcgatgatttcgcgctgatcaccatcgactccggcgtcggcggcgccctgttccttgacggcaagattcgacgcggcaaggattggcgcgccggcgagctcggtatgatgattccgaattatgaaaacggagggtttcagaccctgcaaaactatctgtccaccatcgtgctggccgaaagctatgcggaggaattggacgtgccttccgggtccatcgtgccggcgacgttgttccacaagctggatgacccgcatgtgcgcaaaatcgtggatcaatggatcgactatcttgccattgccgtgttcaacattgccgcggtcaccgatcccgaatgcgtgctgttgggcggaggcgtctgccgtgagcagcagctgttgccgttggtcaatgcggcacttgacaagattccagcatgggattcgttccgcacgtccgtgaagcgttgccgccacaccaacaacgccggcctgattggagcctactacgccttcgaaaccgaagtcgatggcttggagaaagtgccgattcgctgattgccgccgtgcaacgccgttgtgctccgaatgtcacttcagcgtgctgccaaaccgtgagaaccggcatgcgtaccacagttccgcggtagtgcccggatcattcagatcggcacccagctccttgctgatgactcccagatatttggtcggcgtatgccgatgcatgccggccattcgcgcggtctcttcggtcctgccgcggctttgcagccatgcccacagcacgtcgatggcacgtacctgcgtgcctgaatccgtttcgtcgcttgacgattccattgctggtgcggcttccgtcgttcgtgccgttctcgccttggtgcgcggtccggttgataggtcgaacgtgaggttcgcaatcggcgcgagtttgagatccgcgaacgcacgcatcagcgacggctccaccacgccttccagcgtcgcaccgccctcgccgtcgccatactgtaccagcgcctccgcgcccgtctgatatgcctcatgtcacgcacggggcatatcgatccaggtcgcacctgaggattggcccacggtcagtcgacccgtacgggtcagctgctgcgtccgcatcgccacattcgattgcgacacgatcgcccacatatcgtcgtccacaatgccgaacaccacacgattgtcgttcttcgccatcgtacgtcggaacggctcgaacagccggccggcatcttccaacgcatcctgctgtccgataatgcgcgatacggccaacggttgcactggcagcccgttccatatgtcgtccgcgaaacgacgcaccgattgcgtcgccttccgggcacggcctagtcatgctggagcgcagatgcgtgagcgcacgattggatgccgcttcgctgttcacggacaaagacaacagtgaagcggcttccaccaccaacggatggtcgatggcgccgcgctcgcctttacgacccgcgaccagatagcccagtgtctgtctgttgggagaggccacatgaaaaatcgcaatgtcgtagcctttcgccaccgtgaacttcgtctcgccgagtatgctgaacgcgagcatgtcgcttgaggagtccatgtcgaccggcagcgtgtgatgggacgattcaatgatgcagcccgccggattgagcagtgtggtccagccgccgatcagttcggccaaacgcgagatgatcgtgctcaccggatcgagcgaatgcacgctacggagcagccgttgctgattgcggtacatttgttccacgttgcgatgcgtatcatcggagatgccgcgcgcgatagttttggagatggcgatgaacggtgtcgccagtggcactgtaaacaagggtaggccgaccgcttcgcattgatagatgagccattgcggcacatgttcatgctggatgcccaaaccgaatccgactccacgtgcgccaaatctccgcaagacgggaggcatattctcgatgagccgcgtcgggcgtgccgtccggcattaccagaccagtggtcagtaacagctcgccgccctccagatatgtggttgggtcggctgattcggatacctgcacccatgagatgggggagtccagcgtcgcgccggaaccttctacagccagtcgtaggttgagggagcgttgctcaagcagattgcgtacggtaatcgccagggcttcagattagttgtccgacagcgaatcataacggattcgtctatatcttgacgatattttcgacaactcgtctataacaaattatgatcttgacgatattttcgacaactcgtctataacaaattatgggcaaactttctaacgtgacaaccaacagtgatgaggaacggatcgaaaggaagccatcatgtcagtcccacaggtagcgcgcaagatcgtcaccgccattccaggtccgaagacctcaaggccgaacatacccgctatgtcagcgccggcgtcggccagggcatgccggtgttctcgccgagaccgcaagcggctccaccatcaccgacgtggacggcaaccgcttcatcgaccttgcctccggcatcgccgtgaccggtgtcggcaactgcgcgccggaagtcgtcgcggccgtgcaggaggaagtggctaagctcacccacaccaactacgacggcgtcgttcctgacctgatcaccgccgccgaggtactcggcggcggcatgccgattgcggccttgaccggtcgcgccgaaatcatggacgccgtgcagcctggcgtcatcggcggcacctacggtggcaacccggtctcctgtgccgccgcgctcgctgcaatcggcgttatggaggagcaggatctgccggcaaaggccgcacatatcggtgaggtcgtcgaatccgtactcggtccgctggtcgacgtagtgccggcggtggccgaagtacgtggccgtggcgccatgatcggtgtcgaattcgtcaagccgggcaccgtggagccgaataaggagctggtcagccgcatcgccaagcgcaccatccaagaaggtctgatcatgctgacctgcggcatcaacggcaacgtaatccgcttgctgccgtcgctggtcatcaccggtgacgagctgaacgaagcgctggcggtactcaaggagatcattgtcgaggaaagcgccaagtaagtacgcaatcgttgcgtgcgatcgaaatcgccgatgacgaaccctcaagcaaacggacagagagttggctgcaatcgccggaatgggcgcggttgcagccaacgttttggaaaggacgcatcatgaaactgttgacggttggacccgacaatacctacacctacgatacgatcaaggaattcttcgcatcgttcgaactcggaccgaaggatctgctggtcagcatcgaagtgatctacaagtagttcctggaaccgtatgagaacggtgcgaacgtgattcttgtcgacaagtacggcgcgcaggagccgatcaatgtgatgatcgacgaattcatcgcggatgcgggcaaattcgactatgaccgcatcgtggcagtcggcggtggtgccgtcatggacatgtcgaaggtcgtggcggtggccggcggtatctccatcgacgacgtgatcgaccatctgcccgacttcaggcgctccgtacgcctcgtgctcgtgccgaccacttgcgacaccggttcggaggtcaccgaaatcgcggccatcaatcgtacgcgtctaggttgcaaggccggaatcgcaggccctgagatgttcgccgacgatgccgtgctcgtgccggagctgctctacggactgcccgatcacgtgttcgccaccagctcgctcgacgtgctcgtgcactccgtggaatccacgctttcgccgaactccacgccatacacgcgcatgttcggctatggggccatgaagatgatcatctccggctacaaggccgttgccgaagctggtcccgccggttcgccgcgtcaagtgcaacgaactgatgcgcgacttcctgatcgcctccgattatgcgggtatcggcttcgataccggcgggtgcgctgccgtgcatgcgctgagctatcagctgggcggaaaatatcatatgccccacgcgaatccaactacgccatgttcaccggtgtgctacgcaactatatggagatcaaaccggaaggcgagatccttaagatgaaccagttcatcgccgacattctcggctgtgacgtggcttatgtgtatgacgagctggagacgtttatcaacaagctgttgccgaagaaggcgctgcatgagtacggtgtgaccgaacaggatctgccggaatttgccgatcgcgtgatcaagacgcaggagcgactcatgaagaactgcttcgtgccgctcgattacgatcgcgtgctcaagatctccaaggagctgtactgattttcttgggttgtggcgtgatgcgtccgtagcgtgtacagaggcggattgattttgaggtggtaccgttttcttgggctccctactggggttatcggggatggcgccatctcggttttcaacgtaaggctgatcattcccgttcgtatgatcgcaatggattctgctggccggtatctgaaattccggcataagggcgcatatgcccgtgtattatcgggcactgacacgggggctgcaaggctgagaggaagcatccgcttcgaccgtttgaacgtattaatgctggcgcacggcgactacgcttggttgggcgcggagtcggactccgtcgccgactggatgtacatgctgaataccgaagattggcgagaagccatcaacttgcgtttcgtcaacgagctgttggatgacaccctgccggaagagatattgaaatcatatttgattcaggatttcaagttctacaacaacggcatgatgacccggcgcatcaagttggctccgcgtcaggaaaccaaggacatgctcgccgcccagtcgcgatggttcgcggacaacgaggccacgtatttccagcatttcctcgaggactaccacgtcagccagcaggagtatgacgacagcgaacagacccaggcgaacagagattacggtgcgtacctcgatacgttgtccgataagagctggccggaactgatcaccgcgatctgctgcatggaatggctgtatctcgcatgggccaagcgcacggtcgacgccggggtcatgcaacaggtcccggcacacaagggatgggtcgacctgcacgaaggcgcgcatttccgcaaatgggtcggcgatctcatcgcgctggtcaacgaatactgctccatcgacggtccggaagccgaggtattctacactatcgtgtatctggaacgccgcttcttcgacgattcctacccacaggactgattctacgggacatcccgtatcggtttcagtgggtagcgtatatgagatgcaacgtgttctgatatacgcggaatccatccggactgctgtggggccatcgggccggtggctccatgtggaagttgactgtgaacagctcgaatatgcaggttgcctactgccgtgccgaaagcgtcttcggcagcaggcaacctgcgctggagctctcgtattcgctcggatcggtgtatccggcccattcgctcggtgggaagatgatgtcggaaatcgaaatccactgctcaagcaggttcattgaatcgtcgcccagccagcggtactgcagaccgtccatcgcgctcatggcaagcgtgtacaggtcgtagaagcgctcctcgtcgacgtgctccggcagtatccaattcatggagcagatcatttcccagttgcgcatatggcggccgatgaagaagctgtgtgccgggtgttccgggctaagcgcctcaccgttgagtacggaatagagttgcaccatttccggacgttgcaggttatagcgaacgatgttcaggcaatatcggggataatagtagacgcaatgtccgtcagcgtcgattaccgcagcggtcacggcattgtattcatctgcatccggagtgtcatagccttcggaaagcaccatgttgagcagatcgtctttcgaggagatgtagtggtagagtgcggcttcggtgatgccgagctcgtctgagatatcctgcagcgacataccccagaaccctttgatggcgatgatcttggctgcggcctgcagaatctgcagatgccgctcttcctgattcatgcgcttgcgtttttcaaaggttttttttgacgtggtgtcacgtgcggtgatgctggtgctggagatatccgggccagagccggattgggcttccaaaaactgagaccatgctgcaacgctcattgcccctcctcctttgcaaaatggcgcgaagattgccggatgacgcattcatcaattcttttgattatatccgaaatccgtcgaaatacttgaaaatctatgcaagacaagactacaaattttgtaggacagtatgcttacggcatcatggatgatgaccatctcgtgataaggggtgttgatggcgggaatcaaagatgttgcggtgcgcgcgggggtctccatcagtacggtttcgtatgtgatgagtggcaagcgttcggtgcggaatgaaaccaagatcaaggtgatgcaggccgcccgcgagctgaactattttcccaatgccggtgcccgcatgctgcgtggggaaagaacgcggctcgtcgcgctgagttctccgatgagtgacgagacggcatatggcgattggtcgccgttctttttcggggtggcccttcgcctgcgccattatggctatgacgtgttgttgctgatgggtgaggatgaaaatgaggatttggtgcgcatgttcgactccggtttggtggatggagtactgctgttggatgttgccatgagcgacccgcgtgcccgcgcggcgaagacatcccgggtgccagtcgcatcgattggatgccctgacgatttggatggagtctatgcggtggatttggatttcgagcagatgggagagatggcggtacaaaaactgatgaaggccgggcatcgtcatgtactgtttctcggtgcgaactcccatgcatacgagcagggcgtgaactttctgatccgtacgcgtgattcggtgcggatctgtgctgagaagactggtatgcggctgacgtgcgatgtaatcgataccggtgacgctgatgagatggaatgtgtggttgaaagggcctttgcttcggatccgcggataactgcggtgctcgggcaagttggattaatcgcgatgtcgaatcttaagtcggccttgcaatcgcgtggttatgacattccgaaggatatctccgtcatccagttgggtgccttcggtcaggcgtcagtgatgaatccgccgcttgatgagattccgctgagaccatacgccacctgtgcccgtgcggtggatgtgttgatggagatcatcgaggggaagcgccggatgtccgagcaagggataaaggcgctgattgcggtgaagtatttgagtcgaggttcggtgcatgacgtttcgaaaggcgtgtgatattcctccgcccgtgaaggaaggcggcgcaatcgaatgtgccgcaagctttttgtcgaaaatcgtcgaaacgattcgacaatgaaggataaggccttgtaccctgaaatcgtaaacgtccacggcatggtgaggaagccataggacgagcagatgcagggttgcttgtatacgcgcattcgcggcggttacgcgcgatttacgacggaatcgtcatgattgtggacgtttgcatgctcgtgacaatagctacgaaaggacaaagtgagggaagatgcgtagtgtcggaagaaaactcgtcgcggcgtgtggcgtgcttgccatggcatgcacgatggcggcctgcggcggtgacaccgcaagcgatgccgatgacaattcgctgatgacggtcgaggtgttcgaccaactggcgaactatcagggcgagcggaagggctggttcgccgaggtcatcaaggataagttcaacatcaagctcaatatcgtggctccgaacgtcgcaggcggcggcaacacgctgttcgatacccgcgcggctgcgggcaatctgggcgacattgtgatcatcggttctggcagcggtcaggccgaaaaagtagtcaagtccaaactcgtcactgacctgagttcgtatatcaaaaacaccaagtatctcaagacttatcagggggaccatcgatcagttgacgaaggatgccaaccaggagagcggtatgtggggcattccaacctcggtatcatccttgtctccgaccgagtccagcgaaggtgtcgaaccgactttcggcccgttcgtacgttgggattactacaaggagattggctaccccaaggttgccacgcttgaggatctgcttccggtcctcaagcagatgcaggacaaggcgcgcgaagaaaccggcagcgatgacgtctacgcgctgagtctgttcaaggattgagacgatcaggccatgcagaatggcttccagcttccggcgttctatggctatgccgaagggaccggttacgtgatgagcaatgccgacggcacggatgctcaatcgctgattgacgagaatggcgtttacgtgcgtgcgctgaagttctataacaaggccgagcagatgggcttggttgatccggaatccaccacgcagaactacgacatcatgtattccaagtacaaggaagacaagttcctgttctccttctggccttggctcggccaagcggcctataacacggacgcccataagaaggacggtaagggtttcatgatgctgagcatcgatgacatgaagatcgcatccaagggcgcccagccgaacggcaccaccacgttcatcggcgtcggagaaaaagccaagaacaaggaacgtctggtcaaattcattgactggctttactcgcctgagggtatccaagctgcgggttcccagaccaatggcgctgccgggttaaagggtctgacctgggacatcaaggacggcaaaccggtacttaccgatttcggtgtcaaggccatgggcggcgaaagcgtcaacgttccggaggaatacggcggtggcggttactccgacggcgcatcccagctgaatgtctccaccgtgctcaacaaggacattgatccgagaaccaacgcgccgtacaactatcagatgtgggattccgaactcgccaagcgtgataccgcactcgacaaagattggcaagagcatatgggcggtgcgcgcacgaccatggagtatctggagcagagtggcaaactcgcggtcattccgggcgtctcgtacaccactccggataaagactccgtgatctctaccacccgtggacagctgaagaccgccgtggtgaacgcctgctggcaggcagtgttctccaagagcgatgacgagttcaactccatctggagcaagatgcagaaagaggttgacggtctcggttacaagaaggtctatgacgtcgacatgaagaacactaaggatatgttcaaggcgcgtcaggcaatcgaaaaggagtatgcgagccgcgagaaatagcccggtatcattcgaggcaaaagccacctgaagcgtgagggtcccggcctattggccgggaccctcacgctgtgccgctcgctatgagcctatttggcgaacgtcctacgcatccacgcggcagccagctgcagccacacctgcacgcattcctcgatgccgtggacaccctgccatgccgtttcggcggtaccgagcgacaggccatggccgccgctggggaacaggtgcgcctcgacactgacgccggcctgcttacaggcattgatgagcataagcgtgttctcatacggtacgcagtcgtcgggaacggtatgccacacgaacaccggcggcgtcttggcatcgacatgcttctcgatggacacggattcgagcgcttctgggtcggccttgcgttccccgagcagcgaatcaaagctgccgcggtgcgcgagcgggccggacgtgatcaccgggtaggcgagcatcaggccgttcggacgtaccgcatccagatcgtagccgtgcgccgcgattacctcgtcactggcggaagtggcgagattcgcagccagatgaccacctgcggaaaaaccgatcacggcgatggcgttcgtatcgacatgtcattcggtggcatgttcgcgaatctgcttcatcgcttcggccgcttccaacagcgcaaccggaaagatggacggtttcacggaatatcgcaggacgaaagcgttgtagccagccgcaagaaactgcattgcaatcggctcggcctcacggtcggacgtcatctcatatccgccgccgggaatcaccagcacggacgggcgtgcgtaatccgggatgacttcttcgctgttgtcaaggcaatatccgacgaacttggcggcggtgccatcgatgccggaaatctcatgttcgaaatactgcatggatccatcctattcgtaaagtcaattcataagggggtgcatgggtgacgtgatgtcatccatgcaccccgtttctgtcgtttgacagctactcggctgccattcggccatcagaaggtgacggccaccttgaccagcttggtgtcgtcggtcgggaccggcacgacgttgcctgcaagctgctcgccattgactctcactgtgcgctcgccggtgcgcttcatggcgatgcggtaggttacgccacggaacacacgggtcacggtcaggtcggtgaactgttccggcagatgcggttcgatagccagaccatcgagcgtcgggcgcactcccagcagatactgggacacgtccacgaacgtccatgcggcggtgccggttagccaggaattcttgccttcgcccggggtcggagcctcagagccggccaccatctggcagtagacgtacggctccaccttgcggatgtcggacttgtcttccacgtaggccgggcagttgcgctggtagaccgcgaaggcctcctcgttgttgtcggccagcgcattggcgatggagatccacgggttgttatggcagaagatgccgccgttctccttatatccgcgcggataggacgagatttcgcccagctcgatgcggtaggtggaataggccggggcaaggatggcggtaccccaatcgcaggtcagcttgtccttcacggacgtcagggcctgctgggccttgccgtcatcgaggccgatgccggccatcacgcacatgccctgcggttcgatgtagatctgaccctcggtgtcttcgtgcgtgccgaccttgcgcgaataggcgtcgtaggcgcgcacgaaccattcgccgtcccatccggcggttttgaccgctttagagacctggccgatttcggcgcgcacattggctgcctcggagtcgatttcggcatcggtcatgccggtgagctgaccgtaatgttcgatgatgtcggcatactggccgccatacagcacgaacataccgccgatgaacacggattcggcaacgccggtgtcgttgttctccacggtctggaagctctcgcccggagtgtcggagaagcagttgaggttcaggcaatcgttccagtcggcgcggccgatcagcgggatgccatgcggtcccttgtgcgtgatggtgaagttcacggagcggcgcaggtgctcgagcagcggtacttcggagccttccacgttgttgaaaggcaccggctcggtcagaatcgatgcgtcgccggtctcggcgaggtacgcattcacgccggccacgagccacagcgggtcatcgttgaagccaccgccgatgtcggcattgcccttcttggtgagcggctgatactggtgccacgcggaaccatcctccatctgggtggaggcgatgtcgatgatgcgctggcgcgcacggcccggaatcaggtgcacgaagccgagcagatcctggttggaatcgcggaagcccatgccgcggcccatgccggactcgtaataggaggcggaacgggacatgttgaaggtgaccatgcactggtactggtgccagatgttgaccatgcggtcgagcttctcgtcgccggatttcacgctataggtggtcagcagttcggtccagtaggtgttgagctccttcagggctgcctctacctgctcgacggtggtgaagcggcggaacagttcatgcgccggcttcttgttgatgatgcctatcttggccggatcgttcggatcctcccacttgtcttccttggtgacttcgatgtagcccagcacgaatacgagcgacttggtctcgcccggcttgagctcgaggcgtacgcggtcggcggcgatcgggaaccagccgtgggccacggaatcgtgggactggccttcggtgatgacctgcggagtgtcccaaccattgaacttgccgaggaattcgtcacggctcgtgtcgaagccgacgacaggggagttaacggcaaagaacgcataatggttgcgacgttccttgaattcggtcttgtggtagatcagggtggcgtcatcctgcttctcgatctccacttcgccggtggacaggttgcgctggaagttggaggagtcgtcgactgcgttccacaggcaccattccacggaaccggtcacgtcgagcacgaccggtgcgtcggtggtgttggtcacgtcgagacggttgacttcggcattgatcttcagcggcacgaacgcggtgagcttggattcgatgccgtgcttggcggcttcgaacacggtgtagctgatgccctgacggcacttataggagtcgagcggcgtcttgcatggcaggaaggttggcgaccacgtgtcgatcggcttggcgttgacggcgttggagtccatgaggctcagatagtagttgcgtgcgccgttgtcgccgggcacgttgttgtaacggtagcgggtgatgcggcgcagtttggcgtccttgtagaaggagtagccgccgccggtattggagatcagggagaagaagttctcgttgccgaggtagttgatccatggcagcggggttgccggagtttcgattacatactcgcgggcggaatcatcgaagtggccgtacttcatgggaatcctttcagactgcttcgttgcggcttctggctgcgggcgtgggtatacgtggggcggcgttgcgcgcggcgacggtcagtgttcgttggttattgcgtttccccataaggataccacgttatttataactttataaataagtggttcgaccgtgttgcgtgggctcgttccgacctcattccgtgtgttctgggaaaagccgaatcgtaggaaaggggaatccgaatcccataggggcgaaaatccgaatcgccggcatggcggaggcgggcacgggcggacgccggtagagtaggggtaaaagacatggagcgacacgaaggagcgctggtatggccgaagacggcaccatcataaagtcaaagccggtggatgacgatctcaatgccaagactcgcgctgtttgacgcattgcaccgcgcaacgggcgaattcgccatgttaggccatcagaatgaagccagcaacgtaattggcgagcataccgactccgatgtgcatgcggtaaccggctcttacccggctgtgtggggcgacgacttgggcggcgtggagctggaccggaaccgcaacctcgacggattcggagccgaagccatccgaaacgaaatgcttcgagccttcaacatgggtgccgtcaacacgctcagctagcattccgccaacccgctcgccctcggcggttacggccataacatggccgagggccacgtcaaagcggcgctgctcggcggtgaagcgcatgagaagttcctcggctggctcgaccgcattgccgccgcgctcaccaccatcacggacacgaacggccaaccgattcccatcgtcttccgcccgttccatgagcataccggcgactggttctggtggtgtaccggttctcccgcgcgcccgaccgacatcacgcccgaacagttcgtcgaactgtggcgcatgactatcgaatacctgcgtgacgtcaagcatgtgtacaatgtgctctacgcctactcgcccgaccgtagccgcatcgatatgagcacgccggaatcgttggagactggttatctgtatgcctatcccggagatgactatgtcgacgtgctcggcttcgacgattactgggacatcgcgcccgccgagaaaagcgcggaggatccgcaggcccgccatgccgatctgattgcgatgcttgcattggttggtcgcctcggcaaggagcgtggcaagctggccgcggccacggaagtcggttctccgggaatattcgccgactcgtacgtctgcgattcccacgatctcaccatcatcggcgctaatgatgacgctgcggccgaagatggttcagcgttgtcggattcgccatggacgaagtatctgctgaccgccgcgctcgccaacggatacacccgccgctcactgtggtacttgccgtggcgcaatgatccgaatgccgccggcaccggagcatacggcacgcccgttgccggttcgcggtatgccgacgatttcagacgattcgtccgtcacgacttcatgcatctcgccgacgcccttccgcctctgtataggtgagcggcttgccgcgtagggtcccgtatgtggtcagatccatatctgaccacatacgggatagccagaattcgtaaggcaccggtatcgccgtccagatcgggtagaagaaggccgaaaccagtatgattaacataaggcccagcccgacggtcagacgataggtgccgatttccgcatgcgtgcgcaaccaatcaagcacataacagattgcaagcacgatccacggcagaatcacaatcgaatagaacgtgaacgtcgtacgattcagatactgcgcccacagcagccaaccgcccaaaaagccggccaagaccgccaaaattcgccaatagccaccatcttcgcgggggtgctgccacgaatacgtccgcgcaccaggccggtgatggcgatgatgatcgccgtcaccgtgcacagtgagtccgcccaccagattagcggattgcagagcgacgtgatcgctgccacgcattgcgaatccggcgccaacgaacacagtcccggatgcccggacagcttctcccaataaaagctggtcggccttacctgcaacggccaggtaagcggattcgtcttgtagccgtgcggcgcgtcaagcgtggtgtggaatcgccacatctgcgcatggtaggccacaaaggaacgcaacgattccggcagccaggtcatgccctcgccgggatgattcgtggcccaatcgtgcatatacgagtcggcatgcaggaaccagttgagccatccgcccaaataagtgagcgcgtagatcggcaccatgtatcaagccgccacgagcccatccttcaccaaaccggtcgtgaaccatgcgcgatagccgatccgccggcgctcccacgcatcccacagcatcgagatcacgcagaacacagcgaacagatatgtgaccgaccacttcacaccggtcgccatgccaagcaggaaagccgcatctacgcggtaccacgacaaggcgatcatcggtccacgccgttgcagtatcaatccgcgtcttctcgtcttgaaacgtgctgtacgggagaccgcatcaatcgcatattgccgtcgcagccgtgcacgggcccaatcgcgatgcatcaacatcagcgaaaacgccccaaggcgaacaccatgatgaaattgtcgagcaggccggtgcggctcatcacgatgccgagaccgtccaacgacatgagcaggccggcaatcaacgcgatcggcagattgtgaaacaggcgcaaggccacgcgggtgatcagcgcgatggtgacgacaccggcaacggcaacgctcgcacgctaggcggcgggattgtcggtgccgccgaacagtttcggcccggcccgatcatccacttgccgaccggcggatgcaccacatattcggccgtattaagccaacggttggtgtcgccggctgcgaacagtcggtcgatttcgacatccacgccgtcgatggtcaccagtttcggccaatcgcgcgcctcgccggtgttcagcatggttcacgcgtctttgacgtaatacgtttcgtcgaataccaccgcgcgaggggagtcaagtctcacaaagcgcaggattccgccgaaagcggccacaagaatcgtcatcaaccatgcgaaaggcctagaggcggtccaacgtggttcgggagcgccgagcgcatcggagccatcacgttgatgccgtcgtcgtcgaagtgcggcgtatcgcgcattcgccttgaccgtctgtatactcatcgtcgtttcatttcgcccgcaagacatgcccttggatacacagtaggagatactggaagatatggagagcatacaagcgcaatcaatacaggagccaaccgaattcacggacgggacggatgacggcggtcggattaccgccgccggtgcgctcgatgcgttggtggacggcgtcggcattccgcgcggtacggtgattcttgcggccacgccgatcggcaatactgccgacgcatccgcacgcctcattgcactgctggagcgcgccgacatcgtcgcagctgaagacacccgccgtctctatgcgctcgccaaccgtctcggcgtgcatgtgaacggccgcgtggtggcctaccacgatcataatgagcgagacaagtccgatggcctgcttgaccaggtggaaaccggtgcgaccgtgctggtagtgtccgacgcgggcatgccgaccatcaacgatccgggcttggcgatcgtgcgccgcgccatcgaacgcggcctgcccgtcacctgcgctccaggcccgtccgccgtactggacgcgctgtgcctatcaggcctgccgaccgaccgtttctgttatgaaggattccttccgcgcaagcattccgaacgcgtgcaatacttgcgtacgttgcgttcggagcgccgcaccattgtgttttacgagacgctgcatcgcatcgacgagtccatggccgacctgcttgacgtgttcggtccgaaccgcaagatggcgctttgccgcgaacttaccaaggatttcgagcagattcgccgcggaaccatcgcgcagattcgccaaagcgtgatcgacgagcctccacgcggtgaaatggtgttggtcgtcgccggtgcttccgaagaggaggccgatgccgcggcccccgcgtcgctgagcatagaagacttggcggtattgtcgatcgaccgtgcgcgggaagacaatctgcgcatcaaagacgcgatttcgcaagtcgttgccgagcacccccttgctgacggttcgctcgccaatcgcaagcaggtctacaacacggttcttgccatgaaagagtaggattttcgcattgtttgccgtttggcgatcgcttgccgcgcgcttgcccgctgcatacttgcgattgcgttattgcattgcgattacttgcgattacgctactttagccatcatgcgcaatcgtatctaatgcgcgcgattccaacgattccagcagtatttgcagggaacgtgccacatctggcccgccgacttgcgcaagatattccagcatcgcaggtgttgcagaaggattggcaatcagccatttgcgcagttgaggcgcgtactccgcgatatgccagagcacgttctgtggagtgccgggactgcatgccaccagcggcgtcaacggaatcgggggagacggtggttcgatcagcggtttcgggcgcggcttgggctggtatggcggcggttcgcggcgcgtgcgatacgcatggcgatgggtgcgattccgtgcatgccgtcgcgttgcccggtgcgctttgcggcgttcacccggcttgcgttttttgcggattccgaacggcccgcgggatctgccggcgtcgtccgattggcgcgggcctcccaagccacgttcgcgctctttgctccagcggtgcccatgtgctttgcgcctgccgtgcgccttatgcctgctatgcgccgcgcacatattcggcatccttacggttcttacggtcttcgcaatccttacgtttcccgtgttcgtaacccctgccgtcaatcgcaagaatgtgattccgtgcctgtggagcgttgcgaatatgcttcgtgtcttccatgatttgcatgcaatcgttggaacgaaaatgaaattcctgcataagcatgcagatgatttcagaaaccttcgattccgtttctgggacgcagttcagcgccagatcgcatgcggtgcgaacgggtgtggtcacggtgatcgggccgaccttcatggtgtgctcagatggtgcgacgcggttgaaaacgttgatttttcgcccgtatcgcagcgttctgtagtgggctttcgcgatgatgtctatggagtcggggaacgcgcctcccagccagacccatgcggcggtgcgtgcacatgccacggaacggcttggcaatagtgtcgcgataatgcatgcccgcccgtacaacgtgtccgaatcatggcttgagtaggcgttcgcgctgtcgagcttgc

SEQ ID NO: 1334 - DNA, 18207 bp, Unknown
  R157_18m  MAG No. k141_15110
gcttgactacgatgtcgtccgtagccggctcaagtcggaaggtgcagtgcaatgcggttacgtgaagaacgacggtgagcggttcatgttgacgattcttaccgacaacagatccacggacgagaccatgtgggtgttcgaacgtaaggacctgccgtagcggaaggctcgagaccctcaggggcatggccctgggcttccgcaacctcgacgccaccatcaccagaagcctgctgcacgccggcggcttcagacacgccatccaaacccacctctgacacatgcccttacacgccaaaatcggaagagccggaaatactacaacacgctgattgttgtatgtacaactgttgtatatgggtctcttgattatgaatttgaacatcaaacactccctcagtcacctgtggtgatggctcccgatcaagacggagcggaggttgctaacacgaaggaggagaacgaatgagcgataccgcagaggcaatcgcgcaggcgcgcaaagccgtcgaacccggtagacctaagcatgtactgcgcacgctgggtcattcgattcgtgaatacaagaaagccagcatcctggctccggtgttcgtggcggtcgaaggtattctggaaatcctgattccgaccatcatggcttcgctgatcgatgagggtatcaccggtggcagcatgccggccaccgtcaagttcggcgtgattctgctgatgtgcgcgatggtttcgctgggtgccggcttcctgtccggaaagtacgcggccgtggccggcgcgggcttcgccaagaacctgcgcaaggaccagttcgagaaggtgcagggcttcagcttcaccaacatcgaccggttctccaccggttcgatcgtgacccgactgaccaccgacgtgacgaacctgcagaacgcctacatgatgatcattcgtctgggcgtgcgtgccccgatcatggtggtcgtagcctggctgttttcgttccgtatctccccgtcgatctccctggtgttcctggcctgcatcccgatcctggccatcggcctgtgcggtctggtcgtgctcgtgcaccccgtgttcgagcgcgtgtttcacacctacgatgcgttgaacaacgtggtcgacgagaacctgcagggcatccgcgtggtcaagtcctataaccgcgaatccttcgaggtctccaagttcggccgcatctcccagcgcatcttcaaggacttcaccaaggccgaacgcatcatgagcttcaacatgccgatcatgatggtgtgcgtctacgcctcgatgattctcatcgcatggatgggcgcgcagcagatcgtcgcttccggcaataatgcggcgttgggcctgtccaccggcgagctgacttcgctggtcacctatgccatgcagattcttatggccatgatgatgctgtccatgattttcgtcatggtgattatttctcaggcttctgccgagcgtatctgccaggtgctgcaggaggaaagcacggtgcagaacccggcacagccggtgactgacatggccgacggctccatcgaattcgaccacgtcaccttccgctactccgacagttccgaaaagcccgtgcttgacgacatcaacctgaagattcgctccggcatgaccatcggcatcgtcggcggtactggttcggcaaagtcgtctctggtacagctggtgccgcgactgtacgacgtgagctctggctcgctcaaggtcggcggcgtggacgtgcgcgactatgacattgaggcgctgcgcgatcaggtggccatggtgttgcagaagaacgtgctgttctccggcactattgccgaaaacctcaggtggggcaacccgaacgccaccgatgaggagattcgccatgccgcgcagctcgcgcaggccgatggattcgttcaggaattccccgataagtacgacacgtacatcgagcagggcggcaccaatgtgtccggtggacagcgccagcgcctgtgcatcgcccgtgcgctgctgaagaagccgaagattctgattctcgacgattcgaccagcgccgtcgataccaagacggacaagctgatccgcgccgcattccacaacgagatcccggacaccacgaaaatcatcattgcccagcgcgtggcctccgtgcaggaatccgacatgattcttgtcatggattccggccgtatcatggcctccggcacgcacgaggaactgctcaccacttgcgacgaataccgttccatttacgaatcccagaccaagagccaggctaagcccgaagaactggccgctgccggacaggctgctgagtcatctaccgctgagccgtccgaaaccgtgacggtgacagtgaccatgcccacggccgataccagcgcagctgataccaatgcagccgataccaaggaaggagaagcacgatgagcaacgaccagagtttcaagaatcgcgagcccgccatgggcaaagccgaccccggaaccatcaagcgcatcttcggctacatcttccaatacaaattgcgcgttatcgccatcgtggtgtgcatcctgatcggtgccgccgcgcaggccggatccgcgctgttcctccaatcgctgattgacacctacatcctgccgatggtgggggaatcgaaccccgactgggctccgttgctacgcgccatcagtctgatgggctgcctgtatgtggctggtatcgtgacatcctgggcttggcagtggctgatcatcaccgttgaacagggcacgctcaagaagattcgtgacgatatgttcgcccaccaacagaagctgccgatccgctacttcgacagccacgagcacggcgacatcatgagccactacaccaacgacaccgatacgctgcgccaggccatctcgcagtcgttcccgcagatgttctcctcgattatctccgcgattgcggcattgctgtccatgctgtggctgtccattccattcaccgcgttcgtaatcgtgttcaccgttctgctgtatttcatcgtgcgcaagatcgtgagccgttccggccgctacttcgtcaagcagcagcagtggatcggcgacgtgaacgccttcgtggaggagtccgtcaatggtcagaaggtcatcaaggtcttcaaccatgaggatgccactcagaagaccttcgatgagaagaacgaggaactctttgaggcgtccgccgaggcgaacacttggggcaatgtgaccatgccggtcgtcggcaatatgggctatctgctctacatcctgctcgccatcgtcggtgccgccgtttcgctggccggcgtcaatgacatcggtctgaccggtgtcaagccgctcaccctcggcacgctcgtctccctgctgaccttgtcccgctcgttcatcaacccgatcggccaggtctcccagcagctgaccatggtgatgatggcgctcgccggcgcctcccgcatcttcaagttgatggacgaacccatcgaggaagacaagggcaccgtgacgctcgtgaacgtggaacttgggccggacggccgcaccatgaccgaagtcgaccatgagaccggccactgggcgtggaagcgtgagatcggcgacgatggtacgaggtctctgaaggccgccgaaaagctgtgcggttccgcctgcgaggtggcgatgaaggccaaggagcaggcgatcacttcgcctgatgggcgttatacgctgctgcgcggcgacgtgcgcttcaccaacgtgaccttcggctacaacccggacaagccggtgctgcacgacatcacctggttcgccaagcccggccagaagatcgcgctcgtcggcgccaccggtgccggcaagaccaccgtgaccaacctcatcaaccggttctacgatatccagcaaggtcagattctgtatgatggcatctccgtggccggcatcaagaagcctgatttgcgcaggtctttgggcattgtgttgcaggacgtgaacctgttcaccggtaccgtgatggacaacattcgttatggccgtctgaacgccactgatgaggaatgcattgaggccgcgcgtctggtcaatgcggacagcttcatccgcatgctgcccaagggctacgacacagtgctcgaaggcgacggttccggcctgtcccaaggccagcgccagctgatttccattgcccgtgcggcggtggccgatccgcccgcgctgattctcgatgaggccacgtcttccatcgatacccgtaccgaggaagtcgtgcaggccggcatggataacctgatgaagggccgtacggtcttcgtcatcgcccaccgcctgtccaccgtgcgcaactccgatgtgatcatggtgctcgaccatggcaacatcatcgagcgtggctcgcatgacgagctgatcgcgcagaagggcgagtactaccagctgtacaccggcgcggtggagctggagtagccggtacgccagcaaaaaccgcacctcgattatcgggttgaagcaattctcatccggtggttgaggtgcggttttctatgttgaaagccgtgtgttggcgcaggattgcgaatattggcggtgaaaagagtacatttgaattgttgctttgacgatgtatcggccgcaaggaggggactatggcgttcgtgacgttgaaggatgtcgctcaacgtgccggtgtgtcggctgctgccgtctcccaaatacttcacaataaaggccgcttttctagcgatacgcgacagttggtgctgaaaactgttgaggaaatggggtatgtgcccgatcaacgtgctcgctccatgcgctcgtcggatactaagactgttggtttgctggttcctgatttgcgcaatccgtatttcgccgatttggtctcgtcaatggaggatgagttgtatgcccggggctattccacgctgattggtacttcagcagaaacagtggaacgccaggatgcgtttattggcaatctgctcgggcagcgtattgatggtgcgatcgtggtgccgcaaggtgtggagtcacccggggtgcagtcgttgattaaacgtaatttgccattggtgttcgtggatcggcgtgtgccgggcgtcgaatcggtgccgtttgtggtttccaatccgtatacgggcattcgcgaggcggtagaggaattggtacgtttgggacaccgttgcgtgggatatgtgtcgcatccctcattagggtcgttcagcgtcaacgaacgagagaccgcattccgtgcggttgcgtcggatatgcttatcgagggtaacggcgtggtagtcgcttgcgactccacttatgaatcgcgtacggcagcggttgagtcgttgcttgatgccggcgtaagcgcgatgctgtgcgcatactcgccggatgcgctcacgatgattggtgtgctgcacgaccgtggggtttcgataggtgaggatatgtcgctggtgtcgttcgatgacattgcggcgttcaccttgatgacaccgcgtatcgcggtggtttcccaacaggccgagctgatggggcggcagggcgtggatttgctgctgtgccgtattcgctctggtgcttcggatgagggcgtcacccattccgtgcccacgatgttcatcaaccgcgggtctgtgaagcagggcccctccgcagccgtcgccggctgattgtttcagtattttcctgcttctactacttctttgtccgtatgcgtgacacgcagaagactatattttgacaacgatgatttaacgttttatcattactcccatcacttgataaaacgttaaatcttgtgacggcgacaaggcctcggcttggtcgtgaggagacggtcatggaagacgtctccgatttttcggcaaggaagctgatggaaaggaacatcatgaagaagatcattctcgatttggataccggcattgacgacaccttggcattgtcatacatccttggatccgaagacgcggaactgattggtattaccggtacctatggcaatgtgttgttggaaacgggtatccgtaatgatttgaatttgctggaaatgtacggacggccagatatcccggtgtttaagggtgtgccgcatcccagtgatgcggattctttcgaggtgcctgacagttcaggcatttttcacggtcgcaatggcaccggcaatgttgaggtgcctgcaacggcaacacgtcaggcgtctgataagtcggcagtcgatttcattatcgaatccgctcgcaagtacagcaaagaagagcttgtctatgtgccaactggtccctcgaccaatattgacgccgcattcgtcaaagcacccgatattgttgacaagctcaccatcgtcatgatgggaggggcgctgacgcagccgggcaactgcaacccctacatggaagctaatatttccatggatcccaaggcctctaatcgcatgttctccacttcggccgacatcacgatgattggtcttgatgtgaccatgcaggcattgatgaccaagaaagatacgcaggctctacgcgatgtcggcactaaggccggtgcatttcttgccgacatgactgattactacatcgatatcagtgaggaaactgatcctgcattccagggcggatgcaacctgcatgacccattggctgctgctgtggcccttgatccgacactagttacgactttcccgattgaccttatggtcgagactgaaggcccgagcattgggcgtaccatcggcgatccgacaagattattgagccagccgaagaacaccaaagtagctcttggcgtagatgctgaacgatttacttcgcaattcatggaacgactgctgaagcttgccgccaccgtcgattgaatcactaaggaaaataaggagaattgtaatgacggaacaaatacagtcggttgcttccattgatgattttgaagccaaccgagcaaagaccaaaaaagcactgcctgcactgctgattgttttcactttgggaacactgatgattcaggcattcaatctggtgttccaaaacattggtgattcactcggcatgtcatcaagtgcctcactgatcagcacactaccaggcatcgttcttggtgtggtgtgcatgctgtatggcacattgtgcgacttcatatccccgaagcgtatgacgctatttggcgtagttgcattagttgccggtagctttttggggttctttggctcgttcaacttctgggtcgtgctcatcgcacgtatgattcaggttgctggtgcacaagttgctggttctgtgttcctggtgatgacagtcaaatatctgaatgacaaggaaaaggccatctacattggcatttacaatgctgtgtattatttggccgctgctatcggtgtgtttgcgggaggcttcatcacctcttttgattggaagtacctgttccttgtgccggcgttatctgtgttctttattcctctgctgattaagaacactccagacatcagtgccaagggcgagaagatagattccattggcgttctgttgtttgcggtatttgctgcgctcattgccatttacttctcgttccccggagtcggcatgattattgcctcgattgtattcgctgtactgtttgtgctgtggatctggaaaggcgagaatccgttcctgggtcgttctttcgtgaccaatggtgcgtatatgtccattctgctgctgcaatttgtgctgtacttcttcaactttgcttgtgtgccgatttacaacgtgattggtgagcagatctacaacgtgccgttgaccacggtttcgctgtgtctaacattggtctacattgtggccacaattgttggatgcgtttctggtccagtaatcaacagactcggacgcatgcgcacactggttatcgctatcgtgctcatgattgtcggcttcgcaggatctgccatattcattaagagtgggttcggagtgctgacttttcttgcctgcttgttcattgctggtgttaccgctgtatatacgccaatctacgacgctgcgtcagatgcgttgccggtcgaggagaatggtcgtggcgtaggaattctcgatctgatgatgaacacttcggcctctatcggagtcggcgtatactccagtctcatggccagtgacaccatgggcaagggtggtctgttcggtgttggcagtggtgtggaagcgcagacctccaacatgttctggattatgtgtgcggtttcggtgttgtcgatgattgtactgttcgtatttcgcaagagttttacggcaaaacgcaatgtctgattgcgccagctggtgcggagcatgttgatcgaacagactaccgcaccagcagcatctatcattcagaaagggaatatcatgcctgctatggatgaaacgcttgtttctcttgattgcattcatggggccgtgtccgtcgttggctcgatgaatgccgattataccgtcaccaccgagcgtctgcccaaaccgggggagacagtgctaggagggccgttgcgggtgcttcctggtggcaagtcggggaatcaggctgtttcggccgctcgtcttggagccaaagtccgattgtttggtgtgctcggttccgacgctaatgcggattttttgcttgaagcattgaacgataccggtgtggacaccagttatattcggcacgtggatggggccagcgggaccacggtcatcaccgtagacgcggcaggagagaacacgattgtttattctcccggctctaacgcttacgtcagtgttgagtatattcaatcgatgcgggataatctgacctcagccgatgtactgggactgtgtttggagagtccgatggaaacggtcacggcatgcgctcgcctctgccatgatgccgggctcaaggtattgctcaacgattcgccattcgttgctgaactacccgctgaacttatcgaggcttcggacattctgctggtcaatgaacatgaaatggcacagctgctggacatcgccgagcctgacgatgacgattgggatggactggactggtctgatgtggcgcggcagatgcatgacttcggctttaatcaggcggtaattacgcttggcggggatgggtcggtggtcatcgatggtgatgatatctatcgtattgcgccagttgcggttgcggccatcgacactaccgggtgcggagatgcctttatgggcacggttctggccggacttgcctcgggtcatgcgttggcggacagtgcgcagttggcctcgtacgtttccgcgtacgccgcgactggggtcggtgcgcaagcctcttatggtactgctgctcagattcgtgagcggtttggtacgaattgattactgagaagtgtggagtattgccggccgtgaattggtgcagacctaacacgttcatttaggcgctatgcagtgtcgaatgttctcggcgcggattttacgaagtattgtcagcaaatgcatcaaggcaatggcggcggtctgggcgggactacggccacgcataacagtatcgagtactcgaatgagtcctatgacgcgaaaactcggaccgtgacgatgcatgccgttatcgaccggagtgatccgtaccgattcggggattcgaccggcagttttactgcgccggacatcaccgttgtctttgacaagtccgggaaaatccagcgcattgactccacggtctggggattcccgcctgcccgataattatcggagggcctgaaacatgcacgttctcatcagcgctgcggatcgacgatgctgcaaccatacggcgtcatacccgcatgacgtgagttacactatgtagtaaagttatttactgaaatactgcgtattgttacgtactgaggcgtggaaggctcaactatggtcacgatgaaggaaatcgcacagaaatcaggcttctcgcaggccacggtatcccggctgctcaatggggacccgacattgtctgtcaaagaggagacgcgacgtcgcatcatcgaggtcagcgagcagcttggctacgctaccggatcacgccgtatcgcattgccacgccgtgtggccgtactcgacaacgccacccgcgaggaagaactggcggacgcctatttcgatgaactacggtccgtgctcggcgacaatgccagagcccagcacatggaactcacgtcgttttcccatatcgacgatctgattgccgacgccggtgatttcgacggcttcatctccatcggaccgtccgtactctcttcggatagactgttgaagctccatctggtattgccctatggcgtattcatcgacaccaatcctgcgcccagcctgttcgattcggtacaaccggatttaagccaaaccattttggacgcattggatatgttggtgtcctcgggcaaacgacgcatcggctatatcggcggtactggcttcacgatgggtttgcacgaatatccggaagacggccgattaaccgcattccgcaattggaccgagcgtttggggctggatgcggaaggcctgatttacgcgcaaggcgcgttcactgtggacaccgggcgcactctaggggaggaagcggttaacgatcatcgagatgacatgccggatgcgttcatcgtggctgcggactcgattgcagtcggcgtactgcaggcgtttaccgctgcgggagtgctggtgcctcgcgataccagtgtgatcagtatcaataaccaggccatcgcccagtacacttcgccgacattgaccagttacgatatcgaccagaatgagctggccgatactgcgattacgatgcttgccgaggccatctccagtcggcgcacgctgcaccaccataccttcatctccaccaccctagtggtgcgtgacagtttcgtaccagcacgataaagaagctccctctgtgcgataaagaagctccctcgtcagagggagcttctttgtcgctgttagaacagttccagattcacgtcgagcgtgtaggcgcgatcggcgggcagctggtactgctcatggacgggcgcgccccatgaatcgtctccgcccacgcccatttgcgcggccaacaggcgcaggaacgtgtgacgaaccggcggcaactcgttctggtgggtcgcctcttccagcatgagcgagctgtacggcaacaggctcgccgcgaaatgttcgctgccggcctggctgatacgcatgccgtgtccttgggcgtcaagcacttcggcccaacgccagtcttcatggttgccggtctcctgcggcaccagatacggtgcattgtcttcggccgcggtgcgctcgaaaatgccgagcttgccaccgtgcagacggtcgtgataggtttcctcggggccaaggccgtagaagcgcaggttctcgtactgcttgggaagtgtccattccaatccgaatgccggcagcgtcggcgcatcggtggcaccggcatatcgggcggtcagatgtacacgtccgctggcggcatccacctcatagcgcacggcaacttgggtttcacccggttcggccaacgtatgacgaatgccgccaacgggcaccaacctcgttgacggcattcgtctttccaggacaccgcaatcgcggatgcatgccgtttacgcgttgaatacgtattggtcaaggcggcgcatggcctccttgacgcggctcaagggcaatgcgagattgacgcggatgctgtagggggcctggaacatgctgccgtcctgccatgcgacgcccacatcccagccgcgtttctccaactcgggcaggctcaggccgtggcgttcgcaccactgctcgcagtcgagcagcagcatgtaggtgccttccggtttggccaaactcactccttggaaatgcttggtgatgtagtcgtaggcgtaatcgacgttgccggtgagcaccgccttcagttcgtcgagccactcatggccttcgggccggtaggcgccgatcagcgcgtgcatggaaagcacgttcatgtcgttgtagtggcatttcgagcttttggccacgatgcggtcccggagtgtgggattgtagatgatgtggtagcttcccaccagtccggcgagattgaaggtcttgctcggcgcgtagaacgccacggtcctgttgcgtgcgtcctcgctgaccgattgggtggggatgtgctggtggttccccagagtcaaatcggaccaaatctcgtcggaaatgaccacgcaatcgttggccttgtacacttccatggccttctcgatttcccaacgttcccacacgcgcccgcaaggattgtgagggctgcagaacacggccacgtggatgtgatgctccttgagcttcctgtccatatcctcgtaatccatgcgccatacgccgcgctcgtccagcgtgagcggactgtggacgatgcggtagccgttgttttcgatgctccgggtgaacccgatgtaggtcgggctgtgcagcagcacgccgtcgccgggggcggcgaacgcggttagcgcactgatcacaccgcccaggaccccgttctcgtagccgatcgcctcccgggtcaatccggtgaccccgttgcgcgtggactgccagtcgatgatggagctgtaatagtcgtcggtgggggagaagtacccgtaggcgggatgcttcgcccgttcgatgatggcctgcgggatcgtgggcacggtcgggaagttcatgtccgccacccacatggggatgacgtcgaaaccctcgcgtggcgggtccggcgcgaatcccgggtcggtgcccagtccgtcgaccgcgatcgaatccatgccatgcctgttcatgatggacgtgaaatcatacgtcattgtccgacaatcctttctcggtccgtggtggccggtcccaatctaaatcgggctcctgacggtgccgtggccgtgggcggcgatttgaccgcgtggcgtgttaggatatgcaccgttgtgaggcagtgatccgttatcagcggggagtcttcggaagaacggcggcaatcgcccagtagaaccgacgggatcggcccgagacagccgaacacaagcggtcgcgcaggctcgcggctccgagtgcaacagttcggagcggcgcaaccggtgcgataagcgaggtggtaccgcggtgcggagcgcataccagcgctcgtcatcgtcctcgtaggcaggaacggcagacatggctgttccgggcggaacacagtcggttccggctgcgaggcgattgactaatcggcccacggttcggtacgtgacattcgtgaaaccagccggcacacgtcggcgcccggcaatcgccatcaatgacgctcctgtaggaccagtgcacagtactaacaggagatttacggtgagcgaaaacgtatatcccaaggcgagcgagggcggcgagaccgcgcacgtcgcgccgaaccccagcttccccgacatggaggagaccgttctcgactactgggacaaggacgacaccttccagcagtccgttgaacgcaacccttccggcgaccacagccagaacgaattcgtgttcttcgatggcccgccgttcgccaatggcctgccgcactacggccacctgctgaccggctacgccaaggacgtgatcccgcgctaccagaccatgaagggccgcaaggtcaaccgcgtgttcggctgggacacccacggcctgcccgccgagcttgaggcgcagaaggagctcggcatcgactcggtcgaccagatcgagaagatgggcatcgacaagttcaacgacgcctgccgcgcctccgtgctgaagtacaccaacgaatggcagaactacgtgcatcgtcaggcccgttgggtggacttcgagcacggctacaagaccctgaacatcccgtacatggaatccgtgatgtgggccttcaagcagctctacgacaagggcctggcctaccagggctaccgcgtgctgccgtactgcccgaaggaccgcacgccgttgagtgcgcacgagctgcgcatggacgccgacgtgtaccaggaccgccaggacaccaccgtatccgtggccgtcaagatgcgcgatgaggacgacgcctacgccgtcttctggaccaccaccccgtggaccgtgcccaccaacttcgccatcgtggtcggcgccgacatcgactacgtcgaggtccgcccgaccgaaggcaagttcgctggcaagaagttctacctcggcaaggatttgctgccgcactatgagaaggaactcggcgagaattacgaggtcgtgcgcgaactcaagggcaacgagctggcaggccgacgctactacccggtcttcccgtacttcgcgggtgacgaggccgaatccgaaggccacgtgcccggcccgaacggctacacgatcttcaccgccgactacgtcgacaccgtcgaaggtaccggcctggttcaccaggctccctacggtgaggacgatatgaatacgctgaacgcgcacggcatcaagagcaccgacgtgctcgacgatggctgccgcttcaccgcgcagtgccctgactacgagggcgatttcgtgttcgacgccaacctgccgatcctgcgcaacctgcgcgccggcgacggcccgctcgccgagattccggaagagcgccgcgcgatcctcttccaggagaagagctacgtgcactcctacccgcactgctggcgctgcgccaccccgctgatctacaagccggtctcctcctggttcgtgtccgtgaccaagatcaagccgcgtctactggaattgaaccagcagatcaactggatcccgggcaatgtcaaggacggtcagttcggcaagtggctcgccaacgcgcgcgactggtccatctcccgcaaccgcttctggggttccccgatcccggtgtgggtgagcgacgatccgaagtacccgcgtgtggacgtctacggttcgctcgaagagctcaaggccgacttcggcgactatccgcgcgacaaggacggcaacatcaacatgcaccgtccgtggatcgacaacctggtccgcgtcaacccggacgacccgaccggcaagtcgcacatgcaccgtatttccgatgtgctcgactgctggttcgagtccggttccatgtcgttcgcgcagttccactacccgttcgagaacaaggagaagttcgaacagcacttcccggccgagtacatcgtggaatacatcggccagacccgcggctggttctacctgctgcacgtgatggcgaccgccctgttcgatcgcccggcgttcaagaacgtgatctgccacgtcatcgtgctcggctccgacggccagaagatgtccaagcacctgcccaactacccggacgtgaacggcgtgttcgacaagtacggttccgacgccatgcgctggttcctcatgtcttcgccgatcctgcgtggcggcaacctgatcgtcaccgccgaaggcattcgcgacaccgtgcgccaggtcatgctgccggtgtggagctcctactacttcttcaccctgtacgccaatgcggccaacggtggggctggcttcgacgctcgccagctgcgcgcggacgaggtcgccggtctgccggagatggaccgctacctgctggcccgtacccgtcgtctggtgctggccgccgagaagtcgctgaacgagttcgcaatctccgacgcctgcgatgcggtctccgacttcatcgacgtgctcaccaactggtatatccgcaacacccgtgaccgtttctggaatgaggacgcttccgcgttcaacacgctgtacaccgtgcttgaggcgttcatgcgcgtgcttgcgccgctggccccgatggaagccgagtccgtgtggcgtggtctgaccggtggcgagtccgtgcacctggccgattggccgttcgtggtggacgagaagaccggtgaagacaccgaactcggccgtgtgctggtcgacgatccggccttggtggacgcgatggagaaggtgcgtgaggtcgtctccggcaccctgtccctgcgcaaggccgccaagatccgcgtgcgccagccgctttccaagctcaccgtggtggtcgagaacgtggacgccgtcaaggcgtacgacgatctgctgaagtccgaacttaatatcaagaatattgagttctcgactctggaggacgcctccgcccacggtctgaagatcgtgcacgagctgcgtgtgaatgcccgtgcggcgggtccgcgcctcggcaagcaggtgcagttcgccatcaaggcctccaagtccggcgactggcatgtcgatgctgcgtccggtgcgccggtggtctccacgccgtccggcgaccttgcgctggtcgaaggcgagtacgagctgatcaaccgcgtggaggaggagaacgccaccgaggccgccgcttcggtctccgccgctctgccgaccggtggcttcgtgatcctcgacaccgcgctggatgccgatttgctggccgaaggctacgcccgcgacgtgattcgttctgtgcaggacgcacgtaaggctgccgatctggacatcgcggaccgtatctcgctggtgctgaccgtgccggctgtcgatgtggccaaggtcgagcagttcaaggatctgatcgcccacgagacgctggccacctccttcgaggtgaaggagggcgccgagctgggcgtggaggttgttaaggcgtgaggctttgatgcatttagtgctcgcggagattttgggttggccaagatttctgcgagcacaagtcatctgatggtgccgtgctctgaacctgtggggatgctctggcgaaaggccgggaaccttccaccagagcaaaaggtttaaagggtggagggcaccggccttccgacctttattattgcatgactgagtttgccctgcatacgcggggatgatccgttgatagggaggaatgaaagttcttctgctgatggatgctccgcattggcgggggtattgaatacgtttgccccgcacgcgcggggatgatccgattcgcggcatcatcgaggcggacatcgtcaagtttgccccgcacgcgcggggatgatccgaaccaccaaaggcgaagtgaaaaaggcaccaagtttgccccgcacgcgcggggatgatccgcatcgtgacggtgccattggcctcgccgtaacgtttgccccgcacgcgcggggatgatccgaacaccagctcgtccgggtattgtgcggaaaggtttgccccgcacgcgcggggatgatccggagggcgacacctccatcaccatcaccgcagggtttgccccgcacgcgcggggatgatccggccttgacgttcgcgcccgcgtgcacggccaggtttgccccgcacgcgcggggatgatccgcgcaggctgacggtgccggcagggattgcaacgtttgccccgcacgcgtggggatgatcctacgcattggccgagcgcatatacggcggtaacgtttgccccgcacgcgcggggatgatccgataacgcgaatagttccatcatcattatcggtgtttgccccgcacgcgcggggatgatccggcgatggcaatagacgcaagaccgttgaaaatgtttgccccgcacgcgcggggatgatccgacctcatcggcgccgtcatcagctacgccaaagtttgccccgcacgcgcggggatgatccgcaagctggtcgatgtttcacacgccctgccgagtttgccccgcacgcgcggggatgatccggacaagccgtggcataagcgtctgctcgccaagtttgccccgcacgcgcggggatgatccgtgtccctgctcgcgaacgtcacgtcattggtggtttgccccgcacgcgcggggatgatccggtaactgtgatgacgggtgatgctgaggcgaggtttgccccgcacgcgcggggatgatccgattccgcgcgaagtgttttccacggcgaatcagtttgccccgcacgcgcggggatgatccggacctgaccagcaacatcgtgtggacccgcacgtttgccccgcacgcgcggggatgatccggaatcgttcgtgacccgcacctaccggttcgagtttgccccgcacgcgcggggatgatccggagcacgcccgcgcaaataccacacgacacgcgtttgccccgcacgcgcggggatgatccgtgtcgccgggctgaatctcgaacagaagaaccgtttgccccgcacgcgcggggatgatccgtggctcgcatgtttcgacagcgcgggcgcggcgtttgccccgcacgcgcggggatgatccggcca

SEQ ID NO: 1335 - DNA, 9923 bp, Unknown
  R157_18m  MAG No. k141_15430
acgcggggcccgtccacgtcttcgatgcgcatcatcatgcgttcgccacgcgaacgggccgaaagccatgcacccaacatggcgtacacgttgccgatatgcatgcgccccgacggcgtcggcgcgaatcgtccggtcaccggtcttcctgaatcccgtccacgctcacggacggatcgtcgccgcccgaacgtgcggtgaggtccagatgctcaccaccggtctggtcgaccagcacggtgtcgccgtcgtggaccttgccggccagcagcatacgggccagctggtcacccacttcggtctgtaccaggcggcgcagcggacgagcgccataagccgggtcgtaaccggtgttggccagccattcgcgagccgagtcggtgacgtccagcgtgatgcggcggtcggtcaggcgctgagccaccccggccacctgaatgtccacgatgccgccaagctcctcacgcgtgagcgggtggaacatgacgatgtcgtccagacggttcaggaactccggcttgaagttcatgtggacggcgtccatcacggccttcttcttggcgtcggcgtccatgtcctcgttcacgaggaactgcgagccgaggttggaggtcatgatcaggatcgtgttcttgaagtccacggtcctgccctggccatcggtcaggcggccatcgtcgagcacctgcagcagcacgtcgaagatctccggattggccttctcgacctcgtcgaacagcaccacggaatacgggcggcggcgcacggcctcggtcagctggccgccctgctcgtagcccacgtagcccggagccgcaccgatcaggcgcgagactgaagccttctccatgtattcggacatgtcgatgcggaccatggccttctcgtcgtcgaacaggaagtcggcgagcgccttggccagttcggtcttgcccacaccggtgggaccgaggaacaggaacgatccggtcggacggttcgggtcggagatgccggcacgcgaacggcgcaccgcgtcggacacggcggcgatggcttccttctggccgatcacacgcttgcccaggtagtcctccatatgcagcagcttctcgttctcgccctgcatcaggcggccaacgggaatgccggtccagtcggagacgatctcggccaccgagtcggcgtccacacggtccgggaccatcggctcatcggccgggttggccgcgccggcatcggcagattcggcatccgcgctttccgcggcggcgagttccttctgaatagccggaatctctccgtacagaatcttcgaggcctcagccagatttccctcacgggtgaacttgtccgcctgcacacgcaggtcatcgagcttggcacgcaggtcaccgaccttgttgtggccggcctgctccgcatcccaacgcgccttgaggccgctgagcttctcacgggtgtccgcgagttcggcttgcagcttgcccagacgctccttggatgcaggatcctcagccttcttgagctgcatttcctccatttcaagacgggtcaccttgcgctgcagttcatcgatctcctcaggcgaggagtcgagctccatacgcaggtgggcagccgcctcatcgaccaggtcgatggccttgtccggcagctgacggcccggaatataacggttcgagagggtcgcggcggcaaccagcgcgtcatcgccgattgtcaccttgtggtgcgcctcgtaacgctgcttcaggccacgcaggatggcgatggtgtcttccacgctcggctcgcccacgaacacctgttggaaacggcgttccaatgccggatccttttcgatgttctcgcggtactcgtccagcgtggtcgcgccgatcaggcgcagctcgccacgggccagcataggcttcagcatattaccggcgtccatcgagccttcggccgcacccgcgccgacgatggtgtgaatctcgtcgatgaaggtgatgatctggccgtccgcgttcttgatttcgttgaggacgctcttcaggcgctcctcgaactcgccacggtacttcgagccggccaccatggagcctaggtcaagggagatgagcttcttgccttgcagggtggtgggcacgtcgcccgccacgatacgctgggccaggccttccacgacggcggtcttgccgacgccgggctcgccgatcagcaccgggttgttcttggtacgacgggagaggatctgaatcacgcggcggatttcctgatcacggccgatcaccggatcgagcttgccttccttggcggcggccgtcaggtcggtggagtacttctccagggccttgtacgagccttccgcgtccgggctggtgaccttcgcgccgccacgcacgccgggtacggccttgcgcagggaggctgcggtgacgccgttcttctccaggatttcggccgactggttcggcttgctggccgcgatgccgataagcaggtgctcggtggagacgtattcgtcgcccatctgctgcatttccttctcagcctgggcgatggcggcggtcagctggcggctggcctgcggctgcgaagtgctggagccggatgcgctcggcagtgcgaccaaagcgttacgcacggcggcgccgatggcctgtgggtctccgcccgcggcctcgatgagggagcgcaccacgccgttttcctgacgcagcaacgcatccatgacgtgcagggtctcaacctgcgcgtttcctgcggcggacgcactctgaatcgcgtcgccgacggcctcctgggccatagtggtgaacttctgttccatatcgtattcctccatatcatgcggcccgcgcggagcggctcgcgggcttcgaaagccccgcaagcgccaccgcagaccgcaacttgtcgttgtctgatatggtcaaccgacctggaacccattctattcccaaaacttgagtgcaggtgactcaagttttggattttggtggggagggtgaacagtagccccctctgatgagggagctcacatctatttcaggaggccgacggcagcttcggcggcggataggatttcgccggagaggatggcgttggctacgccttcgatttgcggggtggtccaggtatcgcgtacgtcggggccgatttcgttggcgtactggcgcaccacgcggtatacggcggcacccgccgcacccggacggtacggcttgcggaagtcgaaggagcggcaggagcacagcagttccacggccagcacgcgcgcaaaggccggaatcgaccggcgcagcttgcgggcggcggcccagcccatcgacacgtgatcttcctgcatggcggagctcggaatcgaatcgaccgaggcgggcacggcgttgcgcttcatttcggagacgatgccggcggcggtgtactgggcgatcatgaaaccggagtccacgcccgggtcaccagccaggaacgccggcaggccgcggttgcgcgccacgtcaaggaagcggtcggtacgacgctcggagatagaggctacgtcggcagtcggaatcgccaggaaatcgagcacataggccagcggcgcgccatggaagttgccgttggactccacacggccgtccagcgtgacgcacgggttgtcgatggcggaggcgagttccacgcccgccacggaggccgcgtattccacggtgtcgcgggcggcgccgtgcacctgcggggtgcagcgcagcgagtaggcgtcctgcacacgcacggtggagcccgggcggccggcctcgatcagaccggagcccttgagcatgcggacgatgttcgcggcggaatcgccttggccgcgatgcggacgcagcgcctgcaagtcggcggcgaacacgcggtcgttgccgagcatgccttccacgctcatcgcggcggcgatgtccgccgtcttgagtagcaggcgcagatcggtgatggccatacacaacatgccgagcatgccgtcggtgccgttgaccagcgccaagccttccttctctttcaaatcgacgggcgtgatgccggccgcacgcagcgcttcgccgccgccgatcttgcggccgtcagcgttgcgggcctcgccttcgcccatcgccaccaaagcgcaggcggcgagcggcgccaaatcaccggagcatccgagcgaaccgtattcgtagaccaccggggtgatgccggcgttcagcatatcggcgtagacctgcgcggtttccgggcgcacaccggtgcgtccggtgcacagggtgctcaggcgcagcaccagcaggccgcgcaccacctcacgctccacttccggtccggcaccggcggcatgcgagcggatcagacttttctgcagctgcgcgcgctgttccttggggatggaagtggaggcgagcgcgccgaatccggtggagataccgtaatgcggcacggtgtcgtcggccaaatgatcgataaccgcgcgacttagcgccatctcatgcttcgattcgtccgaaatcgccactttggcaccgccgcgcgctacggcgataacgtcctcgatgctcaatgccccaacgcctacggtgaccgtctgctctgccatgttttcctacctctctatcgtgccgagctccacttggtattggatatattcatctcgccagcatggcatatcaacgttacgggactgtccacaatatgcaccgccccgcgccagcgccgcgcgaacgctcctatactcacggctggtttgtaatgcgcctgaccgccgccggtgctgcggcgggtgcttgtgggataagagaagaacatgatttttcaggccggttcgctgctgctcgttatcatcggtgtctacatactcaaacatgtccacattttcggcgagcgtgattacaaaatcgtgcagggtctggtattcaatctgacgcttccttgtgcgattatcctgtcgttcgccacgaacaagcacgacatgcgcatgctgtggatcgtgttgttcggcttcttcgcctgcgcgattccgctgttcatcgtgtatttcggttctcgcggcgacgagaagaactaccgcgccttccagatgctcaacgcctcgggcctgaacctgggcgcgttctgcctgcctgtggttcagacgttcatgggcccgtccgccggtctgccgatcatcatgctcgatatcggcaacgccaccgtggccacggccgggtcactgaccatcacacgcacgctgctgcatatggatgacaatttcaagtcgctaccgctcatcctgcgtctgcgcaatattgccagggacttcctaagctcgatttccttcgacatctacatgctgatgctggtgttcatgttcctgcacatcacgatcccacagcccatcgttacgctcatcaccccgttcgccaatgcgaacgccttctgcgcgatggccatgatcggactgatgatggagattccgaacaatcgcaaggacaaggtggagttgggcaaggtgattgtctggcgcatggtattcggcgcgattatagccgtggccgcctggttcctactgccattcgacatgaggattcgcgagatcatcgtgttgggctcgttcgcccctatcacgatcttctcaaccaagttcaccgattcgctaaccggcaacgccaagctcgccggcttctcgctgacagtgacggccatcatcagcttggtggtgatgaccgccctgcacgcacttctgccgggagcgtaagggggaattacgggcccagacacgaggggagccaaaaagagcaatacttcttctatgtgatatcaatcactgactaagctgcatcaccgactatggttaatcatcatgagaccagttcgccctacaattcaagttctgttgagcatgattgacaataatctcttcaactcagagaaccctcaacaactcattgaacagaacatgcggacggaagcagtaacaccgttcgaaggtcttgatttcaccgcattcgacgtcacactactcaatatggctcgtcaggctttcgctggtgacaaaatcgctgccaccaagcattcggaatttagcgctgtggcaaagcgcccagtctatgaaataaggaacaagcaaaccggctggcgaggcatcgtcattcttgaccaatatggcgacccgtggatggtctattgcggatcgcatggggatttccattcaggcaattgcaaatcaatcattaaggcttccaacgccagcaactatatgcccagcgaagaagattatctggttcggaaacgagaagaagaacgtcagcattttctggattttgagcgacgagtcgttcaggagatgcttaacaaaattcgtgcaggaatttatgcgggccaaacaacttcccagtccgaagccctctcagcgctggatatcccctatcagatttcaggagcccccgtaaaggccagtattcagattcagcaagatgacgatgacgactcagcaactgtcaatcaattcgttgaattgacccttgattttccggtcgaggaacaggacaacagttctccatacgcccgacttcaccgcatcctcttgagatgctttaacgccatctgccagcccaaagaccccaatcagccagcagaaacgtcgttgaagacatacagcgacggtcagcaaagacgcgcaactatgtcagcattcgtgctgctggaaccagacgacatcaagcgcatcacaagcccgaacttcctcgatgattccgaatcgttatacaagacgataggcgacaccgagccagaatctatgctacatcgcgtacccaaagagactctgaccgacgcatatgttgaaggcaccctcatccgttctctgtgcgggaaatggttcgtgccaaccagagatgaatactcaggacttcctgcatgccccgattgccaagacatactggaagtcaaggagtatctgagacgtaattacacgcctgagcaatagtcatgacttgacgcataccgggtaaatcgcacagacaatagattcactacgattcgcctgagacaatcctcactctgcgggagaaactgcggcactactcgctttgatcgcttcacggcgatgctctgcaactaaatcacgcatacgatttcgacttgtctcagacaccggagcgacttcgtcaaccgcatcggcaatatcctttgcccgagaattgattgcgtgggcgtattccttacgtcccgcatcacgattagccatgtacgtccgcaaagcaagtaccgtaatccgatgatgactgcccaccatatgagattcgagcagtcctgacttcagcaaacgagtcacatagggccgactcacgccaagaatctcagcagcttgagcaggggataattcttcgtccttgcgaaccaccagtacattatcgtcaataatgccatccaaaattgcagcgagtacagagcctttttgcaccagctctcggcacgccttcgcctgatccaaatcgcgttctgtaagctgttcacgttctattactgcagtcataatgcacatacctcatttcataactgaaataagtgtaacatatagcttggtgcaacacttagatttcgcgaaaaaatcatctgtacattagacagatgcatatatagatgaaatatatgaaacaaagcacgaaggcccggacatcccccaaataggaaaatgaccgggccatgcgttcgtcagtcgaatcacgcccgaacgattacgttgcgcagatcaccgatgccttcgacgtgcacgatggtctcgtcgccggggtcaaggtgaccggaagcgttcggggtgccggtcatgatgacgtcaccaggcagcagcgtggagaacgacgaaatcgcggcaatctgctcggggatgccgtgaatcagattcgcggtggtgccagacgccatcggcacatcctcgccgttcagcgtgaaggaaatcttggcgtccttccagtcgaggtcgtcacgcatcacaatccacgggccaagcgggcaggaagtatcgaagcccttggcgcgcgtccacgtggggtcgatgccctgcaggtcgcgcaacgtcacgtcgttcacgcaggtgaagccgagcacgtaatccatcgcgttttcaacggacacgttcttggcgatacggcccatcaccacggccacttccggctcgaagttcatgtccttggagcaggccgggtacacgatcggatcgtcggggccaatcaccgaggtggacggcttggtgaagatcaccatgtcctccggcgcgtgggcgatttcggagtgtccggcctcgtgcatgaactgggcgtgggcctcgtagttcttggccagaccgtaaaccttggaggggatgaccggggagagcaggcggatgccgtcgccgtcgaccgggtaccggttgccggtaggcttgacctggtcgccggccagcggatggccgtcaagttcgatgaggtagtccttgccgtccgtttcgtccttttgtacgaaggcgtagcgcggcgaatcattcaaagaaaaacgtgcgagtctcatgcctgtaagcctactccttggcggttccttccgcagaagcatccgtccaaggagcaagcataccggccttcaatcgaccaaaacgcacgttcgctgggattgctacttttcggtccaggttttgtcatacagcgactggccgccttgcgtgtgcatgatgacgcgcaatgatgccttgccgctggaggtcttgcacatcgagcccagcagattcgcggtggattgataggtgctgtccatagcatccagtgaggaagcgacggtatcgcctagcgaggcgtagctgtcgtcgagcacgtactcgtacaccaaggtgtcaccgtcgacacggtagttgaaggtgatgccggtatctgcaaacgtatccgcttcggattcaatggagtccttgaattccgaatagtcgacgaaatcctgaatcgaatcgtacagcccataatcgccgtcggttagatcgtcatgggtttcgtccaacgtgtcgtccagcgcatcgtcaagattatcttgagctttgctcttatcgctgctatcaccgttgcccgaagaggactgactatagaaggaatcggttttcgcctcatctatagccttgctggtgtacgagacaccgccgacgatcagcgcgatgaccagtattacctgtatcaccatgcccgccgcactgatgatgatgccggcgatggccaagcccttgcccttgccgccctgtttcttaatctggttgaggcccacgatgctcaggatcagaccggggagtgagacaaggaacgagcagataaaaccggcaatagccaggccgttgtacttctggttcgcttcaggcggcacactgccgtaagaaccagaccatcccggctggccgttcggttggccgccttgcatatacgggttatagggcgtttgcggaggcacggccccgccgcccggataccgagcactgacgctgccgtagaccggaggaaccgatccgcctgccggagccgtccccggatagggcgaattgggtgctgccggtgtgggcgcgggcgcagcggcaggagtcactggtggcaaagcctgcgtaggcggtaccggctgattgaccggcgcaagaggctgggtggactgctcggcaggtgtaaacgcctgcgtaggctgctcaacaggagtgaacgcctgagtgggctgttcgcccgctgcgagtgcttgggttggagcattgttggcggcggttcctgcttcccccgtcatcgcatttaacggctcagtcggattggcgtcagctcgctgccccggcacctggccgttcggattggcattcggatcagtcatgacatgcactccttcaactgcatcgcaccccacttgcgagatacgcccctcgtcttacgcgccacattgtgcgttacagacaactgtactcctcgtggcgagccttaagtaccccaggaaatttg

SEQ ID NO: 1336 - DNA, 50982 bp, Unknown
  R157_18m  MAG No. k141_15606
agcggcaagcagatagacgtcgggctggtccttgccgacgtcgttcacatcgtcaacagagacgatgtcatcgaatagcccgaacatgcccacatgccgcagcgccggttcacgcaggtgcgggggcagcgaggtggcgacacccagtttgacaccggaggctttcagatcgcgcagatagtcaagcgcgccgggtttggcttcgaccgtggtggaataggcgacgctggccatgtcgtcccattcctgcatgagctcttcgggcgtgtctgtaaggccgaagcgtgcgatggtgtattcggcaatctggcggaattgcatggcggaaactttggtcatgtagtcgggcggaaccgcgatgccacgcttgttcaggaagtcgatgtcgacttggtcccagactcccatggagtctaggagggtgccatcgaggtcgaatatggcggctttggtcataggacactttccttcaacagttctcgggcgtggtctagggaggcttcggattcgctgccggagagcatgcgggcgatttcgtggacgcgggtttcgccgttgacttcggcgatggtggtgaccacgcccaaatcgtcgtcatcggcatccggcggctccttggtgaccacgaactgcgcgtccgcccacgaagcgacctgcgccaagtgggtgacgacgatgacctgcgcgctgcgggccagccgtgccagacgtttgcccagttcgaccgcggccttgccacccacgccagcgtcgacctcgtcgaatatgaaggtctggtcggcaccgccgcgcgtgtcggcagccaccagctccaaggccagcatcagtcggctcagttcaccgcccgaagcgcttttgcccatcggcaactgcggtgacccctcgaacggcgtaaacaggaacgcgatatcgtcgcgaccatacgggccgagcggatcatcggccttgtctcgcggcgtgacgcgcacttccaaggaggcgcccagcatggcgagcgagccgagttcttcagtgacgcgcgcgcccaagtcggcagcggcagccacgcgcgcggcgctcagcacgtcggcggcggcgagggccgcatcgtacagcgtctgccgttcggattcgagttcggcgaccttttccggcgaggcgtccagatcctccagatcgaacgccgccttgtcccgccaagcgagcacgtcggccaaggtggggccccaccgacgggtgaggtcgccaagctcgtggatacggccgttgatctggtccagatcctccacgctgccttcgtcgcccagctcctggctcagggcgaacaccacgtcgcccaaatcggcattgatggattcaagccgatcggcctgctcggcgaacgtgccgccgacgcgaatcgcgcgcaacgaggtcaccgcatgattgatgagttccacggccgaagcgccgtcggcggcgtccacatccacctgcgaggcatccagcgcgcccagcgccgaacccacgccttgggcgatgtcggccgcgttttcgatgcgttcgcggcgcgccttcagctcctcgtcctcccccggctgcgggtcggttcggttgatgcggtcgatggattcgcgcaggtagtcggcctgttggcgggcagaggattcctgcgagcgcaggcgttccagccgctcatccatggcggccagcgcatcccacgccttgcggtaggcggccagttcggcttcgtctccggccacccggtccagaaactcgcgttgccgtgcggcggccgcgattttcagctgatcggtctggccatgaatgatgaccagttcgccggcgatggcccccagcaccgaacgcggtacggacttgccgccgagcacggcccgcgaacgtccggaagcgcgtacggtgcgggaaaggaacagttcgccgtcttcggggtcgacgcccgcgtcgtgggctttggccacggccgcggcagcaccggtgagcccgctgtcagaatcgtcagaaccggcatcgtcaccggcatcgttggtgtcgccggaatgttcagatgcgacggcatcatccgcgagcgcgaaaatcgcctgggcccaagcctcgtccgccccggccgagacgcgcgaggattcggcggccccaccggagaccagtcggatcgcggagagcagcatggatttgccggcaccggtctcaccggtgatggcggtcatgcctgcggccggcgcaatggcggcttctcgaatcggccccagattgcggatatcgagttcttcgagcatcaggctcctgccttgccgtcacgttcgcccggcttgtcgggatcggtaccagcgacaccagcgtcaccggcaacgccagccgcatacgcggccgccgggaacgtgtgcccgtgatgcagcggctggctcgaggcctcgttgcgcgcgtgctcgcgccaaccgaccacgggcagatcgaacttggagaccagacggttggtgaacggcatgccggagagtcgagcgaggcgcaaggtatcgcgcgattcgcgcaccatgacgcgcgtaccctgcggcagggcgcgctgacggcgtccatcgcagcaaatccagccttcggacatggaatcgtccagaatatcgatggtgaaggtcgaaccggagccgatgatcagcggcctggcgaacagggcatgcgcggccaacggaatcagctgcagggccttgacgttcggccacatgaccggaccgcccgcggagaaggcgtaggcggtggaaccggtgggcgtggagacgatgacgccgtccgcgccgaacgagttcatctccacatcgtccacgcggatggacagttcgaccatcttgccccggtcggcgcgttccagcgtgatgtcgttcagcgcccaatcctcaatgggcttggtggtgccaggcagccagacgtccacatgggcgatcatgcgttcgtcgatcgaatagtcgtgggtggcgacccggcggatcgcctcgtcgatctggaagctttcgaattcggccaggaagccgacatgccccatgttcacgccgagaatcggcacctgggtgcagtggacgagttcggcggcgcgcagtatcgtgccgtcgccgcccaggaccacgacgatttcggtgtcgtccgacacgcacggcggctgcacaccgaaatcgggggcctcggtgttgtcgatgatggtgacttcgaaaccggccactcgcagctggctcaccgcctcggccactacggttccggtctgcctgagcctggtatgcgtcaccaccaccgcgttgcgcttggccatggcatcctcctgtcgattcggtcgcactgctcattattctagccgcagacaccgtcatcactcgtacaggtgttcgaaaaatgccgcttcgtggcgcgtcgccgacaacgttccgcagagtcgattaacgtaaggcttcggcatacaatggcatacagccgcgcgatcaccgtacgcgtgccgtgcgcagcgcgatggcatgccgtatgaccatacagcagtatcagttgaggagcttgaggacccatggccaatgacttcgacgaatcctccgccaatgaggaggcctcgaagggcctgtcatggtggtattcggccgatgtactgagccgagacaaaagcgataaaaccgccaagcgcattcgccgcatcagcatcaccgaccgtctgctcaggcacccgggccgtctgtccatggtgtatttcggcgcactgatcatcatcgtcaccggcttgctgctgctgccgatctccacatcggacatcatcttcaccaacttcccggtcgcgttcttcaccgccgtctcggccctgtccacctgcggcattccggtggtgaacaccggcgaatactggtcgacgttcggccaagttgtcatcctattctccatccagttcggcggcctgggcgtcatgaccttcgcctcgatggtggctcttggcgcttcccgcagactcaaggtctcccagcgcatgcttaccgcgaacgaactgggcaccacgaagctttccgaggtcaaaggcgtactcaccgtggtattgggcacctccatcatcgccgaggtgcttaccttcgtgctgctgctgcccgacctgttccgcgtgaaccacggcaatatgggacgtacattgtggcaggcgctgttctacgcggtatcggcctacaacaacaccggtttcacgcctgacgccaccggcctgcatgtgaaccgttggggcgtgggactgccgattctcatcagcgcattcataggaacgctcggcttccccgtggtgctgaatctggtgcagtgcgcacgccgacatctcagcccgaaacgttggacgttgcacaccaaactcactttggtgaccaccgctgtgctggtggccacctcactggcttggttcctgctggtcgagtggggcaataccggcctgttccccgcagacggtcccggcatgaagatgcgccgtgcgatgagcgccgccgtcatgccccgctccgccggtttcgatatttcctgggtgcccgaagtcacgaatgagaccaaggtgttcatgagcatactcatgttcatcggcgcaggctcctcatccaccgccggcggcatccgtgtcaccacgttcgcggtgattctcttgatttgccgcgccgcattcaccggccatcgcgatgtcaccgtgttccgccgccgtatcccccgccgcgtccagatgaccgccgtgtccgtgaccacggcctgctttgcgctggttatggtcggtgcgatgatgctgatgttcaccaccggctgcgcgttcgtggacgccgtgttcgaggcctgctcggccttctcgttgggcggttattcggtgggcgtggcaagcgccggcaatccggccagcctgtttattctgtccgccgagatgattgtcggacgacttggcccgttgaccatcgcctactccatcagcagaccgatggctcccgaacctattcgttatccgcaggaaaacattatcgttggctgatcggccattcaatcggcacacagaaatccggcatagagaggaccatcatcatggcagcaaaaccgagcggcaacaaaagcgtgctggtcatcggcctgggccgtttcggcgggtccgtggccgccaccctcgaccagatgggtcaggatgtgctcgccgtggataagaacccggagcttgtggcccgttggtccgcgcatctgcccaccattcaggccgacatgaccgatgtgctggccatcgagcagatcgacgcctcccagttcgacacggccgtcgtggccatcggcgacagcatcgaggcttcggtgatcatcaccggcaacctgctggatgccggcgtttccgatttgtgggccaagtccgtgtcccaggagcatgcgcgcattctgcagcgcatcggcgcccgtcacatcatcaatgcggagaccgatgccggcaagcgcgtgggtcatctggtggccggcaattatccggattacatcgaaatcgacggcccgtacaccgtcgtcaagatccacacgcccctatacgcggtgggtcgcagcatcgaggacgtgcaggtgcacgacaaatacggcgtgaccgtggtgggcctcaaggccccaggcaaggagttccagtacggctccaaggaactggtcatgcatcgcaacgacgaactcatcctcatgggcaagcaggatcagatcgaccacttcatccaaggctaaccccccctaactgcgctcgctataccccctatctgctcacatcgtgaccgatataacccccctcaacatggatgcgctcattattggggcaataagccataaagctgtacgtccatattgagggggctttatcatcatgggcaagcatacgcagaattgcacgttgataggcaaaggagtctacggcaccataggagtggaccaacgttcccgtcttgccgatggcgcgcattttcacaccatgattgtgaccagcaccctcgaggcctcagttatagaaggggacaaactggtcatcaagagtggcattgtgcggtgtgatggtgatattcgcgtatccagcatcagcggcagcggcgacatcgaagtcggcggcgacattatttgcgatgaaataacctttaccggcaaactgcgatgcaacagcgatatcgtttgttccggaaatctgtccgtcaatggctccctaggcacccgtcatattagcggtcagacagtccgcttgaacggcgtgttgaagggtcatgacgtcaacagcagggctctggaagttcatccactgcgcagtacgatgttttctcgttttgatatggatgggtatgaggatggcagcatggttcgccatatcacagccgtcacggttgaagccaaccatctgcaatgccggactttgacggcggactccgccatgctacgcaacggcagtgcggtggaaagcgccacgtgtgccaccgcaataggcatcgaccgtacctccagcgtgctgctggtgaacggagactgccgacgcattcatctcaagacagcgtaaagcaggtattcctcattaccgtgggtgccgatgatgggactatcggcagtggccaccacgtcaagtccgtgctgttcagcacaggcgaccacgtcgtgcaatgcccgctcccgcaatgccggatcttccacgatgccgtttttgccgagtcctgcccgcccgacctcgaactgcggtttgaccagtaacacaatctgcgcaccgggagccgcgatgcgcgcgattaccggaatcacataggtcagggaaataaaggagacgtcggagacgatcatcgccggccggtaaggcaggtcgtcggcctctacttcgcgaatgttgacgccgctcatttcgatgacgtgctcgtcattggcgatgcgcgggtcgagctggccgtggccgacgtcgagcgccacgactttggccgctcccccgcgcaacagtacatcggtgaagccaccggtggaggcaccgatatccagacattccaagctttccggcccggtaaggccattgccggcaaaggtctcgaacgcgcccaagagtttgtaagcgcctcgggagacgtagtcgtcgcccttatccacggcgagttcgctgtgcccggctttgaccatgaacgatggcttggtgatggtctcgccgtccacgcgcacatgcccggctttgatgagtcgctgcgctttggcccgcgattcgaccagtcccgaagccacgagcatcatgtcgaggcgatcaagtggggtcgcgggatcgatatgttgctcggtcatataccttcctttcgacccaccatccagcaatggggtggctcggcatggacccaccatccagcacttcacgtcatcttccgctggcgggagaatgaatctcctctgctagctgcggctgttatcaagctcgtgttgtaacgattccagcacgttgcgataggtctcaagcttgcggtcgttgtcttgttcatcaatatccgcaagttcggggtatcgctcggtgaccggcgcgtgttcgctatccgtaggcataggactatgcctcgatggcgaacaccggtaccgtggcctcgctgagctgtgcgccttggtcggcggcttcccatgcggcgcatacggcggcacgcaggccgtccatactggtggggtcgctgacgtgtacctggccgttttcaaaccaagcgctagccttgcggcattcccaagtaccgctctcgtcgcggaccggctccggttgggcttcgccgagttcacgcagatcaagggcgatgaatgtgggcctcaggtgtgccggagccagcatcagttcggtcgggttggtgacaccggtcagcaccgccagcgaatcatagtcaccgcggttacctgcctcgatatcagtgtcgagtcggtcgccaatggcgatggacgcctccttgggcaccagatcgtggccttcggcggcgttcagttcgcgggcctcatcgtacatgtacgcttccggcttgccagcggaggcgaccggttcgacgccagtggccgtgatcacggcgcgaatcatcgatccgcaaccgggggcgatgcccagttcacgaggaatcgtcaggtcgcggttggtcacgaaatacgtggctccggcctcgaccgcgaacgcggcatcggccatcatctgccaagtcatatccggataccagccctgaataacggcctgcgggcggtcctgaggaccgtccacgatggtcaggccgttgcgggtgacctcatcgcgcaaatgctcggcgcccaatacctgtacgcgcgcgccggcgggcaacgccttggccaccacacgggcggccaccaccgaagaggtgatgacctgccacggctccacgtccaagccgaagcccttgagctggtcggccaccacgtgctggaagcgcgaggagttgttcgtggtgtattcgatggtcatgccggcggcttcggccgcacgaatggaatcggctgcgtattcgaccggattcttgccgcgatacaccacgccgtcgaggtccagcagcgcaagctgataggcctcggcgagcgggcgatcggtgcctttgaggaaacgggtcattacgccgctcactcctcggtttcggtctcggtctcgtcggactcagccggttcaacggcatcgtcagcggactcggaagactcctcggcttcagattcctcagattcttccgatgcatcctcggactcagcattttcgacatcggcctcatcagactcggcatcgccgtcttcagcctcgtcgtcctcatcgccgtattcctgctccagatccggggcgtactgcgcctcgtccggatcgatgccgagcttctcgagcacgtcggagtcgtcggtgatgtcttcgagatcgtggtcaatcaccacgtcgtcgctgttttcgtcaatctcctcgtcggcatactgatcctcaagacggtccagcaggtcattaagctgctcggcttccttgctgcggccggcctcttcaaggaagtactgctcggcctgcacggcacgcatacggtactcacccggaagaccctgagagcggccgacggtatgaaccacttcaatggccttgtcccacatctccaaatcgccaagggcaccggcatacaccaggaacatctcgaccttgggagcgccatgcagctgcttgccctcatcggacagcgccagttccacggccttcttcggttcaccgacaccacgctcgcagtcagcgatgaacggcaggtagtcgaggaagccgttcatacggtaggcggtacggaactcacgcagggacagcttgtagtcgccctgacggtaggccacgaacgcgagcgtctcgcgggcaaagtcgatgcgggaggcctgacgggccacccacttggcgtgctccaaggcaagttcgggatcgctctcctccagcgcgaaagcggcgaggatgtgcagaccaatgttctccgcatgctccttggacaggccgcgcagacgttcgcgctcatccttggacagcatcgaccattccatgcccttgggcatcttgggctcgtcgggacgacggtcggtgtacgggttctgcgaggggaagctcatcgtgccgtcggagttacggcgcggacgcctcatgtattcagagcgcttctcctcacggtactggcgcttctcttcctgcgaaaactcgcggaattcgccgtcacgacggttgttgtcgcggcggtcgtccctgcggaagttgcggcgatcgccatcacggcgatcgtcgtcgcggcggaagttgcgacgttcaccatcacgatggaaatcacggcgatcgttatcccttcggtcatcgcggcggaagtcacgacgatcattgtcacgacggaagtcacgacgctcaccatcgcggtggaagtcacggcgatcatcgcgacggaaatcacgacgatcgttgtcacggtgctggtagcgcgggttctcgccgttctcgccttcgtgggaacggtagccgccttcgcggcgcggcttgaaaccttcaccgtcacggcgcggaccactgccgcggtaaccacccttgtggaagccaccggacttgccgtacgacttgcggtagccgccgtggccctcgccatcaccatcacggcgcggcgcgtagccttcgccatcctcacggcggcgcggcttgaagccctcgccatcgcggtcgcggcgcggacggaagccgtcgccatcgcggcgcggaccgttgccgcgatagccgcccttgccaccgaaaccagagcggccgcccttgtggaagtcgccacccttgccgtacgacttgcggtagccgccgtggccctcgccatcaccatcacggcgcggcgcgtagccttcgccatcctcacgacggcgcggcttgaaaccttcaccgtcatgacgcggcttgaaaccgcccttgccgcgcggcttgaaacccttgccaccgcggttgcccggtcggcgatcgccataccccttatggccgccgccgtaggacttgccggaacgctcgttaccttctgccattacttgttttccttaattcgttgttgattaacggttttccacggcgccgagcgccttcttgccacgacggatgagcgcgaagcggcctgccaggaagtcggcttcggccagcacctgctcctcatcctcgatacggttgttgttgagatacacgccaccggacttgatggcgcggcgtgcctcggaagcggacttgaacagtccggcagcctgggcggcgtcgattacgcgatcgcccggcttggagacggggaagacgtgctcgccgttctcgtcgaccaccttgaagccgtcgagcacggattccagcgtttcctcgtcgatgtcttcgaggttgccaccgcggccgaacagcgcaccggaagcatcgatggcagcctgggtagcggcctcgccatgcacgaagctggtgacctcccaggcgagggtcttctgggcctcgcgcttgccggggttggtcttggattcctcgaccagtcgttcgatttcggccttgggcaggaaggtgaacgccttcagcaggctttccatctccacgtccgggcggttgatccagaactggtagaacttgtacgggctgagcatcgtggcgtcgagccagacggcgttgccctcggacttgccgaacttcttgccggaagcatcagtgatgatcgggctggtgaacacgttgacgtccacaccgcgcaccttgtggatcaggtccaggccggaggtgaggttgccccactggtcggagccgccgagttccagcgtgcagtggtattcgtcaaacaggtggaggaagtcgttgccctgcagcacctggtagctgaactcggtgaaggagatgccttcctcagagttcaggcgacgggcgaccgtgtccttggcgagcatggtgcccagacggaagttcttgccgacgtcacgcaggaagtcgatgacggtcatcgaggcggtccaatcgtaattggacacgaaacgtacggcgttcgcgccttcggtgtccagaatgccgccgatctggttcttcagacgatcggcccagccggccaccacgtccttcgggttgagcgtgcgttcgccggactggcgcgggtcgccgatgagtccggtggcgccgccgaccagagcaatcggatgatggcccgcaagctgcaggtgacgcatgttgatgagctgcacgaggttgccgatatgcaacgatgcagcggtggggtcgaagccgcaataataggtgatgggctcgccgttcagtgcttctgcgagtcgatcccggtccgtggactgggaaatcaacccgcgccattccagttcctcaagcagggtgttgaaacccgcttccttgaagtcggtgacgtgagccatagcttgtcgcttctccctatcgaattgtgaatgagactgcccaattgggcacagtcaagtttcgcagaacatggcgacagtgccgaacaccagccgagccgcgcgattcagtaaaatgccttattctagcggcgcgggcccataagttcgcgcaaagagtcgatgatatcctgacgatccggcacctggaacttcgggaaggacttgagcatacgcttctgctgtgcgttgatgacgccattgatggcccagcgcagacgctcaaccgtatcctgcgaaagctcacgcatcctgtcggataccgcacgggagccccactgccacgtgccaccggcgcgtgccgccacatcctgcaccacctgagagacggaatcgagcacctgctcgaatccgagcatgcccgcaaccgtgaccgccaagtcgatgatggtgatcagggccagtaccgtgaccagcgtatgcagcatcggcagcggaatcatatccgtgacccgctcgacatatggctgcgaaccaagtaccacgcccacgccgccgagaccgaaaatcaacgcgcccagcaggcagacgcggccttggaggttgaagcggaaattcgagtaatcccaccagcgggcgtggaacagctgctccatgacccacgaggttgtgtattcgagtatcgtggcgcccaccatcgaaatcaggaagatgatgatcgggttatgtacgttgccgagaatggcgacgccgagtatcgcgccggtgccgtagatcgggcacagcgggccgttgaggaaccctcggttgaccaagcggtgctgttggcaggagacgagaatggactcgtacgtccagccgacgaaactgtagaacagaaaccagaggaaataatgttcgagtgtggtgatcatcgacgggcttcgatctcggcgtagggcttcgcggcgggcaacgcgcgcttgttgaaccggtcgagcgagaaggtctcggcggtggcggagcatttgtccgccaaggtgaccagatagccttcgatatagcgcggcggcaccagggtcatcgggaacatgtggttctcgatgctgttgcgttcgatatcgttgagcttgaagtccttcagggcattgaccagggcggcgtggccatgggtgaagccatgccactggtgttcgccgttatcccagtcgtgccagtcgtacaggaagtaatcgtgcaggagggccgcgcgaatcagggatttgaggtcgacgcggtaccacaggtgcgcgcggtcggccatccacacagccaggcaggcgacacgcacggaatgttcgaacgtggtgacgttgccgtgctggtagtagcagcgttcgatctgcatgtggcgatgctcgatgacctcacggccgtgcttggcgaccaggcgttgaatctgcgttcgggtgagcagatgtcccacggtttcgaccctccgttcgggttggttcagtgcaatcccttgttgtgaattacgattacccgacgatattcaagaatccatcgagtaataccgtgaccgattgtagggcacacgtatgtccgtgcacactcatccaaaagaacgacaacgggaaccgttaatcgtggtgggtttcaagatagtcgagataaccctgaaaaccgccatcgaggcttgctacatcgtaaccgcgatcggcaaggatttcagctacttcctcgctccaccatccttgagcacaatagactacgacagtttgatctgtgggcacggttttgagcacatgggccagagggtcgagtggtgcattgatggcaccttcgaccgggtgggcggcgaagtcggctggttccctcaagtcgagcagcgtgaccgtattcgggtcgagcttggcaaattccgccggcgtgatgcggcggtacgatgcttcactgctctcatcgtcatcgaccgcattacgcaaagcaataggcatgttcttcccctctcgttccgatcttggctcccctcaaggaggggtgccacatagctctaaatcgcgcaggccggctgaatatagttggccggatcaatagcagtaatggtcggctgctcaccgcacaccgggcagtcgggcacatggttcggcaacggcacacggcggatgttcatggtcagggcatccacagtgagcatacgagccacgagcggctcccccacgccggcaatcagcttgacggcctcagtcgcctccagactgccgatcacaccgaccaccgcgcccagcacgccggcctccttgcaggtcggaatttcacctgcggcgggcatatcgcggaagatgcagcggtagcaggggccttcgcctgggatgacggtcatcacctggccggagaacccgaccacgcccgcatggatatacggcttgccggccagtacacatgcgtcattgatgaggaattttgcggcgaagttgtcggtggcatcgatcaccagatcgtacggttcgatgaggccggcgatgttgctggcatcgacgagctcgtagtaggtgtcgaccgtcacatccgggttgagcgcgcggatggccgtggccgcggattccactttgggcgctccgacacgtgcagtggtatggatgatctgacgttgcagattgctcatatccaccacatcgccgtccaccagtccgatatggccgacgccggccgccgccagatacagggcggccggagagccaagcccgcccgctccaatgatgagcacgctggaggccaacaaccgcttctgccctttgacgcccagccccttcaaaatcagatggcgcgcgtacctctccacctgttcatcagtcaatgccatgttttctccatgtttccagctcccctcagtccgctacgcggccagctcccctcagagaggggagctaataaaagtgtcagtgcaaatatcccgtagtcggactggacggcacggcctgcccctcggtcaccttgcccagaccggacagatacgccgcacgaccagcatcgatggcgtgcttgaacgcctcagccatcagcgggatattgccagcagaggcaacggccgtgtacgccatcaccgcatccgcacccatctccatggcgtcgcatgcctgactcgggcgtccgatgccggcatcgatgatgaccggcacatgcgcattggcgatgatgatctcgatgaagtcacgcatgcgcaggcccatgttggagccgatcagcgaaccgagcggcataacggcggcggcaccggcctcctccagctggcgtgcggcaatcgggtccgggaacatgtagggcatgaccacgaagccttccttggccagcatttcggtggctcggatggtttcggcgttgtccggcaggaggtacttggtctcgtgttcgatttcgaccttgacgaagtcggtgtggcacacttcgcgtgccagtcgggcgatacgcacggcttcttcggcgttgcgcgcaccggaggtgttgggcagcaacgtgatgccttcgggaatgtagtcgagcacgctgttctcggtggtctgcgcgcggcgcagtgccatggtgacgatttgcgtgcctgcatgttcgaccgtggccttgatgaggttcaggtcgtagcggccggagcccagaatgaatcgcgactggaactcgtgaccgcccagggtcagcggcttgtcttccactggcagaatcggcgcggcggtgccgaccggattggtgacggcgggctgcggcggcagcggagtcgcctcaacagatgcttcagtaaccggattaatattgctcatagcttttcctttcatccaccctgtacaaactgcacaatttccatgacgcactggtcgtcgagcatggcgtcggcacgcttatcgcgcgggataatctcaccattgagttcgatggccacacgctcggcgcggaatccgtgcgcttcgagataatcggcgacgctgaccggcgtctcgagcgtgacctgctctccgttgacctgcataatatcctttcagatagtaaaaaagggtgcacgaaacgaaccgtaccttaagtggtgcgcccattcatgaacccaatcatgcgaccgttcgaccgctgtgatgtattggctccatcacgaccgtctcacggctgaattatgcaaacggaatgaaagctgtatcggagaacccggcaaatctgcaacaacgattccttacggcggcatgacccgcgtcaagttccccggtcgaagtctggcgacttcctctcagcctcacggctcccgttcgttacgatttctcagtgtatgccgttgcagtgacaacagcaaaatagagctccctctgacgagggagctctattgggactagaacgtgccgggggctttgtaggcggagccatccgacgtggatgcggggaagagcttgagttcttcgacctcggccttggcgtcggcgatctgctcgcgcacgcgaccgtaagcggtgccgcccttgccgttgcgggagtcgaccgaaccgtggctggagagcacttcgcgtactcccggagccttgtcggccggcaggaacgcggcgaaggtctcgatgaagtcattgtcggtcagatcccacagttcctggccgcggccttcggcgagcttgacgcaggcaccagagagctcgtgcgcatggcggaacggcacaccgttcttgacaagccattcggcgatgtcggtggccagcgcgaagccggtcggggcttcctcttcaagccgctcgctgtcgaagtgcatggtcttgaccatgccggtgaaggcgggcagcagcacttcgagcgtatcgacctggtcgaacacggcctccttgtcctcctgcaggtcgcgagcgtaggcggtgggcaggcccttcagggtggccagcagaccggtcagatcgccgatgagtcggccggacttgccgcgggcgagctcggcgatatccgggttcttcttctgcggcatgatggaggagccggtggaatagccgtcgtcgagcttgacgaaggcgaactcctgggtgttccagatgatgatctcctcggacaggcgggagatgtccacgccggtcatggcggccacgaacgcgaattcggccacgagatcacgtgcggcggtgccgtcgatggagttgtcggtcacgcgggagaagccgagctcacgcgccacggcctccgggtcgaggccgagcgtgttgccagccagtgcgccggagccgtacggagaggcgttgatgcgcttgtcccagtcgatcagtcgctgcacgtcgcgaatcagcggccaagcgtgggccatgagctggtgcgcgagcagcacgggctgggcgtgctgcatgtgggtgcggcccggcatcacggtgcggccggccttttcgctctgctcgatcagggcgttgacgaggtcaagcaggagtccggcaatcgcacgggagtggcggcgcagccacatacgaatcaggcaggcgatctggtcgttgcgggagcgtccggcacgcagtttgccgccgagttcgtcgccggcaatgtcaatcagtccgcgttcgagggcggtggcctcgtcctcatcgtcttcgatgggggcgaaggagccatcgtcaacgtggcgctggagcgtgtcgagcgcatcctccatgcgctgcagctcgtcggcggtcagaagtcccgcacggccgagagcacgggcgtgggcgcgggaaccggcgatatcgtcgtcggccaagcgccagtcgaactgcgtggacttggacagtcgggccagttccggcgacggaccggacgtaaagcgaccaccccacagggccagatgttcgttgttctcagtcatgaaggctccttgaaaagtgaaaatagctgtgtttaagcgtagcaatgtgttcaaacatacagttgcccccgctggcgagggctgtcacatggagtgtgactgaggacagtcctttcaaagaccactcccagtcagctatgccgacagcctcgcagcgggggcgactgagtaagaattactcgacggtgttcttcgggacctcgatgccgttgccgaacttgacgtcgcgcgctgcggccacgcgggacggcagaccgtagatgtcgatgaagccgttggaggacttctggtcgaaggtatcgccggaatcgtaggtggcgagcttgtagtcgtacagcgaggagtcggaacgacggccggtcacgacggcgcgaccgccgtgcaggaccatgcgaatctcaccggacacgtacttctgggtgtcctcgatgaacgcgttgagcgactgggttgccggggagaaccactgcgcatcgtaaaccagctcgccccagcgcttgtcgatgtcgcgcttgatgcggtgctgttcgcgttcgaggcagcagttctcaagctcctgatgagcggtgatcagagccacggcccccggggcctcgtacagctcgcgggacttgatgccgaccaggcggtcctcgatgaggtcgatgcggccgacgccctgggctccggcgcggcggttcatctcttcgatggcctgcagcggggtgacgtcacgtccgtcgatcttgaccggcacaccttccttgaactcgatgacgacttcatcttcgaccggcgggaaggccgggtcgtcggtgtaggagtagcagtccttggtcgggccgttccacggatcctcgaggaagccggtctcaatggcgcggccccatacgttctggtcgatggagtacggggacttctcggtctgggtgatcggcagcttgtgctccttggcgaacgcgatctcgacatcgcgggtcagggacaggtcgcgaatcgggctgatggccttcagcgtcgggtcaatggaggcaatggagacctcgaaacgaacctgatcgttacccttgccggtgcaaccgtgggagatggtgtcggcgccgaactggtgggcggcgcgcacgaggtgcttggagatcagcggacgggagatggcggagaccagcgggtagacgccttcgtacatggcgttggccttgagggccttcatgcaatattcgttggcgaactcgtcacgggcgtcgaccacgtaggattcaacggcaccgcaggcgagggcgcgctgcttgatggtctcgaggctttcgccgccctggccgacgtcgagggacacggccacgacgtccttgccggtgcgctccttcaggtacgagatggcgacggaggtgtcaagaccgccggagtaggccagaacaatgcgcttgttatctgccattggttccctttcgttcaaggtctgaaaaacaaactgatgcaagtatatacagaggactgtatatttatgcacggcgtgttggttatttggaggcgaggcttagtagccagtcggagcgggagacggcggtgtcgtcattggtgcaaatcaccatgacggtgtcgtctccggcgatggtgcccagcacgccttcgatcggctgcttgtcaatcaccgaggccacgtattgtgcggcaccggaaggcgtgtgcaccacaaccagatttccggcggcggccaccgaggtgaccagtccgttcagcacgcgggacatctgtgcctcaccgcgctcccctacatcctcaccttctgaagcaacgacgctgcgacccaccgtgtaggccaccgtgccgtccttcagccgggtcttcaccgcatgcatctcgtcaagatcgcggctcagggtcgcctgagtcaccgcaatgccctcgtcgataaggattttggacagctgtgattgcgaggtgatgatatgcgtggcgagcgcctgttctatggcactcagccgcgccgccctggtggcagggcgctgcagggacggaccggtttcactcatgcgagcaggctttcgtctccacgggccttgccggccaaccaagtcagcaacgctttctgtgcgtgcagacggttctcggcctcgtcccacaccacggactgcgggccgtcgatcacttcagcggtgacttccttgccgcggtaggcgggcaggcagtgctggaagagcgcatccggcttggccaatgccataagttcggtgttgacctggtaatcccagaacggcttggaacggatggcgtattcggcctcctcgcccatggagacccaggtgtcggtgaacacgcagtcggcgtccttcaccgcttccttggcatcggtggtgaccaggatggagccgccggtctcggccgcgacgcgcttggcgtcggccacgatgtccgggcggggcaggtagccgtgggggccggccacgcgcacgtccatgccggccacggcaccgccgagcaggtaggagttggccatgttgttggccgcgtcaccgaggtaggcgatggtctggtccttcaggttgtcgacgccgcctcggtgctcggcgatggtctggaagtcggcgagaatctggcagggatggaagtcatcggtcagggcgttgaccaccggatgggtggagtacttggccatttcttcgacgcggtcctggccgaaggtgcgccacaccacgccgtaagccatgcggtcgagcacacgagcggtatcggccacgggctcgccacggcccagctgggagccggacttgtcgatgaccagtgggtagccgccaagctcggcaacgccgatggagaagctggaacgggtgcgggtggatggcttgtcgaacagtacggcgacggcctgcggaccggcgaacggctgcttgtagaagcggtcgtggtggaacttgatggcaagttcgagcacctgcttctgctcctcatggttgaggtcgtcgtcacgcagcatgtggcgaagttctggggtcatgatgatctccttggatcggtgggtcggcagtgacggcgagaaatcagtcgtcgggcaggtccgtaggcacatccttgaggatggcaagtgcctgatccacgtcttgagcggttacaatcagcggcggtgcgaaacgcagcgcattgggagccaccgcgttgacgatgagcccgtgttcgaggcagtagttcatcaccgcgtgggagcagggatgcttgagctcgacggcgtccagcaaaccacggccgcgtacggaaacgaacagcggattaccggtggccataatgccatcgcgcagctgtttgccgcgagcttcggcgttggccaccagattctcgtcttcaatcacgccaagagtggcgagtcccgcagccgcacccagcggattgccggcaaaggtggagccgtgggaaccaggagtgaacagagccgcaagtttctcgccgaaagcgatcatgccgcccatcgggaatccgcctgccacgcccttggcgaaagtcaccatatccggcgtcacgccgccggacagatcgtcacgctggaatgcgaaccacttgccggtacgtccgataccggtctgtacttcatcgatgatgagcagcgcgtggttgatatcgcacagttcgcgcacgaacttgacgtaatcggcgcccaacggctgcacgccggcttcgccttggataagttccagaatcacagcagccaccggacccttgccatagcggccgagaccggtctgtgcaaaagcgtcgtgcagggcgaccttgtcgccggcgcgtacgaattcaatgttcggcaccagcggatcatacggcttgcggataccgggtttccatgtggcggacagcgcacccatcgtacggccatggaagccgtgagtcattgcgagaatgcgtgcgggcttgccgccgatggaaggcagggcaccaggcaaggtgcggccatacagcttggcaagcttgagggcagcttcattgccttcagcaccggagttgccgaagtagactttggagccttcaggtgcaccagccagcttgaccagtttggatgccagctcaatttgcggctcggacgcgaaatagttgctgatatgagccaccttggcagcctgatcggcaaccgctttgacccacttggggtgggcgtatccgagggaattgacggcgatgcctgccaggaaatcgaggtattcgttaccgtcaacatcccagatgtgggcaccttggccgtgatccatgacgcgcaacggcgtaccgaacacattcatgtggacctgagagtactctcccagccacttgctgtcctccgtacctagtttttcctcatgctcagtagccataagagctcctcatttccagtccttcatcgggcataaccatggtaccgatgcctgcggaggtgaatatctcattcaaaatcgaatgcggcttgcgcccgtcgatgatatgggcttggggcacgccaccgtcgatggccctgacacaggcctccatcttgggtcgcataccggattccaggtccggcagcatatcgcgcaggttttccacaccgatccggccaatcagagaattcttgtccggccaatcggcgtacagaccatccacatcggtcaagataacaagcttgcgtgcgcccacagcggcagccaaagcggcggcggcggaatcggcgttcacgttgagcacttcagtggcatcttcttcgttcggagccacggaagagacgaccgggatacgaccggcggccaccagatcctcgactgccgaggcatcgacggaaaccacatcgccgaccaagccgatatcggtgggcttgccattgatgatgggcttgcgctgcatggccgagaacaggccgccgtcttcaccggacaggcctacggccagcgggccgtgcgcgttgatcaggccgaccagttcgcgtgacaccttgccggtcaggaccatgcgcaccacgtccatggcctcgggggtggtgaccctcaggccgcctttgaattcggatttgatgccgagggccttgagcatgtgggagatctgcgggccgccgccgtgcacgacgatcggatgcaggcccacctgacgcaggaagaccatgtcttcggcgaagcactgcttcagatggtcatcgaccatggcgttgccgccgtatttgacgacgatacgctggccggcgaactcctccagccaaggcagcgcttcaataagcacttctgccttctgatcggcgcgcaaatcggtgtgcacgtcgaaatggaacccaggtcccttcaattctgtagccaatttttctcttttctgcgacgccggcgacgctatcgctgccggctgctacaaacagcccactgggctgtttgtcagctttcgtagtcggcgttgatgtggacgtattcgtgggtgaggtcgtcggtccagacggtggcctcggcgtccgagccggtgttcaggtcgatgtcgatgtggacttcgcgcggggtcatgtcgacctcgctgcggtcgcggccggcgccgccgttctcgcagatgcgcacgccgttgacgtccacggtcaccttgttcgaatcgtaaggcgcgacttcaggcggcacagtgcccaaggagctgacgatgcggccccagttcggatcgttgccggagatggcgcacttgagcaggttcgaggcggcgacggcacgaccacaggcaagtgccgcgtcttcgctggtggcaccggtgacggtgatgcggatgtcgtgggaggcaccttcgccgtcgccgacgatctggcgggacagggatgcgcaggcctcacgcaccagcttgttgaattcgtccttgtccggttcgacgccggaggcaccggaggcgagcagcaggaccgtgtcgttggtggacatgcagccgtccacgtcgatgcggttgaacgaatgttcggcggccacggcgagtgcggcctgcatctggccggcggagacgaccgcatcggtggtgatgacgcacagcatggtggccagctgcggggcaatcatgcccgagcccttgaccatgccgccgatcttccagccgttggagccggtcagttcgaccgttttcggcttggtgtcggtggtcatgatggcgtgggaggcgtcgtcgccggcttcggcggtggcggcaagagcctcatgggcgctcttggcaccagccagcacgttgtccaacggcagcagttcaccgatgagaccggtggagcagacagccacatcattcggttcggcgccgatgagaccggcgaccgtttccgcggtggtgacggactgggcgtaaccggcctcgccggtgcaggcgttggcaccgccggagttcagaatcacggccttgacgtgaccgtcggcgacgaccttacggctccactgcaccggggcggcacagaaacggttcgaggtgaacacgcctgcagccgcgtcgagcgggccgttgttgaccacgagggccaagtccttcttgccttcgacggatgaaataccagccgccacgccggcggcggagaaaccttgtgcaaatgtaacgctcacggtgctactccgatcttggtcaggcccgcgtcttccggcaggccgagtgcgatgttcagtgattggaccgcttgtccggcggtgccacggttgaggttgtctatggcggcaaaagcgtagatgcggccggccttgcggtcggcgacgacctgcaggtgggctgcgttggatccgatgatgttgccggtggcgggcagtgtgccctcgggcagcagcaccatgaagtcctggccttcataggccttggaccatacggcgcgaatctcctcatcgctcagcgccttggccttgtccgtcatgcgggcggacacggtggcgaggatgcctcgggacatgggggcgagaatcggcgtgaagccgagcgtgaattcgctggcttcggccgcgctcttgccggccgcgtgggcgaagttctgcaggatctcgggaatgtggcggtgcttgccgcccaccgaatacggcagggcggattgcagggcctcggcggcaagcaggttggtgcgcttgagattcttgccggcacccgagtatccgacgaccagatcggccacgatatcctgcgattcaaccagtccttcggcgatgccgggctggagggccagcgtggtggcggtgacgttgcagccagggcctgcgatgcgcttggtgccaggaagcgccgcgcgctggcgggtgtaggagccgtccgcggctttgccggtgatgagctcgggcatgccgtaggtccaatgctcatagaaatcgccgccgtagaactcatcccaagcggcctgctcttcgagacgatggtcggcgcccaaatccacaaccacggcattcggatcgagctgcgaggcgagcttgcccgaagcaccgtgcggcagtgcgaggatgataacgtcatgcccgttcagcacttcgggcgtggtatcttcgacgaccagattggccagttggggaatatgcggcatgtgcttggccatcgactcccccactgaggaatggcctgccacgcaggtgatgtcgaagtcggggtgcgcggccagaatgcgcagcgcttcaccgccggcatagcccgtggcaccggccacggccactgtatatttcgccatactcatctcttttcactgatgtgtcttgggatgagtatacgcgattatgcagactattgcatatttatgcagtgggtgtgttggtatgtgaacgctacttatgcggagatggagtcggaggaggagccggtgccgccggtgagttgctggagggcttcctggtagaggctcatggcgtcatagccattgaaggccatccagatgacggcgatggtgtacagcacgttgatcaccacggcggccacagccaaaccgaagcctttcatatggaaggtgcgcgtgcgccacattgccaccgcgcccatcagtgccgagagcactggcaccgggaagaacagggcgaggataaaggagatgatcgcatacgaatcccagtgcccgtagagtgggttctggtttggatcgttcaggtcgatgccgtggtaataatgcggctggtgaggctgaccgttcggctgttgaccatacgactgcccctgcatgcccgggtacccgcccggatatgcgcccggaccggactgttggccgccttgagcatacggccagccgcccgcctgctgattgccgggccacgccggctgctgaccgtacggctggccggcctgctgggattgcgccgcgccaccgttgatgccagcggctgcggcggaatccttcttggtatccggctcgggagcgccataaatatacgggttgtaattcggtccgtattggccagacatagcaccatattcaggctgctggtactgcccgtatttcggcttgtcctgctccggttggctcatgacgctcctcgattcggatgatcggttgggtcaggcgcgcagctgggcgccgatttcggcggcctcagccacgatggccttgcggatggcgtcgctgtcttcggcggacagcgtcttgctcggtgaacggaacaccaccgcataggccagagacttcttgccctcgcccacctgttcgccggtgaacacgtcgaacagttcgatggattcgaggttcgcgccggcggccttgcgaatcacgttctcaagctggcctgcggtcacggtctcgtccacggtgaaggccaaatcctgcttgaccggcgggaacgtggagatcggcttggcctggacgggcttgccggtcagcgtggcgaacagcgcggtgaggttcagctcgaaggccgcggaatgggccgggaagccgagcgcctcgttgacgcgcgggtgcagttcaccaacccagccggtgaagacgtcgcccaccatgacgcgggcgacgcggccggggtgccattggacgggcacatcgtcggcggcgggctggtcgagttcgattgcggcaccgatacggccggcgatgcggcgcacggcctcgacggcgtcggaccagtcgaccgggcgcttgccgcccatccagccatcgtcctcggccagaccggtcaggatgccggccacatggtcgggctgttcgggcagaccggcgtcaagcgcggcgagctgttcgtcggtggggcgcacgccgccgggcagtgccgggatggcgggcgcgttcggatcccacaggtagacgtggccgagctcatacagggacacgttttcgatgccgcggcggatgttgcgctgcacggtggtggccagggtcggcagaatctcgcgacgcaggtacggacggtcgccgtagagcgggttggcgatctcgacgctgaccttcttggtggcttccgggtcgaagccgaaggccttgtaatcgtcgtcgcccacgaacgggtagctcagcgattcgaccatgccgaactcggcgagctcgtctgccacgcgacggcgacgctgctggtccggggtcaggcccaccagaccctcgaccggtgccggcggcacggtgatcggaatctggtcgtagccgaccagtcgggcgatttcctcgaccaggtcgcacggctcgttcaagtccggacgccagctcggcgcggttacggcgaactcgccgttgccgccgccggccaccgtgcagccaatgtcggtcaggatgtcggagatgcggttgatgtccacgtcgaggccggccacgcgggccacttcggaggccttgaagtggatgaccttggcgcgcggcgtgttgttcacgtcgttcgggtgttcgctgggctcgccgttgccgtacttggccatgagctcggcggccatctgggtggcggcgggctgcagcgcggtgtcgacgccacgttcgaagcggcgggaggcctcggatggaatcttgtggcgacgggccgaacgggcgatggtcacctgatcgaagtgcgctgcctccagaagaatgttcttggtgtcagcggtcacttcgccatacaggccgcccatcacaccggcaaggccgaggatgcgcgagccgcgttcgccgttcggcgaatcggtgataagcagatcttcgacgctcaggtcatgttccttgccgtccagggtggtgagtttctcaccctcgttggcgcggcgcacgacaatcgggccttcgagcttgtcgaggtcgtaggcgtgcatcggctggccgaggtcaagcatcacgtagttggtcacgtccacggccaaggagatggagcgcatgccggcgcgaatcaggcggcggcgcatccagttgggcgtgtgggcgttgggattgaagtccttgacgatacgcgcgtagtagcggtcgcaaccgggcacgccgtgaatcggattgttatcgtcgatttcaacatcgatgtccaccggggtgccgggctggtagtcagcaggttccggggccttctcgttcagtgccacggccggatcggtgtaggcggcaccggtggagtggtggtattcgcgggccacgccacggtaggacagcgtgtagccacggtccggggtgatgttgatctcaagcagaggctggtcgaggtgcagcaggtgcatggcgtcctgaccaggcttcagagcctcatattcagcctcggagaagccgtactgacgcagcagaatgatgccattgtggttgtcgcccagacccagctcacgttcggaggcacacatgccgttggagatgtggccgtaggtcttgcgcggctcgatcttgaagtcgccgggcagcacggcaccgggcagggtgacgacgaccttttcgccggccttcatgttgggcgcgccgcagatgatgccgcgcggcaccttgttgccgtcttcgtcggtctcgttccattcgtcgccgcagtccacgtggcaccagttgatggtcttgccgttcttctgcggttcgggggtggcgtcgaccacgtagccgaccacaatcgggccggtcacctgggaggagtggatctcctcttcctcaagacccaccttgacaaggtccttggcgagctgttcgtaggtcaggctttcgggaacctcgacatggtccttgagccaatcgatatcgatcataggcatggctgaatcactcccccatcacaaactgttcggcgaaacgcacgtcaccttcgaccaggtcgtgcatgtcgttgatgtcgctgcgcagcaggagcgtgcgctccatgccgacgccgaaggcgaaaccggtgtagacgtccgggtcgatgccggcggacttcagcacgttcgggttcaccatgccgcagccgccccactcgagccagccggggccgcccttcttgtcggggaaccacaggtcgagctcggcgctcggctcggtgaacgggaagtagctcgggcgcaggcgcgtcttggcttcagggccgaacatggcgacggcgagcttgtccagcacgcccttcaggtcggccatggtcaggtgcttgtcgacggcgagggcttcgcactggtggaagaccggagtatgggtggcgtccagctcatcggtgcggaacacacggccgggggacgcgatgtacagcggcacgccacgggtcaggagggcacggacctgatcggaggaggtctgcgtacgcaccaccatgttggagccgacgaaaccggcggcgtccttggcttgattgcccttgacgtagaaggtgtcctgcatctggcgggccggatggtccgggccgaagttcagggagtcgaagttgtaccattcggcttcgatttccggaccggaggagatctgccagcccatggagatgaagaagtcctcgacgtcttccatcagcttgggcagcgggtgacgggcgcccagaggcttgcggttcaccggcagcgtcatgtccacggtttcagcggcgagtgcggccttctcggcggcttccttgagctcgacctccttggggccataggcacggccgaagtcggcgcgcagcttgcccatgagcttgccggcttccttcttctggtcgacgggcagggagccaatggccttgctggccttggtcatcgccgaatcggcacctgcgtacgttgtcttgatggccttgagctcctccaggttggaggcgttctggattttctcgatgcccttggcaacctcagcggtcacctggtcggcgtcgaacaccatttgttctgccacgagaaccctttcgtctgatgttttctcagcgtttcacagcgtttttaccggtttcacattctttcaacatgacccgacatagacagcgacatcaacatcaccgcggccgaggtgccgaggttcagcgattcggccttgccgtacagcgggatggagacgatgcggccgcagcgtgtgaggatgtccggttccaagccacgcgcctcattgccgaacagcacggctttcggagcctcgaccgccgccttgtccgccagtactgcgggcaggctttccggcttgcgttcttcggtgccgtatacgtcggcggcccagacgcccatattatggtcgcctgtccaggtgaagaattcgtcggtgctcatggcgagtaccggcagatggaacagggagcctgcggtggagcggatgaccttggggttcagcacgtccacgcagtcgtccacgaagattacggcgtcgcagccggccgcatcggccgcacggatcacggtgccggcgttgcccgggtcgcgcacctgccagaaggcggcgatctgcgggccccggccgttcttgccaagttcgacgtcatcggcaccggcgtgcatggactcggcattgccgacggccacgatgccctgggcgtccggactgatgcggtgcatcacgtcgccggtgcagtagtgcacataaatcgtggcatcctgcgaggtttcgacgatcttctccaacgtggaggagatgatacacggatgttccaacgcctgcgaaacctccacatagaggtcctgcaccacgtccggccgccaagtgacggcctcgcgcacggattgcgggccttcgataagaaaacggcccgaacgttcgcggcctttggcgcgggtcagatcggcgatgcggcgaacgcggtcggatttcggattatcaagaatctgggcgttgatgggcatagccactaccctactgccgggtcattacgtcagtcgtggctcgctcccgctggcggaggcatcgtaagcctttcagacaccttgaaaggcactgtgccagtctgtcgcctttcagacaccttgaaaggcgaagtgccaattcccggtgccgatggctacgcctatggaggccagcgggacagccagacagatgacgtagaagatccagtcgataggcttcagacgcgagatacgggcttgggagcgtggggcgctggagccgaagccgcgcgcttccatggcggtggcaagtttggtggcgcgccggatggagagcaccagcagtccgaacgcttgggagagggcacgggcgatggcgttaccgtcgccaaggccgcgcgaacgttgggacaagccaagtgcgcgccaatcttcctgcagcagcgtaaacatgcgcaatccagccaacccgccgtatacgaatcgcggtgagaagtgcagaatctcaaccaaaccgtccgccaaatcagtgggatcgaggcccagggccaggatcacgccgggtacggcaatggccgccaccctgatagccgtggcgatggccagattaatggatccctcactgatcacaatccagccaccctgccacaggatctcgcccgaggtacggccgtagagaaacacggagataaaactgccggcggcggcgatccataccggccaggtcttacggcatacggtccacggagccacgccaccaatccacagcagcacgaattcgatgccgagcgccgtggatgcggataccacatccagactgatgaacatcggaacgcacagcaacagcgcaccgatgatgcgactgaccgcgttgatgcgcgctatgaaccatgagggcgatgaggctttgaccggctccacgcgcgtttcctgcgggctgacggttaccacgtcactcatgcctcgcctcctcgaacatcacgcgtcgtgcgcccagcgcatccaccagcgcctcatcgtgcgtcaccatgaccacgcacgagccttggtcgcggatggcggcgatcagcttgaccatttcattccacgtactgaaatcctgtccgaatgtcggttcgtccatcaccaacactttgggtgcggcggccagcatggaggccacggacagtcgccgcttctccccgccagacaaggtatacgggttggctttggcgaagcgcgtgagattcatctgctcaagcatgcaatcggcggtccgataagcctcgtcttggctctgccccatcgacttggggccgatggcgacttcgtcacgcacgaaattggcagcgaactggtgttcgggctcctggaacaccatgccgatacggcccagcagttccttgcttttccagtcaatcggctcacgcccggcatgcgcgggcttgaggttgtcggcgatgagcaccttgccggcgataggcttgagcagcccggccaaggtcagggccaaggtcgatttgcccgcgccgttcggacccatcagagccgttacttcgccgggatagaaattcagattgatgccaacgccaagagcggtcccacggccaaagcttaagttctcagtgctgagcaccggcgcatcgtgcgcaggctcctgcttcggtgagtaatcgggaatcgcacggcccggcacccacgcgccaccggcggccaatacgtcgcccatctcggcgaacacctcgtccggcttgccgtcggcgatgaccgcacccgtgagcgaacttgcatcgggtcggccgagcacgatcacgcgatcgaccagatcgagccatacatcgatatgatgttcgaccacaaccatggtctgtccggtggcctcgatgacctttttgaccgcgtcatgcacttcgaccacgccttcggggtcgaggttggcggtcggttcgtccaacaacagcagaccgggcttcatagccagcacgccggccaacgcgagacgttggcgctgaccgccggacagatggcgggtggaccgatccagttcgagtccgccgagtcccaccatatccaatgattcgcgcactcgctgccgaatctcctcgcgcggcacgttgaggttttcgcagccgaaggccgcgtcatcgcccagtcgttcaagaatgatctgcgagtccgggtcctgaagcaccagtcccacgcggcctcgcgcctcgcgcgcatcgacgccatcgatggtgagcgagccctcctgctcgccttcctcatcgccgccaagtacgcctgcgagaccggccatcatcgtgcttttgcccgcccccgaagcaccgagcagcaacacacgttcacctggccggatggtgaaatcgacggcacgcaacgcgaagtccttacgcgtggcgtgccgccatccccagccgctggcctctaccgcagccggattaacctgcatcagacgcgcgccttgctgcggccggattcaaagcgttccagagcgccggtggcggcgagcgcacgagacaagtaccagaccaccacgccggcgatcacgacgccggagatgatggagccaaccagataccaagtgacgcgcaggccgttccagcccgggttggtggcccagtagtaggcccagcagcccacgccggcgagcgcaccggacaggatggtggtgccgatgttccacttcttccaggcgaagacggcgaaggcgatttcggcacccagaccctggaggatgccgacgatcagcgagccgccgacgccccactggttgcccagcgtaagctcgaggaaggcggcgagggtttcggcaaacagtgcggcaccgggcttgcgcacgatgattgcggcgagcgggccggcgaacagccagaatccgttgagcagaccctcgaaaccgggggtcacgccttcgaacagggccagcggggcggagcagacaatgtcccagccccagaaaatgacgccggatgcgacggcgatgattgcggcgacgacgatatcgacgacgcgccacttgtaattggctttggccacagcttcagtcatgaatgtgcctttcttctgctcgtacgcaggccgaacatacatggatatatgtacgcacatgatgcacatgttcgtggccacgcgcgggttggttcaggcacgggtgggtaagagcgacatttccgtgcgccggcattatccggtcacgttccatcggtcgagactatgaatctcctctcagccgcctaacggcagctcccgtgtcaactccccgactataaagcaagccgccgtcaaaggcaatagccacatccgtgacctacctgacggcggctcgccaccattaccgatgcggttcggttacttgccgagcttgtccagcagcaaagcctcggtgatcacgttgttcttgaggccgggcagggagatggactcattggggctgtgggcgttggccttcgggtcttcggggccggtgaccagcacctgagcgttggggaaaatgcgctgcagttcggggatgaacggaatggagccgccctcgcccttgttgatgggctcaacgccgaaggcctcggtcatggcttccagcgcgtctttggtggccacggcggtcgggtccatggcccagcccatgccgttttcgccgcgttcgacagtgaccttggcaccgaacggcgcgtgggattcgaggaatgcagccagtgcttcctgcgcttcttcagggcgctgggtgggcgcggtgcgcagcgacagacggaagcgggtctccggggcgatcacgttgaaggatccctcgaccgggtgggcgtcgaagccgatcacggtcacggacggcttggtccacaggcgtgaggccagcgaaccggtgccggcgaactcgtaaccggccaccacgccggaatcctcgcgcacggtggtttcgtcaaggtcgcgttgcaaaccgccgattggctcttccgcggccacgccgggcacggccagatcgccgttctcgtcgtacatggaagcgatgagcatggcggccaacgtgttggagtcaagaatcgggccgccgtactgaccggagtgcaccgggtgctcaaggccctgcacggtcacgtccacgcaggtgttgccgcgcagcgaggtggtcaaagaaggaatgtccgccgaccagttgccggaatcggccacgataatcacgtcggcggcgaattcgtcgcggtgagcctcgatgaagggaatgaagcttggcgagcccatctcctcttcgccttcgatgaacactttgatattgacgttgaggtcgtcgcccaaagccttcagcgcaccggagtggatggcgatgccgccgccgtcatcggcggagccacggccgtaaagacggccgtcgatttcggtggccacgaacgggtcggtgttccactcggccgggtccggaacaggctgcacatcgtgatgggcgtagagcagcacggtgggggcgtccggagaaacgatatgcgagccgatgacctcccatgcgcccggagtgccgtcggcattggaagcctggaccaccttggcatccacacccacgaggcgcagttcgtctgccacgaattcagcggagcgcttcatatgttcggcggtgatgcccttggcggagatcgactgcagcgcgaccttttcggccagcaccttgacgatgcggttccaatcggtttcgacgcgcgaacgaatctcgtcagcggtgagcgttgccatgatgatcctcctttatatatgtgcgtatatatgtgcgtgagcggcgtcattgcaatgactgcgccagtgtacaagtgtctgaacgtcaccgtaacctcaaagcatgacatggaatccgtttaggaaaaaagaagaggcccaagttcccgttgagcaggccccgaagaaggccgccgatccttctgagaaaaaaggccgtcctaccccgaagatgaagcaggctcaggccgccggtatccgtccgctggttccggtggaccgcaaggccagcgccaaggccgccaaagcccgtctgcgcgagagggagaacgccgagtacgaggcgatgcagaagggcgacatcaaccacatgcccaagtcggaacgcctgccttggcgtatctacatccgtgattatgtggatgcccgtttcaaccttggcgaatggttcatcccagtggccttcgcgattctgatcgtctccatgttcgtcacttctttgatgcagaaccagtgggcttccatcatcatgatggcgcttatgtacggttacctgattgccgtgatcatcgacgtatggctgatgtggcgcaagctcaaggccaagctcatcgccaagtacggcgaacagtccgtgtccaagggctcccgctccttctcctacgcttggagccgttcgattcagatgcgtcgttggaggcttcccaagccgcgttacccgaagcgcggtcactggccggcagactgatgtccatatatactctggctcccctcgttgaggggctgagccgtaaagaaaacagtccagtggactgtttttaggcgaagtggcggcgatagccgcatatggctccctagcatgggagccatacttatatgcaccaaggaggcaatcatgagcgaacagtttgatctggtcatcatcggggccggccccggcggctattccacagccctgcgcgccgccgaactcggcatgaaagtggcactcgtcgagcgtgacgccaccgtgggcggcacctgtctcaaccgtggctgcatcccctccaaggcgctcatcaccgccacccacaccatcgacaccgtgcaccgtgcggccgaactcggcgtcaacgcctcggtgaatggcatcgacttcggcacgctgcgcgactatcgcctgcgcgtggtcaagacgatggtgggaggactggccggactgctggcccatcgcggcatcaccgtgttccgagccaatgccgcgttccatgcggatgagatcgctccagcaacttccaaccacatcgtccacctcgttccctcccccgaccaaagcgacatcctcacctatcacaaggccgatgtccccgaacccagcggccccacgatggacctcacggccacgaacatcgtcatcgccaccggtgccaagccacacccattgcccggtaacccgttcgccggcgccctcatcgactccacacaggcgctggaagtcaacgaatttccctcttcggcggtgattatcggcgccggggccatcgcccttgaattcgcctcgatgtggaacgccgccggttcgaaggtgaccctgctgattcgcaaggaccgcgtgctctcagcctgggaccggagagccggcaccacgctgacccgtgagctcaaacgtcatggcgtgaacatcatcacccgcgccagcgtcacccatgtggacaccggcgcgaaccttggtgccaccgtgcactacacgcgcgaaggccaggacggcgaacagagcgtttggggcgaaatcgcccttgtcgccatcgggcgtgacccgatcaccgacccagcatggggcgtgacgattgatgaccacggacatgtcgccacggatgcgtacggtcgcaccgacaaaccgggcgtatgggcggtgggcgacgtgacggccggtcacgcactggcgcatcgtgcttttgagcaaggcatcgtcatcgcggagaccatcgccggactcaatcccaagccggtggacgaagccgctgtgccgcagatcgtgttctccttccccgaagcggcgtcggtcgggctcaccgtcgaacaggcgcaggcgagagaggacctcgtcgaaatcaaggagaccaactatccgatgctggcgaacgcgcgcatgctgatgagcggcacgaccggctcattgaccatcgtctccggctgcgacgcggccaacccggacaccccgcgcgtgctcggcgtgcacatggtctccccgatggcctccgacatcatcgccgaagccgaacagctggtcggcaaccatgtgccgctcgccgacgcagcccgcctcgttcacccgcatcccacattcagtgaaacgctcggcgaggcgctgctcaaggccgacggacgaccgttgcacacacgctgagaccaaccagcacaagcaagttcggaccagcgcacctgataagatattgcccagtgtgtttcgtcccaacaaaggaagaagtgatggcggaaaaggacgcgaagccgaagaagcagagcacaatcaagcagatcatccagatctacaagtacacggctaaggaagacaaggccctgccgtggcttgaggccggtgctttcctgctgcctgtagtcgtgatgatcatcatcggtctgattgtcaagtggacctggctgacctggatcttcaccatgattaccgccatcatgctcggcattctgctggccaccatgatgctcacccgccgcgcggatgcagtcggctacaagcagattgatggcaagcctggtgccgccatcggcgtgctgagcaacatgcagaaagccggctttgacttcccgcaggaaccggtgtggatcgacccgaagaccaaggatgccatctggcgcggcacttcgatgaacggcatctacctgatcggcgaaggcgaatacggtcgcgtcatgaaggcgatggatcgtcaggaacgcgatatcaagggcgtcaccgccggctcctccattccgatataccgcatcgccgtgggccacggccccaagcaggtgccgctgaccaagctgcgtagcacggtgatcaagtccaagagctatgagcccacggaccacaagaacgcactgatcgccaagattcatccgcgccgtcgcttcctgctgaccaaggccgagatggaaacgctgaacgatcgtctgcgcacgctgcaggccaagaagggctatgccatccccaagggcatggatccgaaccgcccgcagaagatctcccgccgcgcgatgcgcggtcgctgatcggcagcacacaaccaaatcgcacagaagccccggaatccgttcaatcggttccggggcttcgtcatatgtctcataatcacgtccacttacatccacctacgtcacctgtcaatacccactgtccacgttgcggacatctctacctactcccccgatagtctccgtttccattctgtaatgatgtttcgttgaaataacgcgcctgcgcgattgtcggccacagtcacgaaacattctcgtaacccaagtttcgagccggcgaaacgcgctattttacgatatataccgttatatctcatacgaaaggagcggtcccgtgaccgaactcaagtccaaggaagacgtcgaggcccttatcaacaaggaaggcatcgagtatgtctccgtccgtttcaccgatcttatcggcgttcagcagcacttcaccgtgccggctagcgaattcctgaaggacgctttcaccgacggcatgccgttcgatggttcctccgttcagggcttccaggccatcaacgagtccgacatgaagctggtcccggacgttgagacctctttcgttgacccgttccgcaagcacaagacccttgacgtggccttctccatcgtcgacccgctgaccgacgagccgtactcccgcgacccgcgtcaggtcgccggcaaggccgaggcctacctgaagtccaccggcatcgccgacaccgcatccttcgcccctgaggccgagttcttcatcttcgacaaggtgcgtttcgagaactccatgcagcgctccttctacgaggtcgactccatcgaagctccgtggaactccggcgttgactccgaagaggacggcaccccgaacatcggtttcaagaatcgcgtcaagaagggctacttcccggttccgccgattgaccacacccaggatctgcgcgacgatatggtcgccaacctgcagaaggtcggtctgatcctcgagcgttcccaccacgaggtcgccggcgctggccagcaggagatcaactaccgcttcaacaccctgcagcacgcaggcgatgacctgatgaagtacaagtacgtcgtccacgagaccgccgctctggccggcaaggctgcgaccttcatgccgaagccgatcgccgacgacaacggcactggtatgcactgccaccagtccctgtggaaggacggcaagccgctgttctacgacgagaagggctacgctggtctgtccgatctggctcgctggtacatcggcggtctgatcaagcactcctcctccgtgctggccttcaccaacccgtccctgaactcctaccaccgtctggtcccgggcttcgaggctccggtcaacctggtgtactccgctcgtaaccgttctgccgccatccgtattccgctggccggcacctccccggctgccaagcgcatcgagttccgcgctccggatccgtcctgcaacccgttcctggccttctccgctcagctgatggctggcctggacggcatcctgaaccacatcgagcctccggagccggtcgacaaggatctctacgagctgccgccggaagagcacgctggcatcaagcaggtgccaagctccctggccgaggctatggacgccctggaagaggaccacgacttcctcaccgccggcgacgtgttcaccgacgacctgcttgagacctggattggtctcaagcgcgacgagatcgaccaggctcgcctggccccgaccccgctcgagtacgagctctacttccacatctgagtttgagagcttagcaacgttgggatttcgccattgctcttctcttgtgggagtctaatgggagtcattcagcgtaactagaaagaacctcgtgaaattcgtttcacgaggttcttttttgtatgttgcgttgtgtgttatgcgatgtgtgttgctcctggaatattccaggggcgggccgctacttagtctcccaacgctccttgagtacataggcggcggctttgggctgacggtcgcgagtgaagacgcccttcttgttgccgtcgacgcgcatgataccttcaccggtttggaagtcgcagaggttccatacctgctcgcccaccactgcctcgaacatgtcgaacacttcgtgctgcatggtgaggtactcgcattggtattcctcactccactgcacgcttggcagcttgtgcgcaccggcatcggtgtccgcaccgtattcggtgaacaggaatggcttgttgggttcggtgttcatccattggttcatctcgtcgatgaaggccttcttggctccgatgagctgatacccgccttgcatataccagccgtaataccagttcaggcagatgacatccgcgaattgatggcacttgtctttgcctgcggcggccatcatcagattggtgtaggtcagcggacgatgttgcggatcgagcgtgcgcgcgtaatcgaatatctccttgaaatacggcacggccgcctcggatgccgagtcgttggcggcgtcgatgagattccaagcgtcggaggcccccggcattcttttcgtcgaaggggacaattcagaacacaactgccgacacaatcgtcagggaggccagcgagaacagcgtgcttacgagcacgaagccgaccgcatactcgggcatgttgttcttgcgaccggtgaacatggcaatggtggtcatggtcggcagtccggcgatgaccgtgatcatcagcaccatgtcatgggtgatcggcagttgcggcaatgcgccggtcagcgcggtcagtagcgcgtagaaggcgagcgggaatgcgatcatcttggcgactaggccagcatagagttcgtagcgtttgaggacgccccaccacttggtcagcgcgaacaggccgcccaagtagattagcgacatcggcgtggccatattgccgatggtgtgcagcggcttcaggatgatgtccggcaccttgacgccgagcagaatcagaatcagggcgagcatcacgccgacgaaggcgggattgacgaatcgtttaagcaggccgaggacgcgggtgcctggcgaggggcggacgacggccggagaaccaccgtttgcggcattgctcgccgaaccagcattgcccaccgaaccggcgccgttcaccgaaccgttcacgaccgcacctcgcgcgccaatcgcgttgccgtcagtcgcttcgtcgaccggctcgcacagccatacgccgtacgtccagagcagcgtctggtcgatgatcgacatcagcgccacgtaaatcgcgccgttctgcggccaaagtgccataatcaacggaatgccgatgaatccggcgttgccgaaaataagcgacgcctgaaatacatggctacgcgaacctttgagccgcaacagttcggcgaccagccagaacaccaggatgagcagcgcgtacatcacggcggtcagcagcatcacgccccagttagaggcaagctgcgcgcggtccgcaccatcgacggcgttcgaaaacacaagcacggggatgagcacgttgagcagcaacgagcacatgccgtccaacgccgtctgaccgtagaatcgaagcctcacacatccatacccgaccatcagcatgatcagaaatccgaccaactggccaatcatgacaccgaactgccccatgcacactcctctcgtttgctctcccgcgatttcctgtcactggttcatataggcagccatctggacaggctcggcggcacacgcatcagtatgttcgataccaccacatgccaatccacttctcgttcaaccgttccccgtgctaatgagccgcctgccaccccgtgttgccggtgctgcgcgagcaccgctacgtgtattgcattccggtggccctcgggcgcaacgtgtgggtcggcgcgaacgtgtcgattctgccgggagtgaccatcggcgacaattgcgtgattggcgccggtccggtcgtgacacattccatccccgccaactccgtcacctacggcgcgccctgcgaggtcgtgcgtgaaatcggcgacaaggaccgcgagtatttctacaaaaatcgcaagctcgacgtgtgggagtgagctttcgcgctactgctctttgagcttaaaacgctcactgaattggcggtcgcgccagtagtagacgtcgtcgcgttcgttgatttcgcgaattaccttgcacgggctgccataggcgaccgtgttggcggggatgtccttggtgaccagcgagttggcgccaatgaccgcgttgtccccgatggtgaccccgggcagcacggtgacattcgcgccgatccagacgttctcgccgatgtggactggcaacgaatactgggcaccctgatagcgcaggtccggacgcacgggatggccggtggctacaagcgtgacgttggggccgatcatggtgtgggatccgatgaagatctcaccatcgtccaccagcgtcaggttgaagttggcgtaacagcgctcgccccaataagtattgcagccccagttcgcatacaccgggcattcgaggtacagaccctcccccgccgcgccgaagaacgcctgcatgagttcggtacggcgcttcgggttggtcagcggcgtggcgttgagttcgagctggagatcacgctgggcggcctgcagatcaaaaaagccgtccacatcatccggcaggtagacctcgccagagaacataagcgccattttctcgcgcgtcgcatcatcgataatcggcttggcgatcggcttgtcttcggtcatcattggctcctgttcggcgttttggcgattgtgtcggtcgaactattctgtcacagactcgttttcgacacccagcatcgagcgcagccagtcaaggattcagatgtgcgattggcaccgtgcgggcctcacacttttcttattgagaacgattcgccgtgcagtcaagccctccatccacccaaaaaggactcgcttttggccgcgtcgtcgcggtaggccttgccgaactcgtcaatgagcccatggaattcctgcaaatccttgacactgaggttcgtatccagcaccacgggcgaataggccctgtggaatgccggatagccggccggcacgtcgaatccaaggaaggcgaacagccgccgcgcgtaggtatcggccacgaatgtgcggcgcgagaacacgtacagcatcagatcgtcggccgtctcgccgccaataccaaataatccaagcaactcggtccgcaattcggcgtcgggaatatctgccgctccctcaggtgaggctccgcaacgctccacataccatcggctcagtgactgtaccgtcttggatttgttgacataaaagccggacgggcgaataagttcctgtagatgcgctggccccataatcgccagcttatggggttcgagcacaccctccgcgttcaacgccgcaagcgaacgattcacattgccccacgccgtattctgcgtcagcaccgcgcccaccataatctcgaacgtggtctccgccggccaccatccggtcgggccgagtgcgtcagccatggtgcggtacagcaattcgatgcgctccggcacaggccacttgtgtgcctggttggctttcatacgtttcatattctgcattcaggctccgtattagccatccgccattcatttattaggtcgattatgcgttcattaggtcacttgtgatgaacactgccttcaagaatggcttcattccaatgctcattatctcatgctaagcagggcaccgacctaatgaacgcataatcgacctaatgaacgcaacggtaaggaaaaactacagagattcagcgagatatgctcggtccacctggtctggaagtcgaaaatcttgatgacatctaccgcaattcgtgcaggattcgccgcatgaacgggatagtgactaggaatgtcagcacgtcggacaccgattgcgccatttccacgccgagcacgccgaacatcatcggcagaatcagtacgatcggtgccaaaaacagaccttgtcggcacagggccaggaatgaggcgatgccggtgcggcccatggtctgggtcatcatattgcccatcatgttgaagccgttgagaatcaccgtgcagcattggatgtgcagcgcggccacgcccaccgccaccacggccgggtcggagcggaagatctcgaccagttgcagcgcgaaaatccacagcaacaccgccaacgccacgagcacgcaggtggcgagccgcacgcagaaccagtacccttctttgacgcgcgcgaacaggccggcaccgtagttgtagccgcacaccggttggaaaccttggccaagaccaacgatcaccgagttggcgcccagcataatgcgcatcacgatggccatgccggcgatggccgcatcgccgaacggattggcggcaatgttcacgcaggtcacggaaatcgaaccggcgccttggcggatcagcgagggcaggccaccgccggccacttcgcgcatgagcagcacatccggcctgcaattgcgcagggacagtttcatcacgccgaatttgcggctcattgtggtcagaatcgtgaagctcaccgtctggcagatggcggtggccaggccggcaccaaaaattccgaggtgcagcacgaagataaacaacggcgcgagcaggaaattcagcaatgcgcccgaaaccagcccgatcatgccgaacgccgattgcccttggtatcgcagcagtccgttgagcgcgaacgacccgcatacacagggtgcggcgaccaacaacggcgtcaggtattgcacggcgtatggggcgatcgtcgaggtcgatcccagcatgacgaccagcggccgcagggtcagcaatccgattgtggcaatcaccaaaccagagagcaccgcacccgcgaagcccacggccagtagtcgggaggcgcgctcattgttctgtttgccgagttcgcggctcatcgagttgcccgcgccgttgccgaagaagaagccgagcgcctgcatcacggtcatgatggagaacgcgatgccgatggcaccggactgcgcggtgccgagctgaccaataaagaacgtatccgtgaggttgtaggcggtggtcaccaagttggagatgacggccggcaaacacagtttgagaatcagcggcttgaccggctgcccggtcatctgccgatatttcgcgtccgcgctcgcgcgtctaatgccatgaatctgcaccatggacggctatcctactcgcgcagggtcctatgcaaaggcgcgtgaccgccatacaagtcagcgcagataccgcccggtgatgctgttcggattggccgcgacctgttccggcgttccggtggcgacgatacgtccgccgctttcgccgccgcccggacccatgtcgatgatccagtccgcattggcgatcacgtcaaggtcatgttcgatgaccacgactgttgcgccgctcgccacaagccggtcgaacacgcccagcagcacacgcacgtcgagcgggtggagaccgatggtcggctcatcgaacacgaataccgcgtccgattgggctttgcccatttcgctggcgagcttcaaccgctgggcttcgccgcccgaaagcgccggcgtcggttcgccgagtgtcagatacccaagacccaaatcatgcaaggtggtcagacgtgcgtggaccttcttgaggtcgtgggtcacggccaatgcctgatccacgctcattgccatgagttggggcagactcaacgaaaggtgcgattctcccttaacggcacgccgaatcgcgccggcttcagacgcataccgggatccgccgcaatccgggcattcgatggtaacgtccggcaggaactgcacgtcgagtgagatcgaaccggtgccgtcgcacgtggggcaacgcagtcggccggtgttgtatgagaaatcgccagccttccagccgcccgccttggcgccgtccgtgcgggcgaaggcgcggcgcaattcgtcgtgaatatcggcataggtggccacggtggagcgcacgtttgcgccaatcggcgtggcgtcgatgagattcgcgcgactgatgcccgcggtctcaagctcgcgcacgtgttccggcaacagctcccccgccgcctgcgctttgagtgcgggaatcagcgattcgagcaccatcgtggttttaccggagccggagacgcctgtcaccgccacgagccggccgcgcggaatatcaacgtccagcggcttgaccgtatgcaactggctggttgtcatgcggatgtggccaaggtcgaacacctgcggttccgccacgcgctcacgaatacgcgcgtttgcctgatctgacaggaacggtgcaatgcggctgcctggattcgccgccacctcgccgaccgtcccttgcgcgatcacatgccctccttcggcgccggcaaccggtcccatttcgataagatggtcggcggccttgagcacgcgcacgtcatggtccacgaccaccacggaattgccgtccgccaccaagtcatgcatcacgccgagcagcccatccacgttcgagggatgcaggccaatggacggctcgtcgagcacatacagcacgccggtggtgcggttgcgcacggcacgggcgagctgcacacgctggcgttcaccggttgaaagcgtggcaccagcgcggtcaagcgccagatagccgaggcccagatccaacagtcggcgggccacgtccaggaatgattcgcagatgttggtggccatcgtccgcatgtcggcaggcagggattccggcactccgcgcacccaatccaccgccgcatccaaggtcatcgcgctggcttcggccaagttcagcccgcgcacatgcggggcccgggcgacggcgctcagtcgggtgccgccgcagtcggcgcacggcccctccttgaggaaccgggccacacgcttcaggcccttctcgtccttggctttggcgagcgcgttctccaccgtgtatacggcgttgaagtaggtgaagtcgagttcggcgaaatcgtcgcctttcttcggcttgtaaagaatatgctttttgacggccggcccgttgaatacgatgtcacgctcttcgggcgtgagctcgctgaacggcacattggtgcgcacgcccatcgcgccgcacacctgcttcatgaggtcccacatgagcgaaccccatggcagcaccgcaccgtcgtcgatacttttcgactcatccggcaccagggccgcacggttcacttcgcgcacaatgccggttccggagcaggtcgggcaggcgccggccgagttgaaggcgagcgattcggcgccgggcgcgtggaattccttgccacagctgacgcaagtaatgggcagtccggccgccacgttcagcgtcggttcgttgcgcgccccgcaatgcgggcacacgtgcgaggcgacgcgggagaacaggagccgcagactgttgagcagttcggtcatcgtgccgaacgtcgaacggatgccaggcaccgtgggccgctggtgcagggccagcgcggccggcacgtgcagtacttcgtccacttgggcgcgactggcctgggtcaggcggcgtcgcgtgtacgtggacagcgcctccaagtagcgccgcgaaccttccgcatacagcacgccgagcgccagcgagctcttgcccgaaccggagacgccggccacgcccaccagttcgcccagcggaatgtcgatgtcaatgttcttcaggttatgcacgcgcgccccgcgcacctcaatcgcctgcggccgttgattgttggtcatgctcggcactgctccgccgccgcgctatctgacctctgttcgagtgtcacgccgtcacctctttctcgacttcgcccttggctgccgccgcctgagcttcatggtctccagtatcatcacggccaacgacggcggccgaacgccggacgagaatctttcgtcttgggcaccgtccgccacctgcaattcgaactagctgaaccagcgtgacgatattgtcggctatcgatctgccgtgatcgtaatggacatcgtcgtccggaagcacgtcaccggttccgagaggagttggcggcgcgctttcataagggcacacaatcccaagatcacacccacagatcaataccgatcaatactcgtacgtgatcgcggggtcgccgatggtcggcgtctgatccagtttgaggttggccgagccggccgcggtggtcacgtcgtattcgatggtcaccgtgtcctgaggcgccagggagatgtcgtccatgtaggtcatatggtccttggcctgcacctgtgcgaaggaactgccgttcgacgccgacacgttgctgacctcgcctccggccggcgtgtagatgaccacgcggttcaccgccacgcctcccttggcgttcgccgtgatgtattccggcagggatccggcctcgcccggctgcagggtgttggtgaacgaatacgtaacgtggtaggtgttgtcgccggtcctcttcaccgtcgacttgcgctggatgtaccagtccatcttcgaggcctgcatctcgttgaagtagacgccggtcaccgggttcttcgcgtcgttggtgatctcgccggtgacgccggcgctgcgcagcaccgcctgatcctcctcgtggaacgaccagaagtacaggtgccgctgctcggccatccggagcatcgtcttggcgacggtcatgagcttctgcgtgttcatgtcgctgaacaggtgggcgaccgcctgggcggcggtctcgctgaagtactggtcctgagcggagggcgtcagttccttgtaggcgccgttgagcaggaattcggcggtgttcgacccgttgagcacgcgtccgtcagacagggtcacgtcgccggtggcgccgatcatcgcctgcagcgcgacggggtcgagcgacatcacgccgtcggacgatccgccaaacggagccgcctgccagaacttctgggccatggacgcgacgcgcgggaagtccggcgtggacgaaagattatggatgacttgaccgaagtacagtccgctgtacagcgtgccgtcaccgtcctggttgacgtcatccaacgcggcgttggaggggaactcggcatccgcgtggaactcccccaccgcgatcttgccgttgtccgcgctgaaggaaccggccgaaccgatcaggccgccggttccgcggatctcggaattcgtctgggccagcagcacgtagttgcgggcgccgttcgcaccgaggaagttcggcagcatgttgagcatgccgctcaggttttcggtcacctgcgccagggcggccatctgcgtcttgccgttctgcagcgcgttgttcaccacgccgagtttggcgtcgggaagatcctggatcgtcctggcctgcgattgcacggactggtcgaccgtggcaagctgctgcgccgcggcgatgatcggctccatgttgagctgcccatcgccactggagaggctggcaccggtcagtgtggtgacgaccttgcccagctggggcagcgtggtctgcgcgaagtcatcgatggtaccgatggcggtgcgcgccgtcttcacgtcaccgccgaccacgggcatcttctccgccagcgtccacagaccgccgctgacatcctgcttggcggcggccgcctccttctggatgtagctcacgtcggacagcgccttgaccatgtcgtcggtggaaccgtccttgatgaccttggccgcgttgacgacattgttgaggtgcgctttggcgctcatcgccgacttgtacagtttgaatccgctgaagccggccgccgcggcgcacatgaccagcaacagcagcacgacgagcagcgcgttgcgaacgcgatgggttgtcctggggaccgtgcgtgcgtgtgatggcatgggctacttccttacgttatgacatgtatcgatactggctggctgcccggttacgctttcgctggacgggtagcccggcggacggcacgtagcagtgcacgacgtgcacatcgcgtatgacgccgggggtcgtcagcgcggctgactggggtggccgcggaccggtacctggacttgcagctgccctccggcgatgcgtgtcacctgcagcggggaacgtccgctgcagttacggctattaccggccagccgacagcaatcgctggtttagttgttggtcttttccggctggtcacccgttcccatgagctggcatgcacctttcagcgagtatctctcctaccgcatgccagtctacccatgcctgcgggataacccaaaaagccttgcaagaataccgaatttctttacctttggccctgatcgttcgacggctcgcaagacggcgtaacctcatccaaccggccgatccccggaggcggaaccagcggaatcctcgtgaccgggaatgcgatcgttcccgcttgcgcgatggcggatgcgcgcaacgcca

SEQ ID NO: 1337 - DNA, 11124 bp, Unknown
  R157_18m  MAG No. k141_15819
tcgaatcccgtctcctccgccgggaatttcgcgaacaagtcaaacgcgcgttcctggtccgccagccatgtctcaatcagccgcattggtcacactcctcctgttgacacagcagaccacactactactgtgctcggccaacggccgcaagccttatctagggtgtgtttacagataggcagcaagtgtctgccaatgcgtttatcgcaggatataccaggttactttccccgatacacggcagcgacgccgaagacaaattgtatgatgaacaatcccagcaggaagatcagagctcctgactggtacgtgcggtagaagtcgaccatatccggctgcgccaaaggcgctgccatgatatacaccagcgcagcgaacacggcgccgagcgcggaaacaaccaagaacgcgcctacggcaaaacgcagcaggccacgatccgaggtcctccggcgcagaccacggcatcccacgaagacgaataccgagatcagcaggtagaacagcagcccgtacgtgggcagcatgtcgataatcagcagatcgttcatggcatatcctttcgtggcgcaatcccattcaacctgcgcatggccaaaagcgcaacatcgtgtcaagtaatcgcatgatagcaggtttcgtccggctgcgaccgtggccacgatgagcggcatgggacatgatgacatgaccggggctgcggcgcggtcgatccgtatcgcccgtattggacaatgatccgttcgccctggatgcgatgtgcgcgatgatctcggccgtttccaaggacttttatgtaatgcgggggcacgggttcgcccgcggtggcgatcgagcattgccataacccgcataccaggccggatgcgctggtgttggatatggcgttggggggaaaaaaaaatcacgggcgctgacgtgtgccggcgcatccgtcgcaggagcggcgggacgggcagcgtgttcacgtacgtgcaccgcgtggccgacaagctgggagtcgccagccgcaaggaggtgctggacgcatgcgccagatacgatctgctctgccccggctttccgaccggcttggcctgcggcatgccgggcatccggtgatcgcggcgtcctgcgccgtattgtccgtggcggtgctcgcggagtacgtgttctcgatggcggcacgggtccccggcaccgcgaccgtgcgcgatatcatgttggctctggctgtgcttgccggcttggtcggcggcatgttccgcccggaccggttcctgtggccggcgcttgtcacgggcgtaatcctcatgctggatgtcccgatggtcacgccgggaccgacggcatgcccgccgacgaacacgaataccagcaacagctcgacgaattgcgcgacgccgccagccgggccatgggccacacgcacgaggtcatcgactcgctcgaagaacacacaccagcgcaagccagccggacaccgaacaagcccactggcagctggaggccgtcattccctttaccggcgtgttacagacaatggaatggtgatgttcgcgttccagttgtcggaatcatcggtgatgtcgaacgtcccggacatggattcgataacggttcggtatctcttgaggccgctgccgagtccgagccgtaccgcttcgtcctttagtacgtcgcttgccgaaatgatgacgtgccgccggtcgaaggagatcgtgacggcgtaccattcgtgcggggcggcgtgcttggcgatgttcgcgtacagttcgttgagcagtccttcgagaaggtcgaggatgtcgtccgccagtggatggtcgaacgtcccgaggatgtcgtcaccttggaatccgaggccgccaaggcgacgtcgttgcgattgaatgatgccgtcaagccgttcacgctgctgttcgattttcctgtcggttttgtcgtcgttatttgttttgacgatgcggctgcgatcgtctggtttgtcggtgcgttcaagttgtcgtatcacctggtgggtgtggtcgagcgccgtttcggcgatggcgcgcagatcggtgagttggcgctgatattgctcccgatcggcggggcaatcactgcggcttgcctggtcgatgcgcaggatcatgtaggcgaggtcgttgctgatggtgtcgtgcaggtgacgcgccgtgtgttcgcggtcgagtcgttgcctgagtgtcgcggtcgcctgccgttgggcgaacagcaggttgagactgaaccccagcgacaatgggcataggcacatgatgatcatgcctacgatgttcgacgaggtgaggttgttctgcatgttgttcgcggcgagggcggcgagggccgccagtgcggaagcggctccaaggcggggtttgacgaacgagaggaccgctatggaggtcagtgcggcgatcatgatggtcgtcaacggcgagaacagccacagcaacgcgtatcctgagaccgcgaacagcagacaggcggcccataccggtgccgctccgagcatggcgcacaggacggcgacgagcagcgatatgcgtatggtcgaccatgacagcaggttctgggatgagtacacgcccatctctacggggatcgccactgcgaggaccagccccgcggccagtatggctgggtggtgtatacggttcaaagcagatcgtatcgggcgcatatggcgagggcctccttgcggtcggcggcatggagcttgcggcatgccctgttgacgtaggtgaagacgctgcccttgctgacattcaggagcgcggctatctcgtcggtggatgatccatgcgcgtagaggcgcagtacgtcccgttccctggaggacagcgatggcttgtcgttttccggcagccggccctcggtcgcgtgtccttcgttgagtttgcgattggcttcccgtgcggtggggaatccggtgccggggacgggctcgccctgtgccgcgcatcgtatggcctgcgggagctctttgacgatgtcatctttggctatcaggcattgcgcgcccgcctcgaccgcgtcttgccgatatggatcaaggtcataggaggtgacgcacaccaagccgatcgtcggagtgcgccgacggattctggcgcatatgtccgcgccggtgatgcctcccaaggccatgtcgacgaccagcacgtcgggtcgcgcgccgtgggtcatgcagcgctgcaatgccatcgccggggacgtggtgctccagatgatgtggaaccgcggggagacggctcgtcatcacggctatggcgttgagggcgagcgaatcgttgtccagcaccccgatggagatggtatgcgagtccgataggtctgtcatgccacccatcgtatgcgcatcccatgctcctcgacgtatcgttgtcatgcgcgcgcatgacagtcttttgctcccggatcgccgtctgtgggctaatggttggcgacagttgtgcaatcgtccgaaggagcatgatgatgaaatcgggaacacgacgcagggccgccattctgaccgcagtgatgctgctgctgtccggttgcgggacgactccgaacggcggcacctcgggaagtggcggcatgctgacctggcagcaggcgaacgaggaatacaaggcgaccgtcgaggatttcccctttgaactgatgaacggcgatgcgtttccagcgaatatacccaaggcgcaggccgcgtcctcgctgtatgccaagggaagtggggaaggacaggcgtatgtctactggcagtgctcggtggaacgcgacattctcgacaacagccagaccaacgcggaagcagcccgaggcgccctccagcagctgcgcaagctgctggataccgactggttcaagaactactacgaggacaaggatggcatatacgagaacgatgtgatcggcaaatccgaactcggcgactattcgaccatgcgggacttctacaccacggactgcacatggtaccggcatgagaacggaccgacgaaatgaatgcgatcgcaccgttcaaatgcctgttggcgtgcgtgacggccacgacgatgtgcgcgatgatgacggcttgctcgccgtcgcggacgccatcgtccgacgcctcctccacggcgaagcggccagcatccacggtcgaggtgcgtaggggcggcatcacgccgttatcctcttcctccaccggcgtgcaggtggctcctgtgttctcgcttacgactccggcgaaaggctggttccactccacgactgatcaaggagcatacgtgcatgcgggcgacgtgttgggtaccgtcggcgatcagcaggtcacggctccggtcgacggcgtgatcgaaacggtcgcgcaggacaacgacatggccgcggactatccgctgttctcgatacggtatggcggcatgagcgccagcgtggacgcgaccgcgctgctggcgaccatagacccggaccagccgttgacgggccgattccagatcaccgacgcgcaggggcccacggactgtgccgcggtagtgaatgacggcgtcgccactccgccctcatcagcggaagatacggccggatcggcgacgactgcgcatgggacggaatcgactcgcacactgcaatgcctgttcccaaaagacgtgcaggcgcgtcccgggcagaacgccaccgtggtactgaccgcgacggcggtcgaggacgccttgatcctgcctgtcaccgcagtcgccggcaggctcgcctccggccaggtcagcaggcgtgacggagattcgttcgccaccgtgaacgtgaagttgggggcatcggacggcacgtcgatcatcatcctcgacggtctcgaggaaggtgacatggtgtccgcgacagctccgaatctcacaccgggagcgcaatcatgagcacactcatccagttggaacatctgagcgccgaagtccggctgcccgacggcgaacgtctgacgacggtggacgatgtcagcgcatcgttcgagaggggaacgtccaccgccatcatcgggaaatcaggatccggcaaaaccagtctcgcctccatcgtcgggctgctcaacaacgactatgacggaacgctctcctatgacgggcgggactgcgccgcgtggaacgacgccgaccgggcgcgcttccgctgccggcatgtcggcttcgtgttccagaactactccctcataccgcatctgagcgcatgggagaacgtggcactcccattgcaataccggggaggcatccccctgcgggtcatcagaagacgagcctcgcgcatgctgcacaccgtcgggctcgggagccggacggtgtgcagcatgccgtcgcgcctgtcgggaggcgaacagcagcgcgtggccatcgcccgagcgctggtgggagatcccgacctgctgatctgcgacgagccaaccggcgcgctcgacaccgaaaccggcgacatggtcgccgacatactgttccgacatgttcgtgaactcggggtcacactcatcctcgtcacgcacgacccgcagctcgccgcccgatgcgaacgccgactgacgatcgacagggggcgactgtcgtgatccgcatgatcgccaaggatctgcgcatcaacccgttgcgtaccagcctcaccgccctgtcgatgttcatcggcatcatcgccctcatcgccggcgttctcgtcggcacgctcggacgcgactatctggaagcggtcaacgcgcgactgggaggcaagtcacccacctatagcgccatcgtcgacgtgccatcatcggcgaacatgcaagtcgtcacggctttgcaggaacgcctcgcgtatttccgtccgggaatcgcatcggcgcaatatcacctcaacgacctcgccatatgggcgtcgtccggtgacggcaacacggagatacgccgcgtcaccatcatcatcaccgacgccgaacggacaagaatcatgcccgcccccatcatcgagggcacatggctgaccggagcggacgaacccgccacgctggaaaccgcagtcaacgaaagcgcccgccaatacgtgcatgacggcaccgtggcactcgcccggacaggaaatccgcaacaggtgccggcacgggtgaacggtgtcatcgccgacgggacggacacacccaccatctacgtcaacgcgaccacactgcaacgctactggccgcaagcctgggaaccggatgggctgaccatcctcgtccatcccaatgaaggcgtggacgatcaacacgccaaaaccgcgttggacgatctgttgtccgacgtcggggccggcagcatatcgtcatggaaccgttccgacaatgccgatgattacgagcaggttatcggttttctccaactcggcgtcaccgtcaccgcgatattgctgttgtcggtatccgccatcggcatgatcaacatcggattggccggcatcgagcaacgctcgcacgagctgctcatccgccgcgcactgggcgcgaccagagccagcatagccatacaggtcatcggctcgtccgtgctgctcggcctcatcatcgccttcgccgcggtgctcatctccgcggtgctggtctgggcaattccgtggatgatgcccgccgactcgccgctggaaccgcccgcatacccatatacggcggcgatgattgcggcctgtgcgtccatcgtcacctcgcttgtcggctctcttgccccggccatcaaagccatacggctgcaacccgcgctggcgttgcgatggaccagaagccattctggacaagcccgccgacagctggatggtcggcattccgatcatcgattgcatccggtaaacaatccgcttgcgggatgtgtaccatggtcgagatgccgcaaccgcagaatgttgactattagcatacaaatacatactattgtcttacgtaatgatgttggaggttaatgtgagcatggcatccgtcacagtccgcgtggatgcggacaccaagcagaaagccgcaaacattgccgaggatctcggtctggacttgtcttcggtcacccgcgccttctacaagcagattgtccgggagaggcgcattcccctaaacctttcctatacgaccgtgccgcctgaaaccatggaggcccttgacgaggcgaagaacaggctcgccgacggcaaacctcgtttcaacagtgccgatgagatgttcgattcgttgggaatctgatcaatgctcaaaccggattacacagcggcattccagcgagatatcaagaaactcaaacgcaagcacactgatttacgcccgctgaaagaagtcattcgtctggttcttgaggacacggcggactccaaggaagtattgaggcgtaggcatcgcgcccacacacttaccggtgatttaaacggcgtattggaatgccacatcggcaatgccggcgactggctgcttctatggattcgcgatgatggtaccgccatgttcatgcgaaccggcagccatgacgaactgttgggcaaatagcgggtttacatcctgctttgaaccggccgatggcgatttgagtgcggcagtcggcccgtgcccgcagaagccggcatcgcctcgcagcgtgccggtctgcaatcgctgatcgacgaggaggagtccaggctcgaagccccgggattcaccggcgacaacctgctcgccgaaccacaccggccgctcacgccggagaccatgcgactgctgtcgggcttgccggcggaactgtacgcgaacatcgccgaacacgccgaccggggcgaatggtacgccatctgcgtcaccttcgacacggacgccatccacgtctccgccagcgacaccaccacacccgccgacatgggactcggcctgggcagcggcctcgaccgctaccggaccatcatcgaaacacacggcggcaccttccaaacccacaccgaacaagcccactggcagctggatgtcagcattcctgccaagaactagccaggcttgggactcggtaatgcacgcgcgcaacgatttcttctgtgagtttctgttcttctacacaacttaatccgatatgccttccgggcgtgtcgttgctcgtgtcgtgaaccgtcggttcgtttctagctacatacatcaatgaacgtttgtttacgatgtgccgtggaaggagccgcatacgcaggatgacatgacctcgcccggtggggcggtgatgcgcgacgaggatctgctcgcgcgggtcgcctccggggacgaacgcgccttcgagaccctgtatgggcgtcacgctgcggcggtgcgggcgctcgtgcgcgtgcgcgtgccggatgccggcacggccgaggaggtgtgcgccgacgtctggctgggctgctggcggtcggcgagggcgttccgtggtgatgcgaaggtgctgtcctggctgctgggcatcgcgaaacggcagatctacatgcgcgtgcggcgcgtacgcccgaatgtgaccgcgttggacgatgcgcccgaaccgcgtgacgatggaccgagtccggagacggccgtgctgtccgaagcgggcgtggatgatctgatggcgttgttgcgccggctgcccgtcgaactggtggagacggccacgttggcgtggctgcacggcctgtcgtaccggcagatcgccgatttgtcggacgtgccggaaggcacggtcaaatcccgtatctcgcgtgcgcgccgtctgctgcgcgcgcaactcgaccgctaaaacgatgcggatggaaaggaacggtgaatcctgatgaccgatcatcttgacgaaacgatcgaccgtttgacggacgagacgcccgacgggcgtctgcttgcggcattggacgccgtggaacgatcccgttcgggagacgcgcctcccgctgcggcggtgatggcgcgcatccgcgcgtcgcggtccccgttggacggaccggcatggtcgtgggcgcgcagtctgcggttgttcatgctgctgctgggccggcagtcgcgggtggtgccgtggcaggtggtgccggccacactggcgttgatggcgttcgccggattgggggcgcggttcttcgcggtcggctggagtgcgacgatcgtgtcccatgcgttctgctcgatggtgctggccggcgtgctgctgagcgtgacgatggcgttcggggattcccgcgcggacatgatctcgtcggccaccccgttgggtacgggggcggtcacgctggtccggctggtgttcatactcgcctgcgacgtcgtgttcggcctgatggtgaccaccgtgatgggcgcgcaggggtatgggacgttcggcgtactgctggtcggatggctgtcgcccctgctgctggtcgccggcgtgggcgcgatgctcgcgatccgtttctcctcgggcgtcggcttcggcgtcggcctgctgttgattatcgcaatccggctgaatccgttcgggttcgcgggtctggcggacgcaagccggtccggtgcagcacaatcctccggacagctaggtctggccgccgcggggctgatggcctgtgtgggggcggtggcgctggccggacgattgtccggggcgcgcatggcggccgcgaccgtctgaccgactcgaagccgataactcatctggtcgttcggcatgtcgcgtgaacttcaggacaggcggccgctacctacttggtgacgaacaaaaagaatgaccggcaacttcatcggacttcaaggagggtcggcatgacgggaatgattcgcgctcaggcaaggcgcatcggcatgggattgctggcaatgcccgtggcctgtgggattgcggtggcggcagccggcgtcatggtatccggcgtgtggtcgcgtacgcaaacattgatggtggtgaactggctcgcccagctgatggtgatcggctcgggcgtgtgcgtggcggtcgcattgaccggtgacccgctggtcgaggcgagcgagtccacgcccgtgggttggaggcgcgtgcaaaccacacggttcgcgctcacggctgtatccactcttgtgggtgccgtgcttatgttcgcgccgttgcatgtattgggcctatggccgcaggatatgggatggataagtctgatcgcgccggccggcgcgatactggtcgtgggcctggccgggttcgcggccgccgcatggtccgcgtccgcacaggccacggtcatggcggtggtcgccgtatggatgttcctcgccctgctgtgggacccgtacgtgctcgatccggtcacgcaacgcggcatcccaatcgccgtctccatgatcgccgtagtgttcgcgtggcgtctgctgggcgacgaggaacgcaacgtgacgctcgcaaggagaagcatatgagtccttgcaccggtttccggcatctgacccgcgtccacatgatcatcgtgtggcggcaacgttcattatgggtcgcggctgtcccgctggccttgctcgcggttctgctgggcgtgatctccccggcaggaccgcatgaccacggtgcgggcgatttggcgttcatggccaaggcgatggccatgttcatgccgatcgcctacatggccgcgttcaccgacttccacacgcggcactcccgacttggcattggtcaattggaggattccacgcccatccccgcgcccatgctggccgcggctcgcacgctcggcgcgtttctgatcctcatcaccccgtcgctcctgctgctggagtgcgccggcgtcgtccagaccctgcacggctcgtggcgggccataccacaggcattggccgccggactcgcgatcaccgggccggccgtgctgaccgcgatgagcctgtcctcgctgctcggcgcgatcctgcccatgatcgtcgcgcgcatcaccggcgtgctcgcatggttcgcgctcgtgttctcctcgccgatgctgcccgtgccgaccgtcaacggcaccatcctcaacgtgatcggcgacgccgtcggcgccggatggttcgggctcggccccgtctacccggccacgggaggcatcctcgcggtcaccggcacgcccgccaacgcggccatatccctgatcgcgcagctcgccgtcgccatgctgctcatggcgttgggtggatggtgctcggcacacccgcgcacaacgcgctgaacggcaccggcggaacccccaccgaaaaaacatcacacggaaagaaga

SEQ ID NO: 1338 - DNA, 7196 bp, Unknown
  R157_18m  MAG No. k141_16893
ggcccgtccgccacggaccgcatcttgcggttcaggcggacgggccttatgggagggatgggaacgggagatcagttcttaataactgcctgcgcctcagcgccggcggcttcggcggcctccacggtcagcgcctcatcgtcgacgatctcgccggaagcgagcttggcttcgagctcgtcaacgatctgcgcgtgcatcttctcggtgatcttgaccttggagacgaacaccagcaggctgagcacgatcaggatgagcggggcatagaacgcgcagatcttgaagacgtggatattcgtcggggtcatatcggcggcggttgcatcacccgtcatgccagccgcaagggcgatgaagccgacgatgccgttcgacagagcgccgccgatcttatcaagcatcgggcggatggaaagcgtaacggcctcgttgcgcttgccgttcttcagctggccgtactcgatggagtcggtcagggagaggatgaccgtcatcatgatgagcgtgccgggaacgtagaagagcaccagcgcgatgaagaccaggacgatgttgctggagaacagggcgagcatcacataagccacgatcatggagaccatgccgccgatgtacaggtagcggcgcggaatgtacctgttcagaatcgggtacagcggggacatgaccaggcccgcgatcatggcgatgacaccggtcgcggagaaagcggcctgattgtcaaggacgaacttgaacaggaagagaagcacaccggtggtggtcacgttcgcgatggcgtacagcaggtaggacagggcgacccacagcagctggtcgttctggaacacggccttgaacgcctgcaacggaccaccgttgtcttcggcgttggcgcgaagggcgctttggttttccctggtgccgaaggcgacggtccaggcggtcatgatgccgagcaccgcgacgatgatgccgaaagcggtccaacccgactggtgctcggcgttctcgccggtgaacacccagctgaaataggtgacgaccggaatcacgaggatggtgatggcgttgccgccgatggagccggtgaaggagccgagggcagtgtaggtggaacgctcgtgggagtcggaggacaatgccgggatcatgccccagtaggagatgtcacgcagggagtagaacacgtcaagcacgatgaacgtgatgacgaacacgacgatgaacaatgtggagttaacgttcaccaggccaaacatgccgctgaaaaccacggcaagcagcacggaggagaccagtccgccgaagaactgccacgggcggaaacggccccacttggtggtggtgttgtccacgaggttgcccagcagcggatcgacgaagatctcggcgatgcggatgatcaccacgaggctggtgatgacgccgatcagcttggccgcaagcgccttgtcaacgcccgagaacaggcagctggtgacatacacgatgaagtacgtgctcatcgcgttgtagaaggcggcctgaccgaggtttccgaacgcgtaggcgatgcgctggcctaacccactcttcctgcggacgtcaccgtccgcggcattttcgttgctcattaatcttctccttaagaacccagagcatggaatcactcattgattttgtaaagtaagcatacaagttttatcaccaaaagtaaaaagcattagtaaacaaggagataaacagcgtgtcgcaaggatgggataacatgggctgaaccgagacattgcatggacgcggcgtagcgtcgacggcaagcagtgccagtgatttggaagcggtaaacaggatttgcgttttatataaaaactgtttatccttttcggtaaaggaggccccgacctcctccataatatcattcacaacgaggtaatgacagaaagcaggagagcatgacagacgtcacacatgtcgatcgcgcatcgcaggcttggctgaccgacccgacggtgttcgaggtgaaccggactccggcccattccagccacaagtggtacgcccgcgacccccagagcggacaatggtccgatctcaagcagagccttgacggcgagtggcgggtcgaggtcgttcaggccgccgacatcaacctcgaagaggaacccgcgacggccgagtcgttcgacgactcctcgttcgagcgtatccaggttccgggccacctgcagacggccggtctgatgaaccacaagtacgtgaacgtccagtatccgtgggacggccacgagaacccgttggaaccgaacatcccggagaacaatcacgtcgcgctctaccgcaggaagttcaccgtctccgcccccgtagcaaacgccaagcaggccggcggatcggtgtcgatcgtgttccacggcatggccacggcgatctacgtgtgggtcaacggcgcgttcgtcggctatggcgaggacggcttcacgcccaatgagttcgacatcaccgaactgctgcacgacggggagaacgtcgtggccgtcgcctgctacgaatactccagcgcctcctggcttgaggatcaggacttctggcgtctgcacggcctgttccgctccgtcgaactcgccgcccgcccgcacgtgcacatcgagaacacgcaaatcgaagccgattgggatcccgaggccggcaccgcttccctcgacgccgcgctgaccgtgctcaacgcggccgacgcggccacggtccgcgcgaccctgaaggacgccgacggcaacacggtgtggcagacgacgggcgacgcggaggcgcagaccgcgatctccagcgagccgctgcagggcatcgaaccctggagcgccgaaagcccgacgctgtacgaacttgacgtcgacgtcatcgaccaagcgggggacgtcatcgaatgcacgtcccagaaggtcggtttccgccgcttccgcatcgaggacggcatcctgaccatcaacggcaagcgcatcgtgttcaagggcgccgaccgccacgagttcgacgccgaacgcggccgcgccatcaccgagcaggacatgatcgatgacgtggtcttctgcaagcgccacaacatcaactccatccgcacctcgcactacccgaaccaggaacgctggtacgaactgtgcgacgagtacggcatctacctgatcgacgagaccaacctcgaagcccacggcagctggtccctgcccggagacgtcctcaccgaggacaccatcgtgccgggcagcaatcgcgaatgggaaggcacctgcgtcgaccgcgtcaacagcatgatgcgtcgcgactacaaccacccgagcgtgctgatctggtcactgggcaacgaatcctacgtgggtgacgtgttccgcgccatgtacaagcacgtgcacgacatcgacccgaaccgtccggtgcactacgagggcgtgacccacaaccgtgactacgatgacgtcaccgacatcgagacccgtatgtactcgcatgccgacgagatcgagaagtacctgaaggacgacccgaagaagccgtacctctcctgcgaatacatgcacgccatgggcaactccgtgggcaacatggacgaatacacggcgctcgaacgctacccgaagtatcagggcggcttcatctgggacttcatcgaccaggccatctacgccacccagcccgacggcaccaggagcctgcgctacggcggagacttcggcgaccgtccgtccgactacgagttctccggcgacggcctgctgttcgccgaccgcaagccgtcccccaaggcccaggaagtcaagcagctgtactcgaacgtccacatcgacgtgacgaaggactcggtgtccgtcaagaacgacaacctgttcaccgccaccagcgactacgtgttcgtcctgagcgttctcgccgacggcaagccggtctggcagtccacccggcgtttcgacgtgccggccggtgagacccgcacgttcgatgtcgcatggccggtggcggcgtaccgcgccgacgcccgcgaactggtgctgcaggtttcgcagcgtctcgccaaggcgaccgattgggccgagagcggctacgagcttgccttcggacaggcggtggtgcccgcggacgccaccgcgacgcccgacgcgaagccggccgatgggaccatcaccgtgggccgttggaacgctggcgtgcgaggcgccggacgcgaggtcctgctgtcgcgcacccagggcggcatggtctcctacaccttcgccggcaacgagttcgtgctgcgccgtcccgcaatcaccaccttccgtccgctgaccgacaacgatcgcggtgccggtcatggcttcgagcgcgtccagtggctgggcgccggccgctacgcccgctgcgtggacaacgtgctcgagcagatcgacgacagcacgctcaagggcacgtacacgtatgagctcgccaccgcgcagcgcaccaaggtgaccgtctcctacacggcccacaccgatggccgcgtgaacctgcacgtcgaataccccggagagcagggtgacctgcccaccatcccggcgttcggcatcgaatggacgctgcctgtgcagtacacgaacctgaggttcttcggcaccggcccggaggagacgtacctggaccgcaaacacgccaagctcggcgtgtggagcaccaacgccttcgccgatcatgcgccgtacctcatgccgcaggagacgggcaaccatgaggatgtgcgttgggccgagattaccgacgatcacggccacggcatgcgcgtcagccgcgccgatggtgccgcgccgttcgcggtaagcctgttgccgtactccagcttcatgcttgaggaggctcagcaccaggacgagctgccgaagccgaagcacatgttcctgcgcgtccttgccgcacagatgggcgttggcggcgatgattcctggatgtcgccggtgcacccccagtaccatatcccggcggacaagccgatcagcctcgatgtcgacctcgagctgatctgatcagaattgatccgatagtccaccgtgcaaacgatgtggcccccgacttcctgcgaggaagtcgggggccacatcgtttgcacggtccttgttagtccagcggatgcgccggatatcgatgcagatccaaacctagtcgttgtagagcatcaatgaataaagatgtcactcataagctatcaagagaatccagaacctttttgaattcatatgctcgacacgcaatgtatccagcgtcgtttataatgattcctcgtgccttaatggcacatcgggctatagcgcagtttggtagcgcgcctgctttgggagcaggatgttcccaaaacgttgcgcttgcgacacccgataagccctattcccgcttgggttttaggacttcaactaaaactgaaaaatgaccgccagtaacactcagtaacaatgaccgcagacctccgattttctcggcctatctgagtgcaaaaaatgagtcatctggaggcacagaccgtcttgaggtatgtgtagactaaaaaagttatgccaagtgacataattaccgggccgtagcgcagtttggtagcgcgcttgctttgggagcaagatgtcgcgggttcaaatcccgccggcccgaccacgaaagccctactcccgcttgggaagtagggcttcttctttttgtcgaaacctcgtccagtaaaacaaaaaagttttactggacgttattttcggccttgggtctgccataccgaccgaccaacgtatcgtcgtcatcatcggaattgtcattctcgacgtccgcttcactccatgtcaatccccatagctcactctcatcgaaattacaatcgcagaaccagaactgccctccgcatctagggcatacctcaatgtcacagcctggaccatgaagttgtccaatattacaagcgcaatcgccgcactctgttctaggaacccaatcttgatgctcttgccaaaacggctcttgcccataaacaatacgctgatatgacttaccatcaagactgacagtgggaaatccctgagcatcagtaagtaaagctggccaagtacggtgcatacgcttgccgtcaaaaagcacagtctcgtttctgaagaaagtcatcacatgcgccgcaatgattttcgccttagcggataaatgcttcgtgagatcaggatcgtcaggatactgctctgcttgaaatcgtgttagaaattcgaataaaagcgcaaagcaagttttgatctcttcagtctgaagatcaacattgtaatgagtgatggcattacgccatttgatggcttgccgaagacgacttctatcatcttcatcgaactggattcctgcattttccagtctagtaatagcttcttcaagcatgacagtatgcccgtcaggtttgagcttggcccatagcagtaagggatgttcgtcgtataagcgctgtttgagcatcagctccacagcatgcgtgatatgcagcacagcatatttccaaggaactgggttgccatctgaagcttcttcggattttagcagtgcttcattcagcgaatcatacgcgttgtctttcatcgataactgaagatgccctttgcttgctatcttctccgcgctcgccatctttctccttttgactatctagagcctataggtatcggttgaatctcattttagtctccttagccatttggatctcaaatcccgatgtctatttagaagtgcaacacccggattcaacttgtaagtgcaacggctggtttcgtgttggttgcctttgattgtagcttggccatctcctcgtcccatacctcgttgggcgttttgtagccgaggagcttcatgggggtgtcgttgatctccccgacgatcgcgtcgagctcgtcctgcgtgagatcctcgaaactggttcccttgggcaggtagcggcggatcctgccgttcctgttctcgttgctgccacgctgccaggaactgtacgggtcggcgaaataggtgagcatgcccagcgcctcgtccaccagcgtgtgcaggctcgcctccgtgccgttgtcccacgtgcggtcgacgcgcgcggccggcggcatgtccttgaagatctcgtattcggccctggccgtggcggacgcgctcctgtcgtcgacgagccgggcgaacagcccgcggctcctgcgctccacctgcgtgttcacgcagcgcctcgacggcgcggcgccgac

SEQ ID NO: 1339 - DNA, 19097 bp, Unknown
  R157_18m  MAG No. k141_18705
cgccatctgtacgcggcccatattgagcttgtccgccgcggaggagagatgcgccttggccgtacgctccgagataaacatacgggaggcgatttcggcgttgggctatgtgctgcaagacgattcgccgattacggtgcatgccacgcgcatggtggaaacgcccgttacgctttgcgatgagcagaacgagccgatcgatcctattcatggaatgttcagctttgttcctctaagattggtactggaacaaacgctaaaggagcgattatgacattcggtcagcagccccagaacaacgggcaatacaacccgcaatacaacacgcctgattacaacgccgcccaacagtctggatatggccagcaatacgcacagtccggttacggccagaactactatgcccagccgcagggtgcccccacctaccagtacgcgccgcaggatgcggccggtgccggcgcgggtgccgccaccatcaacacgacgatgacctacaactacgaggaggcccgccgcgtctccgtagccaaggtgtacggcgagatgaccatcggcatcctcgtcaccgccgtggtcgccgtgctcggccagatcaccggagcctactacagcttcctcatggccaccggcatggtgggcctcatcggcctgtgcgtggtgcagattgccctggccgtggtgctcggcatgcgcgtcaccaagatgaagtcggccactgcgcgcgtcatgttctatgtgtacgccgcattgatgggcttcaccttgagctcgatcttcatggtctacgacctcggctcgatcggcgtggcgctcggtgtcaccgcagcgttcttcttcgcgctgaccatgttcggcatgactaccaagttcgacatgctcaaggccggcccgatcctgatgatcggcctgatcgtgctcatcatctcgcagatcgtgctcgccttcgtgcaggtcgacggcatgaccaagatcgtctgcgccatcggcctgatcctgttcgccggcatggccatctacgacgcgcagtccacgcgcgcgctgctgaccgaatacgaggcccagggcccggaaatggtcaagaagatctccatcctgtgtgccctgaacctgtacctcgacttcgtgaacatgttcctgtacatcctgcagctgctcggcaacagggactagcctcgccagccgattggtgggcggcatgtagcctgctcgtcaaacgtcacagcccgaccacattgtggccgggctttttcatgtctgtcacattcgcacgttaggctgtctccccgtgaaaagacaagaactcgtaggcatgctgagcctgttgttgaccgcgctgatctggggttttgcgttcgtggcgcaggtccagggcatggatttgatgtcgccgatgttcttcaacgccacgcgcttcacgctgggagcactgtctttggtgccgattctgctgtggcagcgtggccgggggagcgcagataagggcgatacagccggggtcgatgtcgttgggaccgaggcatccagggccgtctccacagatgccgcatcgaacggtgcatccgacgtcgttaccatcaccggtgccaagctgaatgcgaacaagcccgattcggccgtggcgcgattgctcgccaacccggtggtcatttccgtgatctgcggcatcgtgctgttcaccgccagcaccctgcagcagtatggcattctgtacggcaaatcggccggccgcgcgggattcctgaccgccatgtacatcgtgatggtgccgttgctggcctgcgtgttcctgcgccggcgcatcggcatgctggtgttcgtggccgtggtgctgtccatcgccggcttctatctgctgtgcatcaccgatggtttcggttcgatcggcctggcggatatcctgctcgtgttcacggccgtgctgttcgccgtgcatattctggtgatcgatactttgggcggcaccgtggacgccatcaagctttcattcggccagttctgcaccaccgccgtgctgagctgggcgggttcgctgatcgaaggctcggtcgactgggccggcgctgctcattcctggattccgatcctgtacgccggcatcggctcggtgggcatcgcgtacaccttgcaggtggtcggccagcaatgggtgccaccgacgcgagccagcctgctgatgagcctcgaatcgttcttctcggcggtaggcggtgcgttgcttctcggtgaagtgatgaccccgcgcggttacctcggctgcgccctcatcttcctcggcaccctgctggcccaagcgccggccaggctgccgaagtggctgcaacggtgaatgaatcggacgcaggccgattccatagcacctcagtccgtggtcttaggcgcttcacccacttgcggcgcgccgttgatgtcgcggtggatgttctgcatttgcacttcgatgttctgcagcgaacgggcgcagtcgagcagtgtctgtgaatgctcgctgagcttgttgtccggcaaatcggtcttgtagcgcagcgcatgctccagcgacgcccaataatccatggcgatggtacggaactgcacctccaccggcgtgtaatgcgcgcccgaggagagaaacacgggcaccgcgtagattacgtgcaatgaacgatacccgttctgtttcgggttcttgatgtaatccttgacgcgcagcacctgaatatcggactgcgacgacagatagttggacacggaatacacgtcgtcgcggtaattacagatcacgcggatgccggccacatcgaacagattgtccttaatcgaattgacactgattggcagattcttgcgctccagcttgccaatgatcgaactcaccgacttcagacggcgttccatatgatgtatcgggtcatggctgaaccgcacctggaactcgtcgtcgagaatctccagcttggtgctgatctcgtacatcgcgccttcatacacctgcatgaggtcaacgaatttaacgacctgttcgggagtgaaggtgcctcccggaagatccaacgctttgagacgggcctgtagatcggaggttttgagtcggctatgtcggtcaagtatcacgtccaccaatatactcggcggattccagacaatctggatgttcgcggggaatctttccaagaacccatatttaggatcgtgacaaccaatggcatacgtgaccggagcatgacgaaccccgccgatagaatcggtcgttatgaatgaagacatgatgaccgaggcggagcgtgcctcgattgcagccgatggaaccgatagcttgctgggggagcgcggcaagggcgtattccatatccacacgctcggctgccagatgaacgtgcacgattccgagcgcatcgccggcgtgctggaggccaatggctacgtccctgcaaccgaggaccagatcaatgacaatgacctcgatctgctggtgctcaatacctgtgcggtacgcgagaacgcagccgaacgcatgtatggcaccatcggccgattcaatcgcgtcaaactggttcggccgaacctgcagatcgccgttggcggctgcatggcccagcttgaccgcaagaagatcgcggatactgcgccatgggtttccgcggtgttcggtaccaagaacatcgaagatctgcccaagctattggatcagaatcgtgcgaccggcaaggcgcaggtccaggtcactgaacaattgcggcagttcccgagccagcttcccgccgcccgcgcctcccgcatcagctcgtgggtggcgatttccgtgggctgcaataacacctgcacgttctgtatcgtgcccaccacgcgaggcaaggaaaaggaccgccgccccggtgacattcttgatgagattcgccaatgtgtggccgatggtgccaaggaggttacgcttctcggccagaacgtgaactcgtttggttatggtattggcgatcgatacgctttcagcaagctgttgcgcgcctgcggaaccatcgacggtctcgaacgtgtgcgcttcacttcgccgcacccggccgccttcaccgatgatgtgattgcagccatggccgaaacgccgaatatcatgcatcaactgcacttcccgctgcagtccggttccgaccgcatcctgcgcgcgatgcgccgctcctacaggtccgccaagttcctcgatatcttgggccgcatccgcgaggccatgcccgacgcacagatttccaccgatatcatcgtcggattccccggcgaaaccgaggaggacttccagcagaccatggacgtggtgcgccaggcgcgcttctcctcggcgttcacgttcatctactcgccacgccccggcacgccggccgccgcaatggaacagattccgcgcgacgtggtgcaggaccggttcgaccgactggtggcgttgcaggagcagatcaccgaagagaacctcgccacattcgagggccgcgacgtcgaagtgatgatcaccggcaaactcggcaagaaggacaccgacacccaccgtgtcaccggccgcgagaaaaccggcgtgctggtgcacatcggcgtgcctgaaggcgaaccggtacctgaaatcggcgatttcgtcacggtcaccgtcacacacgccggccgccataatctgcttgccgaccccgatgtggccgctggacagacctattccgtgcgacactgagggggcgtatatgacgcagcgagtcgtctccatcgtcggtcctaccgcgtctggcaagacggggttgggcgtcgccatcgcccggcgtcttgccgaagtgggggagcgggccgaaatcgtgaacgcggacgcctaccagatgtaccgtggcatggatatcggcaccgccaaacccaccgccgaagaacaggcggccgtgccgcatcatctcatcgacatcatcgaccccgaagacacgatgagcgtggcccgattccagcagcttgcgcgcgagaccatcgccgacctgcaatcacgtggcatccggccgattctcgtcggcggctccggcttgtacgccagagcggccatcgatgacatcaccttccccggcaccgatcccgacgtgcgcacacgtcttgaggaacgcgagaaaaccgagggtgccggtgctttgttcgacgagctgcgggccaaagaccccgaggccgccgcgcgcatggacccacgcaacccacgccgcaccatccgtgcgctggaagtcatcgagcttaccggcaaaccgtattcggccagcctgccgcgctaccggtacgtgattccgtccgtacagatcggactcgacctggaccgcccggatttggaccatcgcatcgacctgcgcaccaagcagatgtatgacgatgggttcatcgaagaagtcgaacggctgcgcccgcatctgggtgccaccgccgtacgcgcgctcggctatcagcagatcatcgacctgctggacggtatctgggatgtgaacgacgccttcacggacatcgcacagaaaaccaagcgactcgcccgcaaacagatgggatggttcggccgtgacccgcgcatccactggctgcaggccctgaacccgaaactggtcgacaacgcgatggccattatcgcgcacgccgacgccggcgactacgacccgatcgacgcccgagccgacgaatacacccagcatcatctgggcgatatcacggcgtaggaatcagccaaaggccggtgcaatcacccgcaatcagtgtgcaggcccctgattccagccggcgatcaagaacacgcgcgtcggattcgccgggcgtagtatcgcgtcgaacatcgtctccagtgcagacgtgtcgccccgatatgccgagtgcttggcggagcgatactcctcgcgcgtcactgagccccagtcgagatcccagccggcgtcatgcgccaagcgtgaaccgaatatacgcagcaccatcgcattgccgccacggaacggatgcagataaccgagctcatcataaatagaagcgaacgcgtgaacgaacacgtcgcgatccaacgcatgcaggttgcgcttgtccgccaactccatcgcgatgttgtgcgcgccggtctcaatgagcccagccgggaagaacgcctccggattcgcggcccgagcccggtcgttcgtcacctcgcgtgtggtgtttgaggtacgcaacttgcccgcatcctcgaacacgccttcgaacagccccttatgaatggcggtcaactcgtccaagtcgccagacggattccaccgacgttccgccaacaatacggtacgtgcgaacaccgcatccgcgcgatccgtggcatgatcatccagactgccggcagccagacgatcctttccggcagggtcggcggcggcgcgcagacgcatggcggtctgctcgtccgccacgtcgatgagatgggtcacgggctccaagccacgttcgtaggcaaccgcggcgcgcatcgttgcctcgcccggcgtcatcgcttccagtgcgcagttcttgagtgcaaatgcgactgcgctcgcacgctctgcgggtgtcatgcaacccatgataaggcatattcgcgctccagcggggaatcgactcggacgaacctcgacgaaccgcggcgaatcggctgtcgggattcgtcaatcgaccatatcgtcacggtgtcgtcaccaaccatgcacccccgtactagtagaatcagacccgatatggcacgaacagcatcctccaacagcaccaaaccccgtaaatccaaagacaacgggtctacccatgatggcgaaaccaaggtccagcccgagcttgacctcgaacctgagccgttgtggaagaagatcctgctcgcgattccgcgcgcgttcggctccggcgtacgcgccgtcaccggcgtcggcgaatacgacccagcctaccgtcgtgacggtttgtgcttcctgctgctcgtgctcgccgtactgttctgcgcgtccgaatggttccgtgtcagcggtccattcggccagctgcttcacgccatcgcggccggtgtgcttggtctgatgagcgtcgtgctgccggtgttgctcgccgccgtggccttccgactcatgcgcaattccggtaaagggtccaataacccgcgtgtggtcaccggttgggtgctgctcatgtggtcgatttgttcgatcatcgacgtggcgatcgccgccgaccacaccggattcgacatcacgattctgcaatccgccggcggcctgttcggcttcttcctcggctcaccgctcgcctggggcctttccaacgtgttcgccatcatcattttcgtggtcgtcggcctgttctccttgctgatgattaccggcacccacgtcaccgatttgccggaggatgcgcgcaaaatcgcagctaaaatccaacgcaaaccgtatgtgccgatgggccaggaggccgacggaagcgccagccagttccccaacgaggtccgtgtgggagataccacactcgcctttgccgacggtgttccctcgcatgacggcaacgacgacggcaacgacaacgatcaggccggcgatgcacggcccagcctgttcgcacgactgttcggccgcaaatccaagaccgaagacgacaaaacccttgacaagtatgctgccgacgatccgttcgaccgtgccgccagccagcatggtgccaccgccgaaaccccggtggtcgatccgatgaccggcgagattaccggtgcgcgaaccattgcatcgtcttcgtgcgacggtcgtccgcacctatccagccctgcgcctgctgccgatgcggatgatggcgacgcttcccgaacccgcgtcatcaccagtggccagaccatcgccatgcccggtgggggagcggtagacgatccgtgggcacccagtgccgcccaggccggtactgtcgcgctcgcaggggcagccggggcgatgggagcggccggggccgccggtgccgcggccgcggcagccgcgaccggagcctacgcaggcgccgatgcggatggcagcggagtcggccagggcgtgcccaatacggacggacagccgaatgccgccgccggcaacggtacagacgacgacgccaataggccgtatcagttgcccgacctgaacctgctgaccaaaggtcagccccatgcgatgcgcaccccggccaacgatcgcgtgatccgggcactgacttccaccttcgaacagttcaacgtggacgccaaagtcgtcggcttcctgcgtggcccttcggtcacccaatatgaggtcgagcttggccccggcgtcaaggtggagaaagtcaccaacctgcagcgcaacatcgcctacgcggtggccagttcggatgtgcgcatcctttcaccgattcccggcaagtccgctatcggcatcgaaatcccgaacgaggatcgcgaaatcgtgcacttgggcgacgtattgcgctccgacaaggccgtgggcgacccgaacccgatgctctccggcatcggcaaggacgtcgaaggccacttcgtgaccgctgacctgaccaagatgccgcacctgctggtggcaggtgccaccggttccggtaagtcgagttttatcaactcgatgctcacttcgatcatcatgcgtgccacgcccgaacaggtgcgtctgatcatggtggatcccaagcgcgtggaactgtccgcctacgcaggcatcccgcacctgctgaccccgatcatcaccgatccgaagaaggccgcacaggccctcgaatgggtggtcaaggagatggatgcacgctactccgacctcgaattcttcggattccgccacgtcaaggacttcaacgaggccgtgcgcgccggcaaggtacatgcgcccgccggctcccagcgcaaggtggccccctatccgtacatcctcgtggtggtcgacgagatggccgaccttatgatggtggccaagaacgatgtggaaagctccatccagcgcatcacccagctggcacgagccgccggtgtgcatctggtgctcgccacccagcgtccgtccgtggacgtggtcaccggtctgatcaaggccaacattccatcccgactggcgttcgccacctcgtccgccaccgattcgcgagtcattctcgacacggtcggtgccgagaccctgattggtcagggcgatgcgctgttcctgccgatgggttccgccaagccgattcgtgtgcagggctcgtgggtgtccgaatccgagattcgcaaggccgtggagttcgtacgcacccagcgcaagccgaagtaccgcgaagacatcgaacagatggccaaggaagctgagaagaaagacagtatggagcctgacgaggagatcggcgacgacatggacgtgctgctgcaggccgccgaactcgtggtcactagccagttcggttccacctccatgctgcagcgcaagctcagggtcggcttcgccaaggccggccgactcatggacttgctcgaatcgcgcggcgtggtcgggccgtccgaaggctcgaaggcccgcgaggtgcttgttcagccgcaggacctgccgcaggtgctcgccttcatccgaggcgaaaccagctcgctcgaagccagcgccccgcaacaacccgaactcggcgaataattcacccatcgacctccctctgatgagggaggtgcccgaaggggcggagggagagaagcgcggacagcatcagcacgaaacctgattcccgaataatagcagtcaatatccagccaccactcactcaaggtaggagtatgggggtaacgtgaacactatggatgagaacacaatggacaagcagtcatcgcccaaatcatcgctgttcgacggatggaacgcgccgccgaacctggtcacctactcgcgcatcgtactcgtggtgattttcctgacactcgacattctcgccggttcctggggtgaggacaacctgatcatgcgttgggtcgccgcggtactgttcatcatcgccgcgtccaccgataaaatcgacggttggatggcccgcaaatacaatcaggtcaccgaaatgggcaagctcatggatccgatcgcggacaagctgctcacttgcggcgcaatgattgtatgctccgcgttcggcgagctcggctggtgggtgaccatcctgttcctgattcgcgaaatcggcatcaccgttatgcgcttcttcgtcatggagcgtccgggcggcaaggtcatcgccgccgcatggcccggcaagctcaagaccgtattccagtgcgtgggtctgtccatgctgctgctgccgttctggtcattgggtaacggacaggccacgccgttctggatgaccgcttactacttcctgacctacgccatcatctacgtggcattggtcctgtgcctctactcgggtgccgtgtacctgtacaacacgttcgtcgccccgaagcggaagtgacggatattccaatgcaggaattgtgcgacagtctcgcggccggcatcctcaagatctgcgaggcgaacaatacgaaaatctcctgcgctgaatccctgaccggtggcctgctcgccgatgcgttcgtgcgtattcccggtgcctccaacgtgttgctgggctccgctgtcacctacgacatcaatgccaaggcctcgatcctacacgtggacaaggccctattggatcgagaaggcgccgtacaccccgaagtcgcccggcagatggccatcggtgccgctcgcctatacagccagccggaatacggcgaccgaatcatcggcctttccaccaccggcgtggccggccccggtccggacggtgataagccggccggactggtgtatgtgggcctgcgcatccccgcaagcctcaccgcggaccatgtcgaagtgctcaaagccgtcgaactccatcttgatggcatgcgcgaagaggttcgtcgcctcaccgtattccacgttctgcaaaacttgagtctattcacagcaagttttaaggaataaaaccgcgggaccgtcgtgttgtacatagtggaaacactgaaccgaccttggaaggggcgatggcgatggaaacgatgacccgagtgaacgaacagatggatgtggccgccaagaagccgatggctgtgcagccgggtgtcgcccgtatgcgtgaactgactccggcccagcgccgtgcggtgatgttcgcccagcagcaggtgctcaaggcgcaggctgccaagaaggccaaggatcagcgtcaagccgttcgtgaacgtatgtgggatgaggattcgccgtcgtacaagccgactgccgccgccgagtccgtggtggttgaggaggagcctcgcgaggtttcgctgcgtggtgctatcggctacgtgctgcgcgaactgcgtacgcgcgatcgccgcacgttgcgtgaggtctccgagaaggcgggcgtttcgctgggctatctttccgaagtcgaacgtgggcagaaggaagccagctccgaactgctgagctccatcgccgatgcgctcggagtctccacttcgcgcatgctgcgcatggtggccgattatctcgactcggtcgagggctgatcggttggcggtgtgaagccgcatcccgtaatctatgtctagctgtgaacccgtatcgcttgtggcgatgcgggtttttgctgtcctgcgggtggtggcacactggcgtgtatgcgtgaacgggaattctgggaattacttgaagaggtgttcggtcggacctacggtcgttcgctgtcacgtgatcaacggatgtccaaattggcgaatatgaccgtggtcgaggcgctggacgcgggggaggagccacgcgtggtctggaatgtgctctgtgaccaaatggaggttccggactccaagcgttggggccacgatcataacgcgccgcccatgcccgccgtctgacactgcgggattacggagtcgctgaatcgtgaaattggcgatttcggcgtgttgcacgccaaattcgaacaaatgttcgtgtgtgtggttatagttatccacagtgacaagaagccgcatacgtgtgcacagggtgcttgtcatccgccataagccttaccgcagtaggtcttagggaggtcagatggccgagctcgggcaagctggaaccacaatggttggtttggattgcctcacatggcatgtccgtcatacggtggaggcatccgattcgcgcacgacttcgacaaggagaagatcatggcacttgagaccaagccggccaaggacccggcagccgaggacaagcacgagctcgatcccaagcgcaaggcggcgctggacaccgcgctggcgcaggttgagaagagctttggcaaaggttccgcaatgcgactgggcgaccagcccgagcagaacgtcgaggtgattcccaccggttcgttggccctcgatatggcgctcggcatcggcggactgcccaagggccgcatcgtggagatctacggccccgaatcatccggtaagaccacgctcgcattgcatgtggtggccaatgcccagaagaagggcggcgtggcggcctacatcgatgccgaacacgcactcgacccggcctacgcccgcaagctcggcgtggacaccgactcactcatcgtctcccagccggataacggcgagcaggccctcgaaatcgccgacatgctgattcgctccggtgcacttgacgtcatcgtcatcgactcggtcgccgccctagtgccgaaggccgaaatcgaaggcgaaatgggagacagccatgttggtttgcaggcccgactcatgagccaggcgctgcgcaagatgaccggcgcgttggctcaggccggcaccaccgccatcttcatcaaccagctgcgtgaaaagatcggcgtgttcttcggcaatcccgaaaccaccaccggcggcaaggccctgaagttctatgcctctgtgcgtctcgacattcgtcgtattcaaaccctgaagaatggcgacgaagcggtgggcaaccgcacgcgcgtcaaggtggtcaagaacaagatggccccgcctttcaagtccgccgaattcgacatgctctacggtgaaggcatttcccgtgagggctcggtaatcgacatggctcagcaggttggcgtggtcaagaagtccggttcgtggttcacctatgagggtgatcagctcggtcagggacgcgagaaggttcgtcagttccttaaggacaacccggccatcaccgaggagattgagaataaggtcaaggccgagttcggtctgatcggttccgccgaccagttcgcggaagatggcgaagccgcagcagcggccgctgtcagcgaggccgccgctgccgacgtggccaaggacagcaaggccgcagcggcgcctgctgccaaaacgacccgtgccaaggccggcgcagctaaggcctgaacatgattagtgccgaagcattcttgcggcgcaatcctgttgcgtcgcaagacatgcccattgccgagcagcgtgttcagtcgaaaccgccgggacgtttttctcgacgggggagagacgctgccgttgtcgaagatcccaatgatttggacgcttgccgcgaggctgcattgcgtttgctggacgcggccccgcgtgcatccggcgcgttgcgcgaacgattgctcagcaaaggctatggcgaggcgattgtggacgaggtcattgaacggctgattcgcgtgcaactgattgacgaccgcgcttatgccgaatcggccgtacgctattgtgccggtcgcatgatgggtcgtcgtggtgcggtcctggaacttgctcgcaaaggcgtggaccgcaaactggctgaacaggtgtgtggcgaagctgagcaaaatggcatctttgaagatgccgcatgggaattgggccgccaaatagcccgcaaaacccatggcctcgatcgtcaggtccgtcagcgtcggttttggtccgcaggcggccgcaaaggacacagccccgaaaccctccgccgagtcgccgccgaattgttggtgtagccaagaaaaaaatgagacctcttataccccgggttctgtcgtgccgtgcacgaacgcacggcacggatggccatccatctcgacctgacgttgccgccaggctctagcagcctacccgatgacacgggcgagcagcccttaccgccatctgcttggccttgctcccgatgaggcttgccatgcgacctactgttaccagaggcccggtggtctcttacaccgccgtttcacccttacccgtcgaggacgggcggtctgttctctgttgcgctatctctcaggtcaccctgggcggacgttatccgccatcgtgctctatggagcccggaagttcctcagccgatcccaatgaagatcacggccgcggccatcaagaggtctcaagcctgcaattatacataaggtgcggaaaaggcggcatcccgccctgcggtgaggccatgacgttgcccagttatcctgttttctccatagttgggcgtagttgggcgattcgtgaacgacgcgccgaatatcggatggggcgtgtcgggcgtgttgtggcgtgtcgtatggagacgaatcaaatctgtaagagcttggtatgtgcgagaaagagcaagaaaacgttgcctatccattgcagtatttaccatgacgaacaaacgagccagcctgataaaccggtatcaaatcttcttataggagactgctgccaaaaccccagtatatacatcgtttcattgcagagaaaagcccggagataaacatatattctctgggcgagtttccggccgttcacccattgttcgtctacaatgaaacatacccggtcggtgatgatgccgttcggaacacatatagcgggttacaccgcttgagttagaggaggtcaacatggaaatcgtcgttaccggacgccacacgcaggtcaagcaaaggttccgtgatgtggtcgagaccaagatgaatcgtgtgaccgctatcgccccggatgctcagcgcgcgcagattgtgctgacccatgagggcaacccgcgtcaggccgataccgccaagcgcgtggaaatcaccgttatcgccggacgtaccgtggtgcgtgcggaggcttccagcaccgatgaattcagcgcgctggacatggcgctggataagttgacgctgcgtctgcgtcgtactcgtgaccgtcgcaaggatcaccgtcgtggttacgcgaacccggtcccggtggatctgggtgttatcgccccggagcccgagccggaggagtcggacgaagagccgaacaacagcccgcaggctgcggtcgcctccgatcttggccctggcgaatccgtggaggtccaggttggggatacgccgattgtcatccgtcgcaagctgcacatcgccgagcctatgagcatcgacgaggcgctgtacgagatggaactgatcggacacgacttcttcctgttcgtgaacaaggagaccggacgcccgtccgtcgtctaccaccgtcacggttggagctacggcgtgttcgaaatcgatactccggagaacgtcaagaaggcctgaagataaggcctgctgacacgatcagctgataccgcatggaccgcttccaatatggaggcggtccattttttcgtaagaaggtcgaaaaattcgactgctgacggtgcgaggcgctattctggtacgcggacaccaccacttatcagtcaagggagaacccagtggtcgatattgttgacaaagccctgcgaatgggtgaaggccaccagctcaagaagctggagaacgtggccaaggccgtgaacgctctggaggatgagatctccgccctctctgacgaggatctgaaggcccaaaccccgaagttcaagcaggaaatcgaaaacggcaagagcctggacgatatcatgcccgaggcgttcgccaccgtgcgcgaggtctccaagcgcacccttggccagcgtcacttcgacgtgcagctcatgggcggtgccgccctacactggggcaacatcgccgaaatgaagaccggtgaaggcaagaccttggtcgccaccctgcccacctatctgaacgccctcgaaggcaagggcgtgcacgtggtcaccgtcaacgactaccttgccagctaccagagcgagctgatgggccgtatctaccgtttcctcggcatgaacgtcggctgcatcatcaccgagcagaagccgccggagcgccgcaagcagtacaacgccgacatcacctatggcaccaacaacgagttcggcttcgactacctgcgtgacaacatggcctgggagaaggccgacctcgtgcagcgtggtcaccactacgccatcgtcgatgaggtcgattccatcctcatcgatgaggcccgtaccccgcttatcatctccggcccggccgaaggcgacgtgacccgctggtaccgtcagttcgccaagctggtgctgaagctcacccgcgacgaggactacgacgtcgacgagaagaagaaggtcgtcggcatcctggacccgggcatcaccaaggtcgaggacttcctcggcatcgacaacctgtatgagccggccaacaccgccctgatcggctacctcaacaacgccatcaaggccaaggaactgttcctgcgtgacaaggactacgtcgtcacccaaggcgaggtgctcatcgtcgacgagcacaccggtcgtatcctgccgggccgccgctacaacgagggcctgcaccaggccatcgaagccaaggaaggcgtggaggtcaaggccgagaaccagaccttcgccaccatcaccttgcagaactacttccgtatgtacgacaagctcgcgggcatgaccggtacggccgaaaccgaggccgccgagttcatgaacacctacaagctgggcgtgctgccgatcaagaccaacaagccgatgatccgcaaggaccaggacgacctcatctaccgcaccaagaaggagaagctggccgccatcgtcaaggacgtggccaagcgacacgccgagggccagccggtgctgctcggcaccgcctccgtggaaagctccgaagtggtctccgccctgctcgacgtggcgaagatcccacaccaggtcctgaacgccaagcagcacgagaaggaagccgccgtggtcgccgtcgccggccgcaagggcgccgtcaccgtggccaccaacatggccggccgtggtaccgacatcatgctcggcggcaacgtcgagttccttgccgacgccaaactgaagtccgagggctactctccggaggacaccccggaggagtatgagaagcgttggccgggcaccctgaacgagatcaaggcccaggtcaaggacgagcatgaggaggtcaaggagctgggcggcctgtatgtgctcggcaccgaacgccacgagtcccgtcgaatcgacaaccagttgcgcggtcgttccggccgccagggcgacccgggtgaatcccgcttctacctgtcgctggaagatgacctgatgcgtctgttcaacacccagctggtggctcaggtcatggccaagggcatggaggaaggccagccgatcgaggccaagtccgtcaccaagggcgtgcgcaccgcgcagaaggccgtcgaatcccgtaactatgagattcgcaagaacgtgttgaagtatgacgacgtgatgaacaagcagcgcacggtcatctactccgagcgtcaggccgtgctcaagggcgaagacatccacaaggacatcctgcgtttcatttccgacaccgtcgagtcctacatcaagggtgccaacaagggatccgagaaaccgaaggactgggattgggagggcctgttcaaggcgctcaacaccgtgatccccaccaaggtcgacgaagacgaggtcaggaagatcgtcggcggcctcaagggtgcgaaggccgtcgaggccgtgcgcgacctgatcgtcgaggacgccaggcagcagtacggcgaaatggaggagaccatcggcgagaccggcttgcgcgatctcgaacgccgcgtggtgctcgccgtgctcgaccgcaagtggcgcgagcacctttacgagatggattacctcaaggacggcatcggcctgcgtggcatgggccagcgcgacccgctggtcgaataccagcgcgaaggctaccagatgtacaactccatgatcgaggccattaaggaggagaccgtccagctgctgttccacatcgacatcaagcaggtcgccaccaccgacgaggccgttgacgaggtcgaggagaccgccgaaagcgccgacaccatcgccgtggcctccggccccgacgagaacggcgaatccgtggtcgaggctgccgagggcgaagtcgaggaagaggacgaggatacggacgccaagcaggcgatcgccgaatccgcagccgcctccggggccggcgagtccacgctgcctgttgccggaccggctccgatcagccacgccgaaggcaaggtcccggtttccaagcgtccgaagagcgaagagctcaagacgccgtgggccgacggccgcaccttccctggcactggcaagaacgccccgtgcccgtgcggttccggccgcaagtacaagatgtgccacggccagaacgagaagtgacgcatcgctagttagtaactagctcatggctccccacacggggagccattttctatgcggttcatcagcatgtattcgtgcggtgtcgtacgcgcgggacggcacgcgattttcgcggattttgacgtcgtatcccacactgttgcgggatggcacgagtgtcaatcgattgactagcgtggcgtcccgcagtacgaattacggaatcgttgaaattccgccattcttggtgttatggtgtcacggtccgcaaagggtgatgtgggacggcacggctcaaacggcgaaaatgagctgccgtcccgcagttttacgggatagcacaaaaaagaggcttctgctgttttcgtgggttgggttcttggttgtggtgggcgtatgtcgagtccgccgcggcggagcatgacgagggcgatgggattgttcgcgtggtggaagccgtaggccatgcggatggtgaccttgatcctgttgtcggacgcctcgagcctggcgtttgaacagcccaattcgattgtcccgaggatgtcgggcccatga

SEQ ID NO: 1340 - DNA, 5202 bp, Unknown
  R157_18m  MAG No. k141_18748
cgcacgcgcttgtacttgccgcaggcgcactcccagtcacgggtcgggccgaagatctgttcgccgaacagaccgtccttctcaggcttcagcgtacggtagttgatggtttcaggcttcttgacctcaccgtggctccaaccacggatgtcatcggcggtggcaaggccgatgcgaatcttgtcaaatgcgttgacgtccagcacttgttaatccgtttctgttcttgagaccttcccaagctccccttgtcaggggagctgtcagccaaggctgactgaggggtagtgcaaaccggaaaggtctctgtacgttatctatttcacgttggcggggctacacgcggcgtattgaccgcatgcagcccgagggatcactggtattcgggctcttcggccttctggtcttccttggcggccgcgtcggggcgggcgccaatgttgaagccgaggtcgtcagcggagctggccggatcgtcatcctcatccttcatgtcgatggccacgccttcggcgttgagcacttcgacgttcagggacagggactgcatttccttcaggagcaccttgaacgattcggggatgccggccggcggcaggttgtcgcccttgacgatggcaccgtagacgcgcacgcggccgtcgacgtcatcggacttggtggtcatcatctcgtgcagcgtgtaggcggcaccgtaggcctcaagggcccacacctccatctcgccgaagcgctggccaccgaactgggccttaccaccgagcggctgctgggtgatcatggagtacgggccggtggaacgagcgtgaatcttgtcgtcgaccaggtggtgcagcttcaacatgtacatgtagccaacggagatcggcttggtgtacggctcaccggtacggccatcgaacagggtggccttgccgtcggggccgaccagacggtcgccgtcacgattcggcagcgtggtggacagcagacccttcaggacctcaggcttgacaccgtcgaacaccggggtggcgaccggggtgttcggctcggccttctcggcaccggacggaatcagcttcttccactcggcttccagattcggatccaaagagatgtcccaaccggagtgggcgatccagccgaggtgcagttcgagcacctgaccgaggttcattcgggaaggcacacccagcgggttcaacatgatgtcgaccggagtaccgtcggcaaggaacggcatatcctcttccggcaggatgcgggagatgcagcccttgttgccgtggcggccggagagcttgtcgcccaccgtgatcttacggtgctgggcgatgtagacgcgaatcatctggttgacgccgttgggcagctcgtcaccgtcctcctcggcatcctcgcgggtgatctccttgacgccgatgacggtaccggtctcgccgtgaggcacgcgcagggaggtgtcgcgcacctcgcgggacttctcgccgaagatggcgcgcagcaggcgctcctccggggtcagctcggtctcgcccttcggggtgaccttaccgaccaggatgtcgccggcctcgacctcggcgccgatgcggatgatgccgcgctcgtcgaggttggccacagcgtcctcgccgacgttcggcaagtcgcgggtgatctcttcggcgcccagcttggtttcgcgggcgtcgatctcgtactcctcgatgtggatggaggagagggtgtcgtcctgcacgaggcgctgggagatgatcacagcatcctcgtagttgtagccgttccacggcatgaaggcgatgagcaggttcttgcccagggccaggtcgcccttctggatggcaggaccatcggccagcaccgagccggcctccacacgctcgccatcatggatgatcgggcgctggttgtagcaggtggtctggttggaacgctggaacttggccagcttgtaggagctggtggtgccgtcgtcgttcatcacgcgaatcaggtcggcggacacgtaggtgaccacaccgtccttctcggacttgatgacgtcgccggaatcgttggcggcgcgccattcggagccggtgcccaccagtgggcgctcggattcgatcagcggcactgcctgacgctgcatgttggtacccatcagtgcacggtggccctcatcatgctccaggaacggaatcagggaggcaccgagggagaccatctgacgcggggagacgtccatgtaatccacggagctcaccggcacatcgactgcctcttcctcgccgactcgggcaagggcggacttggagacgaagttgccgttctcgtcaagctcctggttggcctgggcgatgacgtggtcgagatcacggtcagcggtcatgtactcgacctcgtcggtcacgtggccgttgacgaccttgcggtacggggtctcgatgaagccgaacgggttgacgcggccgaaggtcgccagggagccgatcagaccgatgttcgggccttcaggagactcgatcgggcacatacggccgaagtgggacgggtgcacgtcgcgcacttccatggaggcgcggtcgcgggacagaccgccggggcccagtgcggaaagacgacgcttgttcgtcacaccggacagtgggttgttctgatccatgaactgggagagctgggaagtgccgaagaactccttgatggtggcgttcaccgggcggatgttgatcagggactgcggggtgatggcctcggcgtcctgagtggtcatgcgctcgcgcaccacgcgctccatacggctcagaccggtacgcagctggttctggatcagctcgccgacttggcggatacgacggttgccgaagtgatcgatatcgtcgacgtccacgcgcaggtcaacgtcttcgccattgcgcttgcccgggaaggtcgccgcaccgtcgtgcagggccaccagatacttgatcgtggcgatgatgtcttcctggtggagggaacggtcgttgaaatcggcctcgacacccagcttgcggttgatcttgtagcggccgacgcgggccagatcgtagcgcttggtgttgaagtagaaggagtccagcaggttcttgccggcctcgggggtcggggtgtcggccggacgaatcttgcggtagaggtcgacgagggcctcgtcctgggtctcgagggtttccttctccagggcgtcgagcaccagcgggtagtccttgaaggcctgggcgatctcggacttggtcatgccgatggccatgaggaacacgatggcggactgcttgcgcttgcggtccacgcgcacctgcggctggtccttcttgtcgatctcgaactcgagccatgcaccgcggctcgggatgatcttcgcgccgaagacttccttatcggaggtgcggtcctgctggcggtcgaagtagacgcccggggaacgcacgagctgggagacgatgactcgctcggtaccgccgatgatgaaggtgccgtgcggggtctgcagcgggaagtcgcccatgaacacggtctgggacttgatctcgccggtgtcgccgttctcgaattcggcgttcacgtacagcggagcggagtaggtgtaatccttctccttgcactcctgcacggtgtggcgcggctcctcgaagtacgggtccgagaaggtcagggacatggtctgtgcaaagttctcgatcggggagatctcgttgaagacctcgtcgagaccggaggtgtgggccacggtgttggtgccgttagcctcatcctcttcgacacgcttcttccagcggtcggaaccgatcagccaatcgaagctgtcggtctgtacgcccagcaggtagggcacatcgatgggttccttgatggaaccgaagttcacgcgatccgacgccttgtgcagatcaatgtcatgctggtcggcgcgtgcgatgatggtggtggtgttcgtcgtagactcagtagccaatggacgttccttatcgctcgctaatatgtggtaattcccctgggagcgccggcatggccaccatatgcctatgcggacgcttcattgtcgacggcatgcccgcaatatgacacacctcatgcaaagtcaaaagaatactgatatgcgaggacatttttagctcccgctgacgagggagctgtcgagcggagcgagactgagggagagacccagcgtccaaacaccaaccgcaggtcctaccccaccgtaaacgtcaccggatcgctcttcaccttcggatgatccttcaaactcagctgcgccacgtacgttcccgcattgaccttggcccaacccgactcatccgtgcattcggtgagcgtggcgttcgcatcggtattccacgtgaccttctgaacgtccttatcacccttggacatcagcagcagacgtgaatccgccggacacacatcggacttgtaaatcgtttcctgaccggaagtaatggtgagcacacggccggaatcggccccgtccaccaaacagttgcctgacccctcgtgcacgatggtcgcggtgaaatcaagcgatcctcctaccggcacggattgggaggccgcggaaagctgcaatgtcacatcactggccgagcaatccttgacgttgctgactttcttcggagccggcgtggcgtcgcgggaaatcgcatacacctcgtcatggtgaatcatcgtgttcacggcaccgataccccggccaaggctgtacacgcagaatacaatcagcgcgattatcagcagcaacaccgtgccggccacgatacgccgacgacgatagatggcctgctgctttttgctgatcctgcgcttgcgcggcttgccggaacggtcgtttcgggcgggcccgccggatggcccattggccccggtgccggctccgcgtgccgttctcgcgcctgatgtgttcctctgcactgccataacccttccagtctacggtcaccacacccatacacgcttggggagcccgccattttcacaatgtcagctgggtaatcgcaggccgccgtccagaatctcgatcaggccgtcatcgtcaaggctggcgatgcaggcggcaagctgaatctggtccttccaaagcttgtcggcatcttccctgggcaacgtgactccagcgggaagctcgcgcagcgcggcgagcaccagaccgcgcacctgtcgatccgtgccttggaatcgttggcgtgggcgggtgcgacgctcccccagtccggggcggccggc

SEQ ID NO: 1341 - DNA, 13179 bp, Unknown
  R157_18m  MAG No. k141_19264
aacggctacctcaaggtcgacgcggacaccgccgtgaagaacctcaccaaggcgctttccaccggtgtgctcaagatcatgtccaagatgggcgtctccaccatcatgagctaccgtggcgcacagctgttcgaggctgtgggcctgagccaggaagtcatcgacgaatacttcaccggcaccacctcccgtgtgggtggcgtgggccttgacgagatcgccgaagaagtggccatccgtcaccgcgtggcctacccgaaccagtggagcgcatccccgcaccgcaacctgcgcacgggcggcgactacaagtggcgtcgtaccggcgaggaccacctcaacgatcccgaggccatcttcctgctccagcagtcgacccaccgtggcgactaccagatgttcaagaagtattcgcaccacatcaacgacacgtcgaaccgtctcatgaccctgcgtggcctgatgaagttcaacaacaaccgcaagccaatcgacatctccgaagtcgagccggcctccgagattgtcaagcgcttctccaccggtgccatgagctacggttccatctcacaggaagcgcacgagacgcttgccatcgccatgaattcgattggcgcacgctccaactccggtgagggcggcgaatccgacgatcgtatcaacgacccgcagcgctacagccgcatcaagcagatcgcgtccgctcgcttcggcgtgacctccgattacctcgtgcacgccaccgacctgcagatcaagctcgcccagggcgccaagcccggtgagggtggccacctgcccggtgccaaggtcccgccgtggatcgccaaggtccgtcacgccaccccgggcgtggagcttatctccccgccgccgcaccacgacatctactccatcgaggatctgaagcagctgatcaacgatgcgaagatggccaacccgaaggcacgtatccacgtcaagctcgtttccgagttcggcgtcggcaccatcgcggccggtgtggccaagtgccatgccgacgtggtgcttatctccggctatgacggcggtacgggtgcagccccgctcaacgccatcaagcacgccggcaccccgtgggagatcggcctgtccgaaacccagcagacgctgatcctgaacggcctgcgctcccgcatcgtcgtacagtgcgacggcgagctcaagaccggtcgtgacgtggtcatcgccgccctgcttggtgccgaggaattcggcttcgctactgcggccctgatcgtggaaggctgcgtcatgatgcgcgcctgccagaagaacacctgcccgcagggcattgccacccaggatcctgagctgcgcgcccgctttaagggcaagcccgagtacgtggtcaacttcttcatgttcatcgctgaggaggtgcgcgagatcctcgcccagctcggcttcaggactcttgaggaggccatcggccacgttgagtgtttggatcaggacgaggccatcaagcgctggaagtccggcggcatcgacctgaccaacgtgctcaagcaggccggcccggtacccggcacgatcctgcaccagaccatcgagcagaaccacgagctggagaaggcactggacaacaagctcatcgaacttgcccagccggccctcgaacacaaggaacccgtgcgcatcgaaatgccgattcgcaacgtcaaccgtacggtcggcaccatggtcggctacgagatcacccgccgttacggcgaggaaggtctgccggacgacaccatcgacatgaccctgcacggttccggaggccagtccatcggcgcgttcatcccgcgcggcgagaccatgcgcatctacggtgaagtcaacgactacgccggcaagggcctgtccggcggtcgcatgatcgtgcgcccggaagacaccgtcaccttcgacaagcacagcaacgtcatcgccggcaatgtcaccggtttcggcgccacttccggccagatgttcgtagccggtcgcgccggcgaacgtttcggcgttcgtaacggcggtgccacgttcgtggtcgaaggcgtgggcgaccacggctgcgagtacatgaccggcggcactgttgtggtgctcggccccaccggacgcaacttcggtgcaggcttctccggcggtaacacttatgtgcttgacctcgatatgaagaaggtcaacccgggtgccatcaagtccggtgcactgctcttcaagtcgcttgatgccgaaacctccaagctggtgtacgcactggtcaagcagcatgccgaagagaccggttcccagttcgccgcggccctgctggaggactggaacgaaaccgtcaagcggttcacgcacgtagtgccgaagcagttcgtggccatgacgaaggccatggaagaagccaaggccaacaatgtagatttcaatgcgcccggcgcctgggaaaaggtgtacgagcaggttatggaaggagcgcgctgacatgggcgacccgagaggattcctgaaggtccgtacccgccgagagctggctgaacgccccgttgaggagcgtatcaaggactggttcgacgttcacgccgaaaccggcctgcaaccgtggacccaaacgcaggcggcccgctgcatggattgtggcaccccgttctgcatgaccggatgcccgctgggtaacctgattcccgagtggaacgacttggtccgtcagggcaagtgggaagacgcctacaaccgtctgtccatgaccaacaacttccccgaagtcaccggccgcatctgcccggccctgtgcgagcaggcctgcgtgctcggcatccaccagccgccgaccatgatcaagcttgacgagcagaccatcattgaccaggcatgggatttggactacgtcaagccgctgccgccgcagcgtctgaccgaccagacggtcgccgtcgtcggctctggccctgccggcctcgccgccgcacagcagctcacccgcgccggccacaccgtcgtcgtctacgagaaggacgacgccatcggtggtctgatgcgttacggcatcccgaacttcaagcttgagaagggtctgcttgaccgccgtgtcaagcagatggaggccgaaggcacccgcttccgcaccaacgtggaaatcggcaaggacatcacgtgggatgacctgcgtgaccgttacgacgccgtcgtagtggccatcggctcccgcgtgccgcgcgatatgaagattccgggccgcgagctcgacggcatccacttcgccctcgacttcctgcccgacgccacgcgccgtatcttcggcgtcaagccggtgcacgacatcaccgccaaggacaagcacgtcatcgtcatcggcggtggcgacaccggttccgactgcctcggcacctcgatccgtcagggtgcgaaggacgtcaccgtgctacagatcatgccgaaagagccgtcaagccgtccggacaacagcccgtggccgaccttcgcccgcacctaccagaagacctcctccatggaagagggcggcgagtacatctactccaccgactccgtgaacttcgagggcaccgaagaggagaaggccaaggtcaccatcgacaactcgaccaccgccgaaggcttcgtggccgatgagcgtggtcatgtcaccggcttgaaggtcgtctccgtggctcccggcgaaaatggtccgttcactcgccagcctggcaccgagcgcgtgctgcccgccgatctggtcctcatctccgtgggcttcctgcatccggacaccgagaccatcctcgaccagctgcccgtcgaactcgacaagcgtggcaacatcgctcgcaatgacaagttcgccacctcccaggatggcgtgttcgtgtgcggcgatgccggccgtggccagagcctcgtggtctgggccatcgccgaaggccgctcctgcgccgcagccgtggacgagtacctctccaaggaaaagagcgagctgccggccccgatcaaggccagccagcgtccgatgatgctgcctcgctgaatactgttccaaacagaaacatgaaaatcccttcttcatgaggggatttttgcgtttctgggattaattactgccttgagtcttcagtaatgtttatatttcgagaatattgcatacatggttaacatgaagctcctatggtgtctttcgtcgccaaaaagacgacgccagaatatttgggagagattcatgaacacacgtcatgtcacttcactggtcgcggccggtgcggcaatcgtcatgctgctcagcggctgcggatcgaccggtacctccaattccagcaatgcttcagattccaatatcatttccgtgtacggcagtgagccggcacacccactattccccggcaacaccactgaggccggtggcggcaaggttgtagaccagctgttcgcaggtctggtgacctacgatgcgaagggcggcatccacaacgaggtagcagacagcatcacctccagcgacaacgccacgcattacgtcatcaagctcaagagcggatggaagttcaccgacggcactccggtgaccgcgcactccttcgtaaacgcatggaattacaccgccaacagtgccaacaagcaggccagcgccagcttcttcagcacaatcgaaggctatgatgatctgcaaaagccggacgtggaccccaaggccacgctgagcggcctgaccgtcgttgacgacaacaccatcgatgtcaagctcagccagcccgactcggcattcccggtcaaggccggcagccacgcctacatgccgttgcccgaatccgcgttcaaggacccgaagaagttcggtcagcacccagtgagcaacggcccatacaagttcgtgtcctggcagcacaaccacagcatcgaaatggtgaagaaccctgactacaagggcaatcgtgtcgccaagaacgatggcctgaacttcaagatctatacctcgcctgattcggcatacgccgacctacgcggtggcaacctggacttcacgaacacgattcctgacaccgcacttacctccttccaatccgacaagtcgctgaaggcatacaacgagcccggtggcaatacgctcaccttcaccattcctgaatggctggaacacttcggccagaacgaggaaggcaacctgcgtcgtcaggccatttccatgtccatcgaccgcaagaccgtcgccgagaagatcttccacggcaccgccacgcccgccgtcgacttccttgcagccccaatcagcgcctactccaaggaactcaagggaaatgaagtactgaagtacaacccgtccaaggccaaggaactgtgggccaaggccaacgccatctccccgtggagcggtgagttcggcattgcatacaatgctgatggcactgcgaagaactgggttgaggcaatctgcaactacatcaagaacacgctggatatcgatgccaagagcatcccgatgtccacttccgacgaattcctgtccaatgtggattcaggcaagatgacctccgcataccgtagcggttggggccctgattatccatccgcggacaactatctggtacagctgtacgattccagttcggccgacggcaagggcggcaacagcggcaactacaagaaccccgagttcgatgccatgatggacaaggctctttccgccccgtccaccgaggaagccgacaagtattatcagcaaggtgaggagattctgctgcaggaccttccggctatcccgttgtggaaccagaatgccaccgcagccagcacctccgcagtctccggcgtcgcattcgactacggcggcggtccagtgttcaccgcactgaccaagaagcagtaagcagtaagtaataaacagacagcgctagcccccccgctggcgggggctgtcggcaaagccgactgggggtggtctcaaacagcagaccacccctaatcttgttatatgagcgagctcccgtaagcgggagcaatcgagaacatacaggagcacattaactatggaattcaccgtatccggcactaccgtgcgattcgatgaacgaacaatgcagttcgcttttacgcgcgacggtgccgaatggaatacctgcgctgatttcaagccgaccctgcaatgcgcgcaaggcaccttcgcgttcgcggatgccacttccatcacccatgagcagcgtgaaaccggcacgggaaccggcattcgcagcatcttcaccggctttgggcacagcgcatactcctttgaaacctatgtatgggtggagcgtgcctcaggcgatgtgctcttcgaatggattccgctcaatgagcaaggcctgaacatcaccaatgtgacgtggcccgcagccatggacttcgattgcgccgatgaccatgacacgacactcatcacccatgagcaaggtgtgatgatccccaacacatggcctaccgccgtgagcaccaaagatatcgccttcgacggccgcttcgaaacggctggcggttacatgccgtggttcgcgcagctccgcgcagacggacacgggtatatcgccatctgcgaaactccatggaatgccggttacggcatcgaccatcccagcgatggctcgtacacccatatcaatacttggtttgagccaagcctcggcacaatgaattatcgccgcgtggtacgctaccagttcctcgaccacaccgatcacacggcggtgtgcaaggcctatcgttcgtacgtcaatgaacgaggtcgtttgcgtacgctcgtcgaaaaggcggcgcgcaatccctccgtgcgtgacctgattggtcgttcatgggtgcacatcggcatcaaaaccaaagtacagcccgactcgtactactacgataaggaccaccccgagaaaaacgagtcactggtcaccttcgcacagcgcgaaaagcaaatgcgaacattgcacagcatgggtgcaggccgactgtacatgcacttggatggttgggcacagcccggatacgacaacgcacaccccgactatctgccggcttgtcaggaggcaggcggctgggaaggcatgaagtcgctggtcgacgcctgccatgagcaaggcgatattttcggcacgcatgaccagtaccgcgattactacttcaccgcgcaaacctttgatgccaacaatgcgattcggctggcagacggtacgatgcccgaacacgcacgctgggcgggcggccgccagacctacctgtgcgccgagctcgcaccggactacgtgcgccgcaatttcgccgaaatcgccgcgcatggcatcaagctcgactgtgcatacttggatgtcttcacctgcaacgaaggcgacgaatgctcgaaccccgaacaccgcatgacccgccgcgaatgctttgaccgccgcgctgaatgcttcgaatatctgctctcgcacggcatcctctcctcgtccgaagaggtatcggactgggcagtgccaagcctgatattctgccattacgcgccatacgacttccagatgcgctcacccaacgagccgcgccaaggtgtgccggtgccgctgtataacctcgtctaccatgattgcgttatcgagccgtggatgatggagcgtgtggtggacggcgacgattacatgctgtacgccttgctcaatggcggagctccatacctgattcgcgatgccgcatacatcggcgttgacggcgacatggacgacgaacagcgcgctcgcaccgaaaacgacatcgaacgctgccatacggtcgctgcattccatgagcgggtcggcatgcaggaactggttcgtcacgagttcgtggatgatgatccgctggtgcagcgttcggtattcgcggacggcactgcggtcacttgcgacttccatacgcaaacctatcgcatcaccgactgcccgcatcactgactgaaaatacaatgacacacagtgggttccgatggactggtggcaaattgccgccgataagcgagtaatatagccaacagtgtcaccgtcgaaacaggagtagtggaatgccgaatcgtgcagaacgccgtgcccaagccaaagcaggccgcaggggagtgccgtcgcagtatgaccagacccgtggccgtggccgttcgggaatgattgacgaataccagctgcagcagaagtcccagcgtctgcaggacggcaccgacggcaccgaatggaagcccagcggcggtacgattgcggacaccgaaaccctgctgaccactaacccgaactacacgaatccgaactacacgaatccgaagatgttcaaggcaccgcattcgttgcgtcagtggttccgcgtgggcagctggacgctgattgccatcgcgattatcgcgttcttcgtggttatgtggctgccaagccatccgatgtggctgatcatcaccgtttccgcggtgttcattgtgggtgtgctgagcctgttcttcacggctggcgattccaagcataatccgaatttggatcagaacggcacggccgtctgatttttttgcctggtaaatccggcttgaaaagcaaaacgcacgacggaagttgtgcgttttcttgtatgcggtgccctaaagtaagaagtgcttgagtttctttctgacgcacgaaggagaggcagtccgatgaaagttgatattctaacccgcgaatacccgccgcatgtgtatggcggtgccggcgtacacgccgaggaactgtccaaggttttggccgagcgcattgacgtgaccgtgcgtgcgtttgatggcaagcgcactgaggctgatatccccgcgattcccaatgccgctaatgccaagggcagtctgaaggttgtcggatacgatacgccgtccgagcttgccgatgccaatccggcattgaagaccttcggcgtggatctgcagattgccaacgacgttgacgccgatatcatccacgcacacacatggtatgcctgcttggcgggctacatggccaagatgctgcacggcactccattggttattaccgcgcactctctggagccgttccgcccatggaagcgcgaacagcttggtggcggctacaacctgagctcctgggccgagaaggacgcctacgagcacgccgaccgtgtgatcgccgtttccggtggcatgcgcaaggatattctgaccgcctatccgaatcttgatccagacaaggtggttgtggtctacaacggcatcaccatgtctgactttgctgctccggcgccggacgatccgggctggaaggtgtttgggcgttacaacatcgaccgttccaagccgactctgctgttcgtgggccgcatcacccgtcagaagggtctgccgtatctgttgaaggctttgcacctgatttccaaggatattcaggtggtgctgtgcgccggtgcgcccgacaccccggagattgccgaggaagtcaagaacgcgttcgccaagctggacgaggagcgcggcaacatcgtgtggatcgaggaaatgctcccgaagcccgagctcaacgcgctggagcacggctgcgacgccttcatctgcccgagcatctacgagccgctgggcatcgtgaaccttgaggccatggcctgcggtctgccggtcgtcgcctccgccaccggcggcattccggaagttgtggttgatggggagaccggctatctggtaccgatcgaccagctgcacgacggcaccggcacccccaccgatccggacaagttcgtgcacgacatggccgccgccatcgacaagatcatggccgaccccgagctcgccaagaagatgggtcaggccggctacgaacgcgcccgcgacgtgttcagctgggagaccatcgccgacaagaccgtggaagtctaccagtctgtgctcgacgagcagaagaagtaagtagcgctgcaacgagtgccccccccctcagtccggcgcaggtgactgaggggagttctcagaccgcgaatcatagttagtatttcactcatgacaaacaccgtcctccaactcgacaacgtcgaattccggcgtaaccgtcgcgtcatcatcaccgacgtgaacctcaccatcaacgcgggggagcggtgggtgctgttcggcccgaacggcatcggcaaatccactgcggtcggcatgttggccacccgcacgttcccctcggaaggccgcgtgtttattctcggtcaccagcttggcaaatacgacgtattcaagctgcgtacccgcatcggtctcgcctctgccgatctgggccggcagttccccgagttcgaggacccgctggacgccgtggtcaccggcctgtccgccgtgaccgggcgctggcgcgacacctacacgcaagaggaatacgcccgcgcccgccagctgctgcgcgattttcgcgtctcctatctggaaggcaaggagatgtggcgactgtccgaaggcgaacgcacccgcgtattgatcgcccgtgcgctgatgggagatcccgagctgctcatcatggatgaaccgaccaccggccttgacctgggcggccgcgagcaggtgatgcgcacattgagccgaatcggtgaagagaactccgagcgtgccgtggtgctggtcacccatcgcttggaggagattccggccggtttcgaccacatcgctatcatgggacgcaagccgattcccgctgaggacgccaccgaagcgggcgtggattcaatgggtaatcccggtgctggcaccattatctacaccggttcgttggagaatggcctgaccgacgaacgcttgtcggaattgttcggtatgcccatcgaagtccagcacacccacggccgctgggccgcctacgccgtgtgatgcttgtaggtttttaggcgggattttcttcgccccctctggaggggctgtcagcgtaagctgactgggggaggtccaaccagttacgaaggcaaccatgacaaccaatagcaaactcgtattcatcgatatcgacggcaccctagccgacgaaaaccacgtcgtacccgaatctgccagaatcgcttgcaaacaagcccaggccaacggccacaagctcttcatctgcaccgggcgttccgtgccgaaaatcgaacgcagcatcctcgacctcggtttcgatggcgtggtttccgtggcgggcgctcaggcgaatatcggagacaagctgctgttccagcatctcgtccctcctgaagcggtcgatgcggcgatggcgtattttgccaagcatcatatcgagagctaccaatggcaaggtgcggacggcatgtacatctcggaaggctaccgtcaacatctggaatcgaaaggcaagacctggaatcgtggcgaattcgcgcgattctggcacctgttggatgaggtggaggtgccgactggctcgactttgggacagacgattcgtgtgagcaaggggtcatacttcacctcgccgaatcctgacgtgactttcgaggagactcaacgtgatttgagcccatggtttgagctcgtgcatggttcgtatgacaatatttccccgaacaatggcgaactactcatcaacggcatcgacaaaggtaccgctgtgcgcgacgtggcttctttgctgggctatgccattgccgacaccatcaccatcggagactccgacaacgacaccgccatgctcaaagccgccggcacatcggtagccatgggcaacgccatccacggcatccaagccttctgtgacttcaccaccaccgatattcaccaggacggcctggccaacgccttcaagatgttgggactggtgtgatgagtgcggagtccttaccagttgctgttgcgcaatttacggtggcggaggagccggaacggaatctggagatcatcgacggattcgcgcgtgatgcggcggcgggtggtgctcagctgctggtattgccggaaggtttgattgcgcggcgtggcgatgacgattcatatgctgccgcgcacgcgcaaccactggacgggccgtttgtagacggcttgcggcgtatcagcgcgcagcggcatattgtgctgatgggtaccgtgcatgttgcgccggaagtgaacgcgttggaatcagatatttcggaatcgatgaaggatacggactcgcgcgtttccaatatattcctcgtgattcgtgatggtgagattaccgctgcatatcgcaaattacatctgtacgatgcgttctcggcccgcgaatccgacgtggttctcccaggagatgcattgccgcctatcgtcgatattgacggttggaaaatcggcgtcatgacctgttatgacgttcgtttcccggaaaccgctcgctcactggccgtgcgcggggcagatgcgattgttgtaagcgccgcttgggtgcgcggcccgttgaaagagcagcattggaagctgctgactgcggctcgcgcattggaaaacacttgctatgtgttggcttgcagtgaggtgagttcgcggaacatcggatgctgtcgcatcatcgacccgatgggagaggtagttgccgaagcgggcgatgagggagccgagcttattgctactgggcttagtcgcgaatgccttgcttccgcacgccagataatgccggttctgcagaatcgccgttttgccgacccgcagttgcgcgattagtcgagcctttcagagcccgctgccgacgctttgatggcatattactatcaaataaaacgtgccgaattattggcgcaatcagtggtcatcgaaagtccgtgataaatgtcgtgggcccggacatctattatgggacgcatgactaccactgttcatgattccgcccaggcttctgtatacgctcgtctgagtgaggggagcgaagccccggatttcactctgccggcgattgttccgaattctgcatcatctgatgaagccgaatctgatattgattcgcaagaaacttccctcaccttgtccgaagtactcaagggcggccgcaaggtagtgctgtatttctacccggccgcgatgacgcccggttgcaccaccgaggcttgcgatttccgcgacaatctcgcccgattggcgtcgaaaaacgttacggtgcttggcgtctccaaggactcgcttgacaagctgcgcaagtttgcacagcgtgatcatctcacgttcccgctgctgtctgatcccgacctgaccgtgcacaagctgtacggcgcatacggcgaaaagaagctctacggcaaggtgcacgtagg

SEQ ID NO: 1342 - DNA, 5964 bp, Unknown
  R157_18m  MAG No. k141_19486
ctgattcaactcggtcgggaagccgactacgccacgttctcggggcaagacattgcatcgggccaagccaccacatattggaatggagtcgaccggttgcgcaaggcaatgctcgcttctttgccgcgtttcaggaggatacgtacacggctttcgctgaaaagcgtgtctatattggcaaatagacacgcagcaaagccgcatacagcgcgagtcaagcgcaagcataagaaggggaaaacgtcatgaccacaggttccatccgtgtctcgatgaccagtgacgtgggtcttaggcgcaaaaacaaccaagacaggaagccgtggacgccttggtggcggccgcgctcgatgcgggcggaaccgacaatatcactgtgattgtggccgatatgccactgaccgaacccgaacatcacgcgttcagcgcttttaaactggacgagggcgaggacattggcgccattgaagacgcaacactgcaaacactacggaccatacgttcggcataaccgagcgaacataaggaggtaatcccatggttgattatgatgctgcggtcgctgccgtacaggatccgaacgcggacccgattctgttggcaaaaatcgcctacgagaatccggaattcggcgcaaacgtcgccgtgaatccgcgttgttatcccggcttgaagcgttggatcgccgaattcggcgatgagcgtgcccgcgaaaccctggcacaatacgggttcaccgccgacgcattcggcggcccggttcaggatcaggaggctccggaacaggcggcccagcaggctgccgagcagcagcctgcagacgcttacgccgccgaccagtacgccgcggctcagcagactgccgccgcccagcccgccgccgtccagtctgccgccgaccagtacaacgccgtccagtctgccgccgaccagtacgcggcccagcagcccgcggctcaggcggcattcgaggagcctgtggccaccaatccttatggcttcaccgccgaacaggccctgaccaccaccgaccagatgcaaatcgcccagattgcccagtacgcgcctgaactacgcgcctgcatcgcacgtaatcccaacacctatccggcactgatcgaatggctgggccagctcggcgacccggcaatcaacgccgctctggcttttcgtcagtgaaaggacggcatcatcatggccaaacttccctaccctccagcacctgaactgggttggtattccgacgatccggtgggaggcaccccggattccgcagttggcacagccgaaccgcagaacgactatgggcagcccagctctgcggaaaccgcggccaataccgcttttgcggcagagcctgccgtcactgccgctaccgccgccgctgagcccgctgccaccgctccggcagacaccacaccgcacgccgccgaaaacgacatcgaggattgggacggcaccgtgctctcctcctcgttcacgtccaaggcaccgaagaagacgtacctgctgcataacgatgtcaccggccagaccattgtgatcgataagagcacgttgctgggccgcaagccttccatggatgtgccgcaaggtgccaaggcggagcgtatcgaagacccgacccgcaccacgtcccgcaaccatgccgccatcagcatcgacaccgatggcgcgctgtggatcgaggactacggctcgttgaacggcacctacatcatcaccaatggccaggagacccaagtcaccaagggcacaacgctcaagctcagtgcaccttcaacggtgcgtattggtgatcagttcttccagttcaccgaaaaacaggcctgagtaatcaagcaacgagcggctgcctgctcttgttcaacaggaaaatcacaatggcaaatatacggatggcccggaactgatatagttccgggccatcttattgcgattaacgcaagatctgagtcctagaaaggacatcctttctaggaccctctcgcttactcctcgatgtcaggctgaccgccctgatcggagtagaaatcatccgggttgaagtcgtcgccgagcttcagatcgccgaattcgaggttcgagaagttcaggtcggacaggtcggcgtcggagaaggtcgcgtcgccgagatcgccatcgccgcccagaccgaagttggggtagatggtgtcgcggatggccttgtcgggctcgaccacggcgttgcggtagcgggcgaggcccgtaccggccgggatgagcttaccgatgatgacgttctccttgaggcccttgaggtcatcgaccttctcggagagcgcggcttcggtgagcacgcgggtggtctcctggaaggacgcggcggacagccaggagtcggtggccagagacgccttggtgatgcccatgagcgccggacgaccgacggccggacggccaccgttcttgacgatgttgcggttgatctcgcggaagcgggcgttgtctaccagctcgccgggcagcaggtcggtgtcgccggagtcgatgatggtcacgcgacgggtcatctggtgcacgatgacctcgatgtgcttgtcgtggatgtccacgccctgggagcggtacacggtgtgcacctcctccacgatgttgacctgggcggcgcgcttgccgaggatggtgaggatcttcttcggatccacggaaccttcgaccagctgggtgccgaccttgatgtggtcgccgtcggcgaccttgagcggcacgcgcttggagacctggtaggtgatcggcttgatcacgccgtcttccttcggtgcaccggaatcggcgtccggggtcaggatgatctggcgaccgcgatcgttctccacgatcttgatgctgccggcgaactcggtgatcggcgcctcgcccttcggggtacgcgcctcgaaaagctcggtgacacggggaagaccctgggtgatatcggatgccgcggccacaccgccggagtggaaggaacgcagcgtcagctgggtaccaggctcaccgatggactgggcggcgacgataccgacggtctcgccgacatcgaccagcttgttggtggccagggaccagccgtagcacttggcgcacacgccgcgcttggactcgcaggtcagcacggaacggcacttgacttcctcgacaccgtgggccacgaggtcgttgagcacgtccatggacagggcgtcgtcacgcttgtacagcacggtctgtccgtcggccgggtcgatgacgtcggcggcgagcagacgggagtacggaccgccatcggcggccttgacgagcaccaggttgccgtcgttgtcgcgctcggcgacgcggatgggcagaccggccttggtgccgcagtcctcttcgcgcacgatgacgtcctgggagacgtcgaccagacgacgggtcaggtaaccggattctgcggtacgcagtgcggtatcggccagacccttacgtgcaccgtgctgggagatgaagtactccagcacggacaggccgtcgcggtagttggacttcacaggacgaggaatgatctcacccttcgggttagccacgaggcctcgcatacctgcgatctggttgatctgcatcatgttgcctcgtgcaccagactgcacgatgatggccaggttggaggtcgggtcgaacttctcctcgacttccttggacacctcggcggtgcactcggtccacaggtcgatgagttcctgacgacgagcttcctcggtcaacagacccatctcgtagttggcgttgaccttgtcggccttggcctcgtactcggcgatcttctcgtcgcgctcgggcggctcgttcacgtcggagaacgcgaaggacacgccggaccacggtgcacgggtgaagccaagatccttcagggcatccagcgtggcggccacctgctgggtggagtaacgcatggcgatgtcatcgacaatcttggacagacggcccttggccacctgctcattgacgaacgggtagtcggtcggcagagtctcgttgaacaggatgcggccgtaggaggtggcgaacagcacggtgccgtcgtggaagcgctcttccttgacgacctcgtcctcaccttcgcgcgggtcgagcaccttgacctcgccgggctcccagttcttcggcagaacgaagctctcgggcaggcggatgagcaccttggcctgcatgtcgatctcgtggcggtcgagggccatttcggcctcttccagcgaggagaacacgcggccctggcccttggcgccttccagcacggtggacaggtagtacagaccgaggatcatgtcctgggacggcatggtcacggtgtgaccgtcagccggcttcaggatgttgtcggaagccatcatcagcgagcgggcctcggcctgggcctcggcggacagcggcaggtggactgccatctggtcaccatcgaagtcggcgttgaaggcggcgcaggccagcggcggcaggtggatggccttgccttccaccaggatcggctcgaatgcctgaatacccagacggtgcagcgtaggtgcacggttgagcagcacggggtgctcggagatgacctcctcgagcacgccccacacttcggcgtcgccgcggtccacgagacgcttggcagacttcatgttctgcgcgtagttcaggtccacgaggcgcttgatgacgaacggcttgaacagctcgagggccatcggcttcggcagaccacactggtgcatgcgcagggacgggccgaccacgatcacggaacggccggagtagtcgactcgcttaccgagcaggttctgacggaaacgaccctgcttacccttgagcatgtcggacagggacttcagcggacggttggaggcaccggtgaccgggcgaccacgacggccgttatcgaacagggagtcgacggcttcctgaagcatgcgcttctcgttgttgagcatgatttcaggggcaccgagctcgatcagtcgcttcagacggttgttacggttgatcacacggcggtacaggtcgttgaggtcggaggtggcgaagcggccaccgtcgagctggaccatcgggcgcaggtccggcgggatgaccgggatcacgtcgagcaccatggcctccggcttgttgccggtggtcaggaaggcgttgacgaccttgaggcgcttcagagccttggtcttacgctgctcggaagcgtccttgatctcctcgcgcagttccttggagatggtctccaggtcaagggactgcaggcgcttcttgatggcttcggcgcccatgcagccgtcgaagtaatcgccgtagcggtcctgcatctcgcgccacaggtccacatcgtcgaccatgtcgccgggcttgagcttcttgaacttgtcgaagacggcgtccacacgggcgatctggtcgttgtagcgggtgcggatggcggccatatcgcgctcggcaccgttacgcagcttggtgcgggccgggcccttggcctcgccggcctcctcaagggcggcgagatcctcttcgaccttcttggcgcgggcttcgatgtcggagtcacggcgctgctcaaggcgtttgatctcggaatcgaactcgtcctgcaggccgggcagatcgttgtgacgctcgtcctcgttcacctcggtgaccatgtaggaggcgaagtagatcacgcgctccagatccttcggggtgacgttcagcaggtagccgaggcgggaaggcacacccttgaagaaccagatgtgcgtcaccggggcggcgagctcaatgtggcccatgcgctcacggcgcacgcggctgcgggtcacttcgacaccgcatcgctcgcagacgatgcccttgaaacgcacgcgcttgtacttgccgcaggcgcactcccagtcacgggtcgggccgaagatctgttcgccgaacagaccgtccttctcaggcttcagcgtacggtagttgatggtttcaggcttcttgacctcaccgtggctccaa

SEQ ID NO: 1343 - DNA, 30547 bp, Unknown
  R157_18m  MAG No. k141_21205
caccaagcatggtcgcatcgaaatcgtcttctcgtcaccagaggatatggatcgcatcctgcagctgctggtgccgagccaaggcgatgccgattccaaatgggtgtaacacgataagaacattcgtgttgtcgccggcatcgtcagtgacaacaccgatgcttagcgttgtcacttggcattgtatcggcttgtcactgtcgccggcattattgctgtgcagtgcgttgtacgcgcaagacgttatagcctctgcgtgattcctggcaggggcgtatgcctgcgttgtagcccctgtcgcaatagaaaacccctcaggctggaggatgacaaatcacacatcgtgattctccgtcgcctgaggggcctttctatgcctttgaccggtgcgtactatccaagggcggcatgctgtaacactgacctagcgctgctcctatgtcacaggcagcagtcagaacagcaagccatcatcaggtcgccgcaatcagtccgtaagataggcctgcgcatccagcgctgcacggcagcccatgcccgctgcgctgattgcctgacgataagtacgatccacgcaatcgcctgcagcaaagatgcctggcgcactggtcaccgtgctggcaccctgcaccacgacatacccatcattgtcacggtccacaacaccagctgcaaaatcagtggctggcgtatggccgatagccacgaatacggcgttggtgtccagcgtgctttcttctccggtcaccacgttacgtacggcaatgctgctgacactggccggtgccacagccggtcgtttgattgtcaagccaggaatggcaataggtgcaccggtgttctgtgtgggggaggaggtgccggtaatggaggtcaccactgtgttggtcagtagggtgatggtcggattggctttggctcggtccaccatgatctgcgaggcacggaagctatcgcgtcggtgaatcaaggtgaccgaagaaccgaaccgggtcaggaataatgcctcttcaaaagccgaatcgccaccgcctacgaccacgataggcttgttcctgaagaagaagccatcgcaggtggcgcagtacgagacgccatgtccggacagctcctgttcgccgggcaccccaagcttacggaatgacgaccctgtggcgatgatgagtgctgatgcctccaactgggagtcatcggagagcgttacacgataggtcggcttgaccgaatcactctcacacgcctcaatggaagagacatcgtctgtgatataggttgtaccgaagcgcttggcctgttccttcatgcgatccataagatccgggccaagaataccttccgggaatccggggaaattctccacctcagtggtgttgaccaactgtccacctggcgacaacgcaccagtgaccataacaggattaagacctgcacggccaagatagatggcggccgtgtagccagcgggaccagaaccgataatgatgacgttatgtttcacgtgaaacattgtcacacccccatacgatattccatgtcattcagccagacgcgaagaaagggcggcaccgtcgaatgtatgcgaacggtaccgcccttcttgggtcagttatcggtatagatgccgattagaagacctccaccttctcgatgtacagctggttctgcggcaggctacccgatggcacccacagcagcagatcctgcgtattgacggctttggtgaacttcacctcagtagtgccaccttcagcaaaggtgaattcggccacctgctcgccctgagtggggtctccagtggtatttgcgcgaatatagcccttaccaccggatgtgcggatggtgataaccatgcggtacgcatcctgcggctggtcaaggtgcatgtagtatgcgtacccggattggccgccaggattcgacaggaagttggcgctggaaatcgtaaacgccgtgttgttctcatggcgcggttgcggagcagcgctggaatccttatcgctggacttcttggccttggtcttcttggacgacgaatcagcagtctcggacttcttggacttgtctgatgccgagtccctggattcgctctgagtggcatcactcgactttgaggaatcgtcagtggcgccaccgttcgtcgcgttcttgctgccaccgaatggcacagcgtcagcattgatatcgggccagtcaccttcactggagttgctggaagcatcggcaggattgtctccggaggatcggaacgcatgcactgcccaaacagccgctgccactaccaatatcagagccacaatgatggcaacgaccttggtcgacagtttgccgaacagatgttcatcgggcagcttgctgtcatcctcgtcatccggcacatccttcggtgtgaagctcggaggaatggcgcttacttcggcaatgcgggcctgctcctcttccaaggcacgcagcgattcctcaccgggggccacagcacggccgctgacatcgaacacgggaatacgactggtcgtctctcccacggtggcatcggaaataccgccggtaacaataggcaccgtcaaccgagtattatcacccggaccgccgatgggggccggattcatttcgctgtaccagtcaccggtgtcttcaccggaaagattctcgtgctcccaggcgtcagaaaggttgaagtcaaacagacggcgggcgtcagattgagactggttgccgtcagcagtactggacccatcaggcagaggagccggtgacatcgcgtgcggagcggggacggcggccggctgaaccggcagggaaggggtaatagacaattccggaagactgctgctgttaatcaacgtgctgggaataggcacgatatcggtctcgttggcgggcttcagtatcgccttggtaatcgagcaatcgctttccacgctcggcaaagcgatatcagcatcgctcagttcagagagcggcttccaattacccaacaaggcgtcgagttctacaagggcagccatcggcaacgtgtgctcgtcgggcttgcttaaggccaatccacgcttgcaaatcacgcggaattcgccaggggtgtcttgcggcaaggcgcgcagattgaatgtgggtgtcgcttggcttggcgtgcgtgtcagcagggcatagagcaatgccgcaagctggcgaatcgcataccgttcaggaccgtccgtacgcagatcggtagcggacgtgtcggccagcatcgtggcacatggtgcatcggcaatctgcacaccggaggtagtcactcgaacggtgtcggttgtgatgacgatgctgctgggagtatccgcaatgacctcgcgcagcacgttggcgcattctccgataatcgaccggatggcgctgtagctgagcggcttgtcggtatccaccatgtagtcagtcaggcattggccgctgtccaccggcatgacaatgagaagtacgtcggattccatacggtatttcagtacgggaatcacacgatcagggcgagtggcggcgatgcgaccagcgagctcatcgattgcggcgaaagcgctgcgattggtaatgatgaacagctggcaatcctttgccaacacacggtcgttggctttccatgcctgaatgccaggctcctcacgcaacgatgataccaaggtgtatcggttgagaatcgtgtctccgagttgcggtttcatagtgcgttcggctccgtgtgattggtgttcgagactggtcttagatattctacgtgtggggctatccttgacgggctccgtctcaggattgatttgcgtatcgtcgactttttccggctgggctgtcacagcaacgtcctcactggccggagtcttgtgtagacgggccagtatcgagtgataggcgctgatgagttccggggtgcgtaccacccacaacacagccacatatactacggccagcacgatggtgagcaccacgcagatggccagcgcagaccaccagctcatgtgcccgcctaccgatcgaatatccgcgccgaacagtgcgactaccggtcgtttgatcagccagaccacaactccggaagccagtgccgccacaatggccttggcatatgtcctcgtgatctcccgaccgccaagattgccttcgaacttgcggcgcaacatcatcaacgtcagcggcaacgccagtaatccgccgagtgtcaccgagcaggcgatgccgagtacccaatgctcaggaggaagtaccatcatgccaatcatcatgaataccgaggtgaacccatactgcatcaccgcggacaggaaggggtgcaggccgtcctcaaaggcatagaacgtgcgctggatcaacaggaacgccgatcccaaaggagtgcccacagatagggcgataagcgcgtaggaaatcagcatggtctcgtccatcgagacggacggaagcaatgcgcggatgatcggttcggggaacacaatcatggcggcggcgaaaaatatgatcagcagccctacgttgttcagcgcgctcaccagatcgtgccgtgcctcatccagattcgcagctgcgacagaacgggagattttggggaacatagccgtggataccgatacggcgatgagcgaatagggcaggatgaacagtgtgtacgcattctgataggtcgcgttgcctgccacgctgaacaggctggcacccgtcagttcgtgggcgcgctgcggtgcggatgtggcgatacgggtaaggataatgccgcagatctcgctggtgaccaccacacccaaagagcctaacgccacgggacccatagacctgagtccaaagccgccaagcccgaagctgggtttgtacttgaacccgatacgggccagtggcaggaacagtatcagcgcttggaaggccacgcccaaagtccaggtgcctgcggtaagcgcaatcttgtcggcggtccagaattcgaggggctgttcattggccttgctgaacagcagaataaaaccagtaaaaccggcgcaactaataatgttggcaccggttgagctccacgcatacgtgaggaaatggtctttggcggccaggatctgacccaacaccgtatacaggccgtagaagaacacctgaggcatgcaccacagggtgaacgaggtggtcagggctatcatctggtgatcgtcgctacccacgtacaggcgggcaagcagagggctggccgccgccatcaccacggtcatggccaacaggatgccgatggccaacgtaaccagacgattcagtcgttcttgggcgtctttttctttcaacgtgcgcacgatctggggcaccagcacggcgttgaagatgccgccggacaccagcgtgaacacggattggggaatcatggaaccggcctgataggcgttggccgccaatccagtggtgccgatggccgcagcgagaagaatcgtgcggagctgaccggtcacacgggaagcagcggttcccgtggccatgatcagggaattacgacctacggttgaactcattcgtcggggtccttcttccgatggaactgccgccacaggccgataatacacagtagcacggcgaagccgatgataatgaaaccgctggcatcactgacgcgcatcacactggtgatcgcggtatcctgcgtgttgccgaagctgttgccttcccggtcgctcagcgacacatgggccgtcgatgagccggaagtggaaacgcggatggtgaaggtcacctgagcgtcgctatgcgcgggaatatcgatgtcagtggttcgcgaggtgacgatctgcatggagtcagtcagcgagttgacctgcacgctgacggcataaggaaggtcattgctgacggtgattggcattttcgcggattcgctgaacacggatattgattccgatgggttgatgcgtacgccgttcagaagatcgctggccagtgttttcgcggctctgaccatggcttttcgcgtggctgtcggctggggggagccagacatggatcgcagcgccatatcgtcatgcagcaccagcaaagagccaatccattgcgtcggatcgttgctgtgcgagacggtgtcattggcatcctgccgggccagggcctgcggggccaacgacgagacctcgtcggaatcaatctcgttcctcaatatggaggtggccatgcgcatgatgtcatgccggctgtcggccaactgtctcaatgccgaccgggtattggcggtgttggcatcatcggccttgtcgggattgaccgaatcgctgacattgtacggatcggcctcggccatggtcttcaggtccgtcagattcaaccaggacgcctgctcgaaggcgctcatcacctgatcgatccagccggcctccgtggtgcgggagaacgtcataagcaggtatcgggatgtataaggctgttccatctggtagaacgcgctctgagcgaccagtcgggccaaccgaccggcatcgctggactcggcctgcgcgtccgtgctggtgggttggcccttggccagcatgcccaaggtcgattgctccttcagcacggtgacatcgccggcaggcgtatccaccacgtaggtgcctgtgtgtacggcttcagtctggtcggcatcgaaagaggcatcggcaatcaccgtgtcatagccctgctcgcgtgccgcggtcagcgcatccaacgtccaacagttgttgccctgccatgcgtacgcggagggtgtttcggagtcgtttccggcggcataccatgcggccgcctgcttggcgttccactgttcagtggtgatgccggccttttcgtaggccgcggtatcacccagcgcggtataggcggtgatgtcaaagtcggcgggctgcatgatgccggcaatggacggttgcactgcggactgacgccaatacagaggatccgcgatcacttgcagcgagcggtgcttggcgaatgtctgcccaagggatcgcgcggtatcggcatcctgcccggataaggatatggcttgcgtatcagtggctttggccgcgttgccggcgtcggcgttatcggacttgtcggccttgtccgtgctgttggacttggacgatgttgatgtcgaggaagtggtggtttcggcaatgcgattgctgatggccttgttatcgacctgccagccgctggcggtgtagggcatggccacggtcaggttcatggccggtgtcgtcgcggtgttgagcccatccgaagatcgggtcagaaaactcggcaaatcggcgagtatccgattgccgacgatatacgacagcatcagcggcttcggcccccagctccctatggaggcaagggtctgctgattggcgttcacctcgatggtgacggtggcagtgccgccggcgggaatcgatggcacgtcaacggaacccaactcgttgggggtggggatgggggcgttgttctcggcccaattctgaatatcggtgcgcgagacaaaggtgaacagcgtattggtggtcaggtgcagtgtgccgcttgacgtggccgtgctgtccgtattgctgatgaccgcggtgacatgatagcccgatttggaggtgacgatgggggtgctttgcgtgatggcaatgctctgcttgggctgattctcggtctgattgcccgttgcgtccgtcgtatcggatgaatcagtcgtgtccgtcgtatcgttcgcgtagacggtcaatggagcggccagcatcgccacaacggcgacgccagccgccagtgcgtgtgccagacgtgtgcaatgtcgtaagactccgggtaggttcactcgtttgcctgcctgttcttcttcctggcgtagagccacgcgattttgcgttcgttgggatagctcaacacgtcatccaaatcttcaaaacgtacccagatggcgtcttccgcctcatgatccgggtctccttccaccgtcagttcgccgccggtctgtttgagcgcgaagtgatggaccagcttatgcacgcgctgcgtggtgccggtgaaccagtagtcgatggtggcgatggaatcgatcacctcgcccagaatgccggtctcttcatgcacttcgcgcacagcggtctgctgcggggtctcacctttttcgatatgccccttcggcaagcaccattcgagatggccggagcgggaatgacgggcgataatggccacgcgattctggtcatcgaaaatcagaccgcctgccgaatattcgcgtacgaccggcagttcctgggcatccagtgaagcgaatgtggtcggaccgtccgacgtacggcgttgcggcatcatggccggagtcgggctggatggcgtcaccggttctactggcactgccggttccggcgaggcaacatccgcggacggatgccggccgaagaccgtggccggcgtgggatgcgctgacgttgcgggcctcactggtgctgcagacggcgctgagaccggcatggtgaccggcgttgcggccggtgcggtacgtgccgcaggcggcatcagcacgtcgcgcggagtcggtatcgctgcggtatgcgcggcggcggccttggcgaccgcaacggcagcatctacggccgcgtgggcggtcgccgcgggatcgttcgtgacgatggttacggacgtttgtgccgtggcgataatcggcccgacctcggcaatcgtctcggcaccggcctcgccggcgataccatcggcctgcccttcgatagtgccgctggtagtggcgatggtgacggtggcatgcatgccgaagacggtggccggtgtgggcatcatcggcttcggtgcgggcatgtcgctggcggcgtccgatatttcggattcggatggtgcgggcgtgacgggcgttgcgggcgtgccgggcacaccggaatgttgcgcagtcggtactgcgtctacttcgtcttgatgaacggcctgattggtggagtggctcgcggtgccgccgacatcggaagaatcgcccgaatcggcggaatgatgcggagtttcggacgtatacagcaggtggtcttgggtatggctatccgccgaatctggtgtttgccccagtatgcgggcaaggtcggcgggcgtaatcatattctccaccttactcaaccccgtgtgcaggtggggtaacggtatgctggtagggcagaaaaacgtcgcacgcgggaaggtgcccattgaatttcgaagtatggcccgaagccatcgaacttggtcgactgttcgccgaacagggttacgagctggcattggtcggcggcccggtcagggatttgctgctccatagaaggagccacgatttggacttctgctcatccgcacggcctgagcagttcgagccgatactgcgccggtgggggcatgacggcttctgggacatggggcgcaagttcggcacgctgggtgccatgcgccgccgcccggacggcaccgaggtcaaggtggaggtcaccacctatcgctccgacacgtacgatccggactcgcgtaagcccgaggtcaattatggcgacacgcttgagggcgacctgtcccgccgcgacttcaccgtcaacgcgatggccctgcgtgtgcccgacctgcaattcgtggacccgttcggtggtgccagcgatctgtccaagggcgtgttgcgcacgccggtggacccgcgacagtcctttgacgacgatccgttgcgtatgatgcgcgccgtgcgattcgtggcccagctgggcttccgtatcgcgccggacgcggccgaggcgattacctcgatgcgcgaccgcatcgacatcgtatccgccgagcgcgtgcgcgacgaactgaccaagctgctgctctccgaccgtccgcgcgccggccttgaggcgttggtcgaatccggtcttgcggacatcgtcttcccggagattccggccctgcaattgcagatcgacgaacaccaccgccacaaggacgtcttcgagcacacgatgattgtgctcgaacgcgcgatcgccctggaaaccggcccggacggcccggtgcccgcccccgacctgacgctgcgcttggccgccgtgatgcacgatatcggcaagccgaagacccgccggttcgagccgggcggcaaagtgagcttccaccaccatgacgcggtgggtgccaaaatgacccgcaagcgtttgaaggcgctgcgttttgaccaccatctggtcgaggacgtctcggaactggtgaatatgcacctgcgcttccacggctatgtggacgagccgtggaccgactcggccgtacgccggtatgtcaaggatgccgggcacctgtacgagcggctgaacaggctcacgcgcgcggacgccaccacacaaaacaagcgcaaggcgatgatcttctcccaggccatggatgagatggaggagcgcgtccgcgaactcaagaagaaagaggacttcgacgcgatccgcccggatctggacggcaacgaaattatggagttgctgggcctggagcccggcccgatgatcggccgcgcctacaagcacatgctggaataccgcttggataacggtccggtggaccacgatgtggccgtcgaagaactcaagcgctggtacgccgagattcagtagtccgatactagtccgataccaaaaaaccgtacgctgaatacgtgtcagcgtacggtttttcgcgaagatgaagctgtatgcgccttactccgccgtgtatgcgtcgtgtttggtgtcggcgggcagcttggtcatgctatcggcggccttgcaaccctcgatattggtgatggtcttaccggattgtggggaggatttggtgtcctgcagatcgttgaacgtggcgccgatgaccacatcgatgagttgatcctcgcgagccgtcatgatcatggtggcgtcggtgaaattgccgatcagcgtatacgcctgattaatggcgttcttgccgaagtagatggtggtgcgttcaacgccggtgctggaatagttatcgattttctgcacgctgaatccacgattggccaaagcctcgcccacggccttggcgaattggccgtgagaggtgccgttcatcacgcggatgccgaccgaagcgttggacacgtattgcgctttgccgctgctgtccttgaccgcgcacggtgccgcgttgccgtaattcggctggcgggccggagtctccacttcgccgaggccgaaaacgtggaaattgaacagtagggctatgaccagcactactgccaataccgcgccgctgatggaaaagacgatggtctggcggtggcgcacgtacgccttgcgggcttcacgttcatcaacctgatacgtcatcggtggacttctttcatgggtcgggtggctggttgctaccttagcgtcactgtctgacgccgatattggggtgtgcgggagatttggctcgaataatgcgatcgaccacagccgtatcgcgccacacatcgataatgcgttgtgccgctgcctcgtcggcggcgaaagcgaccactgaggggccggatccggagacgaatgcatggctggcacccgcctgcgtggcggcgtcgatggcctgcccgctgcggggatgcaggctgattgccgcagcctgcagatgattgcggtcgccttctgcggctcccacgaggtcaaaggtgtggtagacctcaggagtgctgagttgcgactggtacgcgccgaccaatacttcgccgctgaatccctgttctatcagcgctagctcatcgcggctgccgggggcgatatccgtgatgcgttcgccgaaaccggtgccgtatgcaaggccaccggtcaggcagaacggcatatccgcgcccaacgtggcggcaatggtgcgcaggcgctctataggccagttcagatcccagagacgattgaccgccagcatggtcgccgcggcgtcggctgaaccgccgcctagtccggcacccacgggaatgcgcttggtaatggtcaacgccacatccggctcgcgttcggccgcctgggccatggcgaagagggccagtaccgcatggttgcggcgcatgtcgctgcgtgaggaggccaagtcgcccaaataagcgccttcgagctccagagagaatcctgctccgggttgcttggcggttgcggtgacggtgtcgtatacaccgattgcacagtagatggtgtccagttcgtggcgtccgccccactcgtcgtgagcaggccccacttccaaggtgagattggttttagccgggcaatccaccgtaatggtgatgggggagagctcatcgaactgatgtcgggcagcggctgggcgtggatgtgaaattaccggactcattgtgcctcatctccatctccacacgattcgatggccttggccagagcggtgaattcggcgatggtgagcgtctctcctcgacgggtcggatcgatgccggcgatggagaatgcctcggagggcgcaatggtcttcaatgccgcgtgcagggtcttgcgacgctgaccgaatgccgcatcgatcagacgaaatacgagttcccgttgtgtgccgtcgtctgtgctgttcgcagttcccggggcagccgggtcatcggcctgataccgggtgaatttgacgagcgcggaatccacattgggagccggccagaacacattgcggccgatggtgcccacccgttcggcggtgccataccaggcgagcttcacactcggcgtgccgtagatcttggaaccgggcttggcggcgagtctgtcggccacctctttttgcaccatcaccaagaacgagccgaggttgtcgaaacgctccaacagcgtgagcagaatcggcgtggccacgttgtacggcagattggcgaccagcgtaaacgatgcgtcatcgctgaaatcaggcacgttctccggggtgacggttaaggcatcccgattgacgacggtgagtcgtgacgtggcttcgggcatgaattcggcgactgtgcccggcagtcgttcggccaacggcggatcgatttcgactgcggtcatggtggcgccggtttccagaatcgccaatgtcaacgatcccaggccggggccgacttccatgacatgatcggcagcggtcactcccgcctctcgtacgatacgacggaccgtgccggggtcgatgacgaagttctgcccgaatttcttggtggggctgatgccggcatcggccgcgatacgacggatatcggcggcacctaacaggtgaccggtggcgggaatggtgtcgttcataagcgtgtgttccttgtgggcttcgtaaccgatcagtaccaaccgatttgttcggaatgttgccatgccttggacgggctgccgtaggtttgtgcgatgtaccacagaccccaatcgatctgtacggcggcatcgtcacggtaattggcgccgaacgcagccattttgtctgctggtcgcgactgaggaatgccgtaggcaccggagctcgcgttttcggcataccacagccatctggactcgcggttccatagtttgaccaggcaatcccagtcgttgcctgtccacccgcgctgcgcggcggcaccggcggcataggcctgagcctgggctacggtggcgtgccagagtcggccggagggcgtggtggttgttcctgaatcggagccggaagagccggaattgttgttcgtaccgccgccggtgttaccggaattaccagtgttaccggtgttgccggtgttgccggtgttgccggtgttaccggagttgttgccgccggtgttgccggcattgttgttggtatcggtgttcgtgttgttgccagagctgctgttgttcttgtcgcctgtgctgttggcattgttaccggacgactcgtgctgactgttggaaccggaatcggccttgccgttatcggcggagtcggattttttgtcggaacctttatcggtatcagacttggcggcgcctacggcgatgatctggtcgatggccatcgtggtgacggtttcggatttcagcgtctccgattcggccacgccatcgacatacgtgacgttatacacctgggttttctcgccattgacgccttgctggcggatctccgactggccttcaggcagattggagtcgatgatggtttgtgtggagtatggcactatggctgtgcgtgtttcctcgccatgcgtcacgcgccgtacgcgcaggatagtggtatcgccgtccttttcgacgctcacacggtcctctttgttcagcacgatgcctttggagtcaagaatggaggccgcgggcagtttgccgttgggggccacggaagtcttgccgtccgcaatgacggtgaccgggccatcctgattgatgaccagtccgccggtgagctggttgtacacattgtcgatgtcgacggtgatttttgtggcgttgttctggttttcctcgaaaaatcccagcaactggtcggcactggtggccacggtccagaagggaacggacgtgccgtcgatgttgatagtggtctggtaggcggactgtacggtgaccacggcatgattggcgagttggtcgccggacgaggtagtgacgatatcgtgggtcttgatatccaccccttgttcctccagaagacgggtggccgtcatcgcatatgtggtgacttgggtggtttgcccgttgatgttcagggctacggatttacgcgcggtgaacgcgaatgatccagccagcgcgatactggtcgccgcgatacaggcgattacgcggatgcgacgcagtgtaacaaaccgctgcggggtccaacgccgtgccattgccatactcttcctgctggatgaacgattacgccacccatcgtaacggttgttccggcccgtactgcggtttcaccggccaccgtcaccattcctgctcgtcagattgttctgagctcaaaaaaagaaaagaaaaagggggcgggagagaaggggatgttcccgcccccctgaaggcgcggagctggttgggggacgctccgccctcattccaggaagcccatagttgggggaaggctcctggagtacttacccaaggtaagaattatatgcgtagaaaaatctacgtatcatataatacgccacttttctacgcgtcgagcctcttgtcgggatcgaaccgacgacctgccgcttacaaggcggccgctctggccatctgagctaaagaggcgattgttcttaacgcgtaaatcgttttgaacaaatctctagtataccggtagttctcgagtggtcaattcaggccgagccgcgccggtaattaatcggccagcgaaatcggcttcttgttggcgccgatcgatggcatctggccttccacgcccacctgatcggagtccaagccgatggacttgaggaatccgtccaccatgctggtgtccgccagcgtgagctgcttcagatcccagtattcgccattgatggtgagcgtgggggaggagaacgcgccggagctgttgaacagttcggggcgtaggatcgtgtagttgttggaggcggtgagccacttgacgtattcgttcttaccactgaatgccgcggtggccacatcttcgctcacgccggcattgacggcctgcttctccagcttggcgttgcttaccggctcgtaattggacaattcgcccggctggaaatcctcagcgtagatgttggagaggtagctcatgaggtgatcgggattgtcatcatgctcggcaatgtagatggcaccgttgaacgcgcggttggagtagttgtcggagctcttgttgtcctggaaattgaggaagtgcaaatcgatgttgagctggccggcgttcatcagcttgacgagcgtcgggtcaagctggcggttcaccgaggcgcagccggggcacagcggctccatgtagatggaaacggtgggcgccccttcggccttctgaccgtaccccttgctcgagatcacgaagccggccttgtcatcggcgttggccggctgggtactgactttcttgagcttgctataggcctcgtccgcggtcatgttgctttgctggctgctgctggtgttggacggccgcatagccttgtatacggcgaatccagcgatggccaccagcaccacaataatggccaccacaatgcagccgatgatggtctgctgcttacgttccttagccgcctgctcggcccgtgcctgctgggcggcctcctcggccgctcggcgctcagcgcgtgtggcacgcttggcctgacgcttcggatctgacatagctatccccttgcaatcgcttcaatgtttgggccccatcataatgaccgggcctgaggaggactgcgcccagagctgatctgaggtgaattccctgtaaaagtgtgacggaacgaacgtatcggatacacaacggccatgtgtgcggatggctgatgtgtgagattccgccccgctctaggcgaacggcatccagttgatcggcatgcccagaatcggcatcgcgcacaaggccacggtgatgatggcccatatggtgaacagcacggtgccgcgcccgccgcccttgggcgccgacgccactggagcaggtggagccccacccacttcggtggatggcgcgcccgccgggcgactgtgtttgagcccgcgcagtacgccgccccccagccgaatcatcatcgactgtggggcgaacacagtgaccagccagccgatggccatgaaaccgcccagcgccagcccggaagcggagaacggcacatcattgagcaacggcaccggaataccccaatccgcggtgaaataccaggagatggtgtgaacgggcagtgccagagccgcggtggccacggcggttcccgccatatagatgatgactagcagcagtatgcggggaatggccagcagcagggctttgaccagatgccagggaaaagtcgccacgcgaatccacgaatcggagtttttgcgctcgccgccgcgtttgccctcgcgctcaagctggggttcggtgttataggccagggtgagcagtagccacaacaacgcagtggccgcgatgatggccacgagcggagcatttgccgccagtgccgccagcggcgccgccagcaggatcaatggcagggtgccgcgctgcagatattcccctcgcttcacgtccaccggattgggcatgggaggattttggaccatggtttcggtgggggccgcttgggcggtttggtcgatgatgcgctgcaatgccgggcgaatggcggggtccaccgctgtgggctggttgcttgcgggatcccagctgctctgggcggtgccggacggggggaatgatgacggctgcggcgtggggagtacggtggtgcgctcggccagcggcgtggtcggggccggagtcgaatcggtgttggtcattggtgtggtggcgccggccattggtgtggtttggtccggcatcggtgtggtcgcgccggtgagtacctgtgtgccggcgtcgtcggtgaaatcggcagcagcgtcgaacaacagttgcgtggcctgctccgcaccggccggcggacgtggcggcatatcggctaagggcagcgtggcggtagcggcgccagccggcgagaatacggcggtttcgccatcgccgttatcgcccttattgccggagaacacggccatggtgggagcctcagcggcttcctcggccgcgcgccagatggttcggggattattgcggtcaacgccgccggccgcgccaaaagggggcatcgcctccgcggcttcggcaacgatcgcagccggttgtccagccacggctcccgcggcgaacggtcccgcctgctcgccctgccaagcgttgggattcaacgcatccaaggcgatggcattcagcaattgatccggcgtgcaacgatccctgcgatccgggtccagtgcagaacggaaggcagccaatgtgccggccggtagtccggaaagattcgcgttgcccgaggcctcgcgctcaagtaccgccatcatcggcttggtgccgaacacaggcgcgccggttgcggcaaaagcgagcacggacgccaccgaccaccaatcggtggcgtcgtcggattcggcaccgtcaataatctcgggtgcgatgaatccgggtgtacccatcactaggccggtgcgggtcacgtgactttcgccctcgcccatcgcgataccgaaatcgaccaataccggtccggcggccgacaccatcacattggtgggtttgatgtcgcgatggacgatgccggccgcatgtacggctttggtggcttcgatgagcttgcgggccaagcgttccagatcgtcgcccacataccggccattggcggccacatcatccttaagattcttgccctcgatgagttcagtgacgatgaacgccaacgtatcgtcgagttccatatccacgatgccgcacacacccggatgattgaccttcttcaaggccatggcctcgcgccgcaggcgctcgcgcggcgtgacatcgggcttgaggttggggtcgtgcagggccgtggacgcagagccggagcctgccactgactcgtcggtcagggagtcgcgcagaatcttcatggcataggtggtgccgccgtcgtcgcgcacccgccacaccgaccccatagctcctgagccgagccgggagatcagcgtatacccaccaaccacttcgccgggctcaagattcaacgcgttcaaatcgctcatgccctccatcctaatgccttgccggtgcattattctggctctctcctgggaggccgagcttgatatttcttggctcccctctctgagaggggagccaagaataagtgccgtttacgtattgagaagtgccgtttacgccattaaggtcgattgccctgaccggatgtggtagcaaattatgcgctcgaaatgacaggataggtgcgtgggcaggtgcgccagtcgtgaatttgcgactctataaccatcggcatcaaggatgtgtcggcggtgacccaaaggtgagccagccgggcacattcaacagtggcacagcgatgcaagggcagtatcgtgagccgctgatcgaatcgataacgatatcagattcgaatgccgcgacttcgccggtcgtaccttcgaatacttctccgaagacggctacctgttcggcgtgatggcctcccagcaggtcgctggcgctcaggccaaggcctgaggtgtgtctccgataactgaatagctaaatagaatggacggcctgctgagtgctactcaacaggccgtccattgtgtatctgaatgcgaaaagtcattatatggaacggaatatatcgatactgtgcattgtgccgattactgattccgacgcaagtattcgcgcaggaagggcacggcaaaatcgacttcgcctcgttctgtttcgcggataacgaaggcgtcaaggaggcgtttgcggtaggtggcggcatagttaggcgttttgcccatgcgctgtgcaacattcacggtgggagagggaccatctgacgctgccatggcttcgagatactcacggtcgtttttggataagccttgcaactccgggatgcacacggcgttatcaaggtcaatacgtgcttcctcgatacctgccgtaacatcagcgtcgatgatggtatccgagtcccgcatgtctgcggcatcccagatatggtagccaaccagttgaatcatataggggtatccggctgtcacattggctgcagtgcttaattgagcgtcggtgatggacatgccggaggcgcggaatgttgtggcgaaagcatcgcgcacttcatcaagaggaatatctgtgagcatgttcgttttcgcgcgacgtaggaacgtgatgacttcgtcattgaacaaatcagaaatcatctgtgggagaccggcgaacacgatggcgatattgcgtcgttccctgatttgatgctgtatggcagtggcgatggcaatcatgtcggatcgctcagccgcttgagtctcatcaatggtgataagcaacccagcatggcgcttctcaagcgcatccaaccgtccggcaatggcacttctcaacgtttcgggcatacgcttcggggatagttcggcttctccgaggccgatgcccgctccagcaaaagtcaacgatggtcggatagtgaggtggtcaagggcccctcgcccggttcgtaaggcatcaacaaggcgttcgcatagtccggcagaggccgtttcttcgatgacatcccatctgcgcgctttggcccggtctccgaacacagtgagcatcacggtttttccggttccatgagcgccggtgacgagcataatgcgccctggggcaccgactccgttatcgagacctttctcgaaatcgcggataactttgcctcggccgatgagcaggggcggttcccctcctgccgttggcttgaatgggttttcctttgccttcatgtggaccgcctcctcgctgaatcaacctaaaataaaaattatcaaaaatatcaaaaaaataaaaattatcaaaagttgggttgagccgactgaagaaaacagccgtggcgacaatgattctgccgcaatccgcggtgacaacaactgacgcggaccttcttggcagaatcgttgtttgtcccgcttcgccaatcaacgtcgctcaagttcggtgcgcagaccggctaccgtagcggtcagctcacgcacttcctcgcgcaataggtcgatttcgggattggctgatgttgcaatagcctcttgcgcggcttccttggccacttccttctcccgagcgtcctcgcgccgatccgtctccagattgacctgatccacgatccacgaagccagcgtggccgtcacaataccgatcaacgcgatgccggtgaacatcagcaccaccgcaatgatcttgccttggaaggtgaccggcgagaagtcgccatatcccacggtggtcacggtcacgaacgcccaccacaacgccgtgccgaagtcggtgatcgtggatccggacgccccgcgctccacggaatacacggccagcgcgcccacgtacatgagcattcccaccgcgccgaccgcgtatacggtgatgcgcccgcgcaccgccatgccggaggtgcggttcagcacgtgcagcacggtcagcaaacgcaacagtcgcaagggccggagcatcggcagcgcgatggtcagcagcgtgaacaggttgtgcttgaaccactgccagcgatcgtcggccaaccacagcgagaccacataatcgacgacgaacaccacccagatcacgttgatgacggtttcacacagcgcgatatgcgtgcgggagagaatttcccacgaatacaccaccagaaacaccacggacagcaccatcagcggccagtccgtccacttcttccacgtcttcagtcccatattccgattgtagtggcgcgtccgctgcgccactgcggagcatgactccggacatcagtgttgtatacgttcgtatacatttcacgttgtgtacgaacgtatacagcggtatttttcatctcgtatttcccttatgactatcaccacagtgatataatcaagaatatgtaaggagagagaaggagccggccaatggagaccgcatcgatcgaactgtggcatggctcttcgcatgtcatcaagcatcctgaatacgggctggtcaagccgaacaacgattatggccgcggattctattgcacgcgcagcgtcgagctggccaaggaatgggcgtgcgcgggactggatgacggtttcgcgaatcggtacacgttgaccacggacgggctcctcttcctggacctgtcccagccgccctacaccatcctgaactggctggccatgctggtcgaaaaccgtcgtttccagccgaccaccgccgtcgccgcgcaaggcatcgaatatctgaaacaagtgtttctgccggatgccagtcaggctgacgtcatcgtcggatatcgtgccgacgattcgtatttctcgttcgcccgcgcttttgtcaataacgcgatttccatcgaccaactcgctgaggcgatgcggttgggcgagctcggcaagcagatcgtactcgccagtcctcaggcattcgcggcactgcggttccaaggctgcgaaatcgcccgcgcttcgacctaccacggattgcgtaacgagcgcgaccgcacagctcgcgaagcctaccgccgcaaaagtgcagaagccgatctcgacggcctgttcatgcgcgacatcatccgcgagaaagtgaccaacgatgatccccgcctatgatgagacatacttgccggacgccatggccaacttggccggcgccttcgattatgcgctgaacgattgcgggttgccggtcggcctattcatggacttcttcgccacctccgaggcggccgcgcttttcgggcgaggcacgcccaaatacgtgtgtggcatgtccggcgaggagctggtggccgaaatcatgcggcaaaccggttgggcgcgcattctcgatatgccgccagccgcactgcgcgccggctcaacacccgaatactgggccggatgggtactcgcatactgccaatggaccaggggagtgcggttctcggacattctcgatgtgctgtcgctcgacgatatcgtgcgactgtacccgactctgcacgaagccgacgaaagccgattcgtcgacgtgtacgacgagcgggccgcccataatcgcaccgagggcgactcccggctgcacacgatccgcgtgcgcgccggactcagccaatccgggctggcccgccgctccggcgttaccctgcgctccatccaaatgtacgagcagcgccgcaaagaccttggcaaagctgccgtctccaccgtgctcgctttggcccgcacgcttggctgccgcatcgaagatctgttggagccgtaaagacgcggagtagtatcgcgccgcatcgattctgataactgaacaactacttttaaggcccggccggatgctcgtttggacatccggccgggtcttctggctccacacggggtgccgaggtatccgttctccgcttcgaggggctgatttggccttccgtagaggtttactcccgtttcgaggggctggtggcccgctagaacacgggtataaacggcttcgccccaccgtcattccgccattttggggatgcgcttacttgagtaccagcccctcgaaacggagatagatctccggaaagggtcaaaacagcccctcgaaactcaagatggcggttgcagggcggttgaggatcagtcgaagagcggttcaaacgcaaatgtgaacaatgccacatgtgattgggcgggtcgctgcacgccgattttcgggggtgcatgggaatggcggaatatcaacgaaaaaccctatatctaggtttgttatgtgacacgcgccactacatatagtgccttgatttcaaatcacaccgctgtaatatggccttcgcttcactgttcatcagaaccacatcaaggggagtcgccatgaccgtcaccgtgttcaccaagccgcattgcccgcagtgcgatgccaccaagcgccagctcaccaagctgggtgtgccgtttgaaaccgtggacctgacgcagaacccctccacccttgagcagctgcaggccgccggtttccagcaggctccggtggtcatcacgccggacaactcctggaccggctaccgccccgacctgattcgcgaagtcgcccagcaggtggccgccgacaaccgcgccgccgccacggtgtccgcgtgagtctgagccagcccgaattcgcggccgaaggcaagacgatcggcgcattggtctacttctcgtcggcctccgaaaacaccgcacggttcgtggccggatgccgtttgcaggacgaaggcatcaacgtctaccgcatcccgttgcgggccgccgacccggcgctgaacgtccgcgaaccgtacgtcatcatggtgcccacctatggcggcggcgtggtcaagaaagcagtgccgattcaggtcaaacgcttcctcaacgatccagccaaccgcgggtggattcgcggcgtcatcgcctcaggcaacaccaatttcggtgaggcctactgtgccgccggagacatcatcgccgccaaatgcaaggtgccctacctctaccgttacgaactcatgggcaccccggaagacactgccgccgtgcgaaacggcctcgtccgcttcttcaccgaacagtaaatcttgaccccctcgaggtattggctcccctctccgaggggagctgtcaacgaagttgactgaggggagcaactgtctgagtaaacacacttctgccatattccaaggatttccaatgactgacctcaccgccaccggcctgccgctcgacaatactgccgacaccgcagcggaacagtacgacccggcgcacgattaccacgcgctcaacgcgatgctcaacctctatgacgccgacggcaagatccagttcgacaaagacaaggccgccgaacgcgaatacgtgacagggcacgtggccaccaacagcaagcggttcgcctccaccgccgagcgtctcgaatacctgatcagcaatcagtactacaaccctgcggtcttcaaccagtactccgctgaattcctcgaccgcatctacgagcacgtggaatccgccggctttgagttcggcactttccttggtgcgttcaagttctacacgtcctacgcgctcaagacgttcgatggtcgcctctatcttgaggacttcccgcagcgttgcgccgctgtggccctggagctcgccgccggcaatgagcagcaggccatcgaatacgccgacgaaatgcttgccggccgcttccagcccgccaccccgaccttcctgaacctcggcaaggcccagcgtggcgaaccggtcagctgcttcctggtgcgcatcgaagacaacatggagtcgatttcgcgcggcatcaacgcggccctccagctctccaagcgcggcggtggcgtggccctgctgctgagcaacctgcgcgagctcggcgccccgatcaagcacatcgagaaccagtccagcggcgtgattccggtcatgaagctgctggaggactccttctcctatgccaaccagctcggcgcacgtcagggcgcgggcgcggtgtacctcaacgcccaccaccctgatatcctgcgcttcctggataccaagcgagagaacgcggacgagaagatccgcatcaagtcgctggctcttggcgtggtgattccggacatcacgttcgaactggccaaacagaaggcccagatggccctgttcagcccgtacgacgtggagcgcgtgtacggcaagccgttcgccgacatctccgttaccgagcattatgacgagatggtggccgacgaccgcatcaagaagacctacatcgacgcccgtaagttcttcaccaccatcgccgaactgcagttcgaatccggctacccgtacatcgtgttcgaggacacggtcaaccgcgcgaacccgatcgaaggtcgcgtgaccatgtccaacctgtgctcggaaatcctgcaggttcaggagccgagcgcatacaacgaggacctcacgtatgcgcatgtcggccgcgacatctcctgcaatctgggttcgctcaacatcgccaaggcgatggatggcggcttgggccacacggtggagacggcgatccgcgcactcacctcggtggccgagcacaccagcatcaacgcggtgccttcgattcgccgcgccaatgaggagggccacgccatcggtctcggccagatgaacctgcacggcttcctggcccgcgaaggcatccagtacggttctgaagagggcctcgacttcaccgacatgtacttcatgaccgtggcctaccacgcctaccgtgcctcgcacgcgctcgccgtggagcatggccgcacgttcgccagcttcgctacgagcgactacgccaagccggccggccagggcaactacttcgacaagtacaccgatggtcgtcgttcgctcactccgtgcaccgaacgggtccgtgcgctgttcgaacagtacggcatcgcgatcccgactgcggccgactgggaggccctgcgcgacgcgattctgaaggacggcatctacaaccagaacctgcaggccgtgccgcccaccggctcgatctcgtacatcaaccattccacgagctcgattcacccgatcgcctccaagatcgagattcgcaaggaaggcaagatcgggcgcgtgtactacccggccgcctacatgaccaacgacaacctcgggtactacaaggacgcctacgagatcggctggaaggccatcgtcgacacgtacgccgaggccacccagcacgtggatcagggactgtcgctgacgctgttcttcccggacaccgccaccacccgcgacctcaataaggcccagatctacgcctggcgcaagggcatcaaaaccctctactacatccgcatccgccagcaagccctggaaggcactgaagtccaaggctgcgtctcctgcatgctctgatcgttcgagggagcgtataccgcctttcttcggcactcgacgtaccttcgtacgccttcggcctcagacggcggtctccgcacgcattgaacaaccagagagccgttgttactcccctcactcggctaacgccgacagctcccctcagagaggggagctggccgcgaagcggactgaggggggctccaccatctaaggaaccaacaatgtcacgaaccatctatagagcactgctccggctgaccgcgccggaggagttcgaaaacaagtccaacgacgataacgataacgataacgacaacgacaacgagtaataaggaacactcatggcacctatctccattccgcgcaaaccgctgaaactcatcgaccgcgtctccgcaatcaactggaaccgcctcgaagacgagaaagaccttgaggtctgggaccgcttgaccggcaacttctggctgcccgaaaaagttcccgtctccaacgacatccccagctggcagaagatgaccgaggacgagcacacgctcaccatgcgcgtcttcaccggcctgaccctgcttgacaccatccagggcacggtcggtgccgtgagcctgattccggacgcgctcaccccgcacgaggaggccgtgtacaccaacatcgccttcatggaatccgtgcacgccaaaagctactcgtccatcttctccaccctgtgctccaccgaacagatcgatgccgcattcgactggagcgagaacaacgagtttctgcagaagaaggcggaaatcgtgctcgactactacgagggcgacaacccgtacaagcgcaaggtggcctccaccctgctcgaatccttcctcttctactccggcttctatctgccgatgtacttctccgcgcacgccaagctgacgaacaccgccgacgtgattcgtctgatcatccgcgatgaggccgtccacggctactacatcggctacaagtaccagaagggcatcgcccagctgagcgatgccgagcgtctggatctgcaggactacacgtacgacctgctcaacgagctgtacgacaacgaagtggagtacacccagtcgctgtatgaccgcgtgggcctgaccgatgacgtcgagaagttcctgcggtacaacggtaacaaggcgctgatgaacctcggctacccggctttgttcccggctgagatttgcgatgtgaaccccgcgatcctggccgccctgagcccgaacgccgacgaaaaccacgacttcttctccggctccggctcctcctacgtgatgggcaaagccgaagaaaccgatgacgacgactgggacttctaagggtttcgcggtccgcgaacccgcagcgccgccgcgttcgtgcggcggcgttacgctggagatatggaacaggatccgttggtcagcatcattattccggtgtataaggtcgagaagttcctcgacgaatgcgtggcgtccgttgccgcgcagacgtacgccaatctggagattctgctggtcgacgacggctcgcccgacaattgcccggccatgtgcgacgcctgggccgcccgcgacccgcgcatacgcgtgattcacaagcccaacggcggcctgtccgacgcccgcaacaccggcatcgccggggccaccggtgcgtacatatacttcgccgattccgacgacaccgtggcccccacgttggtggaggactgcctgaacgccatgcgcgagtatgacgccgacctcgtgatgttccagttcgacaccatctccgagaacaacaagccgctgctgtccaactatcgccacaacgacttcaccgaggtgcagatcctgaccccggtcgaggccatcaaaaagcaggtcaaggctgagatcgacggctatttttgggccttcctggcacccgcctccacctatcagggcaccggattctccttcccggtggggcgcaaaatcgaggatctctcccgtatctgcaacgtgatcggcgaggccacgcgcgtggtccgtctgcccaaggcgctgtaccactaccgcatgcgcgagggatcgattaccgccaactgggatccgcagctcacccgcgactggacccgcgccgccgacgaccgcgaggaatacatcgtccaccgattccccgagctcaagggcttcatgacgctgcaacagctgaatttctttgccaacctcgattacgagaccatgcgccagtcgctgatcgccgggctcaagatcgatcccgaggacgccgacgcgcttcgtcgccgcatcgagggcctggccaagtccgccgatgagggcgatgagccagtaccggaaacgttgcgtgagttgctcggactgctcaagctgggcatcaccaaggtggccgatggcacgttcggtaaggccgatggcagcggtactgatgacgatgccgagaacgatgacgtaacgctggccgaccgtttccgcgacatgcgcgaggactggcgccagctgcgcatccagcgcatcgaaaacgccgaggagcgcaaggccgagcgcaaagccgcccgcaacggcgtcaccttcgagtctgtgttgcattagtcggcgactgatggaatccgtcagttcgggaagagcaggcctgctctacgccgggcgtgccggttcgcacgttcgagaaacaggcgtgtcatgggccgaaccacacaacacccccagaaacgcccataaagttaactacattttcagacacgccacttgccttggtcgcaaggccgtgtatagtgaatcttggctcaacgaagagaaccttcactgaaccggaaaaaagtaaacgctgaagcttgcagtttccgagagcaaagttgtatgtcggtggcgagggcggaagcacagtaaagaacaaatccctttacaacggatcgtgaggcacgtacctgcctctgaaaggattggtaattatggcagaagtcgttttcgaccacgtcactcgtatctacccgggcaacgacaagccctccgtggatgatctgaatcttgatatcaaggatggcgagttcctcgtcctcgtcggcccctctggctgcggtaagtctacgacccttcgtatgctcgccggcctggaagaggtcaacaagggccgcatcctcatcggtggcaaggatgtcaccacgatgcagccgaaggaccgcgacatcgcaatggtgttccagaactacgccctgtacccgcacatgaccgtggccgacaatatgggcttcgctctgaagatcgccggcactccgaaggaagagatccgcaagcgcgtcgagaaggccgctgagatcctcgacctgaccgagtacctcgatcgtaagccgaaggctctgtccggtggtcagcgtcagcgcgtggccatgggccgtgcaatcgttcgtgagccgaaggtcttcctcatggatgagccgctgtccaacttggacgccaagctccgtgtccagacccgtacccagattgctgctctgcagcgccagctgggtgtcaccaccctgtacgtgacccacgatcagaccgaggccctgacgatgggcgatcgcatcgccgtcatcaagctcggtatcctgcagcaggtcggcgccccgaccgagctgtacgatcgcccggccaacgtcttcgtcgccggcttcatcggctccccgtcgatgaacctgaacacccacccggtggtcaacggcaaggcgaagatcggtgaggacaccgtggacctgccggctgaggccgtcaacaagctcaccaccgaagacaacggccagatcgtggtcggcttccgtcctgaggacgctggcctggccccggctgacgacccaaacgccttctccctgaaggttgtgaacgtcgaggatctgggctccgatggctacatctacggcaacatcgtcaccgatggctccgccgctgaggcctcccaggtcatgtccgaccagaacaagctcaccacgattcgtgtgaatccgcgtgcgctgccgaaggttggcgcgaccgtcaagatcaagatcgacccggccaagatgcacctgttcgctccgtcgactgagctgcgtctgaactaatagatacttggcgaggtctaatcgcttcgtcaaccattaaacgaggttattctcttcctctcttatg

SEQ ID NO: 1344 - DNA, 40408 bp, Unknown
  R157_18m  MAG No. k141_22730
acgccacgcgggccaccgatggcgtcgatgacggagaaatcctcgccttcattgccggcgtcggctagagcggacaggccggtgcgtttgttgtctgccaagtctcttcctataaatcagcgaacttcggagaacatcgggccgcgagacagcgtggtcttcacttcggtctgctggtcctggctcagcggacccttcggcttgttgtccggaatgtccttgaagtgttccttgccgttctcctcgccggcttcggccgcggccttggcggccttacgctcagcgggggcgaccggcggatgcatcgggatcagatcgcgcggcgccaaaggctcctcgccacgctcgacgacgatgtcggcgaagaacttgttcagcgcctcggtctccgggctgtccggatcgatagcagccttgccggagaagatgccacgcagcatccagcgcgggccgtccacaccaacgatgcgcgtgttcacggttttgccgcccttgacattgaccggcagcttcagttcggtgccgaacacaccgtccacttcagaagcggccttgttggcttcaagcaggtcaccgcgaacgtcatcccacagtcccagggtcttgggtgcggcaaaggcttcgatctccaggctggaggagccgaaggtgatggtggagccaagcacttgctgggtggcgcggttggccttgatgcgcagctggatgccctggaggaagggcagatagtaggcgccgagatccagataatcgtcataatcgggcacgtcctcatcgttgacatcccacgggcctcgctcttcgccgcggccctggtattcgctggccggctcggcgagcacggtctccgcgctctcggcctttgcggcagcgttcgcttctgcggcggccaccttgtcctcatcgacaggctcaacggccggctcggcttccttcttgctcttcttcttgccgaatccgaacagtcccataattcctcgtttcgtataacggttgcaaccttgctaacactagcactcaggcttagagaaagctgagcatcgcggccgccgatgtccggttcgattcgtagggaggccaaaatagtatggccgcatgaccatcaccattaccacgtctaacgtcaacggcattcgtgcggccaagcgcaagggcatcgaggattgggccggcaagcatgcgccggatgtctggtgcatacaggaggttcgcgcgcctcaggacgatgtcgattctattttcgatgaatttggtttcgaatacgccaccgccggcaaaatcgaggcaccggccaacctccatgccatgaacgaggtctgccgggtgaaaggccgcgcgggagtcgggctgctcaccgacttggaagtgcttgacaagcgatatggtctgccaggtctgagcgaggatgtggattcggggcgttggatcgaaaccgatctcaaaacgcctgagggctatacgatcaccgtggcatccgtgtacatacatgccggcaacaccgatgatccgaccaaaatggaacagaagtaccgttttctggacactatgctggcccgcatgggcgcgcttcgtgatgaagccgcacatggcggcaagcaggctgtattatgcggcgatttcaacatcgcacacacgccgctcgatatcaagaacgccaaggccaatgagaagcacgccggattcctgcccgaagaacgtgcctacgtggacaaatggctggacgaatacgagttcgtggatgtgatgcgttcgttggccggcgacattcaggggccatacacctggtggagccagcgagggcgcgctttcgacaacaatgtcggctggagaatcgactaccagttcgccacgcccgagttggcggagaccgcacgcggattcgtcatcgacaaggctcccacgtatgacaaacgctggtccgatcacgccccactcacgatcacatacgaggtatgacatattccgtgggacaacatccgaaaatcgacgattttcgcgggtcgtcccacgccccacagcatgagtaattatcgaccacactaagaatggcgtaattccgggcttcgtgagaaatctgctgtgggacaacactcatgtccatcgattgatgttgatgttgtcccacaaattgtgggacaacatcgggaaaacaccaatttttgcctttcgtcccacgcgaaccatcatgcaaacctgcacatacgaatattgggttctttccacggatggaaagaacccaatacaatgcgctcaaacgcagattatcagtccagaccaagctggagcttgccgccggggatggcgtcgagcaggtctcgggtgtactgcttctgcgggtggtcgaagacctcatcggtggtggcgtgctccacgagcttgccgtgctgcatcaccacgacctcatcggcgatctggcggaccacggccagatcatgggtgatgaacaggtagctcagacccttctcggcctgcaggtcgttgagcaggcgcagcacctgatcctgcaccagcacgtccaaggcggagacggcctcatcgcacacgatgacgtccggatccagagccatggctcgtgcgatggcgatgcgctgacgctggccgccggaaagctcgttcgggtaacgacccatcacggaagccggcatctcgaccatgtccagcagttccttgacacgattggcgcgcgacttcttatcgccaatcttgtggatgcgcagcggctcctcgatggaacggaagatggagtacatcgggtcgagcgaaccgtaggggttctggaacaccggctgcacgtggcggcggaaaccgagcagatccttggccttgaacgtggaggtgtcgcggccttcgtagaacaccttgccggaagtgggatccaggaggtgaagcaccatgttcgccacggtggacttgccggaaccggactcgcccacgatggccagggtggtgccgcgcttgacggagaaggacacgtcgtcgacggccttgaacatctccttcttgcggggcagcttgaattccttggtcaggtggtcgacggtgatgatgtgctcgcttttctcaagcgtgctttcgccggcgatgtggtggtcaagcagggcgtccgcgttctcaccgcgctccttggcggagatgatgcgctgggaggccagcgacggggcggcggccacgagtcgcttggtgtacgggtgctgcgggtgctgcagcacctcgagggacggaccggattcgacgacctgacccttgtacatcacgacaatgtgctgggcgcgctcggcggcaagacccagatcgtgggtgatgaacagcacggcggtgcccagcgagtcagtgagcatgtgcagatggtcgaggatcttcttctgcacggtcacgtcgagggcggaggtcggctcgtcggcgatcagcaggtcagggcggcaggccagaccgatggcgatgagcgcacgctggcgcataccaccggagaactcgtgcgggaactgacgggcacgggtagcggcgtcgggcagaccggcctcggacagcagacccgcgatgcggtcatccattgtggagccgatgacgtacttcttggcgaggtaccaggcctgatcgtcggccacgccggccttgatgaggtcgtcggccacgcgccaacgggtttcggagcccggaacccattcgttggtgaagcgggcgacggccttgtcgaaggcctcgccggacacgccggcttcggtcaaagccttctttgcctcggtcatgagctcgggcagttccttggcgccgaggaaggtctcgtcgtcgttgcccttgacttcgacctcgtcgccggccagggccttggcgagggcggagcgcttctcgtgggccacgtccatgttgttggccttcagtgcttccttgacctgggtgccgatgcgccacaccgggttgaggttgctcatcgggtcctgaggcacgagacccatcttggtgccgcgcagcttgtcgaactcgctctgcttggcgccggcgatttcctcgccgtcgagcttgatggagccgttgaccacgtgaccggtgccgggcagcaggcccagcacagccatggcggaggtggacttgccggagccggattcgcccacgatggccacccactggccggggtagacggtgaagttggcatcgcgcaccgcatgcaccggcttgccggtgtcagtggtgaagtcgatggccagatccttgacctcgagcagcggaccatgctctttctgcatagccagcatcttggcgttggtattgtcagtcataatgattctccactcccctcgctcaggccgtacggctcttcggatcgagggcgtccttgacggcgtcgcccatcatgatgaacgcgagcacggtgatggccagtgcggcggacgggtagaacagcaccatcggatcggtctgcaggttggtctgcgcgctggagatgtcgccgccccagctcaccgtggtggtgggcaggccgacgccgaggaagctcagcgtggcttcggccacgatgtaggaggccagcgaggtggtggcgatgacgatgatcggggccagggagttcggcaggatgtgacggaacaggtttctggcaggcgtggagccgagggccgtggaagcggtgttgaattcgaggttcttcgattccagcacggcgcttcgggcgatacggcatacgccgacccagccgaagagcgtcagcaccagcacgatcttccagatggacttggaggtcttgaacatctggagcaccacgatggcgccaagcagcataggcagcgcgaagaagatgtcggtgatacggctcagcaccgcgtcgacccaaccgccgaagaagccggcgacggcaccgatcagggtaccgacgatcacgaccagtagcgtggagagcacgccgacggacagtgaggtacgggtgccgtagaccacgcgggtgtacacgtcacagccctgcaggtcgtagccgaaggggtgtccggtggaggcggggctcaaggagttgcccagatcgcaggcgttcggatcctgcttggtgaacagaccgggggcgatggccaccacgatgatgaacaggatcagcaagccggagatgatgaacagcgggttgcggcgcagggttcgccatgcgtcggcccacatgctggtggccggtgcggattcgtcgacggaatcgacgtcctgcaacggggtctcgtcgagaggagctacgtaacggtcctgaccgggcagggtttccatgaagtattcggttcctggctcgccggtctggttgagctcgttttcagtggtttcgtttgccatgtgactcactcctccctatcacgcgtaacggatacgcggatcgagggccgcgtacagcatgtcgacgacgaggttgcacactacgaaaatcagcatgagcaacgtgacgatggacaccaccaggtttgcctcgcccttcagaatggactggtaggtgaggaagccgatgccgtggatgttgaagatctgctcggtgatcatggcaccacccatcagggcgccgatgtcctggccgaggtaagtgacgactggaatcagggagttgcgcagtacgtggcgcagcatgacctggccgttcgacatacctttggcacgtgcggtgcgcacgtaatcctcggcgatgttggaggagatttcggagcgggtcagtcggatgatataggccatcgacaccgaaccgagcaccatggccggcatgagcagatcaaggaagccggggtcggcgcctgccgtcaccggcaatatcgcccactgaataccaaagacatattgcatgacgaagccggtgacgaaggtcggcacggaaataagcagcagggagacgatcaggataacggtgtcgtaccacttgcccttcttgaggcccgagataatgccgaagaccacaccgaaaatcgcctcgaacacgaacgccatcaagccgagcctgatggtgaccgggaaggcgcgggtgatttcgtcgagaacgggctggccggcgaaggtatcgccgaagttcagggtcagtgcattcttcaggtagatgaagtactgaacgatgaacggctggtcgagatggtattctgcgcggatctgggctgcgacggcctcattgacaggcttgtctccgaacatggccttgacggggtcgcccggcagggcgaatacaagggcatataccagaagagtcgtaccgagaaccacgggaatcatctgcagaatgcgtcgcagaagatacttacccatacggttgctccttatttcctagaccggccagaaagggtatagtacgcccccgccggtcgataaatactccgacagtttaccgcatgcccggactgtgatatgtaaatttgcgttaacgcaaggtttgagattgggcaatgctggtggatatgtccatggttgcggtcggatagtggatactttaacttggttcccgatggcgtgagcaagcacccctcacacaacaaaaagggcggggatcttgcgatcctcgccctttatttccgaactgcctaacggtatccgttcagtgagtcagactcacttcttggacatctcggtgtaggtcgggaggttctgccaatcgaaggcgtagccggacttcacgctgagggaagccgcgccggaggcgttggagtagtacagcgggatggccggaaggtcgttgaggaggatttcctcagcctgctggtacagcttgttggcgtcatcaacggacttggcggcggcggcctgcttgcacatgtcgtcgaaggccgggttcttgtagtcaccgtcgttggagccgttgccgtcagcagcagcggtggagtacagctgccacaggtagttctcggcggacgggtagtcaggctgccagccggtacggaaggcgcccttcatctgacggttggtgacggcgtcacggaactcctggaaggtcgggatcgggttggtggccgcgtcgatgcccaagttgttcttgagctggttcacgacggcgtcgtaaagcggcttggcaccaccatcggcgttgtaggagaaggtgagctggccgtcgtacttggagatggcgtcagccttggcccacagttccttggccttggaggcgttgaacttcaggttgtcggcacccttgagggagtcggagtagcccggggtcttcggggaggtgaactcggtggcggcggcggcgttaccgttgagcaccttgtcgatgagctggtcacggttgatggccatggagatggcctgacgacgcagctgaccttcctcgtcgttcttgaagtgatcaagggaggacgggatggtgaaggtctggatgacggagccgacctcggagtaagcctggaccttcttgtcggtcttgaaggtcttggtgaaggcggccgggacggattccatcacgtcgaggttgccggcctgaatgtcacggtaagcggcggagtcgtcggtgtagaccttgaaggtcacgccgtcgttcttgggctgctcgttacccttgtagtcagggttcttgacgagggcgatttccttgttgtgatcccagtggtccagcttgtacgggccattggagacaggcttctcgccgaaggccttcggatccttgtagaaggattccggcagcggggcgaaggccgagtagccgaccttaatcgggaacacggagtcggactggttcaggtcgacggtgaaggtggtgtcgtccacgaccttgaggccggagagctgctcgtcacccttgaggccatccttctgcagatcgtcatagccggcgatggtggagaagaaggaggagcacttctgggcgttcttggcgttggccacgtaggaccaggccttggtgaaggactcagcggtcaccggagtgccgtcggtgaacttccagccagacttgatcttgatggtgtactgggtggcgtcatcgttcggggtgatggactcggccacttcgttggaagccttgccgtccttgtcgaaggagaccagacgggagaacagcaggtcgaccggcttgccgccgccggtttcgttggtgttgcccgggatcagcgggttctgcggttcggagttgtacgcagtgatgatgttggagccagcggtgttaccggaggcagcgttgctgttggagccgccgcaggcgctcagcagcatggccacggagcaggccatggcagcgaaagcaagagctttcttcttcatatgatttctcctattcattaggttgcaggacgtctcagccccgcctcatgcaaacggggctggattccccgtcaccgtgagacttgcatctcacgatgtctcgaacaatccaaccccgttgctgattacctgtcatttttgcgcacttgggagacaagcagtgtattttttgttacacccatgtaaaattcaggggttcttgccggctaggttcagtctttgctgagtttgttaaccaatgtccacatagtggtcatgcccgcggaaaggcctgtccgtaacggttcttgagctgctcgatggagacgtgcgtatagcgttgtgtagttttcaaggaggaatgcccgagcatctcctgcacctccctcaaatcggcaccgccgtccagtatgtgcgtggcggcggaatgacgcaacgcatgggggctgatgtccggcacgccggcctctcgggccgctctgtgcacgatgtcacgggctatgcgttggtcaatacggccgcctcgtgcgccgaggaacagggcgttggcagcacgggacttgactgcatccgttgccgtacgggccagtaccggccgcccctgttccagccaagtctccagcgcacgctgggcgggtagtccgaacggcaccacgcgttgcttgttgcctttgccggtgactttgatggtgcgattggagaagtcgatgtcggcgatatccatcgacaccagttcggcgacacggatgccggtggcatacagcagttcgagaatcgcggcgttgcgctgcgattcggcggtgactcgggcgttgtcgcgcttgtctgcacgggcgggtgcctcactgcggtttacggtatcggccgacttatcagctgtcttgccgctgccgctgccggacgcggctgccgctcccccatcgtccttgtactggtttgttgcaacggcatgttcagcgacatccaataattgctcggcctgggattcggtgagcaccgcgggcagcgtgctgggaatcgagggagtcatcagtgtggcggccgggtcggtggtggtcagcccatgctcataggcccacgcgaagaacccgcgcacggccacggttttgcgggccatgctgctgcgggcgtgatcgcgcgattccaccgccatccagctgcgcagatcatccagcgtgatctcgttcagatcggtcacgccgcgcagctcgaacagatgcaggcatgccgtgagatccgcgcgatacgctttgagcgtattcgctgacaggccgcggttggacttcagataggagacgaaggagtcgatatcgccgtcgaactgcgtagatgacactctcgttctcctccgaattctttatggccttgggttacggccggggtggcgtgttacgccgctccggcacgggtttcaatgtggcaatctgttcctgatggatggtcacgttctgggccgggcgcgaaccattggcggcggcgtcacgcaccatctccaacgtgtatccatcccaggaaaccacatgccccacatagtcgcggaacttcatacggtggtcgaccgggtcaatgccgtcggtgatgcgcaccaccacgcgggcaccggccggaatctgccttggtaacgtcatacgtcatcatccccttagccatccgccgcatcaacttctatgcgtttcctgaaaaacggtacagactaccttactcctttgggtctttcgaacagcggagccacacggtcttctcacgaaaacaagcgggaacttcatccccctcgcgcagccttcttcgtgacaggcggcgaggggaacctgcacacgggctgcatggcggggcgcagttacatggcggggcgcagttggacgatggcctgacgcggatggatgaaaccggtgatggcttctccccggcgtgcggagaacagcaaggtctgctgccagccggcttcggggacggcgagctcgcgttccgggaatccggcggcagttgtgccggcttgctgcgcggtggccgtaccagcttgtgcagcggtgatgccggctcgcgtcacggcggccttgtaccggcggaaggggtcgccttcggcgaagaatcccatcacatcctgctcgccgtcggcaccagcgtgcagttggtcggccatatcggtcagacatgccgccatgcggcgcagcagcacttcgacgttcagcgagtcttcctcgaccatcgcgcgcgtgcggtccgggtcggtcagggacacgcgggtcatgtccctccagcagccggcagccagcgcggcggcgatgttgcggtccgggttggcgaccagttcgttgatcagcgcggtggacaccacatgcggcatgtgggagatcatcgccgcggccttgtcatgcgtttcgtcgtccacgacgatgacgcggttgccgacgtccttggtgatcatcgtggcgacgtcgaggaagcggcggtagtccgtggactcgtccacggtgatggcccatagggcaccgtcgtacagatgcgggtcggcggcctgccagccggacagttcgttgccggccatcggatgggcgccgacatagcacttccccagcgcggcagccttgacctgatcgcggaccatgcccttgactgagcccacgtcggtgagcgtggtgttcggatggtcgcccataagcggggctagggcggcgaggattgagggcatcgccttgagcggattgcacagcacgaccacatccggctcggcatccatgagttcggagagcgtgctcttgcagaaaatgccatcggcttcggcctgggcgtaggggtgcgagcgatggttccacgcgatgacgcgtacgccgcgctcggtcaggcggcgtgcgagcgagccgccaatcaatccgagtccgacgattccgactgtgtctaccacagcagttccttccttgctccctcggcgtactgccagccttccgacgcgcgattggtgatgtggacgccgccctcgggcagcatccaggcgtcgaccggcgggttcgggcgttcgcggcgtgggtagacggccagggtttttgcccagtcgccgtgtccggcgatctcttccagtgcggtgcggaatcttggctcccagggggcggcgtcaagggtggcgatgaagctgtaggttccgtcgtggcctttgatcgggcgcgagatgaagctggtcatgttcagccccgcatcacgcaggacgtccagcaggtcggcgagcacgccggggccggtgaccagcgggatgaaggtgatgatggtttcgaagtcgccggcgtcattgcggtgggcgcgggcgttgaattcctggaccacatcacgcggggcgatgacaaggaattcggtgtgcgcgccatcgaaatcctgcacatgttcggcgagggtgtcgagatcgtagagttcgccgcagatgctggggccgagcgccacgcggccgggcttcaggtcgcggcaggcggcggcgttggaggatgcgggttcgggctgcaaatggtgttcggcgatgaaccgggtgcattgggccaggccgtgcgggtgggcgctgacggggttgccggtgcagtcgcagatgctgtggccgcgcacggtgaaggcgttgaaggccacgtccacactgatccgggcgaagccggccgcgtcgggggcgtcgatcagcgcgtcgagattcgggaccacatagccttcgacgttgttttcccatgcgatgacgccccagccttggcgcgactgtacggcctgcatgatcgcgggcacgtcgggcagggcggtgaggtcgaagtcgccgagtgtggcgaactggtcggcggccgtcattgccgcctgatgggtgaaggtgccttccgggcccaagtaaaacagtttcatgcgtgccataaggttctatggtagcggccgtaatcccctacgcccgccgatacgcgacgcattcgcggaaatgtgccgccatatatagttacgcgcgcgattcagaatgagtgggaataacgaaccagcgggcgggaagaatgagcaggacgacttggaccagtatcaggccgtacagccagatgtagccggcatgctgggagaagaacggcatgtcgccttggaatccggcgacgatgaccgccttgccggatgtggtggtcagtgccatgccccatgcggtcagcgaggaggcgatgaggtgcagggccagtccgaccgcgcccatgcgcgaacgggcgcaccatgtcgataggccgatcagcagaaatgccagcaccagaccatacggaatactcagttctgcacccatacggtgggcgaacgtgcccacaaaggcggaagccacgcccgccgcaatcgtgatcaacgatttgaccagcgcgttctggcgatacgaccacggacgcagttcagtagtgctcttcacagtcatgcgtttcagtataggtggggatatgacttggcgaggaataaacttggctcccctcagagaggggagccagagagaatggtcggctacagtcgcaccagatcacttaccctgctgggcggcgttctggcggcgctgcttggcgcgccacttgtaccagtcctcacggccgaggatgatcttgcgcacgcggatggactccggggtgacttccacgcactcgtcctcgttggcgaagtccagggactcctcaaggctcatcttgatcggcggggtcagggtttcgagcacgtcagcggtggaggaacgcatgttggtcatgtgcttggccagcgtgatgttcacatccagctcgtcgggcttgttgttcacgcccacgacctgaccctcgtacaccggggactgcggttcgacgaagaagttgccacgggcctgcagacgctgcatggcatacggagtggccacaccctgacgatcggaaaccatggaaccgttctgacgaatggtgatggcaccagcccacggagcatagccagcggagatggaggaggaaatgccggtgccgcgagtggcggacagcagagccgtgcggaagccgatcagaccacgggacggcacggtgaactgcaggcggacccaaccggagccgtggttggtcatgccgtccatacggcccttacggtcggccatgagctgggtgacggtacccatgtactcttccggcacgtcgatggtggtgttttccatcggctcgttgaccacaccgtcgatcttcttggtgaccacctgcgggcggccgacggtcagctcgtagccttcgcggcgcatctgctcggcgagcacggccagcgccagctcgccacggccctggacctcccaggcgtcggggcggtcggtgggcaacaccttgatggagacgttgccgatgagctcgcgatccagacggtccttgatcatgcgggcggtgagcttgtggtccttgccctcggtgccggccagcggggagtcgttggtgccgaaggtcatggagatggccggatcgtccacgtggatgagcggcagcggcttcgggtcgttggggtcgacgatggtctcgccgatcatgatgtcgttgacgccggcgacggccacgatgtcgccggggcccgcggactcgaccggggtgcgctcgaggccctgcgtgcgcagcagttcggagacgcggaagttctcgagggagccgtccacacgggacaggccgtaggtcttgcccttctcaagggtgccgttgtagatacggaccaaaccgagtcggccgaggaagtcggaggagtcgatgttggccacgtgagcctgcagcggggcgccttcctcgtattcgggggccgggatggtggagatgatggcctcgaacagcggctcgaggttgtcgttgtccggcaggccaccgtcggcgggctggttcacggaggcgtagccggccttggcggcgcagtagatgaccggcatctccagcagctggtcgaggttcaggtcgatgccctcgtgctgcacgtcgtcggccaggccgagcagcaggtcggaggtttcgccgacgacctcttcgatacgggcgtcggggcggtcgaccttgttcacgcacaggatgaccggcagcttggcttcgagggccttgcgcagcacgaatcgggtctgcggcagcgggccttcggaggcgtccacgagcagcacgacgccgtcgaccatggagatgccgcgctcgacctcgccgccgaagtcggcgtggccgggggtatcgatgatgttgagggtgatgccctccgggtggccgtacttggcggccagcggaccggtgtattccacggccgtgttcttggcgaggatggtgatacccttctcgcgttccagatcgttggaatccatcacacgatccggcacttcctcacgctcggaaaacacgtgcgactgctgaagcatggcattgaccagggtggtcttgccgtgatcgacgtgagccacaatcgccacattacggatatctccacgaaccgccatcgaaacctctcttaatactgattttcttgcgtaatcgttcggtacttgcgttctcgagtacttgctcttggatatcaacctgtacctacacacaaaccgtcacgatgttactggcacaccttgacacacaacgggcccggctttctgagaattagtcacatgtcatctggcttgcgagactttttgtattccacactctcgactcccctccctgaggggagctgtcgccgtgggcaactgaggggcgccaagtgtatcccctgaatctcccctgaatcatccctgagtacagcaccgtcatgggtagttactgagtaacctgatatccaacgatagttactcagtaaccttcgcccaaggcaaaccgtctatgcaaaggggatgcggtatggcaatcagagaagcgctattagcactgttggagcgaggcccggccagcgcctatcagcttaagaaggacttcgaccgcaccatcggtctgacttggccgctcaatatggggcaagtttccactacactgcagcggttgaaccgcgacggactgattgaagagaccgcgccgactactagcggatccaatgatgtcggcaccgcagcggccgcaccattatggcgattgaccaattccggcgcccaagagcttgaccgatggtggcgctcccctattaccccggaacaacgcggacgcgacgaactggtgatgaagctggccgtcgccgtggaaatacccggcctcgatgtttccgaactcatccaacaccaacgccacgctttgcagcaactgctgcacgacatcacccgactgcgccggcaaacaccgcccaccgaactcgccacacgtctagtactcgaccaccatattttcatcactgaagcggaattgcgctggctcgataccgtggatgagacccagctgcgagcacaactggcgcagcaccccgtttcggcacctctcacggcaagctcagccgcactcaccgccaccattcaatagtgcataggagcacatcatgacttctcccgttctttcttctctcccgcaatcctccccatgcgcgctggaattacacgacgtcactcgcgttcacggcaaagatgcacgtcgtgtcaccgcgctcagtcacgccaatctcacgcttcgcccgggtgaattcgtggccatcatgggccccagtggttccggcaaatccactttgctcaatcttgcgggcgggctcgatgtgcccacgcaggggcacgtgctggtcgaaggccgcgatctggccacactgtcagtggccgaacgcgcggccatccgccgcaaatcgataggctacgtgtttcaggatttcaatctgctgccttccctgagcgcagccgagaacgtgtcgttccccttggaattggatggctggaatccccgcaaggcacgtgaggccgcgatgcaatccctcaatgaagtgggggtagccgatatggctgatcgccgacctgaagacatgtccggcggccaggcgcaacgtgtggcgattgcccgcgcactggtcggcccacgccgtctactactggccgacgagccgaccggagctctggattccaatgccggcatgacgattctcgaagtgttgcgcacccgcgcagatcgcggcgcggccgtactgctggtcactcatgagcctcgcttcgccgcctgggccgaccgcacggtgtttttgaaggacggccgtatcatcgatgaaaccggctccagcaatatggatgatttgctcaaccttgaggaaaggggagcatgatggcacgcgcagccctcaataatcttgccaatgccaccgtcggtcgctctgcccaaattccccatgccgctaggccaagccttggcgcacgttgcaaccggtatcgggccgcgctgcgactcggctggcgcgacgcactacggcacaaggcccgcaccctactgtccttgctgctggtaatgctgccaatcgccgcaatggtggcctccatcggtatgaccaccaccataccgcccaccagatcgcgtgcgctggcgacaatcccggctgatacgcaggcggtcatcaccgccaccgccaggccccgcaccggccaaccgttccggcagtcacccgaaagcggcggcacgtggcaggacgatccctcccagcagccggcctcggccgccgagcttgcgaagattctgccgcaacaggatcggctgctcccgtattggcagtcgcccgaactcatcgccatcaccggcaccgcgttgcaacccggcgaacagaccaaggctgggatcgacgtgaaaagcgggaacgacattgatctgaacgcggcctccaccgcgaccatgaccgaggcttcacctgaggcattgcaacgaatgttgccgaagctggtcaagggttcggcgccgcagaataatacgcagattgtcatcagccgcacattggcggataatctcggcgcttctctcggtagcacggtgacgttcgtcgctccgccgttcgatggctggatgagcctggacgggcgcatcggcgaggcggtggccgacactcagcgtgcttggacagtcagcgggctgaccgatgaatccgaagccgcggcatggggcttggaaggctggatgtcagccatattggaatctgatggcgtcggtgtggatggccattatttggtggtcggtccagagccggtcacgtgggcgcacacccgcagcatgaacctgttgcaggccatcgtcatttcccgccatgtactgactgacggctatccgcccgcatcgcagctctacccgatgcagatcgatgcggctaccatgttgaaccacatggtcactgtggtcatcaccatgctggtgggtatgttgctggtactgtttctggtcacgcccgcgtttacggtgtcggcagatcagtcacgtcgtgtgcttgggctcgcggccgcatccggtgctgcaccacgtgacctcagtcgaatcatttcctcgcaaggtctcgttatcggcgccatcggtggcgtgctgggctcggcattgggattcgcgcttaccttggcggccggccctgcgataggcgcattgcgtggatccacgccgctggagatcctgcacggattctcgtggggctcgctgccgatgggtattgccacggcaatcatcattggatttgccgcgacgattgcgccggctcggcatgtggcgcgtatgcatccagtcgatgcgttgaaggattgcccgacaagagaggaaatcggctacggtgaatccgcgaatggcgtggatacgaagcttcgccgtaatcctttgagactgctccgtgttgcggttggtccgattctggtcttggtctccatcgtatgcgccgcgctcagtctgacattgccattgcccacgctggccgatcacaatccgggcgcggttccggccggaaccgaaacgcatatggctctgcttgttgccacgattttgttggctgtcatagggcttgcgttgtcgattcgcacttttgcacggtggtgcggcaaagcgggttcccaactgaacatcggcgcacgcctggcactcagggatgcagccgagcatcatcgacggttcgttccggcggcatgcgcggtgctgattaccatgtgcatcgcctcgtacacactggtaatcaccggctccatggtggcggaccagcgaaattccacgatgacgatgacgtatggaccgtcggggatggccattggggccgacgtgcatgtcagcaatgagttcgaccgtgctgtggtgtcggatgcgatacaccggcttggcaaagagacgccgatacgcgctcattacccggtgtacaccgaggatgtcaagcgatggtcaaagctcaatgatacgaccgaagtcgattccgacaagttgaacgccgaacacggctacatgtatgccgctgcattgctcccggccggtcacacttgtgataacccaacgatccaagagcaaccggacacgtccacatgggtgggccaggatgccgcttcggccctgtacccaaacgttccgatacgttgtgtgccgatagaccgatcccatcagccaacgtattcgaatatactgccgagtttccgcggcgtgaatctcattatggatggcaatgcgatgcgtttgtccggcttcccgaacgcggatgaggcggcacaggtgcttgatgcgggcggtgtggtggtcggcgatgccggcacaatcgacgcgggaggtatggtgcgtgtggccatttcgccgaatccggcaattgcaaacgaatctcaggccacacatatcgagaagcgcaaggccatctacgtgcgcggcgcgtacccgctggtgatgagcccggcaacagcacaggcgctcggcatcaaacaattgcagtatctgggtgagtatctagacttcgccggtggcaactcccccgttaccgtaaagaaggcctcagcttatgcaatcgaaaatctgccgctggcatccacgagcactgacgggaatcgcctgccgtggggtgacaatatggcattggtgcccattggcctgttggcattgctggcactgatggccacgctcgtttcactgctgctggcccgcacgcaggcccagcgcgacatggccacgatggtcgccgtgggcgcgccaccccgattcctcagacgttacggcctgacgcaggctgcggtgattctgctggccggcgcgccagtgggcgtggtatccggcgtggcgttgggatggctgcatgtggcatggaaccgcaggatcggtgtggacggtcattggctggaaaccgtgccgatctggggattgcaggcggcgctggcattcggcgtagtggtaaccggactgctggtggcgtggctggtcacaaaaccaccgcgcaatctcacccgtcgttccctcgattgatcagtgacatacggcaacccttgccgtgtcattcgggagctataagacaaaaagtggcccacacattggtgtgggccactttagtagcgaaggctgaagtgtaatcagtcttcgagattgaggcctttgcgctcgggcaagcagagggctgctatgcaggcgaggatgaaggcggcggcgaagatgatgaaggccacggccttgttgccgccggacagggtcaggaaccacggcatgaggagcggcgcgatgatggcggcgatgcggcccaccgcggcggcggcaccggcggccacgccacgcaggcgggtcgggtagatttccggggtcacggcgtacaacacgccccacgcaccgaggttggaggcggacagcagcatgccgaacacgagcacgagggccgctgatccggcctgcgagaacgcgaaggcggccacggcggagacggccaggaagatgctcagcgtcttgcggcggccccagacctccaccagccaggcggccaggaagtaaccgggcagctgggcgatggagatggcgagcgtgtagccgaatgacttggtcagggagccgaactggtcggcgagcagcgacggcatccatgtgaacgcgccgtagtaggagaagttcacgaagaaccacgtggcccagatggcgatggtgcgggccaggtacttggagccgaacagctcgcgcgtcttgatcttcggcagcggcttgcccttgggagaggttaccggggccactcccccggcttcctcgaagtagcgcacggccttttcggcttcgtcttcgcgacccttggcttcgaggaatcgcacggattctgggatgtgcacacgggtgacgatcgcgtagagcagtggcagcgcgccgatggccagcgcccagcgccagccccagtcaccggtgttcgggatcacgaagtagccgattatggcggcgatgatccagccgacggcccagaacgattccagcagcacggtcatgcggccgcgctgtttggtcggcgaaaactcggagaccagcgtggaggcgaccggtagttccgcgcccaagcccagtccgatgatcagtcgggcgccgagcagcatgccgagcgaccaggacagcgccatggcgccgttggcgatgccgaagatgatcagcgtggcggtgaacacggttttgcggcccacgcggtcggcgatgaagccgcccaccgccgcgccgatggccatgccgacgaagccgatggacagcacccacgacttttcggtcggggtgaggttgaagtgcgggtcggctgcgatggcggcgaccacgaaggaaacgaggccgacgtccatggcgtcgaatgcccagccgatgccggaggcgacgaggagtttacggtgcgccttgttgaagggcagccggtcgaggcgctcgttgcgggtgagctgcgcgggttgcgctggagtggtggtgctcacggcgtttcctttctggtaagtggcgtcagatttagtgtcgggtcaggtcggtgtaggactcttcgatggccaagctgatgcgttcgacttgttcgcgggtcagcggcttgcggaaggtcatgcgtaatgccgatttggcgatggacggttcgaggcccatcgccagcaacgtggcaggaatctcgtggcgcccgatggcgcaggccgagccggatgaggcagcgatgccacgcgcgtccaggtcgacgagcagcgcttccccggtgacgccggggaagatgaaggaggcgtgaccgggcagacggcgttcggggtcgccggtcaggtcggcgcgaggcgcgacccggcgaaccgcgtcgatgagcgtgtctcgggacgcgaccaactcacggcactgcacctgcatgcgcgcattcgattcgttgagtccgatggcaagcgccacggcgccggccacgttctgtgtgccggagcgcaggccgcgttcctgccctccgccggacagcaccggttcgatgggtgtgcggccgcgtaccagcagtgcgcccagtcctttgggcgtgccgaatttgtgtccggatacggacagggcgtccacatcccagtcacgaaaacgaatcggaatctggccggcggcctgtacggcgtccacatggatgggcacgccgtgcgcgtgggcgatgcggaccagttcctccacgggttccacggtgccgacctcgttgttggccagcatggtggagaccagcgtggtacgttcgccggcctcgccgtcaagctcgcgttcgagcgcgtcaagatcgagatgcgcctgcgcatccacgggaatgcgcacgacttcgaagccgaaccattcgtgcagccatgccgccgattgggccacggccgggtgctcgatagcggaaatgataatgcgcgggcggctgcttgccagttgtttgccatcggtttcgtcgagtccgtagaccggccgcaggcccagtttgcgcatgcgcgccatggcgatgcctttgatggccagattgtccgattcggtgccgcctgaggtgaagatcacgtcatccggccgggcgcccaacgccgcggcgaatgatgcgcgggccgcgtccagcgcgcgggccgcggttttaccgggctggtgcacactggccggattggcgtaggcctcagtcaggaacggggtcatggcctcgatgactgccgggctcactggttcggtggcggcggcgtccaggtacagttcaccgggttcaccggatgcgttgggggtatcggccatgactagttccaatccaatccaaggtcgatgctgcgcaccgagtgggtgagcgcgcccacggagatcacgtccacgccggtggcggccacggctggcactcgctccaggctcatgttgccgctggcttccacgatggccttgccgtcgatgagctccacgccgcgacgggtgtcgtcgagcgagaaattgtccagcatgatggtgtccgctccgccggcgagcacggcgggaatctggtcaaggcggtcgacttccacttcgatatgcgtggtgtggcccacctgttcgcgcacgtggcggatcgcgccggccaggtcgatgccgcgcgcggcgagcgccgccagatggttgtccttcatcatgaccgcgtcggacagtccgtagcgatggttgtggccaccgccacagaccacgccatatttctcgaacgggcgcaggccgggcgtggttttgcgcgtatcgacgatgcgggtgcgctcgtagcggcgtggccgggtgacgggtccgtcatagtcgtcgccgtagatggcgttcaccgcgtccacgaaggcggcggtcatggtggcgatgccgctcatgcgctgggtgaagttgagggcgatgcgctcggcggtgagcaggtcgcgtaccgggccttccacggtggcgagtatctggccgcgctggaatcgctcaccgtccttgacggtgacggtgacggtgacggccgggttctgtgcggcgaaggctgcggcgaacacgtcgatgccgctcatcacaccgttttcgcgcgcggtgaggtgggccgagccggtttcgtccgcggggatggtggtctcgcaggtgatgtcgccgtagggcgcgtcttcggcgagcgccgcttcgacggcggtgcggatgatgtgtgatgtgagcatgggtcagtccttgatgtaggcgacggagtgggcccagttgtcgactggctcgctgtagtcggtgcgggcgtgggcgcctctcgactcggtgcgggcgagcgcggcggtggcggccacatagcctacggtgagcatgttgcggttctccaaagcctcaacgctgcttgcagcgccatcggcgtttatatcagcctgggcgtttgcggcggcgaggccttggccgagttcggcgatggcggttttcagtccggcctcgtcgcgcagtacgccgacgccatgccacatggtgttctggatgcgggtacggtcccagaccttgtcggcggcggtatcgtcagcagcagccgtagtggcaggagcggccagcgcgatcggcgcatggtcgaacacggcaccggtggcggagttcaggaacggttcgggtgcccagaccgcgtcgtcaccgtccgcgacggcggcaagaccggcgcggcgtccgtagacaagtccttcgagcagcgagttggaggcaaggcggttggagcccatgacaccggtacgagcgcattcgccggccgcgtacaggccggggatggaggtccgggcgtccagatcggtgcgaatgcctcccatgtagtagtgcgcggcgggcgccaccgggatcggctccttgctccagtcgaagccaagcgaacgcgtataggcatcgatggtcgggaatcggtgggccaggaagctggccaggtcggggttctcgcgggtcatcggcgagacgtcgagcatcacgggcttgccaccttgcgcctgcatcacgcggaagttctcgcgggccacgacgtcgcgcggtgcgagttcggcgcgcggatcgatgtccttcatataccggtggccgtgttcgtccagcagcaccgcgccttcgccgcgcacggcttcggagacgaggaagtgctcgcccacggccatggcggtgggatggaactggtagaactccagatcggcgacctgggctcccgcacgccatgcggcggcgagaccgtccgcggtggcgaccggcggattggtggtgtacgggtacatacgacccgcgccaccggtggccaagatcacccgaccggcggccagatccttgtcctgcccgtcgatcagcaggcggacgccggcgatgtggccgtcccgcacgatgagatctttgaggaatgcgttctcgatgatgtggatgcgcgggttcttgcacaccatggcggagacgtccagttcgagcactttgccggtggcgtctcccccggcatgcaccacgcgggcgcgcgaatgagccgcttccaggccgcgcagcatgtgtccctgcgcgtcgcggtcgaagtggacgccggccgcggcgaactcgcggacgcgctccgcaccctcacgggtgaggatgtccacggccttcgggtcgcacaggccgtggcccgcggccatggtgtcggcggcgtgcagcttcgggtcgtcgtcggagaagatggccgcagcgatgccgccctgcgcatgataggtgttcgattccaccagttcggccttggttaccaaggtcacgtcgtgtccggtgccggtcacggccagtgccgcggacagtccggcgacgcctgcgcccacgacgacgatttcagtgttgctcattgtgttgctttcctctgtttttgcgtcatctgcccccctcagtcacctacggtgacagctcccctcagggaggggagctagaagcatgtcacgggtgaacgcgcagcatgcgctccagtgccaccttggcttcgcgggcggtgtcttcgtccacggtgatgcgattgaccacgttgccggcttcaaggttctccaaagcccaagccaggtaagccgggtggatgcggtacatcgtggagcaggggcagaccacggggtccaggcagaacacggtcttgtccgggtactgcgcggccagacggttcaccaggttgatttcggtgcccacggcaatggcggatccggcgggtgcgttggcgatctccttgacgatgtacgcggtggagccagtgccgtcggcggcgtcgaccacctgcatcgagcactcggggtgcacgatcaccttgacgcccgggtatgccttgcgggcgcgttcgacctgttcgacggtgaagcgctggtgcacggagcagaagcccttccacagaatcatcttggcgcgggcgtagtcggccggatcggcggcgccgccctgtgccttgaacggatcccacagcggcatctcgttcagcggaatgcccatcgcgcgggcggtattgcggcccagatgctggtccgggaagaacagcacgcgcttgccgcgggcgaacgcccattccagcacggcgtgcgcattggacgaggtgcatacgatgccgccgttgcgtccgcagaacgccttcagcgcggcggatgagttcatgtaggtgaccgggatgatctgctgcaagccatcggcgtcgggctgggtgccgcagatctcgccgagctggtcccagcattcctggacctggtcgatgttggccatatcggccatcgagcagccggcggacaggttgggcagggtcacgctctgttcgggcgtggagaggatgtcggcggtttcggccatgaagtgcacgccgcagaacacgatgtggtcggcgtccgggcgttcggtggcgttcttggccagctggaaggagtcgcccacgaaatcggcgtgcttgatgatctcgtcacgctggtagaagtggcccagaatcaacagtttggagccgagacgctgcttggcgtcggtgatgcgctgctgcagctcctcgtcggaggccttgcggtattcgtccggcagcacctgctggcgcggcgcgttggcgggcagacggtcgagcatcgaggcacctggaccgtagctgggtgtggtggtgtcgaagtgccatgggtcctgggtcagtcctgcatcgcaggtgctttgcgcgcccagcttggcgatgatctcgtcaacggacggcgcagtggatagtgcggtcatagcggttcctttcctatatacgtctgtgatgccggcccgaagcgggtcggcgggaaaaatcagatgcgcgcggatgggatcagcgcgtcgagagcgtcttcacgctcgccttgtctggacagttccacgatgtcgtcgccatcggattcgtggggcgtaccgttctcgacaagtcgtttggggatgtagcggtagacggtggccggtcgttggcggccttcgcgcaccttctccccggtgtcttcaagatctcccgaggcaagcattttgcggcggaagttcgccaagtcgagggtttcgccgccaatcgcctcatagacgccgtgcagttggcgcagggtgaacgtggggccgagcagtcgggtggccacgtcggagtattcgattttggagcgcaggcggagcagcgcgtagtcgatgatctggcgatggtcgaacgccagctcgggcagttcgtcttcggggaaccatcgtacgttgtcaccatcctcgaagcccgcggcctcggtctggccgacgagcgcccagtacacgacggataccatgggcaatccgccatgggaccgggtcgggcctccaaaggtgtacagctgttcgaggtatcgcgggtgcaggtctgtggtcgattcgagggccgcgtaggcggactgttccaacgaccgatcggagcgcaggtcgccgccgggcaatgcccagcagcccaggaacggctgacggacgcgcttgaccaggggcagccagagacgggaatgggccgagttcgcggcgttgccggaatcggcggcactgttgccggtatcgcctttcgggccgagtgccagaatcaccactgacacgccgacctgtggcggtgcgctgcggcgctcggacacattgccgaatcccatgccatgcctctttccataccggttgttctccccgcattgagagcatagcactacttatagtcacaatgaccataaatcacatattggatggtctagcgcacgaatattggtcaggtagcgggccccaatcgctacgaaatcacgtccgtgtcttccgatttcgactgtgtcatttcggcgacgggcgggaggaacggcgctagggagggtagttcgtcgagactcttcaggcccatttggtcgaggaaggattcggaggtgaccaaaagggccgcgcgggattcggggtccacgccgtcttccttgataaggccgcgtaccgtgagcgagcgaatcacgccatcggagttgacaccgcggatcgcggccacttgggctcgggtgacgggctggcgataggccacgatggcaagcgcctccagtgcggcctgactgagtctcgcagtctggccgtcggtgacgaatgatgagacgaccggctcgaacgcggcgcgactggcgaactgccagccacgagcggtgcggcgtagttcgaagccgcgcgggcggatgccacgggattcatcgccctcatagtcatcgtgcagggcttgcaatgcctcttcgactgtgttgcggtccaatgccaaaatgcgggccagctcggtggcggtctgcggctggtcggcgaccatcagaatcgcttccagacatgcgggcagcccgccgggaaaatcgtctaccgtgaaatccacgtattcggggcgcgtctcctccactcccctcacctcggcttttgcggattcagccgtcgattcggcatccgccatgtgctcggttgcattcgttgcgtcaatccgttcagtcaccagtcgccgtccttacgcaaaatcgccttcggaaatgttcacgtcgttcatcgtttcgtctacgccggatacccacctcaggtgcagttcggcaaacggaccatcttgctgatactgcagcacaccttgtttgaagaacacgagcacggccatgaaccgagccaccacctcaatacgagaagtgcagtcccgggtcaattcgctgaacgacatcgactggtcgcccttggattccagtgctgcaatcagccggtcgcgcaccaccagcgattgggcccgcagatcgaccagcggcacgtgcagctggtggatcgatacttcggaggcgggcgcgttggcgatgacctgggcggccagttgggcgagttcgagcggggtcagcgtccataccagctcaggcaacatggcggcaatgccctcgtccatggccgccggatgcgggaatcggccggcattggcggcgatacgcgcccggaaatcaccggcggcctgcttgtaggcgcggtattggaggagtcgggcgaacagcaaatcgcgttcgcgcagcgcctcgagactttgctcgtcgtactggttgtcttcgccgccgggcagaatcgccacgcttttggcctcgaccaaaatagaggcgatgtcgagaaaggcgctggcctcatccatgtttttcgtgaagtcgagcccgcgcacgtatgtcaggaattcctcggtgatcgaggagagggaaacttcggtcagctcgagtttgttgttggcgatcatgccgagcaaggcatcgaacggaccggaatagacctcgaggttgacccggaagccggaagtggcggattcctccgtgctgatttcggcttccgcggagctcccctcagtctcgctacgcgagccagcttccctcagagaggggagccgagaaagggaagtctcattcatcgtttatcgaaacaatcgttacgccacgatgccgcgagcaatgagctcacgtgccacctcacggtattcctttgatgtcttgtgctcaggtgcatagaccaccacgggcgcggcggcaaccgtggaatcgggcagtttgatggagcgggagatgaacgtgtggaacaccttttcgctgaacgcctcgtaaatgcgctggcagacctcttcgcagtgcagtgtcttggtgtacatggtgatgagcacgccatccacttccaatgcgggattgatgcgggactgcactttttcgatggactgcataagtagggccacgccacgcaaggcgaagaattcggcggccacgggaatgatcacgccatcagctgcggcaagcgcgttcacggtgagcaggccgagcgatggctggcagtcgacgatgatgagatcgtattccgacttgagcttgcgcagcacactgttcaggatctgctcccggcccacttctgtgaccagttggacctcggcggcggacaaatcgatgttcgccggaatcacatcgatgttctcgaatgcggtgtgctgcaccacatcatgtgggtccacggaaatatcgaacagcgcggtgtaaatcgtgttctccacggtattcgcgttgacgcccagtcccacagtggcggcgccctgcggatcgaaatcgacgataagcacgcggcggccatactgggccaacgcaccggcgatattgatggagctggtggtcttacctacgccgcccttctggttgcacatggcaatgacacgcgccggaccgtgctgttgcagcggttcgggtgcggggaaggtttcgtattcacgtccaagcaaatcggtaggcatactgtctaccttatcaacatccgggttcgctgggggtgcaacgacatacgttcccgccataggcagcgttccttgacggaatgcgctgtctttatcgcggatgtctcgccagtcgtccatcgttgccctcgccccctttgccgggaatacctgctcgcctatcctaatgtactcgccgggctcgcctcggaacaccgttttgcagcgggcattccagtgttccgaggtttatggatctcgtctcgtactatgtcgatgcgcttactcggtgcgcagtgcggtggccgggtcttgcttggctgccttgcgcgagggaatcaggccgccgatcagcgtgagcaccacgcttaggatcaccagcaccacgccgccggtcaccggcagggcggcattgacgtccgcattgccgatgaagtgatgcaacacggcgttgatcggaatatcgagcagcacggtcaagcccacgcccaacaggccggagcataggccgatgatgccggtctccgcattgaacacctgggacacgttgtgcttcgaggcacccattgcgcgtaggatgccgatttccttggtacgctccagcaccgaaatgtaggtgatgatgccgatcatgatcgaggaaacaatcaacgagacggacacgaacgcgataagcacgtaggaaatcacgttgacgatggtggtcaccgagctcatcatgagccccacataatccgtgtaggtgatcttgtctttcttcgagacggtgttgttgtagtcggtaatcgcgtcggcgatgtggtccttgtcttcgaagctgtcggcgtagacgttgatcgagctgggcgcgtcacgactcaccacaccgaatgcggcgaggttgtcgtcgtaggtgccggtcgacacgtactggtcgtagatcgcgacaagcacgtcgttcgaagccgtggcgatatacgagtcgaaactgtcggcgagctgctgttcgctcatcgcggccatcgcgtcggcctgatcgccggcacccgccgcgccagcaccagcaccagcaccagcaccagcggcatccgatgcgcccgtaccggaccgctgcccggcactcatcatcgacttggccatgttcgccttctgcgtcacgcccagcgaaaccacgtaggtgcgcgcgtcggccgccttggtggcgtcgtccgagggcgagaacgtcatgccgttgagcacgttcgtgttcgggttggccttctgatcggtgacgatggcgctggaggccgcacggtcgatcagatcattggtcagagcgcgcgtgtatcccacgccagcggccaacggtgtggccgaagcatccttcttcgccttgacgacgcccaccaccttgagtttggtggccgtttcgaggcgctgttcgattacatccttgtcgttgccgatgaatcggtagtggccgtcatcgcccttgacgtactggtcggatgccggaatcatgtacagcgtctggtcgagcgccttagcatagtcgatcttgtcttgtggagtgctgaccttgtcgccggcgttgagcttggacatcatctcgtggtagtcggaggcgggcagcaggccgagctcgtacagcgtggtcagcggcacgctgttgttgtcgtcgagcaccagcaccacctcgtccttggacttcggccatgaaccgttgaccacttggtagttgtcggtgatgaccttgcctacgagcttgctgtcgtccgctccaggcatgatctcattgaacgagtcgggcgcggcgttctcatcggttttgccggtcagcatcgacatctgctgcgaggtgatcgacgaggtgccggacatgccggacgagcttgtggacgccatctgcgaggccattgaagtggagtcgctggcaccgatcgtcacgccgtccgcattgaccagcgtgccatcggggtcgtggtcgaacacggagaatttcacgtcatacgtgtactggataccggcggaacccacatactggtgaatctcgctcttggaattatccaggtatttcttgaagcgggtcaggttgttttcggtaatcgaactggtcaggctggatgcctgcttgacgctgcggtcgtccgggtagatgccgtcggttctgtgcgtcttgccgccgtatccgtcatcgccgcccatctggccgcccatcatgctgctcaggtcgaaggtctgggagtcgatggtgatcgggtaggcggtcatcgtgtcacgctggatgtcgctgatgtatgcgttcacgccagtcgacaccgatagaatcagcgcaatgccgatgatgccgattgagccggcgaacgaggtcagcagggtacgcgccttcttggttttcagattgttgaagctcaacgccagcgacgtgacgaacgacatcgacgcgcggcccatcgtcttgtgcacggccggctgttcggccgtctcatccacgacaaacgggtcggagtcggagcggatcacgccgtcgcgcaggttgacgatgcgcgtggcatattgttccgcaagttcggggttgtgggtgaccatgaccacgaggcggtccttggccacgtccttgagcaggttcatgatctgcacggatgtgtccgaatcgagcgcgccggtcggctcgtcggccaggacgatgtccgggtcgttgaccagtgcgcgggcgatcgccacgcgctgcatctggccgccggacagctggttcggctttttattgatgtgttcgccgagtccgaccttctccagcgccttgcgcgcacgttcgcgacggtcggccttgccgatgccggaaatcgtcagcgcgagttcgacgttcgacagaatcgtctgatgaggaatcagattgtagctctggaacacgaagccgatggtgtggttgcggtacgaatcccaatcgcgatccttgtattggcgcgtcgagatgccgttgatcaccaaatcgccgtcgtcataccggtcgaggccgccgatgatgttgagcaaggtggtcttgccggaacccgagggacccagaatcgcgacgaattcgctgtcgcgtaggttcaggctgactttgtcaagcgcctgttgaacgaaatcaccggttttatagcgcttcgagatcgatttgatctgcagcatgaatacctcttcctggctgacggttcgctgttatgtactgtattgtcacgccttgaatttccggccgactttggtgctcccccccccgccgcgattccgctatgggcggacgcgtcgcaaaatggtgtgtctcaccgcgctctggggtgtgaggtcagatacgtttcgatcagggtttcggggcttacgtgcgtgtagatctgcgtggtggtcacgctggcgtgcccaagcagttcctgcacggtgcgcacgtccgcgccgccttggatcaggtgcgtggcgaaggaatggcgcaaggtgtgcggatggagtggtttggtgatgccggcccgctccccggttgctttgacgatttcccataccgattgccgcgagatgcgcttgccgcgtttgttgagaaacagtgcgcgtctctcgggaatcttggcgctggagcgccgttccagctcgccacgccccgcattgaggtatgcggtgatggcccggcatgcgtagctgcccaatggcacaagccgctgcttggagcccttgcccatgagtcgcgtgatgtgctcgtccaggtcgatgtcgtccagattcacaccggtggcttccgagacgcggcagccggtggcgtacatgaattcgagcagggccttgtcccgcaataccaccggatcggttgagccgccggctgccgccgcgtcgagcagacgggttacctcgtccacggtgagtacgtcaggcagggtgctggcacctttgggtgccttgactgcggcagaaacgtcggcagtcaccgcgtgctggccgagcgcgaagcgatggaattcatggatcgaggccagtcttcgggctttggagcgggcggactcccccgcctggtcaagggcggcgatgtagtcttcgacgtcttgtttggttatggcgtccggttcggggatgccgcgggtttcgagccaatcaatgtatttggcgatatcggattcgtaggcggtgacggtggccgtggcgagtcctcgctccacgccgatgtggacgaggaactgctctgtgagtttggtgaatccgttggtcatgtgtttgttctcttccccacccgctgcgcgggagcccccctcgtcagaggggggctaataataggaaaccccgctcggaagcggggtttctagtgtgaagtcacgacttcaagcaatcaggcctcaaccggagcgttgacgtcctcaggcagggcggccttggcggcgtccacgatggtcttgaaggtgttcgggtcggagacggcgatctcagccagagcgcgacgatccagctcgatgccggcgagacgcaggccctggatgaagcggttgtaggtgatgccctcagcgcggacggcagcgttgatgcgctggatccacagcttacggaaatcacccttgcgagccttgcggtcgcggaagttgtagttaaaggagtgcagcagctgttccttggccttgcggtacaggcgggagcgctggccacggtagccggaagccctctcgagaacaacgcgacgcttcttgtgggcgttcactgcgcgcttgacacgtgccataatctattcctcagctttctaaagtcttattatttccgggtaagccctatgctcacttctgcagaagctggtgcagcttcttggcctggccgccgcgcagcacatcgtcggcggacagttcacgacgcttgcgagcggacttgtgctcgaggttgtgacgcatggcggaaccgacatgcttcaccttgccggtgccggtgatcttggcgcgcttggaagcggcggaattagttttcatcttcggcattgctgccctccttgctggtttgcttcttgtcggaagtcttctgagaaatcgcggactgcgcgtcggccgcggcctgagcctgagactcctgcttggccgcgagacgagccgcctggcgagcctgacgctcggcgcgggactcggcgccacgacgacgctgctcggactgggtgtggaccttcttgcccttcggcgcaagggtcatgatgatgttgcggccctcctgcttcggcttggactcgacggtgccgtattcctcgacatcgtcggccagacgctgcagcagttccacgccaccaatcgggcgggagatctcacgaccgcgcaacatgatggtgaccttgaccttgtcgcctccgttaaggaagcgggtcacatggcccttcttcacgtcgaaatcgtggtcgtcgatcttcaggcggaaacgaatctccttgatttccgcggtgctctggttgcggcgagcttcacgagccttgatcttctcgttgtacttgaacttgccgtaatcaatgagcttggcgaccggaggcttcgcgttcggggccacctcgacgagatcgaggtttgcctccttggccaggttcagcgcgacggaagtcgcgatgacgcccacctgctcgcccttcgggccgatcaggcgtacctgcgggacgcgaatctcgtcgttaatacgtggttcgtcgctgatgatgactccaatcctctacttcaattccgtggcggggcctttgctggagtcctgttcaatgctttgggttcatggcaagccaaaaccagcgccaatatgcgctcagcttctgcagacgcatatcagttctttgcgtcattcctgattgcgcgttgtatatcgcaatcgctaggctgtttgccttgaacccgaggccttgaaaggcttccaggtggggttgccccgctttcttgatttctcaagccaaataggaatcttaccacatgcccggacattcgcggaccgtgtgtcgatgggtggataccggctacagtaggcataatgactcaggtatgcgtgatttttggtgcgggcgaatactatgcgggcacgcccgtggttcccaccggtgcgtatgtgattgcggccgatggcggactcgaccatacgcgcgagttgggcatcgtgcccgatgtggtggtgggcgacttcgattcgctggagggccggccgccccgcaccgatgtgcgcaccatcgcgctgcccgcgttgaaggacgacccggacatgctttccgcgctgaaggtcggctggtcggcgggttgccgcgagtttcacgtgtacggcgggcttggcggccgtattgaccatacgatttccggcattcaactgatggcgctgctggcccgacacggggcaagcgggtatctgtatggcgacgggctcatcgtcacggccatcaccgatggtaggctttcgttccccgcgcatccggtgcccgaggacggccgcatggtgtcggcgttctcccactccgatgtttcgcttggcgtgaacgaaccggggctgaaatataagctcaagaacggcacgctgaccaatacggtggtgcagggggtcagcaacgagttccgcgacggcgtggacgcggccatcagcgtgaaacgcggcacactgatcgtcagcttccccatcgaagtggcgttgccacaggtgagcagattccatgaattcggcggcgatatcggcgagctggacaccgaagtgtccaagctgctggttcgctgacttgcatgccgcgcgcttgctcgtgatgattcgagacattcctccaaaggagaggaaaatcacatgtcggttgcgggcaatccaaattgtgagcgctcacaaaaaatacggcatttttacccaaaacgcacgctgaaacgttgccatgtgtacagagtcggcattacagtagcaactgttggtaaacaatggcccggtgtgccaaagcgcgccaaggccaccctacaagggagaattacatgacagttaagattggtatcaacggcttcggtcgcattggtcgtctcgccttccgtcgcatcttcgagctgcaggctcgcggcggccaggctggtgacattgaagttgccgccatcaacgatctgaccaccccggctaccctggcttacctgctgaagtacgacagcacccacggcaccttccgtcatgacgatggcactccggttgacgtcaaggccaccgaagactccatcatcgtcgacggcaaggaatacaaggtctacgccgagaaggacgccaacaacattccgtgggtcaagaacgacggtgtcgagtacgtgctcgagtgcaccggcttctacacctccgccgagaagtcccaggctcacatcaacgctggcgccaagaaggtcctgatctccgccccggccaaggatgacaccaccccgaccgttgtgttcggcgtgaaccacgacatcctcaaggcttccgacgtgatcgtctccgccggttcctgcaccaccaactccatggccgccatggtcaagctgctggacgagaagttcggcatcaaggccggcttcatgaccaccatccacgcctacaccggcacccagatgctgctcgatggcccgcgtggcaccaagaccggccgcaacctgcgcgccgccgccatcaacaccatcgcccactccaccggcgctgccaaggccatcggcaaggtcgttccgtccgtgaacggcaagctgcagggccatgcccagcgcgtccaggttccggacggctccgtcaccgagctgaccaccgttctgaacaccgagaccaccgccgacgagatcaacgaagccttcaaggctgccttctccgacaccgattactacggctacaacgatgagggcatcgtctcctccgacatcctcggcgacacccacggtggcgtgttcgacccgacccagaccgacgtcaacaccattgacggcgtgaccctggctcgcaccgtgtccttctacgacaacgagtacggcttcacctccaacatgattcgtaccctgctgtacttcgctgagatctccgagtgaaccactgcggtctaggccgctacggttcgtttgagaactaagctgtgagacccccgccttgtgcgggggtctcttcgtagtagaacggtaatcatggcaaagaaaagcaagcatgataagggcgcgggttccaccccggcgacagtccaactggagaaggcgggcgtggaattccacgtatacgaatacgagcactccaacgaccatatggatgacggctacggcgtggaggcggccaccaagctcggcttcgacgagcatcaggtgttcaagacgttgatggcggacaccggttcggagcgtgtggtgggcgtggtaccggtcagcggacatatggatttgaaggccctggctgcggctgtaggtgccaagaaggcctctatggccgatcccaaggtggcaatgcgtgaatccggctatgtggtaggtggcatctcgccgttgggccagaagacacgtcataagactgtgttggatgaaagcgccctgcaattcgaccagattctggtctccggcggcaaacgcggactgtccgtaggcgtgaacccgcaggacctgctcaaggtcttgaacgccgttgccgcaccaatcggcacgtggtgaccgttcttggcttccctcggtgaggggagccaaggatgactacttcttcctgcgcaactccgacggcagcacgaagtgcatgttttccttgatggtttcgacggacttcataccggtgaaacccaagttttgcagagcgtcaatcacaccggacaccagttcgtccggcacggaggcacctgaggagacccccacggactccagtccgacgaaccacgccggatcaagctcgctggcatcatccacgcgatacgctttgccgcgcttccccaagccctcctgcgccacctccatcagtcgcacggaattcgaggagttggccgatccgacaatcaccacgcaatcggactgctgggccaccagtttgaccgcagcctgacgattcgatgtggcatagcagatatccgaactcggcggctcttgaatccacgggaacttggccttcagcgcggcaatggtgccggcggtctcatccacgctcaacgtggtctgcgagagcagcaccagcttggtgtcgggcgcaaaatccaacgaatcgacatccgattcatgctcgatcaagtgcacatgttcggggttctcccccaccacgccgactgcttcatcgtggcccttgtgcccgatatagacgatttcatacccctcgcgcacgaaacgcagcacctcacggtgcaccttacccaccagagggcaggtggcatccaccacatgcatgccacgacgttcggcttccgccttcactaccggagatacgccatgggcggaaaacaccaccggaatacccgcttgggcagcagcatccggaatctccgccaattcctggacgaacaccgcgccttgcccggccaaatcctcgaccacatgcttgttgtgcacgatctgccggcgcacatataccgggggcagcccatcctcgcgcgttcgctttccggaagcctccgcggctttgagaatggtctgtacggtaagaatcgcacggtccacacccgcgcagaagcctcgcggatcagcgagcacaacgcttttggtcatcggaacctcctgaacgtcaatagtgttttccagtgtaaggcagggattacaggaatctgccgtcacaacttttccgcgtctcccacgaatcaccggtttccaaggaatccacgtgcttctcgcatgatggtgtgagactcgtcactccacgtattgctaccgtgtctgtacgaattgtttattatatgccggctatcgccaatccccgcctcgatagaggagacgcgctagactggggccagcgatagcaggagctaccggcccaccaacctcactacgggagtgattccatgacgagtaaaacaccacgcaccggaaatcagtattcgattcactatggcgattattccgccgtcatctgcgaactcggcgccaagattcgccgattcgattatcaaggcaaggaaattttctgcccgttcggagtcaacgacctgacccccacctgtaacggttatgtgctggccccgtggccaaaccgcatcgaaaacggcgaatacgatttcaatggcaagcattactgcgcgccggtcaacgaatatcatcccgcaccgcgcaacaacgcgaaccacggatacgcctaccactacatgtggaagcttgaatcgttgaccgatagcgccgtgacgctttcactgcgcttccccaacctggacggatacccgttcgatgtgaccgtgaccgtcacatacgaactcggcaacaacggcatgaccgtgaccgtcaatgcccgcaatgatggcgacgagccggcaccgtgggctctcggcctgcatccgtggctggccaacggcaagcagggcgcgacttccgccgagcgtgacgccgactccgccgcctgccacctgcagatcaaggccgccagtcatgtgacggtgaacgaggcgctgattcccaccggcaccgaaccggttaccggcatctacgacctgaacgatggcccgacgctcgaaggccgcgcctttgatgatgcctgggttgacgtggagcgtgccgccgatggtgcgaccaccaccacattcacccgcccggacggtatcgaagtgaaaatcattggcgatgagacgattaatgcttggcagtgctacaccgccactggcgcgccgttcgccgagcatccgtctggtatcgccgtcgaaccgatgaccgccccggccaatgccttccgcactggtgaccacttg

SEQ ID NO: 1345 - DNA, 33356 bp, Unknown
  R157_18m  MAG No. k141_23779
catcaccaatcacattgaaaggaaaacaagtgatgtcaggacacaagattaccggaatccacgccatcggcgtcgagatcccgaagggaatgtcattcaaggagctcatggagcagctgcttgagggaggagaggctgagttggagaaggagttggacgaggagacgcgccagccggaaaccggcaagtgcgattgtccggcgtgcggtccggacaaggacaccgtggaggaaagattgttccatccggtcgatcagtggcagcacgccgtcgatgtggccagtgacgtgcatgacgctgcaggttcgctcgaacagtgcctgttcgacctgggtgagaaccagttggcgttcgaggcgtcgatgatcctcagccagtcgctgaccctgctgcgcgccatccaacgcaggcgcaaggaggttgcggaatgagcatcgaagcgttgcgcaaaaagcggcgtatgcgtcgtcccaagccacggttcacggacgggcagaaatcggccgtgttgctggctctcacgttctgcgagggttggctggtcggtttcgccggcacgcacagccgcatcccaagtccggtgggtacgccgcagtggatgataaccggctcgctcgcattggcggtcatcctgccgctcgggttcgtgggaatcctgttgaagtggggtggcgatggaacagccgagtgagttcactctttgtctgccgggcgacccggtgccgaaggggcgtccccgcgtctacaacgggcacgcgatgaccccgaaacgcaccgtcagggcggaggaacgcctgttcgcggaattccgtctgaaatacccgcaggcgaaaccataccagtgcccggtcaggttggaggccgaattctggatgagccatcgcggccgcccggatctcgacaacctgctgaagctggttctggactccctgaacggcgtcgcctacgtggacgacgcgcaggtcgtcgaatcccatgccaccaagcgcatgcccgacctatgggtgtacggagccaaaggcaaataccggaaacgcaagagcggcgacccatacacgtgttgcgggcatgagtacgagccacatctctatatctgtatcaagccgctccccgaatgggagccgaaggaaaggaaacaatcatgagcaagccgatcaacgaaccccgtctggtgcagcaggcgctgatagcggacgaggatctgagtttcgaactggcggccctggtgccgacggcgaacggcatcacgaacgcggccagcacgtttatcgacaaagccaccaaactgttgctgtccgacaagatcatgctcaccaacgagcagcatacggccgtcacgtcggccatcgccatcgcccaactgaccgtcaaggaaggcgcggccatatcgaagctgctgcgcaacccggacgcttcggcggaggtcatcgccggactgcgcctcacctccgaggacaggcatgatgcctgaccggcgtctttggatgccgcgttgcaggacatgcggtccgctcggcaggcccaccggcctggacgaggcggtcacctgctgcaaccggcatacgaatcagaccaaacatcagacggcgtggtatcccacctacgcccagatcatcgtgaaaggcaaatcaaatgactgcgaatgaagtattgccccccgatttcaaggaagtcgaaaccaagaatcccgacgaggggttgcgccagggcctattcgaagctcaggcggcgcgcatcgtcgaattgcaggccgagatcgccatccgccaggaggaggtcgacgagctgaaggcccgtatcctcgactcgcatccggccggcacctaccaggccggcaatctgaaagtgcaggtcaagccgggcgcgcgccgcatcaacgccggcacgttcgaaaaagcctatcctgccaccaagtatcccggagcttaccagttgaagccaaggccgctcagccagttggagaagctgctgtcggcggacgcggtggccgattacgcgatgtcgggcaagccgacggtggtggtctcatgagcgcggaactgtccagcctgggcatcgcccagatcgtggaaagcgccatcgccgactacgacctgcgtgacgaggacggcaacgagctgaccgacgacctgtacgtcatccgttccgagcagctcgacgagctgggcctcaccgtcgccagacgcatccacaaggcgacgcgcgaactggaggcgcagggcaagaccggttttcccgtgcattcgatgctctgcgggcatacgccgccaaccatcacgacggcggatgacgggacctacacgctgcgctttgacaacgccagcgaagcggttgcagtcaaaggcctcaacaagaccgcattggccgacgtcaagaaaaccatcaacgactttctcaaggaggtgaaaacccatgaacggcatgaatgaggctatcctcgccgtcgcgcaggcccaacagggtgatgcgatccccgtggacataccgcccatgacgcagtcggcacccgtcatgggcaagccgcccgtcacgccgaaaaccaaaatcggcacgatggaggaacccaggttgtggccgaagattcgcggcatcatcgaggcggacatcgtcaacaagccgcgcaacctacagcgtgagctcggacccagcgaactgggcacggactgcctgcactgtctggcggcgaagctggcgggctgggaacagtcgaagcagccggcatggctgccctacacgggcacctgtctgcacgagcatttcgaacgcctgttctccaacccgcaggtcatgtacggcggccaggtgttcgacggacccgcccccgaggagctcaaaccgttgtattgcaccgagtacacggtgaccgtgggccggttgaacggcctcacgggcggctacgacatcaagggcagcatcgacctgtgggacgtggccgaaggcgcgaccatcgactggaagtacgtgaacgacaactccacactgaagctcgcgaaggcccacggcccatcgcagacataccgggtgcaggccagcctgtacggaatagggctcaggaacgagggcgtggacgtgcggctcagctgcatttacttccttccccgcaacagccagacgctcaatgacgcctacccgtgggagcgggagttcgacgagaagccgggcatgtgggccttgtcacgggcgaacctgctcgcgaacctgctcgacgtgatagagctcgccgacgggcccaagatgcgtgactcgtggatccgccgactaccacacagcacggggcattgcttcgactgcaacacgtggccggactcgaccacgctccccgaattcgacgaacaggcatggcccgaagtgccggaccaatggctgcagctcatggacctgctcgaacccgaataccagttcaccaagtaaaaaacaacgaaaggaacacgacaatgttcggacaaccacaacagtacgggtacccgcagcaggggtacggctaccagcagccccaacgacagcccgcccagttgaggtcgctcggcgacctgctcgccggcaacagcgccaaagcgtacttcggcgcgaacagccagcccggagactcggtgaccggcgtcatcgaaaaaatcgagaccacgcaggtcaacgacttccagaccaaacagcccgcctattggaacgacggacgcccgaaggagcagatccacgtcatcatccagacccagttgcgcgacccgagcgtggatgacgacgacggctgccgctcgctctggatcaagggctggggcatccagctcaaggcgtttcgcgaggcctgccgtcaggcgggcgtgaagatcccgaagccgggcgacaccatcacggaacggttcgtgggtctcggcccgcggggcgacgcgccccagccgctgaaggtgttcgaattccacatcgaacccgcgtccagcgtcaacaatctcgtgaacggcagccaaccccagcagcccggcatgcagcaagcccagccggcatacccgcagcagcagtacgcgccccagcagcccttgcaggccccgaatcagggatatgcgccggctccggtcgacccatggaacccgccggcacaggcgcaacccgctcagcaggtacagctcggccagccgcaggtggatccgatgaaggtcaaccaactgaaggccatgggtaagccgccgcaggagatcgccgcattgttgggcgtgcctgtcgaggcggtgacggccgtcaccgaccaggtgcagccgcagaaccacggaggttcggaacagcaattggaaaccggtgaattctgatggacgaactgctgaaacacctgcagaactagtggctcgagctgatgaaagacatggattccctcgcctccgatcaggacggtttccgtgacgtcgactcggaaagcctccagctcatgagcgtgagactcgtactactgggctggcacaaaagcaaggattccgacaaggactgatctcggccaccgtacagccgtagccgtatccaagcggcccgcacgaatgcaaaggcgtgcacggcaccacacacattttcacatcacgtcaaaggagtttcgaagatggccgacatctacggatacgcagcagccgcacctcagtatcgtgcggccggctggatgcaggtcatcccattgccggaaggccgcaagaccccgccgccggctgggttcacggggcgcagccgcaagcccgtcaccgacgaacaaatacagttgtggagccaagccaacccgaacgcgaacacgggcatcgtcatccccgaaggcgtattggttctggacatcgacgccgaacaggggcaccaggtcaaggcagacggggcgaaaggcatcagcgaactcagccaggagctgggagcattgccggccacgtggagcagcacgtcgcacggcatcgattcgccggcacgccacctgttctacaaggtgcccgaaggcctcgcgtggaagggcggcgccatcgagggagtcgacatcctgcagcccggccaccggtattccgtggtctggccgtcgatccacccgagcggcgaaatgtactgctggtacacgccaagcggcgcattctccggcacgctcccccatatcggcgacttggcgacactgccatggaagtgggtggactacctgcgcaaacccgacaaagtgtcgaattcgaccactttaactccctcgtattcaagggaatacgacgaccgcatgtgcaaggcggtcaacacgttcctcaacaagacgctcgccgccccggcaagcaaaggctcaaggcatgacaccacgctgcaggccgtctgggcgttggttaacttcgcgcaggagggacaccggggggctctcgacgccatcaaccaattgaagccacggttcatcgccgaggtggcccccgaccgtcaaggcaaggagcgtgaggcggcacgcgaatgggccagcattctcagtggcgcgatggagaaggtcaacggcgtgcaatcgcatgtggatccgtgcgagcagtcgaaaatcgaacgcatgacgcccggcgagttcgacgaactcacccaaaacgcggctgcgagtcaaatggaggaaagtcacccggaagcagttcaaaacactggaacaatgccggttcaagccggttcaacacccgtcgcatcggttcaaaacggttcaatggaaagtcacgaggcaagtaaaaacgcctcctccagctggcagttcgaagacctcacccagctcgcttccggcattgaactgccgcccacgcccaccgtgttccaacgagaggacagccaaggcctcttctataggggcgcggtcaacgacctgcacggcgaacccggctgcggcaaaagcatgctcgcccagatcgccaccgcccaggaactcaaacagggacatgacgtgatctatatcgactatgaggattccgccagaaacgtcgtcaagcgtctcctgctgctcggcgtgaccggcgaacagatcgtgcagcatttacactacgtgcggcccagcgccaagccgagcagccccaccagcctcgacggctggaaggaaaccctcgactacgcggacacggccacgctggccatcatcgacggcgtcaccagctgcctcgcctacgccggcctcgacagcaacagcggtgacgacatcgccgcctggtacaacaccatgccacgactcatcagcgcctgtgggccagcagtcgtactcatcgaccacgtcgtcaaaagcaaggacaaccggggccgctacgccggcggcagcatgcagaaactcgcactcatcgacggcatcagctactcggtggacatgaccaaaccagtcggcaagggcgtgcgcggcaccatcgtcatcaaatcaggcaaggaccgcatcagcgagatcgaggagcattgcgccgtcagctggagcagcaacggcagccacctgcgcgaagccgcacgcatcgaaatcaacagcacggatccgaaactcatgcgcgtcaccatcgcacgccccaacatgatgcccagcgatgaaaccacgcgacagcgcggcctcgaacggccaaccggactcatggagaagatcagccggatcgtcgagaacgcgcccgaggaaccgaaccagaccgaaatcatcgaactgctgaaggacgacggatccagcgcacggaagaccaccgtgctcaccgccatcaaccggctgctcgaaggcggatggatatccaaccgctccggaagaaacaaccggaacatctacgccagcgtcagaccataccggcagatggacgacccgaaatcggacgctttcgtggaccggatgagcagggaggaggcgaacgaattggataaggaaaaccatctcgaaatctagttgttcccgttgttcccagttgttccgagttgttcccggaacaactggagtagcgatgtccagctgttcccagcactcctcacccacactacgtgtgtgggtgggtgcgggaacaactgcgactcggccctccggaacagccaaaaaagcacgtcaacgacactagttgttcccaaccaagaaaacgtcagaaaggaaccacgaaatggcactcacattcagggagcaaatcgaagctaccgcatgggagctcggcaacggagaaggaaccatgcccgagcttcggaagcggttcgacgctgaccccgagaccccgaatttcgaccctgccaaggcattggagatgctgcatatcctccagctcatcaactacaagcaagtcggcaagggacgcggacgcgcccgctgccactatctgaagaaacccgaatacggactactcaacctcaatgagccgaaaccagctcccaaggacgagcgggagcgggaaaaccgcatccaatgggccaaggacttccgcgtcatcgccgactggctcgacgcgaactgttacacgactgaaagcgaggaagcatgaaagaatccgtcaccatccaataccgctgtgaggatgctgacaccaatctggtcgaaaccatcccaatcgcctccatcggcatcgaccagtggagtcaaggccatcccgtcctgttcaaccttgaccggagaggacatcacggccgccgtatgctcagcgtactcatcaccgcctgcgaagcggtgctgcatgaaatccaggacatcaaatgggaggactgacccatggccggaccgattgacgtgattcaacgggcgctcagcgcactggcctcagcgggattgggcagcgagtcgccggcagaggcgtatgtgctcggctaccaggccggctggcgggaagcgctcgacctgtgcatacgaatcgaaacggcaatcaacaacgaaacggaggaaacgaatgagcatcatcagcagtgaaatcgaggcacagaagcagcgtgacccgtcgtacatcgacagtgacctgcagtgggcgtggggacgaggatacaaggccggagcgtcacgcgaaatcaccgaagaggagattgccgccgccatggacgaaaccagaaagttcattatgctccccggcgcgtggttggagaacatcatcagaatcgcgttcgacgcggcaagaagaaaggcaatggaggggtgagcaagccacgcgcccgtgaacgcaaaccagcatggcttcgcgcgttcatcccgaaatccagcccgctcgtggtcacggtctgcgaggggtgtggcctgtatgtgattcaggacagggagagcgtgtgggagtcgtgggactgcggacttgtggagggtgatgacctgacggtggcgataatcctcggccggccgttgacgcgggttgtctggctgccatcagtcggctatccgttgctgcgcagcgtgagcgggagtgcgggcatcaggcctgacggccaatacctcgctggtcacatgtgccgcttggcaagagtgagcgtcaagccgttcaagccgccgaaaagagaccgtccgccgggcaagccgtggggcggacgcaacctcacgaaaagggagctcgatgaattcaaacgcatctgggacatgccgtattcgcggctcaaatatgagaaagccccaaccgtggtcggccagggcgatgagaagcaagcattattctagccgaccagccggaaggggcttagcatgaactgccagaactgcaagacgataaccgaagaggggtattcactgtgcgcagcatgcgagatgcgtttcgccggcacgctcctgcgattggcgcatgatgtcacgccattgcatgacagcctcgacgcgacattgcatccgggcgggcattcgcccgtgcgcatccagacggccactcccccgacgccgatacgcttggacgtgctcgacctgattgacatgctcgacgccacggcccgcgaactatggcgccgcctcgacggcatcgacgcactcgactggcgcaaagacaaacgcaacgaggatctgaaggccacgctcatcgcatgcgccggacaccccaaactcgccacgttcgccgacgcgggcttctacatgcacgtcgttgacggtatcgcccgcaaagtcgatactgcgctggacccgccggagcaacgccgcgagataggtacctgcgaactatgcgagaccatgctcaccgcaggagccaacgaccagtgggtcacatgccccgtatgcgggcgcgaacagcgagcgcagaccgtgaaactgcgcaggctcaagacattgtgctgggatgactccaagcgaggtagcgcggcggacatcgccaaggctttcgccgaggctggcatcaaggtcagtcgcaagaccatcaccatgtgggggcaacgcggcaagattccccgtcacgcggatggatacgcctactgcgacgtgtaccggctgctcatcggacccgctgatttgacagttatggcttagtgttgccataatatgcagtggcagaagtgtcgaaaacccagctcaagtggctgggttttcgcgtatctatgctttgttcttgcgtggtctcccccctccgacaccacgtcccggacgttgagcgttccattcatcgatggtctcaggcaaccagccgcgcgtgcgccctatcgtggcgtcgggttcggggagtttgaggttgagcaggccgccgctggtgatgccgaggcgttcggcgacctgtttgacgccgaggtattcagtcgtcattgttgccttccttgccgttgatgattccggccgcaaggcccatgattccggccgcgagaccgaagccgccagatactatcgggctgtcggatagcgcgccgcccaaggccatggctccgaacgtcagggccacgattccgaaaatcagtgatgttctcatgatgtgtttccgatgagataggattggcggggaggttccggctagtagggttagccggaacctgttttacttcttgtgcttcggtcttcgtctgattgcgatgattatggctatcgcggcgaggacgttggcgatgatgccgttgatgacatcgaaccaatcctttggattcatcggacctcctttctgctgacatatctatagtaacacaataactatagatatgcaagccggggacaccaagacacgccaacgaacacaatgactgcgaggcgtacatgagctggcgagtctgctcgacccccggatgcccgaacctcatcgagacgccggcccgcaaatgcgacgcctgcgctcgggcccagcgggaccgcgcccgtacccgaggccataacccctacggcaccaaggggcaccaatcattccgcaggcaagtgctcgcacgagacccatactgcacatgccccggcgactccggacgtggaggctgcggcaaacaccacggactctgcggcaatccaagcacaatcgcagaccattacccatacgaaagaaccgaactcatcgacatgcgactcaaccccaacgacccgaagttcggacgaggcctatgcaaacaatgccacgatgtaaaaaccggcaaaacaagaccagcaggcttcaacaccagacaataaacaggaacactgtgcatcacgacaaaaacagccggcaacaccccccaggggggggggtggggtgacgaccaccccgcttggaccgccggtgagctgtctgtcgggtgcgcagggttcaaacatcgctggcgggccgccgcgagggcggtctcgtcgatctgtcgctagggcgcaaggccatgacgagaggtgaacatcatgccaagtggaggcaaacgagtacgctccgggccggccaaggacccgaacagcgagaagagccgcagactcggatacacattgcagagcctgccgaacaccgagtgccggatgaagccgccggaatggcccttggagcccgccgatgacgagcgcgtccgcaaacttgaggcggagaagtggaagtggctgtggaagctgcctcaggcacgcgcctggcatctgccccagttcaagtggatgattcacgaactggcgttgtacgcgcggctttccaccgcatgcgagatcgcgccggcacccacggcgttgaccgtgctgctgcgcatctccgaccgcgtcggcatgagcgccgccggattgcaggcattaggctggaaaatcgaagcggaggccgagcggaagccagtcgattcggagttcacgcgccgcagggccaaggagctgaaccaggaatcagccgccgaacgctctcccatggacgagacgaagcatgtgtaccagcgtcggatgagcggcaatggctgacgaggattcatggctcatcgacttccccacgttggggcatctggtgtgcgcatggatcgaacgtcactgccggcagcctgacggcccgttgcgaggccgtccagtggtgctgtccgactggcagtactggctggcggcgaaccgttggcgcatccgcgaggacgccccatatgtgccgcccgaggaagtcaccgtcgacaacccgatggtactcaaccaggcattcgaataccgcatgacgctgaccgtcgggccgcagaaatggggcaaggggccatgcacggcgttcttcaccgccgccgagggctgcgggcccaccatcttcgatggctgggcgcgagaaggcgacatgtaccgttgcgctgacaacggttgtccgtgcggctgggagtggccgtacaatccgggcgagccgaaaggccgtcgacatccgtcgccgctcatccagctgaccgccaactccgaggaacaggtacgcaacatctaccgtcctctcgtggcgacgatcctgctgggcccgctcaaggagctcatgcgcgtgagggacaccttcatccgcatattgcagccggggcgcgaaggcgaggccgacgccttggacttggatcgcatcgacgtggtcaccgcctcggcgaaatcccgtctgggcaatccgatcacggacgccgaacaggacgaggccggcctgtacacgaaatcgaacggcatgatagcggtcgccaccacgcagcgccgaggagccgccggcatgggcggccgcacacatgcgtggacgaacgcatgggatccgggcgaggacagttacgcgcagcaggtgttcgagaacgccgaggacgacgtgttcgtgttctaccggaaccccgatctcgcgaaatcattgcgtcaccgcgacggccggccgttggacttcaatctgaaatccgaacgcttgaagatgctcgaatacgtgtatcgcggctccccgtgggtcgaccttaattccatcgaatcggaagccaaggcgctgatgaagaccgaccctacccaagcggaacggttcttcgggaaccgtctggtgcagggcggcggcgcatggctcgaagacggactgtgggagagctgctatgccggcgcatgaactctggttgccgaacccgccaaaaggcacgcgcgtatgcgcgggcttcgacggttcggagaacgacgactggacatgcatcaagatggagaccctcgacgggctgatattcactccccgatacgggcccgaccggcgtgcgaccatctggaacccgaagcagtggggcgggcgcatcccccgcgccgaggtatccgcagcatgggcggaactcaacgaccgctacaaaatcgaacgcgcctactgcgaccccggcttccgcgacgaactgtcatgggaatcggagatagaagcatgggatcgcgcctacgggccgaagaaattcatgccatggagcatgtcgggcagctcccgcatcggggccgtctacgaggcattgcgccgattcgaagccgacctgaccacacatcgcatcacacaggacggctgccccgtcacccgcacccacatgatgaacgcgcgaaaggtcgccaagaccctggaacgctacgggctggcgaaaccccagcagaacaggaagatagacgccgccgtgaccagcgtgctcgcccacgaagccgcatgcgacgcgcgagccgccggctggggcgctcgcaaacacaattacatgcttaccggatcatcgaccagaaggaggtactgatggactacagccagcaggaactgtcctcattggcgaaccgactggccgataagatccagttccgtcgacccagcatcggcacccacaccgattacgtcttgggcaaacgcggcaagctcaagttcgcgtccaaggaattcaagcgctacatgagcgaccggttctccgacttctccgacaactggtgcctccccgtggcgcaggccccagtggaacgcatcaagttcaagggcttcgtcccttatgatgacgtgaagctcggcaccggcatcatgaaatgcctcgaccgcaacgacttcgaacgcggacttcaggaagccgcgctgatgatgaccaccacgggccgcgcgttcgctttggtcacgcaggtcgacggcagggcccgcatcacgttcgagcacccggacagcgccgcagtcatctacgatgcgcgcaccggccagccgtcagccgggttcctcatccagcagggcgacgacaaggagtacggcaccctcatgctgcccggctggacggtcagcatggaacgcaagaagatgctcgatctgaccgaccagcgcgtgccgcccgacgtgtacggctggaagatgaatgaccctcagcccaccggtctggacacgatccccctgcgcgagttccgcaaccagatgctattggacaatgcgccgatcagcgacatcgcgcacgtcgaatcgatgcaggacacggtcaacgtcgtatgggcctacctgctgaacgcattggactacgcctcactgccggcacgagtcatcctcggcggagacccgctcgtcgagccagtctacaacaaggaggggcagcaggtcggcgagaagcccatcgaactcgacaagcaggtgctggagcgcatctaccagttcaccggcgacaacgtgaacctgggcgaatggtcaagctcgaacctgaacgtgttcatcccggtcatcgaaaaagcggtggagcatatcgccgccgaaacacgcacccccggccattacctgctgacgaacgcggaggttccggccaccggctacgaggtcgccgaagccggcctcgtatccaagaccatcgaacgcatcagcttcctgaaatcccccatccgcgacatctgcagcatcgccatgcgctacgagaacgacgcggatgaggcggacatcatcgccgactccaaggtgcagttcgcgaccccgcagtatcgcagcgaaaccctgatggcggacgcgatgctcaaatacaagcagctcggcttcccgatccaatgggtcgcggagcagatgggccaaagctcggacgaggtgcagcgcatcatgcgcatgcgcgccgacgagatggccgaccccgaactcgaatcgttgaaccgtgccctgcagatcggaggcgctgatggcggtcgaatctcaggtgctggcctacagtcagaaacggctggcgaccttggagctggcggcggacagagccgcacgcagaacatggaacagggtcgacgccaataacatccaggcgtcgtggaagtcgataagccgcgacttcctcaccctgttctccaccatccaaaccaagtccgccgaaacggccatcgacgcgagcggcatgatgctcgccgaacagggcgtgtacgtcacaccacacgccttgtccaaccccaacgcattcgcgggctgggctccgtccggcctcgacatcgcctcctacttccaatcccccgtgttcgccgccctgcacgcgatacgcaccggcagctccccgttggaggcattggaatatgggcgcaacctgctggtaatgctcacctctctggccgtcatggacaccgcccgccaagcggaatcactggacatcaccagccgtcccaaggtcggctacatccgcgtcgaatccgccacctgctgcgaccgatgcatgctgctggccggcaaatggttccgcttcaacgaggggttcctgcgccacccccactgccacggccgccacgtgccctgcagccagagcatggccaaacaacaggggtggatcagcgacccaatggagggtttcaaaagcctctcccatgaggagcaggacaaacgtttcggcgcgaactacgcgcaggccatccgcgatggcgccgacatctaccaggtcgtcaactcgaaacgcggcatgcaaagggtgggcaaaggctatacggcgctgaccaccagcgagggcaccacacgatacgggtgggccagcatgcaatacgcccagcagtccggccggaggatgaaacgccgcctgtccatcgacggcatctactcgctgaccggaagcgaccgggagaaaaccatcgccgcgttgaaggccaacggctactacgtggacaacgactggcgcggcaaggtgcccgagatccgcaaaagcatgtggctgcacgacaacacgtaccggcaggggcgcgtcgaactattgaccgccgccgagaagcgcgttcagaccgcgaagctccgctacgaggccgtattggagggccgcaaccccaacgatggccgcatgcccctcacccccgaaatcgccgcccaatgcgaacgcgaataccgccgatgggtcacctccggcggacagattttccagcaatgatccagcgaatcgaaaggaagaacatggatcccgcaaaccagaaccagcagacaggcgacaacgagtccaagaagccggagaacaccggcggcgaggattggcagtcgaagttcgaaggacagcggaaagtcaaccgcgacctcgaaaagaaactgaacgaagcctacgccaaggccgacaaggtcgacgaactcgaaaaacagatcgccgccctgcagggcaaggaagccgaatacgaggccgccaggaaggaacaggccgtcaaggacgaggcccttgccgccgccaaccagcgcatcctcaaggccgaagtccgcgccgcagccagcggcaagctcaccgacccggccgacgccctgcgctacctcgacctgtccaagttcaccgtcacggatgacggaagcgtggacagccaggccatcgccaattcgatcggcgaactgctggaacagaaaccttatctcgggaaagccgagcaagcaccctcgggtgcgaacatcacgccgcccagcggaacacgggacggcgaccgccatcagggtcagctcacccgagacgacctgaaaaccatgagccccgcagaaatcgtcaaagcccaacaggacggacgactgaaggacctgctcggagccaactaacggaaggaggccttaaatggccatcaccaatttcatccccgaactgtggagcgccaacatcctgctggaactccagaagaacctcgtctacggttccgccgtgaaccgcgactacgagggcgacatcgccaactacggcgacaccgtgcacatcaccggcatcgcgcacatcagcatcggcgactacacggcccacaccgacatcaccatcgaaccggccacagacaaggacgccggcgaactcgtcatcaaccagagcaagtacttcgcgttcgaaatcgacgacgtggagaagcgccaggccatgaacaacctgaccgccgcatattcccgggacgccgcctacaagctgcgcgacctgaccgatcagtacctagccggcctgatggcagcaggcgcgaagagcaagctcgacccgatttccggcgccaccgccaccaaggcgtacgacaccatcgtggatctggccaccgcattggataagcagaacgtgtcagacgcgggccgttgggtcatcgtcaacccggacttctacggtctgctgcgcaaggacagccgtttcgtcgctggcgccgagtccgctcattccacgctgctcaacggcgtggtcggtgaggccgcgggcatgaccatcctcaagtccaacaacgctcccgcagccaagggcggctccacccagtctccgaccgatgagggcaacgtcatcatcgccggcaccaacgcggccaccacgttcgcggagcagatcgccaaggtcgaggccacccgcaaggagaagggcttcgacgacatcgtcaagggcctgcacctgtacggcgcgaaggtcgtgcgccccgaagcgctggccaccgtacacttcaaggtgggcaagtgatggccggcagctatgaggccatgccctacttgggcgaagccgaataaccgcatagggggtgactcatggacacgctggcaacggtcaaggaccttgattcatacggcatcgaatacgcggacgaaaagctcgcgggcaagctgctcgaatcggtttccgcagcggtgcgcgacgccgcagggtgccccatcacacgcggcgaatacacggtgaccatccccggcgaaacctcacgcaggctcgacctgcccatgcgccccgtgatttccgtgagccgcgtgctcatggacggcgaggagaccggggattggaagctgctcggcaacgccctgtacagggaaagcctgtggagcctgccgaacatggtcccctgttccgtcaccgtcaccatgctcgccggctatgacccggttcccccggacatcgtgcgcctcgtgtgcagcatggtcgcagccggactcgtccagcagtcgaacggcggccccggcgctcaccgcgacgaatcatacgcgcgaatcgacgacgtgcagatcggctaccgtcagggcgactccgagatcatcgacgcactcgaactgccggagggcacgaaacgagccctccgcaacaggttcggcatgcgaggcatcgccataggggtgttccgatgaacgtgcagcatatcctcaaccgaggccgacagctcgccgaatcattgatgaccgaccaatgccgcgtcacccatatgggcaaaccggtcaccgaccccgaaacgggactggtggaaccggccgcgaacaccgtgtatgagggccgttgcaaggtgcagacctcgggtggtctggctgccgagaacacggagggcggcatcgtcgaagcgttgggtgccgtcactcccgtgtggagcatgtacgtgcatttcccctacggcaccacgggtttattgccgggtgacgtgtgcgagataaccgaggccgatgacccgaatctcaaggggcggaagctcaggttgttgaacatgcagtccgagaagacacactccaccgcatgccggtggaacgtgaaggaggtgggcaacagcaatgagtgacatcaccatagacgcttcggagctgaccgcgttcggccgtcgtgtcgccgccgcgcacgccatggcttcggtcaaggtcgcgcaggcggtgaagaagggcgcgcaaaacgtcaaggaagtcatcatctccgacctgcagacatcatcgaactacgcgatcagccgtatcggcatcggctacgaaatgggcagcaccggcaccaccatttatgcggacgtgagcccgcgcgaaggcggggccagcgacttggacaacatcgcgttcttcggcaccgcgaaaggcggcggaacccatgacttctacgaagctgcggagacggagctgcccacgctcgccgaatacgtggccgatgccgccgacgacatgctgataggagccatcggattatgagcgtcatggacttgaccaatgcggtcctcgacctgctgccctccatgccgtccggcgtgaaggtctaccggcaggaggagccgctggagtcggagatgccgccgtggatcatcgcgcgcgtctccaccgaccgtcatgtggcggcggagacgatgcggttcaccgcacactccgcgctcctggaggttcgcgccgtcagcaccaccgccgacagcgtgaacatctggtgcgacgacatgttgattcccgcgctggcgaaccgctcacccacccggccgccgggctacacggtcggccagctcaccctcacggaggattccggctcgtacgcggccggcctgaccgccgacgacaccgcgcgccgctaccaggtgcgcgtcctccggttccgattcacatggagccgaccatagatttatcaaaagtcttcaacgccaccccatacggggggtggcttttgctttaaggagcacatcatgacaatgaaactaggtacagagattcccggcaccagtgccgagggcaacatcaccaccatctgggtgccggcgatcaagaacatcaaggccccgaccatcatcgagctcgaggccggcaccgacatctcgaactacgtcatgcttggcggctggagcttcgacccgtcgcaggacaccgtgtccgaccagcgcgagaacaccgtgcaggacttcggggcccccggccgcaagagcgccggcgacatcagcatcgaggtcatcgacaacacgaacacggagcacaaggaacagaacgaggccgtcaccctcatgcacgagggcgcgtccggctatatcgtgcgtcgccgcggcatggccaccaacgcgccattggcctccggccagaagctcaccgtcgtgagcgtgaagtgcggcgaaaagaaggtcatcaacccggatgcgaacaccatgatccgcagtcagatcccgctgttcgctcaggctcccggctgggagtccgagaccgccgtgctgaccgcagcctgacaagttcttccgtgcggggattctaagcctttctggccccgcacgggcattctctcttctctctcagaaaggttttcggatttgtagaaagggataatcatggctttggaagtgaagcgcaagcgcgtggacgtcgacctcatattgaatcaggagaaggccgaacaggtcgccgcattgggagccgacctgaaacgcgccatggcgcagcatgtgaccgagggcggcaacgccgccgccaaacgcatcgccgaacagatcgacaggctgcgcgacgaggtgaaggacgacaccatccgcatcaccttggaggcgctgccgctctcccagtggcgtcaggtactcgaggcgaacaccgtcaccgagaacggcgtaccgaaacaacacatcgaggacatctgcgccgacgccatcaaactcatggtcaggaataccgtgccggaaaccacggtggaggagctggcgaacgtcatgaccgaactgtccgacggccagatcagccccatctggtacgcgatccgtgacctgaatgcgaagctcatcgacccaaaagacgcactcgaatcagcctcgcggataatccgcagacagtaagggaactgcgaatctgccagaagctcggcatcagctacaagcgttggctcggctgggaaccgtcgtatcgggtggaaagggacgagcataggcgcatcaccggctacacgccggaaaccgaatgggatgagaccgaacgcgaatggatgctcgcactcgacgaatacgagcgcacgctgtgtccgcgctgcgggatgcccgtcagcatatgccacgacgagctggcccccaccaaatacgcgagcgaggtcggcgtctgccagatcgacctgatgcgccgcatcgggctcgaagaataccgcaaggaccattccgcggaatccgccacgaaacttgactcactgaccgtgggcatcaacccacgatgatccgacaggaggatatgccatggccagtggcctgaaccgcaacatcaccgtccgcctgctcgcggacaccagcaatttcaccgccggcatggccaaagtgtccggcgaaagccagaagaccgcgaccaccatggaagccgccggaggcaaatcgaagctcatcaccaccggcatcgcggcggccggtgtcgccgccaccgcgctgggcgtggccgctgtcaggatggcggcggacttcgacgccagcatgtcgacggtgcaggccaacaccggagccagcgcagatgagatgaatcagctccgtcaggccgccatcgacgccggcgccgacaccatatactcggccaccgaatccgccgacgccatcaacgaactcggcaaagccggcctatcgacctcggatattctctccggcggtttgagcggcgcgttgaacctcgcagcgtccgacggcatggccgtaggcgacgccgccgaactcatggccaccaccctcaaacagttcaacctgacgggcgccgaatccactcaggtggccgacgcgctggcggccggcgcaggcaaggccgtcggttccgcgcacgacctcggcctcgcattgaatcaggcgggtctggtggccaacagcatgggcgtcagcatgcaggagaccaccggcacgctcgccgcgttcgccaacgccggcatgataggcagtgacgcgggcaccagcctcaagaccatgctccaacgactggccagccccaccgacaaggcgcagaccctcatggacgagctcggcatcaacgtgtacgacgccaatggcaagttcatcggccttgccggtgccgcaggccaattgcagaacggtttgagcggcctgagtcaacaggaacgcaatgccgcgctcaacaccatcttcggagccgacgcggtgcgagccgcgaacgtgctctacgagcagggcgcggaaggcatcgacgactggacgaaagccgtcagccaatccggctacgccgcggacctcgccgccaagaagaacgacaacctgaaaggcgatctggagaatctgagcggctctttcgaatccctcatgatctctttgggcgagggaggtcagggaccattgcgctccctcgtgcagacactcgacacccttgttgacggtttcgcgtcattgcctgcgcccgtacagcagtccatagtgctgatggcggctctggttggaggcagtgtcgcagtccacaaagcgatggggccgctgaactctagcagcagccagcttgcgcaaaccctcggattgattgccgacccagggcaaaggctcataggcctcggctccggaatcgcgtcagcgttccagacatggggcgcaactttcggcagtgcagaatctcagataaacacgtttggcaccactatcagtcgttctcaaggcgttatggcaggtttcaaaaacctgggaagcggcatagtgtcgttattgggtggaccgtggggtatagccatcggcgtcgccggcgcggccctcctctccttcgccgacaaggccgcagaggccaagcagcgagccgactcgctaaaaaccgcgctggaaagcaccggcgacgccagcaaacaaatcatcgataatctatcaaatgcaaaaatcgataactcctggatcattccggacaatatcgaacaggcgtattacggatacaagacccttggcagcttactcgatgatgtcggaatcaagatgtccgacatggcactggccgcacagggcaactcggcagcaatgcgccgaatcaacggtgtcaccgatgaaatgatcgcgaaaggcggcaagcaaaaagaactcgcgggaatcattctcagccagctcaacgaggaaaaggataactataacaaggcatccgatgcagccaagtcaaaagccaacgcactcgctgaagtagagaatgctaccaacggcgctgctgacgccactggagaatactcaaacgcaacacaaggcgctacgaccagcactcaggatttgatggacgccatcgacgatctcgttaaaggcttcctcagcctgcccggcgtgcagctgtccgcggatcaggccgtcacccaattcaaccagggaatactcgaccttaacgagaacatcgcgaagaacggccgagtgctcgataacaacggcaacgctctggcgggctatgagtctcaggcgtatgacagccagagcgcgctgcagggtctcgcctcgaccgcgcagagcacggcgcagaagatcatcgaggaaggccaggcccacggcgacgctgcagcagccacccagcaggcgggcgacatcctcgaacgggcacgccaggcatacatcgacaacgccacggcagccggcatgagcgccgacgcggccggagaccaggccgaccgttacggtttggcccgcagcgaggccgacaatctgcgtcagagcatcgaatccatgaacagcgaggccgctaaccctgttgacgtgaggattacgattacggacgaggccagcgacgtactggacaaggtgaaggcgaaagccgagaaaatcgatgacaagaccgtgcgtttgaccggtgacgacaaagacctcatggacaagatcaccgaagccacaggcgctcagatcgaccccaaaaccggctatctggacttggacaagagtcagttcgatatagcgatggctttggcggccggagccaccatcgatgacaagaccggtatcctcaagggcaacaatgatccactgttcaacaagatggccgaggccaacggttggcagatagacccgaaaaccggctacatctacggcgagaacgatcaggctttgcaagcgatccgcgatgtgaacaacgaacccttggaaaccccgagggaggtcacggtcaccacgaacatcgtccgcaacttcgttgataactatatgaaaaacgacgtgccggatgacagcgtgggcgttcgcccgccctccaagaccggcggcctattcaccggctacggtgtttcgatgcgcggctacttcactggcggccctgtcatcgagggcctgttgcccggcaaggcgagcatcacgggcggcgacaacatcacgttggcgaacgcgcgagtcaagagcggcgaattcgtgtccaatgtgaaatccgtcgcatattatggcgccgacacatacgcggccatgaaccgccggcagatacccaaggaatcgttctccggccgggatatcgacgtgagcggcgtcatcgaggagatacgttccttccgcgagcagatcggccccatcatcagcgcgtatgccccgcaaatcggcaaacgcgacttccagcggctcaccaaggaggccttgcgcacatgatgcatacgctcacctacacgtcgaaccgcgtcggaaccgtgattgatctcgccgaccaggagggaatcatgtgcggacagatcctggagctacgcgcccgcgcatgggagttcgagctcggctaccggtcattgcgggccacgcggcccgcgaagaccgtcaaggtcttcgggctcgtctacggtatcccggcgctcgaaaaggccgaggaactgttcgacgcggacatgtacgcctacctcaacgatgccgcgaaacccggcgtcatcacgatggacggatggtcgcagacctgcctcgtggtcggccacgaacctgactacacgtcacccgtgctcgtgcgtggcgatttcacgttcgccttgcttgacggggtgtggcataaaccggtcaggcagagcttcagccggtcgacggtccgctacaacaggggcaagggttatccctacgactatcgctacgattacgcgccgacccgcaacgtcagcagcatcgacaaccaatccgccctgccctcgcggatgaggctcaccatttacgggccggtctctacgccgagcatcatcatcggcggcaacaaggtgatagccgacgtgagcgtcccatccggcggctacctcatcatcgacggcaccggctcgccccgcacggccgtgatggtcgccgccaacggcgacatcaccaacgtgttcgacaaaacgcatcgcgaccaggcctccaacgaatacgcgttcgccaccctcccgccgggactgcagcaggtctcatgggatgaatcgttcgggttcgacgtggagtactggttggagcagacgggactgccatggacctgatctggaccaataccgctcacgtgccgcagggcgaactcgtctcccccgcactcgacctgcagtacggcgacgagcagaatgacttcgagctcactcactccacccccggactgctgctctccgacggctgctacatcggagcggagggcaccgagttcggaggccgcgtcgacgcggtgcgtatcactgtggatgacgggcatgccctgtatacgctcaccggccgcacatggcacggtttgcttgcgggcaagatcctccaacccgactccggcgccgaccggctcacggtctccggcgacgccaacagcatcatccgcacggtaatcagccggatcggactgtccacggtgttcgacgtgccctcggaagcgagcggcatcaacatcagcaactattcgttccgcaggtacattcccgcgtgggacggattgcgcatgatgctcaccgagcagggagccagactcgacctgacctacatcgctggacactgccggattcgcgcggtcgccgccgacacgtacggcggcgcggacagcgaccagcgcatcagtttcgaggcgcaacgcatctggacccaggtcaaccatctcacgggcctgggcaaaggccagctgcgcaacagggcgcgcagcgactggtacgcggatgagtccggcaacatctcccagacccagaccctgaccggcgaccgggagatagcccagacctacgagctcacatcctccgaaggcgccgaactgtccgaccagaccagggacaaactcaaggacatgtggaaacaaggcaccgtcgatttgacgatccccgagaaccttggcctgcatatcgacgaccatgtgcgcgcctacgacgcgctgaccggcgtcagcgtggacagccccatcgtgcgcatcaccgtcaaactcgccaacggcacaccaaccatccaatatgaagccggccaatacagttggcccgacgaacaagactaaggggagcaacatcatgccgaaacagtccaacatcaccctctactcctgtgaccggccgtcatgtgacaacaaggaatacgtgttacccaacgcgacggccagccccaactggcacgaggtcacacgcatcgaccgcaacggcaaccagaggaaaatcctgttctgcgaatccgactaccagcagtacctacagttggccgaaaatcaggacaaggattataacctctggctcaacaagcccatcaacgcggaaggcaagtgattatggcaaccaacctgctcgtaaccggctcgcacggcggcgacgacccgcacgtggaatcgaagcacgacgcgctcatgcacgccgccatgctcggtcgaggcggatacattttgaaaacccggaattggacgatgaaaccgacggcgaaggatgcgaacaacatcaccatcccagcatgggacctcgtggtcgagggccggcagatctacatcgccgcaccgaccgacgtgaacatccaatccggctcgcaagggcaaaaacgacgcgatctcatcgtggcccggtacgcgttgaactcaggcaccggcgtggagacggtcaccctcgaagccatcaagggcaagcccagcgcggccacgcccgcggatccgggcatcgagaccggcagcatcatcggcggggccatcgcctccgacctgccactctgccgcgtcaacctcgacggcatcaccatcacatcgattgacacgctggtcaatgttatgcagcccttggaggatgtgtgggattccctaacccagcgtatccggttcgaccgttccggcaccacgagcgccggggatgagatgtaccttaacggtgcgatactgccgggcagtcccgccatcgcggtcatcagcatcgtatggtgcaacaagggcaggtttatcaatcaatcatgggcgcacgtcacgctggcgcgcatggtcggctggaaggcgattggacccgccgtacactccccggttgcggagaacattgcctacgagcatttaggcaagaaccagttcgccgtgaccgacacaggggaaatccaatacgtcacgccgggaaacctcactatccccgagaacgcatggcatcgcggctgcctgatagcgccggtcacgccagcctgactagatgccgtaggagattgccagaccgaatgccaaagtaccctgcacgccgccctgattgttgtaacgcaatacaccgtctgcccgcacgatgatggttttctgattgtctccgtcacgacccccgtaggagaagttgagttcggttggaggcctccagccttcgggcagaatgccgaagtccccgctgccccacgagtcctgaacagaggacttccagtcgatgcgcagcgtgacgagcgacccgcgacgatagcccttgacggtaccgtaagtggagttaatcagcgtcagcactttggtctgggttagggaaaaccttatgcggcgggcattgggtcgctggtcctccatacgccggtgcatcccgcgtacgcgctgttcggattgccaagcatcgtgacggtgccattggcctcgccgtaacagatgaatgtcgtttcaccaccgaaaacggccacgggcgtattgacggtgacgggtcgatacccttcggggagcttcttctgagccttcgtgtaattgttctgcccgctactgttgaattttacgttgccacccatgaaacagatatcaccgatgcgcgtaagcaaaatgctgtcgttgctgtaggggaccctccatgtcgtggaacgctgggttagggaaaaccataggtcacgtcaggctgtgatgaagctggcggtgatggcgatcctcctccacgttttgttactggcggtgtagacctgacgcaaattgatggagccgtccgtgagaatggtgagataaccccatgtgccgtcctgcacgccgaacagtacgtgcgtttcaacgttggggcgatacccgtccttgagttgaccgaccttgctcatgccttttgctgggataaatacgtcatcaccggcgcaattcacggtcgcgattttcccaaccgcatcggccgtgaccatgagctttgggaacgtctgcgtttgaagtatgttggtgacgtgggttagggaatcccgttcaggccattaaggctcgttcccagaggcgttgcgcgtctctcaaagccgtgatatccggtttgaggtagtacttcgcggtggtttttatatcgctgtggccgagcattttgctcacgatggcgatatccgctccggcggccagagtgttcgtcgcccatgagtggcgcaggttgcgtgcgggcacatgcggcagatcatgccgcttgcagtaggccttgtattggcgtgcggcttgcggcggggtgagggtgccgatgagtcggcccccctcgcgtggcctgagctcgcgcaatcgtttgacggcgaagcgcggcaacgggagcgtgcggcgggatagttcggttttcggcggtacgacggcctcatgcccggcgacccattgcaggccgcgctccacgtgcaggacgccgcgccgcaggtcgatgtcgccccattcgagcccgtatccttcctcggtgcggagtccgcatgagacggcacagataagccacgcctcaagcggatgaccgtagaagccctgcaacagcgtgcgctgttggcggatgctcagtattcgcggctcgtaatgaggttttgtggggagttggatgtcacgccgtgtgatgtccgcgtccaaaaggttccagcgtatcgctttgcgcagtatcgcgcgtaatacagaccatgccttgcgtgcggcacccgccgaatcgaacccggcaagccacttgtcgaccagttccacgttgatcgcgtccatctgcattgcgccgaacaccggtttgacgtgcagcctccacgccgactcgtaacccaccagcgtgctctcgcgcagattccgcgtgcagtacggccaaaaccggttggtccaaaactctcgcaacagcattttcaacctccgaaaacccacacgccgcacggccgatccgcgcgggacaaacgtgtgggtttatcaataaaaagagaaaggagcgggatgcccccattccaacaattgttcggctcagtggaattctggagcgcggtcatactcgcgctgctgggcggcggcggtgtcggcggcatggtcggcgcatggtcgaaccggcgaaaaaacgaggccgacatagacgacatcaccgccgatgctgcggacaaggcggtgaagattctcacggacaacatcatcgacccgttgcgtgagcaggtcacctatcaggaggagcagatccggcatttggaggacgtgcaacgcaagtatttcaaggccgtgtcctatgtgcgcggcctgtaccactggctgcaatcgttctgcgaagtcgtcgaaccggagtttctgaaacgccatcccaagccgtcgctgccggacgagctccgcccggacgtggcccccgaaacaatcgaatccaataaggaggaacaacaatgacccaaatccatatcagcatcaggaagccgaagaccggaggcttggaccctgtcaccggcctgatgcggttccgcccggtgcgtcgtcatttcgacgcggaaaagaatcttgtcatcgcggcctcgttcgacgcggacctgtccgaaagcggcgagctgacggttgacctgctgcccacgactagcgcgtttgtttggcaggtcatcgagttggcggacacgccgcaggcgtacacgcgctacgtcgaggtgccggactccaagaccaaggtcgaatacgcggacctcgtggaagtggacgccggcacgttcgtcccgaaggacatggccggctcccaactgttgaaggttcgccgcgcagccacccagtcggaggcggagacactttccgcacaatacccggacgagctggtgttcttcgacgaaaccgccacgaccgcgaaggccgctgcggccttgagcacgctggagtccatcacggccgaagctcaaacgaacgccatgctggcgaagagcgccatgctgagcgcccggtcctccgcggattccgcgaccgccacccagtccgacctgagcagtctcgcgtcgaacgccagtatggcggcggcttccgtcgccaacgattcgcagaccgtggccgacaccgcttccatggtcgcggcgaagggcgagacggccatcgccgccatcgattcgacggtgcgggcggtcaaggacaaggccgagagcgcttccgccgaactgccttccgccggcacccctgaaggcaccacggaggaaaccggcaaggactccaccggggaaacgccggccggaaccgtgtcggaggagcccgcagccaaggccgtgaaagccaaggccaagaaggttaccgtgaaggaggcctgaccatgccagccctatacgccggcaaacgtgtcggcaaaccgttgatgggaggccacacgtacaacgccatgttcaacggcaaactcgtatggcccctcgacagggacacggtcgtctccatcaggatcacggacgacaagggcgggacgttgcccaagtctctggcggtcaacggcaccctgaaactgggtgcgaaggccacctacgcggacggtcatgttggcgatctgctcaccaccaatgacgtgacgttcgcgagcagggacacttccaccgccacggtttcgggcaacacgctcacgtggaggcatggcggaacgattctcgtcaccgctactgtcaacggtttcacttccgccgccgtgtccatcagcgcggcctacgcgcccgagtccatcaaggtcacggacgattccggcaaacccatcgacaacatcaccctgcgcgtcggcgagagcaagaacctcaaggtgacgatcctgcccgatgcggcatcgcaggagttcgcggccagcgccgccaggccggatatcgccgtggttggcgacgcgaaaccgaccggcatcaccgtgtcgccggaatcgttgacattgagggtgggcgaaaccgccggcctggacgtcaacatcctgccggattacgcgccgcaggagtatacggcatccatcagggatgtgagtctcgcatcagtcagacaacagtaaggggcaatatcatgccaacaacaacagcgtttaggggggggggctagtgtccgcgccctcaaggagggcgacacctccatcaccatcaccgcaggcagcatcgtaaagaccatcccggtcagtgtatggggaaacaaatgggtgctgcccaccctgcccgccacgcgcaacggaatcacgttcaccgcggccggcgacggcatggtacacgcgaagggcacagcgaccgactgggcgaccatcctcgtcacccaggacctgccggccggcgagtacacgctcgaacacacgctcgccgacggtgtcggcctgttctgcgagctcaaatccacggacggcaggatcgacctgttctcgcatggcacggtcaaggcgacgctcccggcgggcgactaccagatgctcgtcagtgtctcgcccggcaagaccgtggacgcaaccatcaccccaattctcaggaaactcaactaaggccccgatattggggccttcaccataaaaggaggccccaatatgggcgcactatcaataaccggtatcaaaccggggtccacgagtctggaactgaccgccggcaagattacgaaaaccgtgccgattaccgtattgtcgcgtaacctgctgtcctacggtcccgccgagggcaacgggttgaccgccaccgtcaacactgacggttcgctgcacgtcaccggcaccccaacacggcagtgggcgggcttgatgtggacgttcccatgcccggtacagggcaccgtgatattgtgcaaacccacctttatcgccgggttggacgccagcgtcaaattcctcgacgccaaagaacaccggctagaaggtcaggtcacctcgagcggcaatgccgttgcaatccctgccggcaccgtcagcctgcgcttcgaaatcctctccaacgaggacacgcccaccatgaagaacggcgacctcaaagtccagcttgaatccggcgacaccgcgcacgagtggatgcgacccgacaacacgagcctcaggggggggggtggtggtgaattagcgaacctgtatccgcgtgtcaccggcctgcctaagacagtgggcaccaacccggggattgcggtcacggaaacaacgccgggaacctaccgtttcaaaggctccaccacgacaggggccggctcgtggaataacttgaccggtgtggtgcatgtggatgcgggaacgtacacgatggacgccacggactggccgctgggcaacaattcatggctgatgggcatacaagcccatatctcccacgacgacgggagcgaaggagcaaatgtgttcggccctactaactatgggccgaaaaccttgaagaccggcactctccaatgcaacattttcgtcaacaccacgggcgaggtcgataagacgctcactccccgcctgtacaagatcgactgattctagccccacaccattccgtgtggggcttttccattgacggccccgagtgggccgtgacaatcccggcccacgaccgtgggccacaaacaacaatccatcccgagaaaggggaaaacattggtcaataacaaggacaagccgaaaccgtggtggaagcggctgaccgccaagggtatggcgctgatcgccgccatgtgcatgatgacgctccccgcgaccgcccacgcggacatgcagggcgtggacatgtccaactggcagtgcggcgcggacgtgtacaacatgcaggccgacttcatcgtggtcggcaccacatggggcaccgggcaagtcaacaacaactgcttggtgtccggcgtcaacacggacgccaaccgcatgatcgcccaggcgcaggcatccggcaagaaattcggcctgtaccattacgccatgggaggcaacccggaggccgaggcccggttcttctacgcgaatacgtcgaactattggcgtcacggcatcgtggcgctcgactgggagatggacgacaaccccgcatggggcgattgggattgggtacgccgattcatggcggagtgcgaacgattgagcggcggcgtgcgcccattgctgtacaccggcccggtcgccggcaccatcccgcaggacatccgcgaccgatacggtttgtggatcgcacaatacgccaacatgagcccgaccggctatcaggccaacccgtggatgataggcgcatacggcgaggccatgcgccaatacagcggcaccggtgtcgtcaacacgtggagtcccatcgacctcaacctgttccgcggcgacgcatggcagtgggacctgtacgccaacccaaccggcgactccacgccaccggccacaccggccgcgcccgcacagccgaacactcccccggccgacaccaacacgggtggcatcagccacaccatgcagtggggcgagaccatctggggactcgccgtagcctacaacgcatggcccctgtccgcatggcacacgccaagcggtgacatcaaccgctactacgtgggcgatgtcgtcacctacggcggcggctctactgccacccccgcaccgtccaccgggatctccaaggtcctccagtggggcgacaccgtgtgggagttcgccacgtcccacggctacag

SEQ ID NO: 1346 - DNA, 30367 bp, Unknown
  R157_18m  MAG No. k141_24044
cttcctgtgcctgttcggtttcatcttcctcacaacccaatggttccaggcgctgcgtgggtattcggcgctcgagacggcgattgccacactgccgttcgcggtcgtcatggcagtgatggccgcaggcatcgccctcgttcagggtcccgccaccgacacactgatgacggccgtgccggtcggcgaggaaggcatgggcagtgccgtcaacgacacgatccgcgaactcggtggcacgctcggcgtcggcatcatggggtcgctgcaggccggtgcgtacaccaccggcctgacggacgcgctgcgaggatctcacctgccccaggacatccttggcgcatccaaggaatccgtgatggctgccgaatccatttccggctccctgccgggcaccctgcgcagattgctggatgactcggtcgcatccgcgttcatgggcgggctgcacagcgtctgcctggcggccatgacgattgcacttatcgccgcggtcgttgcgatcgtggccatgccaaaacggcggtaatggcctgtacgcaccctagaataacggatatgacgcaatcgcagccccgatccagacgcacgccaacccttgaaatccgcggaagaattcttgacgcggcgaggcggatcgtggaacaggacggcgtggacggtctgaccatccgtacgctgtccgcgcaggccgacgtgtcgcccaccagcatctaccagcacatcggcggcaagcaggcggtgtccgatgcgctcatcgacgcatacttcaccgatctgcgcgaacagctcatcgccattgacgaatccgatcctgtgctgcgcctgcgcagggcgggcatgatctaccgcgaacacgcgctggacgcccccggtatttacacgctggtctggatggggcaggcgtcggactcggcccagcattgcctggaagccatcacgcagatcattcgatacggccaggcggcgaccgtgttccgtgacgatgacccccacctgattgcatcctccatctgggtgtccatacacgggttcatccaattcgaactgcgttccgcccaaccccgcacacgaggccgcgaacgggtcgaccggtcgtacggttacctgctcgacctgctgattcgtggtattcggcggtgaatggtgagctccctctgatgaggtagctcagtattgatacgctgtactgccgtcggcgttgcggatggtgaaagtgggggattgctcgatgttgaggtccacggtcagggaatgctgggcgtcggcgctcgtcgaacgatagacgaagtgcttgttttccagcttcacggtctcggtacgcgcatccatcagccatgggttgcgacggcgcagcgcgatcagcgcctgatgcagccggtatgtcggctctcccagcgtggacagttcggcaggggagtcggggaacttcggacgtacgtcgtcatcgccgccgaaacgctcctgcttgacgcccacatagccctgctcgtcgccgtaatagatgcttggcacgccgccgaccgtcatgagcaccgccaatgccaacgccgccttggccgggccaatctgcgatgcgatacgcgtcacgtcatggttgccgatgaacgtctgcggcacgaaggaattcaggaacgcgttgtgccgcttgagattccaatccagctcgaagaagttctccgtctccagcgcatgctggatcgacttccatagctcgtattgcgtgatcgaatccatcgtggattcctcgatgatgcgcgggtaatcgccatggatcgcctcaccgaaaatccacgaatacgggtgtgcggctttgacctgcggcaacacgcgcgcccagaacgggctcggcacggcatacgcggcgtcgaggcgccagccggcggctccgcgatccagccaatggctcatcacatgggccacatagtcaacggtctcgtcagccgaatggtccagcgccaccagatccccgtgcccctcgaacacatccaaagcgggttcgtcattatcaccgacatgcgcgcggaccagaccatgccacgggttgtcggccggattcaagcgtccggtggtctcgtcaagcgccgcccggacggccggatgatcgcggctcacatgattgaacacgccatccagcaccacctgcaatcccatgtcccggcaggccgcaatcagctggtcgaacgcggcatccccgcccaatcgcacatcgatgtgcatatggtcgagcgtgtcgtatccatgcgtcgccgactcgaacaccggacccagcagcaggccggacgcgcctagatcgcgcacgtactccagccaagggatcatcgcgtcaaggccgcggccatggaactggcgcgggccggcgggcctgatatcggcaccgcagaagcccagcggatacacgtgccagaacaccccgtacttcacccaatcgggcattgtgcggctcgaatccgtgcttacaaccactgtgcacctcctgattgacaccgtgtccattttcgcacacgcatgaccgaatcctcggtagatgacgagagttgtcgatgcaggcgccgaatcgaagcatacgactgtcctgctctgttttcacgaaaggatgcgcggcgcgcaacataacaacaccatataatccgcgcgccatgggaactacgtagccattcttccgttacaatcagtgtgacggcttccgcccccgaagaagaaggtgttgattccccttggacgtctcactggcgcatttcctccaacaagtgctttccaacccggctctgaccgtcacaacgttgctgacgctgggagtcatcttcgtcaacggctggaccgacgcacccaacgccatcgccacctgcgtgaccacgcgatgcatgcgcgtacgctccgccgtcatcatggcggccatcttcaacttcctcggcgtcttcatcatgacgcagctcaacgcttccgtggcctccaccatcagcaacatggtcgatttcggcggcgacacgaacgcggcgctcatcgccctatgcgcggcgctgttctccatcgtcgtatacagcgtgggcgcctcgctgctcggcatacccacctccgaaagccacagcctgatcgccggcctgtccggagcggccatcgccatccaaggcggcatcggcggcatcaacatgggcgaatgggtcaaggtgctctacggtctggtcgcaagcctcctgttcggcttcgccgtcggctggttggtatgcaaggccgtgaccctgatttgcgctggcatggaccgccgccgcaccaacgggttcttcacctacgcgcagatcgtgggcgcggcggccatgagcttcatgcatggcgcgcaggatggccagaagttcatcggcgtgctgttcctcggcatggcgttctgcaacggccaacccagcgtgaccggtgtgatgattccggtctggctcatgattctgtgcagtaccatcatgggcgtaggcacgtccgtcggcggtgaacgcatcatcaaatccgtgggccaggacatggtgaaactcgagaaataccaaggcttctcggccgatctgtcaagcgcgctgtgcctgctcgtcatgaccgtgctcggcatccccgtctccacaacgcacaccaagaccagcgccatcatgggcgtgggcgcggtacgccgcctctccgccatcaacttcggcgtggtgcgcgacatgatgctcacctgggtgttcaccttccccggttgcggtctcatcagcttcgtaatggccaaactgttcatggtcgtgttctagaaaggattccacccatcatggcgagacaaaaagacgtgttctacttcgacggattcctccgcagcgcggactacgcatgccaggccgcgaagctgctgtccgaggtcatgcacgacttcaatccaggccagctgcgcgaacgcatggacagcatgcacgcgattgagaagtcggcggacgaggtgcgccacgacatgatggacgaactggtgaccgcgttcatcacgccgttcgaccgtgaggacatcgacgagcttggccacgtgctcgacgatgtgaccgacagcatcgaaggcgtactcaaccgcatgtactacgacaatgtgaccgacatgcgtgacgatgcagtccagatgtcggatatggtggtgcgcgccacggaaagcatctgcgagctggtcaacgaactgccgcgattccggcattccaagacgttgcgcgaactggtgttcgccatcaacacgatcgaaacggacgccgaccacctgttcatcgagtcgatgcgcacgctgcacaccacctgcaccgatccgctgcaggtgttcgcctggcatgacgtgtaccgtcacctcgaacagtgctccgacgactgcgagcgcgtggccaacaccatcgacagtatcgtcatgaaaaacagctgaggttggtttttcataacctccctctgatgagccgagccgtgaagaaaacgccggaggtgtttttaggcaagggtgagtgacaacgagcgaataagaggtcagctgcaagctgtcctgaatcgcgttcgaggtggcatcgcgaagcgatggcggagggagagacctacttgaccaaaggcccctcaccgatgggcgttgagccagaggatggcgagttgggtgcgattggtcaggccgagcttgtccagtatcgcgctgatgcgattgcggaccgtgccttcgctcaggaacagtctggcggcgatgtcgcggttatcgaggccctcggcgaccagcgcggtgatctcacgttcgcgctcgccaagcaggccctcgatggaatcggcggtatctctggaatcgtcggaatcggcaggattcggagtccgttcggtgagcttgccgagcacttccgcgccgagcaccacctgaccggccatcaccgcctgcagcgcaggcccgaccgccgccacatcctgtttgatgagatagcccttggcgccaagccccatcgcctgcgcgatatacgactggtccgcaaacgtggtcaggaacagtatgcgcgcggccgggtccgtggccagaacctcgcgcgcggcatccaaaccgctggtgcagggcatctgaatatcgatcagcagcacgtccggtcggctcgccggcgtctcgaaataacggcgcacggcggcgtcgccgtcatttgccgtccatagcacctcggccgtgccggtggccgtcagaatcgtctccaacgactggcagacgatcggatcatcatccacgattgcgattctcatcaatccctcgattccatggtccaacgcttcttcggcacggatacgaacacacgccagccgtcctcatacggcccgcagaccgcggtgccgccaagggcgcgcacgcgcgattcgatatccgccaaacccatgccgcgcatcagctcatcggccgaaccacgcatatcggcaacgccgtcggcggcgagtcgcgagccgacgcgcgtggcgcacatcgcacgcgggcgggcagcggccgtccgggacccatcggactcggacacggccggccccggatcctgaatgaccaactgccagaacgcggggaagtcgcgcaacgtcacgctcgcctcgtgcgccgcactatgatgcaccacgttcgacaatgcctctcgaatcacggtcgcgaaacagcgcgagaccggcgcgggcgccttggcgatgtcgttggccagcgtcacggcgaaaccgggggagatgccgtcgaacgacgtgacggcatcatcgatctgcgcggcgaaatcagtgccgtcatcctcaagatcatgcaccgaacggcgcaccatcgtcatcgcatcatccaacgtcgcacccaacgtggcgaacccttgcgcggcgaccgtatcgttcgtcgcctcggccaccgtcctgccggcctgcgcctgcatgatcgcgcgggtcagcagatggcccacattgtcgtggatctcccgggcgatacgcgtgcgctcgccgagggtcgccatgcgaatcgactgggcgcgttcctcatcgatgtcggcgatgcgcgaacgagtggcccgcgaggattcgcgcgccctgtcctgcgcgtgcagcaacgcgcgccgcgcctcgtccgaggaggcgcgggcccggcccagaacgaatccaagcagggcgaccatcgtcatcaccagcgtctggagacggtcggtgccacgggcgaaccagagcgcgatcggcggcaacagccatatccagcgcgcggcgaccgaaagccacggggccgaacgtattgcatcggcaagggaacggcgagaggccgcggtccgcgagacactgggggagcggccgcttgtcgcagtccgtgccccagttcgggctccggccgaggcgagggccggcagctgtgcagtatcgtaggcgatgagcggcatgaacgcgcaccatgaaggcactgccacggcgatgacgagatacgccgtacacaagacccaagaccattgcgcgggacgcagccattccaccaatccggcgacggaaacggccaacagcaggccggcgatgaacacgccatcgagccgcactccgacaagccaggccaaagccaggcccaacacgagcagcaagaccttttcggccaacacacgcatggcacctccccggctcgacgctcttccaccaccagtctagcggtgcgcggaacacgacgaacttgacgggcgtgcggaattacccgcatgacggtccaagacaacgggcttacacttcccgaatagatgaggcacaagcgtcggatgtcgtcgacacaaccgtaaagggatgataccgatgattacgcaaagccacagggcgtccaactattcgatggacgagatcagcctgatgccggtcgataaggtgtacaaggccatgcagaccgacgccgaaggactgtaatgacaaatgtcacgcctgtacggccaagtcgtgacgtttgcctgtggcggcgtccggccccttcttgggatgatggaatcgccaaggaagggagtgactatgacaaccgacaacagagcttccgaacacgactcgacaaccaacccggctctggccgtgcacgtcagccaactggtcaaacgctacggcgacatggtggcgctcgactattttgaccttgacgtgaaccagggcgagattttcgggctgcttggaccgaacgggtccggcaaaaccaccgcgatcaactgcatcctcgcgctgctcacctacgattcgggcacgattcgcgtgttcggccagccgatgacgccgacctcctacgcgctgaaacgtcgtatcggcatcgtgccgcagaacgtggccgtgttcaacgaactgaccgtcaccgaaaacatcgactacttctgctcgctgtacgtgccgaagaaaaccgaccgcgcgccgctggtcgaggagtccatcgaattcgtcggactccaggacttccgcaagttccggcccggcaaactgtccggcggtctgctgcgacgcctgaacatcgcctgcggcatcgcgcacaagcctaacctgatcttcttcgacgaacccacggtcgccgtcgacccgcaaagccgcaattcgattctggaaggcatccagcggctcaaccaggccggcgccacggtgatctacaccagccactacatggaggaggtcgaacagatctgcgaccgcatcctcatcatggaccacggccggcacctggcgctcggaaccgccgacgagctcaagaacatgatcgacacgggcgagcgcatcaccatcgaaacgctcgatctggcggattcggcgatggccgaggtccgtgcgctgccgtgcgtgatcgaagccacctacgacggcaaggaactcgacgtgcgatgccgtcgcggcgaacacaacctgaccgacgtgctcgacgcggtgaaacgctccggcgccaacatcggccacctgaccagtcgcccgcccaccctcaacgacgtgttcctcgaactcaccggcaaagcactgagggactgaccatgctcccctcagtcggcaagcaaataacttggctcccctctccgaggggagctgtcaccaaaggtgactgaggggagttcctgagtaaggagacatcatgtggaccacatttctggtcgcattgaaagcgaacttgcgtaaccggtcggcgttgttctggatgaccgtgttcccgattgtgctggcgaccatgttcaacggactgctcggcgggctggccgaagcatacgaactcaagccggtgccgatggccgtcatcgaagacacccgttggcagcaggcggacggtgcccgcaccttcgtagacgcgctggccggggaaacggaatcggcctcagacgacacgacctacgccgaaatcgaccaaaagctgctgaccatcaccacagtcgacaccgtgaaggaggccgaacaacggctcgccgacggcactgccaacggctatctgaccgccgacaataacggccgattggcgatgaccgtgagccgggaaaccgccgtcacagccaaggactccacgcaaaacagcggactggacattagcctcgcggccctgcgcagcgtcatcgacctgtacaaccgcaccgacgccgttacccggcagaccatcgccgacaatccacaggccgcgctcagccggaacttctggaacagcgtcgggcagaacgtcgacatgacccatgagacgacgctcacgcatttccagcctgacgagatcgcccgatactattacgcgctgctggccatgtcctgcatgatggccatgggatactccatcagcacagtcgccgccgcacaggcgaacctgtccgcgctgggcatacggcggaccgtagcgccgctgagccgggccaaacagctcgtcgcgggcttcctctcctgctggctgtgctcgtcggtcgccctgtccatcgcattggcctatatccggctcgcctgcaacgtctcgctcggcggacgcgaaccggcggcgatcctcgcggtcatcatcgcctcgttcatgaccagctcagcaggcaccctgctcggtgcggtgccgaagctctcgtacaacacgaaatacgggctgtcgaccggcatctcctgcacgctgtcgctgttcaccggactgtacggcgggtttgccatgcagatcagcgactggatagcccgcaacgcgcccatactcggcaccatcaaccccgcacagcaggtgacgaacctgttctacgacatcctgtactacgacagctaccggccgttcatcaccacctgcatcattctgctggcgatgagcgcggtattcctcttggccggcatcgcaatgctgaggaggcaacgttatgaacacctgtaaagccacgctgcgcgtgctgttcgcgcaccgggtctacctgatgatctacctcgtattcataggcatcctgatgatgtccatcagctgggcgatgctgacctccgcatccggctccatgtccgcggtgctcgaatcgaccaagacgcgcgtcgccatcatcgaccgcgactccgaccggggtgatatcgccacgtcgatgcgcgcctacctgcgcgattccagcgaactggtggacctcgacgacaccagcgaaacgctgcaacaggccgtcgcctcgaactgggtggacctgatcgtcatcattcccgacggattcgctgacgattatgtcgccgcggcggcggacggcgacaattcgccgaacgtggacacggttaccagctacgcatccggctccgggtcgatggcgcggatgaacgtcggcgggttcctctcgctcacccgcaccgcactgatcggcgcgcagacgagggtcgaccaggcggcgctcgccggcatgatgaacgctacaggaggggccgccggttttgatggcgcgagtctggaccaagacatgctggactcgctgccggaagggcaagtcgacaagccggatatcaaggatctgtcccaggccgccaaaatggccgccgaatcggccagcgatacagacgtgaaccatcagatcgccgtggtcgatacgccgaccgaggagtcggcaagcgctgcggatacggcggtcagcggattcggcggcaccatgaaaaccgcgctgtacccgctgtccctggcgatgaccatctgcggatcgatgatcctgggcgcgttcaccaccggcgaggtgcggcggcgtctcaccgcctcgccccgacgcatggtcctgatgggactccagcggttgctgacgttgggcggattcgcgctcgtcgtatgcgtcggctatttggtgctgtcaatcggtctgatgatggcggcggggctcgatccgttgcacctgagcgtcgggggagtgctgatgacgttcggcgcgacctgcgtgtacgcgctgatgaccgtcgcctgcggattcatgctcagtgagttcgggctctcggaagaggcggccaacgggttcgccaacatcttcggcctgctcatcatgttcacgtcgggcgtcgcattgccggttgacatgatgcccggcgtgatggtgaccatagccaagttcctgcccggctggtggtattgcaccgcgatcgacaacgcgctcggcttcggcacggctgcggagagcggcgtgagcgtcgccggctgggccggctcgctggaattggtcgcactgttcggcgtgatgttcatctgtattggcctggccgccggccgcttccgccgatcccgtcccaccctggccgcgcccgccaccacgcagctggccgagtgagaaaatcagcctttcaaccgataccgctgtaccgagtcgtcggcgaacttgactcgggcgacccgcccttccttcatcagctcgcgcatgccggacgtggcggccagcggcgtcaactgcagttcgcgcatgatctccttgacgctcatcgccgaatgccgctccagtacggtcataatcgccttgaccacgtcgcccggcgaactgttcgccatcgtgcgttgcttggtgatggtcatcgtgaacgtgttgatgtcgttgcgcgtggtcgccggctcgatgccggcctcgcgcaacgcggcggcgatgcgctggtagccgtcgccgccttctgggttcacaaacccgccgcccggatacggcgtggactccagcagcgtgaacaggaactggtttcgggtggagacgaacggtgcacccgtcaccggatgcggactcgccagcacatcatgtgtcaccatgccgtacaggccacccggattggtgatctcaatgcgatcggtgaacacgctgatatgcacctgcgtgccgcgcgcatcgggcgaataatcacggtgggtgagcgcgttcgcaatcgcctcgcgcaacacgagtggcggataatcgggcttcttcgcgccaatccaacgcatcagcgagtcgaccgcatcgtcgatcatcaccggaatcgaaccgaccaccgacttcgaggcgaccaatcgttcgtcgccccggaacacatcgtcccggctcgtccccggaaacacggctatcgaaatgccgagccgcggatagaacttctgcggatagcggcccaacgccagcagtccggccaaggtgggacgcagtattccgccgacctccgattcgtcggaatcatcatggcgcaacacctgcagatccagcagcacatcgatgccgtcccggtcggcgaacacgcgcggatgctgttcgcgcacgcgcgccaacaatccggcaacaagctgcgggtcgaggtcatcggtcgtggcgccgggcacgatatccagatcgtatgtgggctgcagatgctcctcgatgagccggtcgacctcataggaggtcatgcgccggtcgccgtcgccggtgcggatgaacgagccgccgtgcggtccgagcgcggtggtgaagcagggcttgtcgcgcggcagcatctcgtcgatgcgcgcgaacaccagattcgcgccttcgaacgggcaggtgacgatcacgggccgcaccaccggcgtcatcttctcgcacgcctggctcagcgcctcctgcatggcgcgcgcgtcgaatccctcgaccggcgtgaacccgttcttttcggacaggcccaggatgatccagccgccggagccgttggagaacgcggacagcgtatcggtgatggtcgaggagatcttgcgcttgcattccttgacctcgcactgctgcgtatcgttgccgatcagacgcatgagttcgatcagctcagtcattttggcagtatagtcatcgaccatggcggcctccttgacaccattgtgccccataatccgccgcccgctcgcctccagccccgccggttcaccccaattcatccagaattcatgggttactggtcaaagtacgaatgattgccgaaaggctgtcgtatatgcgcaatagcggctgcaaactgtgttgcgccagagcgttcaagtcttttagcaaagtcgggaatgtttatcggtggccgatgtcgagaatcgataagctcacgtatggcgctagctgtggcttccggatttcgtctaagtaatacacagagcaaatcatccggcgtgatgacctgaatggagaaagagtcaagcagtttctggggaaaatccttgatattgcgcgtggccagtgcgtctgcttgtccctgtgccgcagccgcaagtacgtgacgatcatccgggtcaggcagatcgaattggctccattccgattcctcaacatgtatggaggattcggggaatgcctggtccatcattatcagtcttttccggaaggcttgttgtgcggcgtcaggcagtgttcgggaggcggcttcctgtgcttcttgtaatacgttaggcgaccacaggggaagaaaaaggtcatgctcggccaaggtgagcagaacatcggtcaaggtgatggaatagatgacattggcatcaagaaacaccgacagcatcggcccgtactctccttacctccgataccgcatgcatggcttcctgcggggtcggctcgggcaggtcgtacaattcggcgtcttccccgacgccgatcatttggctcagggcgcaatccttggtgtgtttcgaggctcgcttgtattcaagcaggtcttccagccggatgcgacggtgattggacggacgtgaaaaaggaataagtcctttatcaagcagtcttatcagtgtttgccgcgaaatgccgagcattgccgccgcctgttcggtagtcagatcttgttcggtggcactgatcattacacttttgccttcggcgagaaggatggccgtctgcctgacggcgtcgcaaagctgcgaaggtaggggagtctccacgccgctggcatctttgatgaagatccgctcatcaagaaatcgtgcggtgaatgcctccaatgtcgtcatgtcgtcaatgttgatggatggaaggattgttcgtggaatggtgagtttgtcggattctgccatggtgacctcctttttatctatcacagtataaaacgtccaaagcgaccaaaacacctaaaacgttcaaattatgcgaattgacgatggttatcgagttttcgaatatgggttgctactggccgctaacgaggtcgaggagggcggactatgttgggtggcgtgggaatcttgcgtgtgatttgatgctgccgttgctccgattgagggtatgtgggccaagggccgggtgaagttggcgtccgagccgaagggcaaacggttcggtttgttcgatgccaagggtcgcgtggtggatatcaaggcgccgatcggccccgattggaaaggcgcgaacggcgtgaagccgattcttgccgtcatggtcggcgattcattggtggccggatgtggcgtggacgaccagtcgaaaggcattatgccgctgcttgccgcgcgcgtcgcaagcgtaccggtcggccggtggcctggcgtacggtcggcaagctcggcgcgaccgctcgacgtgtgcgctaccggatgatcggcgatatcaatgaccggccggatgtgctgatcgtgtgcgtgggcggcaacgacatgctcgccggccggtcggtgcgcgaatgggccgccggcctcgcgccggtgctggacgcggccaagaacaaggccggcagggtggtgcacacttttgctggtcactccatccaccactgccgcgaaaccatcggtgatgatcagcccgtcctcattgagcgactggtcagacctcttgccttggcagtgctgttcgatgattcgcatagtggccccctctgattctcactgtagaccggtttgcaaaccatcgaaatggtgggtatgctgttgcggcggatatgttggggtttgctcgtgggggattggtatgcgcggattgtcggtattgagcagggcgttgcgatgggcgttggtgggtatgacgttttcgatgctgtccaacgcgattttcgaggggtcggtgattccttcgattctgatcgtcggactgccggcatgggtgatcgcgttccgcaagacgttcaatctggtcatcgacttcgcttctccggtatccgcatggatcgtgcagcggttcggctcgttccgttcgcttgcgaccacggagggcgtggaaggcgtactgtgcctggcggtcgcgctggtgcccaacggttggacgtattggaagtggctgctgctggccctgtcatgcctgctgctgatgaccgggcaggtcatcgacgtggcctccgaagtgttcgaggtggatgcggccggcgacgacgatgacatgctcgtcaagtacagcggctacgtcgccgtgattgccagcgtggccggtacgtttctgggccaggttgccggatcggccctggccaacgcctccatcatggccatgctgctcacctcgtcggcactgtcatttgcctgcgcgctgacgcgattccgcacccgcgagttcatgccgggattcggcaacgatggtgcgggcggcgatgacggcgacggctccgccgacgaatccacggcggccgacacgtcacacgcgccgcagcgcactccggtcacccgcttgacccggatcagactgctgatcgcatcgctgctgcttgcgctgattccgtcgctgtgggcaagctatgcgttgctgggcatcggctcccggtacggcagcgatatgctgaccgtggtctacgcattcggcggcgtgggcagcatcgtcggatcgtttgtctacatgcggctctccgcaaaactcggcatgcgcgccgtgtccgccatcggggcaatcgccacggcgatttcccttgccgccgtactggttcccgagtttgccgcggtgtgcgtcggatggctcatcaacaacctcggctatggcctgctggcgcatggcgtgatcgtatcgcgacaactgctgctgagcggtggtgacctggccaaattcagcggccgtgccaggttcgcgtatgcgatcggcggtgccgtcggcacgtggggcggctggctcggctccgcccactggcagatactcgccgtcgtggccctggtactgtgcgccggattcgtcccgttgctcaaggccatgcctggcccggtacggcactgaggtgacggatggggccggctggcatctcgtgcgccgggcgatttcggcagattttgccgtgctgatgtacgcaggtgttgacgttcggcgaggttcccaaccacattgctgtgtgattgatgccgctcgataggcatgtcaggccggacacaccacggcggtgccgaatgggcgacggacctacgacccgcatcatcgcagcaaccgggttttgccatccttgacgagcagggcctgccggttggtgaggggcttgagactgagatcggcaccataccggtcgagaatgcgttgtgcggcgtggcccatggccgttgcatgatggtgggggaccacgcggaaatcggccaagcccaatcctgcgtaatcggtgagatcgggggctttgtccgtgcggtccatgagcttgatatagccgatgtcaggtgccgtgatgaccgagcccgcggactcgccgatgtacggcatgccggcgcgcacctgctcgatgatggcccggtcggcgccggtgcggcgcaactcctgcaggaggaagaacgtgttgccgccgcccacatagatgtagtcggcctcggcgatgctacgcgtgacgcgttcggcggacccgctcggcacatcttccacatccagttgctccacctcgaaaccgaggcgttgcagcgcgcgtttgctcaacgccgagtgaactggcccccacggttccacggcgctcgccgtcgggatgaacgcgacccgcttgccttgcggatgcggttcgacttcatgcacggcggacgaggcgttgcggaatatcgaagtcagcagcatcgtaaccataaaagccttcttcacatatcgactaggcgactatgcggcagtgtcggccttgaatatacggaagtgttcgtgcgttcgctctgggtatatccggcctgatcagcgggactcggccaatgtgatgccggccgccgtcatctgtttgcgggccgcgacaccgagctcctcgctgaccggtacggtcaggtcctcgaacacggtgacctcgaaaccgaacttcctggcatcgagcgcggtgtccttgacgcaatgcgattcggcgatgcccaccacatccacgcgactcacgccggcggccttcagcgcattggccagcgtcttgccggcggattgctcggccgcaacctcctcgcgggtctggatacggtcggtattgtcatcgatgccctcaaaaccggaatatgccgccgaatactggcccttcttgaaatgatgctggatattcagcgccttgatcgccgtatgcaattcggcgttcggcgtgccggccgcaccatgcttcggccacgtgtccacgaaatccggttccgccgaccagtgcgcgcccggctcgatatgccagtcctgcgtggttgcgatatacgcgtactcgctgcgatgcgcgttcacataatcggcgatccgctcggcgaccgcgttgccgccttcgactcccagttcgccgccttcacagaacgtcggctgcacatccaccacaatcagtgccttggtcatcatcattccccctattgccttggattcgttttgaatattgtctcgaactcgacgtgcgattgctctcatcatagccatgcgcggccctgtgggaaacgttcgggcttacactgcaagcagcaatcgaatacaagaaccaggggagggtgaccaagaccatgctggaccatctgacgttgcacgtgaaagacatcgaccgtagcatcacattctacaaacaggcgctcgcaccgctcggctatatcgtcaaggcgcatcatgagcccacgctcggattcggcgtggatgacggaaccctgcactccgatttctacgtgtcgccgattgacgggccggaggcggaggcttcgccggtcacgccggtcacacacatcgcgttcctggctgacagtcagcaagccgtgcaggcgttccatgcagccgcgctcgccgccggcggccgagacaacggcgctcccggtccgcgcccgtaccatcccggctattactccgcattcgtgctggacccggatggcaataacatcgaagccgtcgtggattgggctcattcgaacgagtaaaaaacatatccgtgtcgtgcctcaggcagcatcgacggcgtaggctccagtcagtcggatttgtggtcgtgacggcgttataggtcacatcacgcaagcgtgacggtgacggtctgctcggcggtttcggtgccggtccatgtgccggctttgcggttccaatccatgccgtccgcgtgcagtgcgtcaatgccgtattgacgtgcatgcgtgaccagccagcctgccgtctgccagcaaagtcgagtgcggttgtcggcggacaggccgtccggcagcgtgatcgtcaacgttgtgctggccgtattggtcgcagcgccgttgttcgtgccggttttgccatttaggggcataaccgagaccttgacattcggcagtgtaccgcctatggctgcaaccaacccgtccgcgtccgaggagattgctggctccaacgcgcacgtgacgtccgccgaccgttcgccggtcagccccgaggcccaagcgcgtgccatcgcatcccatgtggcatatagttccgggtagcctgagcgctgcacctcctgcgcggcgtcctccaccggaatcgtctcccaatccggcacctgcagcagatggtcgtagaagatgtttgtcgcataggtcatgtcggacacctgctccgccgtgccccagccttggctgggccgctgttggaacaggccgagcgaatccaagtcgccgtagtccagattcgtcagcctcgactcctgcatggccgtggcgatggccaccgtcgccgcgtgatccggcagtccgcgcgtgacggcgatgttcgcaatcagcgccgcgttctgcgcctgatcaggcgtcaaggtgcggcgggctccgtcggacgacaccgccgcacaatatgcttcctcggccgtgcgcgcggtctcgcgaggcgtgaatagccgtggcagcagcgtccatgccgcgatcagcgccgcaacaacaagtatgacggctgcaatcagcgcgcccgcgccatgggagcggcgtctgccgcaccgcacctgttgtcccattgcgcctccaatatttcggtgtcatggctgaccgtgaccggctggcctatgcagcatgcgggatttgccgtgttccggctcggccgtcatcatgacagcgtggcatatccacctgaatggcggctgcgccatcacgcgactttgtgacaattcttcacgcttcctgacatccgcgcaatcagaccggggaatgatacaccgacatctctattgcaagttcgacgcggctgataagccgattcgcaatcgtctatttgcgtttcaaggggctgatttgctcgttccgagacatccacttccgtttcgaggggctgatggccgagtagcgacagctccaaaacggcgaaatgacgttggcatgaagccattcgtacttgggttttggccaatgaccagccccttgaaacggaagtggatgtccccaaaccacgaaatcagcccctcgaaaccgagaatggcggtcgggattgctccgacaccaggggagctgctgccgctattgtgtgaaaggcgatttgtaccgggttgaaggagaggaacacatggcacaattgcagccgtactgcgcgattgagggcaatgatgatggattgcccgtcgtgttcgtgcatggcatgggtgtggaccatcgttcgctgatgatgctcgacaaggcgtttgacggcaatgattcaattcgccgtatatatctggatctgcccggtttcggccgtacgccggcattgcccgagcatgcctgcgggctgccggaaatggcggattggctgcaaacggccattgacggccttgtcggtaaagcggctccattcgccatggtcggcaactcgatgggcggtgcgcttgtccgcgaagtattggcgcgcgaacctcgccgagtggccggtatggcattgatcgcgccggtcgtggacccgcagcatgccggccggcatgtggccgaacatgtggttgcacagcccaatcccaagctgacgcactccttgccacaggaacaggtgttcgatttcattaccatgggcgtcaaccagtcattcgacgcgtggcggcgctaccaacggttcatcctgcccggcgtggcgttgtgcgaccgtgcggcatgcgaacgactggatcagcgttattggctggccgataatcccgaggaaatgctcggcacatatgctggtccggtgctcatcgtcaccggcaagcaagaccagatcgtcggatgcgaagaccagcaagccctgttgccgcactatcccaacgccaccttcgtgactctggataatgccggtcacaacgcgcacatcgaccaacccgaagccgtcatcacgctcgtgcgcgaatgggtggctcatatggcgttcgttccgttgagctgacggtctgctgacagtctgccgaagcctatatgcatatgagcgaccaatgccggttgacgcaatacgccttgcaaggtatatcgtttttcgatatagtcatatcgatgttcgcggtgtcgccaaaaacgtcggcacctgaaaggaccgggctatgaaaaactacatgaaccgatgggtgttgctcgcgttgaaagccatcgtgattctggtctggctggcctgcctatggggccaactattcgccgtaccgggattgagcggcgcgctggccggcctctgcccgagccagacgtcgatgcactggtcatatctcattatgggcgtgctgttcctgctctgcatcgaagcggcgttcgtggccgtatggaaactgttctccttgtccggatcgggcgcgaacttgagcaggtgatttgagatgacgattcgcatcaatctcgacgtcatgatggccaaacgcaagattggcgtcggcgagctcgccgaacaaattggcatcacgcccgccaacgtgtccattctgaagaacggacgtgccaaagccgtccgcttcaccacattggacgccatctgcaaggcactcgactgccaacccggagacatcctcgaatgggaagatgtcgattgatcgacacgccaccggctcgaactcatggttcaacttgtagtctctctcaaaatcaatgatgccctatcatcctgcaagacgatagggcatcagcatgtgactatgcgcagctgatatgtcgcgttgttatcactcggcgtccgcggccggtgcctccttgggcgcggagaggaagtgctcctcgctgggcagcacggcgttcaggattacggccaccacgaacgacacggcgatgcagttcgaggcgaagatttgttggaacagtgccgggaactgcgcgaagatgtcgctcacctgggtgaagccgatgccgatggtcagcgaaagcgccgcaatcgtgatgttgcgctgcgtgaagcccgcttcggcgatcatctggaagcccgaaagaatgatgttgccgaacatcatgatcgtgcagccgccgagcaccgcctgcggcagcgagttgaacacctcggcgatggccggcacgaagctcgccagcaccagaatcagtccgccggagagaatcaccttgcggttgacgaccttggtcatggccaccaatccgatgttctgtgcgaacgaggtcagcggcaggcatccgaacaggccggatacggtggagatcaggccgtcgccggcgatggcgcccgcggtctcgcgttcggtgggcgtacggttcaggcccaccttggtcagcgcggcggtgtcacccagcacctcgaccgaggagacgacgtagagcaggccgatggagatgatcgaaccccagtcgaactcaggcttgaacggcatgaactgcggcacggacacgatggcgaggttctggaaaccggagaaatcgaccttgcccatgcagatggccgccacatagccgaccaccaggccgaacagcacggacagctgcttggccgtgcccttcatcaacagctggaacgccaggcaggcgaccaaagatataagcccgagcgtcaggttctgccagcttccgaagtccttggctccgctgccgccgccgaagctcgtggcacccacgttaagcagcgagaagccgatcgacgtgaccacgatggcggagacgatgggcggcacgaaccgacgccaatacttggccgtcaaacccagcacgagttccagcaggccaccgaccattaccgcgccggccactgcgccatagcccttgtctgcgcagatcgccacggcggccgccacgtaggtgaaggagatgccggtgaccatcggcagacgcgagccgatgagccacgcgccgtacagttgcaggcaggtgcccaggcccgccaccagaaggccggcctggatgatggtggccgattgggctggggtcattttcgcggccgaggcgacgatgaagatcggggcgaggttcgccacgaacatggccatcacatgctgcaggccgaacggaatgcccttccagaaggatactggcgcgttcagcgaagacagcgcctcaaaggatacggaattcttggttttcttctctgacatgattcttttcttctctctgttgctcccgctggggggagcagtcaatgtactcagtgcctaaatgtgatttcgccggtctcgggattcatggactcgacgatggccagcgaatccacatcgtagccttcggcacgcagcgcgtcaccgccgccctggaagcccttctccacggcgatgccaatgccctcgaccgtgacaccggccgcctcgcacaggtcaatcagaccgcgcaacgccttgccgttggccagaaaatcgtcaataagcagcacatggtcgccggcgttcagatacttcttggccacgatcaccgggaactccttctgcttggtgaaggaatagaccgtggtggtgtactggtcgccgtcaaggttgatggactgcgccttcttggcgaacaccaccggcacattgccgaaatgctgggccgccacacacgcaatgccgatgccggacgcctcgatggtcagaatcttggtgatgtgcttgccggcgaaatgagcggcccatgccgaacccatgcggtcgaacagacgcacgtcgcactggtggttcagaaacgcgtccaccttgagcacatcacccgccttcaccgttccctcgctctggattcgctcctcaagttcctgcattagacctcccattgctgtatgtcagtgaatgatatggatacttgtaagtgtacgttgtcctgcgctgacccgtgcatgtggtaaacatgaatgtcgcgattcaaagggaggcaacagtgtacgacgagccggaagtcatcgcacgcagcgcgcaggaactcgtaggcgatctgaacccgcagcaggcggaagccgtgcaataccgcggtcaggcgctactgatcggcgccggtgccggctccggcaaaacccgtgtgctgacccgccgcatcgcctggatcttgagccagttcggcgcatggccgagccagattctggccatcaccttcaccaacaaggccgccgccgaaatgcgcgaacgactcggctcgctgatcggcccggtggcccagcgcatgtgggtctccaccttccattccgcctgcgtgcgcattctgaggcgcgacggcaagtccatcgggctcaagtccggcttctccatttatgattccgccgactccgagcgactcgtcaaaatcatcgccaccgaattcaacctcgacatcaagcgctacactccacgctcgatcctcggccatatctccgacctcaagaacaatctgaccggttggaaggaaaacctcgccgttcacgcgcccgacttcacgcctggccagcgcggctaccagttcggcacggtgggcgaccttgaagccatctatgcggtgatctacgccgaatacgagcatcgcttggccctggccaacgccgtcgacttcgacgatctgatcggccgcacggtcgagttgctgcgcaccgacccggccgtcgccgagtactaccatcaccgcttccgttacattctcgtcgacgagtatcaggacaccaaccacgcccagtacgtgcttgtgcgcgagctggccggcgtggacacgggggagaaggccatcccgggcgcgccaaacgccggcaagtccggccccgcctggatcaccgtggtgggcgattccgaccagtccatctacgcgttccgtggcgccgacatccgcaacatccaggacttcgagcaggacttcccgaacgccaagaccatcatgctcgaacagaactatcgttcgacgcagaccattctggatgcggccaacgcggtgatcagcaacaacgagggccgcaagcccaagaaactgtggaccgcgctcggcaagggcgagccgattgtcggctacgcggcggacaacgcccagcaggaggcccagtgggtagccaccgaaatcgcgcgcctgcacgccgaagagggcatcgcctactccgacatggcgatcatgtaccgcgccaacgcccaatctcgctcgctcgaagaggcgctgatcaacacgaatcagccgtatcagctcgtcggcggcaccaagttctacgaacgtcgcgaaatcaaggatgcgctggcctatttgcaggcgctcgtcaatccggacgacgatgtgaatctacgtcgtattctcaacgtgcccaagcgcgggcttggcgaccgcgccgaaggcgtgctgctcgcctacgcgcgcgagcatggcaccagcttcttctacgcacttatgcacttggatgagattgaagtgccgacccgcaccgccacctcgctacgagcattccgcgatctgatgggcgcgctctcgcagttcacgcgcgcgcacgactccaagcccagcgagatcgtggctgaagtattggagaagtcgggcttaagggccgaacttgagaaatccgtggacccgcaggacgcctcccgtctggagaacctctcccagctgcagtccaccgcagccgaattcgaacagaacacgcctgacgccacgttgtccgcattcctggagaccaccgcgctcgtggccgactccgaccaactacccggcgaggcggaggactccggcaaggtgacgctcatgaccttgcacaccgccaagggcctcgaatacccggtggtgttcctgaccggcatggaacagggcaccttcccgcattcgcgttcgatggaagacaccactgaactgcaggaggaacgccgactcgcctatgtgggcatcacacgcgccaagcagcggctgtatgtcacgcgcgccgccgtccgctcccagtggggtcaggccgccgacatgatgcccagccaattcctcgacgagattccggatccgctgattgattggaaacgtcgtgaagccggcgtggagcgtatgcgcgccaactgggagaccgatggattcgccgacgatttgggcggctgggatgatgacgatttcggcggtgccacgtttggcgggtcgtcgacgttcggctcgcgtggttcgtccggttcgggttcgtcctatgggtcgcggtcgcggtatgggtcgtcgtatggctcgggttccggctcctcgtatggttcccgttcgggttcgtccgcctacgggtctcgctcccgttcgggttcgtcctatggttcttcaggctccggttcggggtcgtcttacgggccgcgttcccgttctggttcttcatccggttcatatggcggcacccgtggcggcaaggtcaccacgcgccgcaccacaccgaaatccggttcgaccggctctgccgtgcccagctcgaagctcaccaaggacaatggcctgaatatcgccgacttcgccgtgggcgacatgatcagccacgaccagtacggtctcggcaaggtcaccgacgcgcaagacaagggccgcaattcggtaatcaccgtggacttcggctccgccggcgtcaaacgcctcatgctccgcgtagcacctattgagaagttgtagatagattggcccctctgacgaggggctgagttatataccaaataaattcacaaaaaacaagacttgtgttcttcatcactatctgggcataatgcggaggttgcgcctacgagccctgggaacaggggagaggaaaaagtagttatgaagaacaagctgtttgcatccgtgcccaatattctgttcggcgcgctgatcaccatcgcgccccagacctttgcgcacgcctgcaccggccatgacatgccgggtgcctgccactactcgcagcaggcggccaccggcatcggcgtcgtcgtcctcgtgttgggcgtcgtggctttgttcgtcgccccgcagattcgcatcggcctcaatatcgccgccgcagccaacgcactgctgctactcgccgtacccaccttcctgatcggcatctgcaagggcgcgatgatgcactgccgcatggttatgctgcccacgctcatcgtgctcggcgtgctcaccatcgtgttcgcggccatcgccatctggctcgactctcgcgccgccaagcgcaactgatcgagcagacggccggagcccagccattccgaacgctggactccggtctcgcttattgcaaccgcactataagcaacataaggactcatcgtgccatcccatatcgcattgcgcggccttccgattgaaaacctcaaacgcaagccgttccgcacctgcgcactgctctccgtcgtcaccatcctcgcgctgacgttcttcggcggcaccatgctgaccatgaacctcaacaccggaatgaccagtatggagaagcgcctgggcgccgaccttatggtcgtgccgcaaaacaccgcgcagaaggctgaagcgctgctcaccagcggcaatcccagcactttctatttcaccaaagacatcgccgacgaggtcatgcaggccgacggcatcgcacaggccaccgaacagacctatatatcatcgctggccgccgcctgctgtgccgaaaagctgcagatcatcggttacgacccggacactgacttcgtcatcgaaccatgggtcgcatcccagttcgaaggcccccttgaagacggtcagatgattgccggcgcaaacgtcaacgtgtccaccgacggcaccatcgaactctacggccataagtggccggtcgtcgcccagcttgccaacaccggcaccagcctcgacaattcggtgttcatcaaccaaaacaccgtgcctgatatggtcgccgcctcggccaaggtctccaagcaggtcatgcccgccgaatatgcaggcgaagccgtctccaccgtgatgatcaagacgcagcggggttacgaagcgcagaccgtggctgagaacatcaagcgtcttgactcccggttcgccgatttggggtacgtataccccggcggcatcaccgccaacaccagaacttcgctgaccgcgcttgtcacctacctcaagattttcgtggcggtgatctgggtaatgggcgtgattgtgctgctcgccgtattcgcctcgtcggtgaacgaacgcaaacgcgaattcgcgtccctgcgcatcatgggcgccacgcgcggcatgttgaatgccatcattctgaaggaatccgccatcatcggtctgatcggtggcgtaatcggcgtcggcgcggccagcctggtgattttcccattcagttcgctgatcggcaaacaacttcaattgccgtatctgcaagccagcccggttgcggtgatcggattcattgccgtgaccattgtgtgctctacggtcatcggcatcatcggttcgctggccaccatgtggcgtctcggccggcccgaagcctacctgaccctgcgagagggggagtgatatgactgagacaactacgccgactcagctgaccacggttgagccgaccaagctccagccgaccacgccagctcagccgaacgcgccgactgcgccggattcgccgcacgtaaccgagacgccctccccggaccatctgctgaccttgacggacctgacccgccagttcgtccgccgcggcacgccgttcgacgccgtcagccacgtgaacctcaccgtcgatgccggcgaattcatcgccatcgtcggccggtcgggcaacggcaaaagcacgctgatcaacatggtcgccgggctgattcgcccgacctcgggaaccgtgagcgtggctggacgcaatgtggccgacttgggcgataaagcactgtccgtgctgaggaatcgcaccatcggattcgtgacccaaagccagaccctgctcggcaacctgaccgtgctcgacaacgtgattctgcccgcaacgatgtttccggagccgctgccgtttgcccaaaacgcagaagcaacggatgccgttgctcaggtggacgctgttgcgtcgaccgatgccgtggcacaagccgctgccaccaatgatgaagcagccgccgacccgttcatgccggatgtcattgcgccaatcacagaccgggaaaacacgccgtcaaacacggctgcgagccgtccggacctgttcgccacccgagctcgcatgctgctcacccagcttggtgtcgccgatctggcagacagctacccgcgcgagctgtccggcggtgaaatgcggcgcgtctccatcgcccgcgcgctgatgaaccagccgagcctgctcatcgccgacgagccgaccggcgacctcgaccaggagagcaccgacatcgtaatgcgtctgctcagagaccaagccaacaacggcacggcgattctcatggtcacccatgatcccgatgcactcgaatacgcagaccgggtgtatcgcatggacgccggagtgctgtccatagcctcggtgtaatatggtctgctggtgtctgccaacaggtagataccgtctggagtcatagcccatcagcgggtcggcggtaggtgatcgcaagaaaaccaacccgttcgtgttcgttcacgacgaagcgctggggaggcccggctcagcgcttgccaggcatatgcaaggcaagcgttccgttcagataacgacagaaggattaatccaatgacgaacgttcagcgttctcgccgtcaggtgcgtctgtctcgcgccctcggcatcgcactgacccccaaggctcagcgcatcttcgaaaagcgtccgtacgctcctggcgagcacggccgtgaccgccgccgcaccgagtccgattacgcggtgcgtatgcgcgaaaagcagcgtctgcgcgctcagtacggcatctccgagaagcagcttcgcgccgcttacgagaaggccacccgtactgccggccagaccggtaacgccatgctgaccgacctcgagacccgtctcgacaacctggtgctgcgtgccggcttcgcccgcaccaccgcccaggcccgtcagttcgtggtgcaccgtcacatcctcgttgacggcaacatcgtggaccgcccgtcctaccgcgtcaagcccggccagaccattcaggtgaaggccaagagccagaccatggttccgttccagatcgccgccgaaggcgtgcaccgtgacgtgttgcctgcggtccccggctacctcgacgtgaacctgccgtccctgaaggccactgtgacccgtaaaccggaggtcgaagagatcccggtgcaggtcaacatccagtacgtggtcgaattctacgcccgctgattcgggccccccttatctgaaacatcagaatcaaggacataccgcttggaccccgctcccgcaagggacgcggggttctcgcgttccggggcgcgggcgttttcccggagactggatgagcggaatcacgccgttctgcttcctggaaggcgtttcgtcgagatcggcggaaagcttgcgtcagcaggcgtcgatgaaggcgctgaagatgcgacgttggttgctatcggctcggtgggagaactcaggatgccattggacggcccagacgaaacgtttggccggcatccagaccgcctccacgatgccgtccggcgcggtggccatcggttccagtccctggcccagcgtgcgaatcgcctgatggtgatagctgttgacgcccagcgtataggcgcgcggatgatacggcctgccgacggaatcgacctcatcggcctccgcctcactcgggccgttgtctcccagcggccacaacgcacgggccaacggcgaatcgggcgcgatcgacacttcgtggaccaccgggtcatacggcggcttgtcgccatgatgcacgaccgggctgggatgttcgtccggcagatcctgccacagcgtgccacccaaggcgacgttgaggctctggatgccgcggcagatgcccagcaatggcttgtccgccgcgatgacggaggggatcaggcgctcctccatccggtcgcgggctttacatagtttgaccgtcttggggccggccgcctcgccataccgttccggatccacgtcgtggccgccggtgaccaggaacccatcgcattggttgaccagctgttcgattgtagtctcgtcgtcggtcagcggcagcatcaccgggatgccgccggcttcgatgatgccgtcgaaatagccgggcagcatccacaggctgttcaatttgtcgtcccacaacgggaccacgccgataagcggacgaagggccatcgatacctccaaatacagacttactgataaagcgactcaacttgctacagtctcaaacctgaaaattttaccactgtgacttgcgggcggagcctactgcatagcttagggaggtagggatttcaatcgagggcggcttatcgctcgtagtgttccaattcggcgagtggatacacctgagtccaatggtgcggctgcaggtcgcgcagcggcac

SEQ ID NO: 1347 - DNA, 4538 bp, Unknown
  R157_18m  MAG No. k141_25600
gtacaaggagacaaccttcggatcgttcatcaaatcacggcccttgccggagtaggcgttgcgaccttggtcgagcacatagccacggtcgcagatctgcaggcaacggcgggcgttctgctcgacaatgaccacggagacgccggccttgttgacctggcgcacgcggatgaaggtttcgtcctgaagcattggcgacaggcccgcggaaggctcgtccagcaggaggactgacggcttcatcatcagggcccgggccatggccaccatctggcgctcgcctccggaaagctggccggcaagctggttcttgcgctgaccgagcttggggaagatggagcatacgtagtcgaaccgctcctcgaacagcttcggcgcctggaaagcgcccatatgcatgttttccgcgatggtcaggctggggaagacgttttcagtctgcggcacgaagccaacgcctcgggacacgagcttgtcggcacgcagattggtgatgtcctcgcccttgagcagaagcttgccggaatggatatgcaccaggccgaacagcgacttcagcagcgtggactttccggcaccattcgggccgatgatgccaacgatctcaccttcatggagggtcagggaagcgccattgaggatgttcacgccgggaatgtatccggccacaaggtccaccgcgtcaagcagtggctcaccttccggctcacccacatgaatctgcgcgcgggtcagcggcttgtctccgccaccttggatgtccgattcaccagaatcggacacatggggtaccgagaccgcaccagacactccagccgcacttgccacacttgcgttgtcgctcatttcaggcctccttcaaatcttccagcacggagtcgtcacccaagtcgatattcgcatgggctcccagatacgcgtcgatcacggccggatcgttcatcacgctcttcggctggccttcggccacgatcttgccttcagccatcacggtgacccagtcggcgatgtgtcgaaccatgttgatgtcgtgttccacgaacagcacggtggtgccttcctctcgcaacgccatgatgtggtcgagcagcgactgcttcaacgcggggttcacgccagccatcggctcgtccagcatgaccagctgcgggtcggacatcaacgcacgcgccatttccaataacttgcgctgaccaccagaaagcgcacccgcataatcatccttctttttgatcagcagaaaacgttccagcaatgcttccgccttctcaatattcgctttctcctgcttcttccacatgccggggaacagcgcgcggaacatgccctcgccaggctgcacgggagcgccgagcagcatgttgtcaagcacagtcagacggctcatcaccttggtcaactggaaggtgcggaccatgcccatccgcgccactttttcaggctgcacgtgggccatgtccttgccgtcgaactgccaagtgccggtgttcggcatatcgaaaccagtcatcagattgaagaacgtggttttgccggcgccgttcggtccgatcaacgcagtgatgccatgcctttcgatttcgaaatggctcacgtccacggcggtcatgccgccgaacttgcgggtcacgtcatcggcgatcagaatcggatcgggcttgtgcacacccggcttgttctccacaaatttcaaatcctcggtgactttgtcacggtaggccgtggaaatgagggtctcgccttccggcgctttggtggcccatttggtcaggtcatggaacggcactcccggctgcacgccagatagctgctgcgcgccggcggtcggggtattcgttgtatcaggcatggaaagccaactcctttcggtcgcccaacaggccttggggtctgaatatcaccaggcacatcagcgccacgccgacgatcacccagccgagggcttcgatctgattggaggagatcagggtttcgggaacggtgttgcgcataacctccttgacgaaggtgagcagcacccacagcacgcaggagccgagcacaggaccgagaatcgtggccgcgccgcccagcagcagaatcgtccacacgtagaacgtaactgtacggccgagcgaatcgggctgtacggagcgcggcagaacgaagatgatgccggccatcgcaccgaacaatccgcccaaaatcaacgattccatcttgtatttcgtaaccggcttgccaagcgaacgaatcgcattctcatcctcacgaatgcccttaagcatacggccccacggcgagtggaaccatcgccagcacaggaacgcagcgatcgcaaccaaaatccaagccacgatacgcagccaccaggaattcgcgatgttgttgctgtacgtccacagcaggaacgtggtcgagccgtcgggcagtggggaaagcgcttcgaacttttcagtgaaatcctgcggcgagatgcccgcggaaccgccggtgaagttcgtcatggctgtggaacggccgacgatgcggatgatttccgcggccgccaacgtgaccatggccagatagtcgggcccaagcttcagcgtcggaatgccgagcagcagcgcgtagatgacggcgagcgcgagcgccgcacagaccgaggcgaacaggttgcagcccatcgactgcgtgatggcgaatccgtaggcgccgaggagcatgaagcccgcctggcccatgttcatcaggccggtcatgccgaagtgaatgttcaaaccgatggcggccagtacatatgccgccgtggtgggggcgatcagctcgcccgccgcgttggagatgattgtcatgatatccatgaatcagcccaccctttgctgcttgccgaagatgccctgcgggcgcaccagcagaacgatgatgaggattgccagcgcactggcgtaacgcatgtcgttggggatgacgagcgagctcatatccgccacgatgccgatgaccaacgagccgataagagcgccgttggcggtgccgaggccgccaagcgtcaccgcggcgaacatcagcaggatcagggtcgcgccggtgttccaagagatgccgttgaggtatacgccgaggagcacgccggatagggcggccatggcgcacgagagaatccataccacgcggaccacctgatccacgttgatgccggacgctgcggccagtgccgcgttgtcggaaacggctcgcgtggcgcggccgagccgcgtcttgtagaggaacagtgtgacgcccacgatcacgcagatggcgatgagcgcggacagcagcgtcggcatgtccgtggtgattgggccgatttggaagctgttcggcacggatttgacgatacccttaatgtcaccgccgaagaagaactggaacgtgtactgcaacgccatggacaggccgatggtcacgatcatctgctgcatggtgccgacgtggcggcggcgcagcggcccccacacgatctcgttttggatgaagccggtcagcgcgccgatgatcacggcgaagatggcggaagccacgagcggcatgtgcagcatctgcgtgcccacgaaggccatcaggccgccgagcgtgacctgttctccatgggagaaggactgcagtccggtagtgccatacacgaggttcatacccacggacatcaggcccagcatcagaccgaagataatgccggaatacagttgctgccagatacgtttgccgatattggagccaccttttttggctgacgatgctgcggcgtccgccgatccggctgcatccgccgtcccctgcttgctatccgccgattcggccgcgccgttgccagcggtatcgtcggcctgatcgaagcggatgacgccgcgctgcttgtcgaagctggctttcttgatggtgaccgtcgcactgctcgacttcaggccatgctctttcgcaacggcatcgtcaatcgtgacggtgtagtcgccatcatcggcaacggaaaacgcccacttgccatcggctgcggttgtggtctccgccgtagccttgccggacaacttgacggtggcgccggcgatcggctgtttgccggcatcctgcagaatgccgttgacgcaaccgttgtcggatgtcggattgcattcatccacggcttgaacggtgccggctgcggacgcaagggcgggagggagtacgaaaagcatcgagagaacggcaaaaatcgaacatagcattgcgattcccggtcgacgatgccgtgtgaaatacgttacggctgtcattggtttttcctctcttattgttttcacaacgtaggagaggaaacagcttgcgcggttgcgctcagatttctttcacgttactcagcgaccgtccgtgtaacgtgaaaattacgccggattggcaagcagcgcaatgccgaaaccggcggccacgcaaatgagaggcaccgcgacggttgctattccatagcccagagccagcgtaaaacgacgctggcgaatcaatgaaaccacttcgttgagcgccgtggagaatgttgagaaaccaccgagaaatccgacaacgaa

SEQ ID NO: 1348 - DNA, 37098 bp, Unknown
  R157_18m  MAG No. k141_25912
atggtctgcgtggccactgcggtgaagatggaggcggcgagatcaggcttggccgcaccatcgttgatcagcggctgcagatcggttttggcgaacacgccgcaacgcgaggcgatcggatacaggttctcgtagctcttggccatctcgttgaggcctgcggcgtcggtgtcaagcagcgtggacatctggtcgatgaacgcgccggtgccgcctgcgcacgaaccattcatacgctgctcgggcgtgggcttcaggtaggtgatcttggcgtcctcgccgccgagctcgatgatgacgtcggcctgcgggtattccttgtcgatcgcctcggtttcggcgatgacctcctggatgaaaggcacatgcagattgtcagcaagcgccagaccgccggaaccggtgatagacaggcgaatcggctcatcgcctcgacctagttccacgagctctttacggatgtcgaccaacaggccggccacggtggcacgcacgttggcgtggtggcgtcggtaatcggagaagagggtgtctttcagggaatcggactgatcaagcaccacggccttgacggtggtggaaccgatgtccaatcccacacgcaggggcttcgggtgtgaagcgggctttacgctcgcgtcagtgacgatgtcaaccatgtgttcctcttaattccgacttccgggtatgtgcgccttcaggcatcatgagccgtttcgggacggctggcagatacctgcggacggcttcgcccggctacttcttctggaatattagtccgaccacctgcccaacgtgacgccgggcatggtgatttcgctcacgggaagggcgttccccaacagttccgacgatattgctgagtgcggcattccggacctgctactacgaggcctgttggccttcgccggcttcgcggtctctcaaatagatttcggggatatctcgttcttgatcgtggagcttggcccagatgaccggttcgccggcttctagggacttggacacatcgaggatgcgctggtttctggagccacggaattgcagcagcgagtccttctggtctttgaggtagcggccgtcgacgaggatgtcgataagatgcagcaattcaagcttgtctggtgtttctccgaggcgcatgagctcttcccatgtgtagccggtccacgaccagatatctttggtatgaccgaattcctggcggatacgttgtgcgagcggcaccagcacgggagtgttgaggaatggctcgccgccaaggaacgtaatgccttgcacccatggcgctttcaggtcttcgatgatcttgtcttcaagtttttgcgtgtattcgtggcctgcttggaagtcccagatggaggcgttgaagcagtcgacgcagtggaaggggcacccggagacgtaaagggagttgcgcacgccttctccgtcggtgacgatgaaggttttgtagtcggcgatcatccgcttggacatgcgccggccatcccattgaccggctttcggatcgttggcaagaccgttggagggtacggaggggccacgcccggtctcgctggccgcaaagtcatggcgcttgggttcgggcttggtcgtatgcaactccggcatgattccctccttgcggaaagcattagctcccctctttgagggggagctgtcgtcgtaggcgactgaggggagcttcggaatagctcttcggactcccctcagtcagctttgctgacagctcccctcagagaggggagcctactcacgaataaccctacttggcctcttcgaaccactcgcgggtggtgccgtcatccagcgtcacacgaccggtttcgccgctcatgtgcttgactcggtgggcgatctcctcgtgacggccgtgcaccatcgggcgctggaccgggctgccgaggtagccgcaggtgcgcttggtgacgttgcacttgtccgggttggagttaccgcactccgggcacttgaagccttcctcggtcggctcgaagtcgccctggaagccgcacacgaagcagtggtcgatcggggtgttggtgcccaggtagccgatgccgatgttgtaggcgtaatcccacacggcttcgagcgccttcgggttgtcctgcaggcacgggtactcgcagtagttgatgaagccgccggaagcgtagtacgggaagtccttctcgtagctgagcttctccatcggggtgggctgcaaccacaccgggtagtggaaggagttggtgtagaagtcgtggtcagtcacgccttcgatacggccgaacttttcacggtccatgcggttgaagcggtcggtcagggattcagccggagtggagtacacggaatagtggtagccctccgctttgctccactgcttgcacagctcgttcatgcgcttgacgatggacagcgcgaactccttgccttccggatcccagccgtggtcgcgaatccagttcttgccgtagaagaccgcggtggtctcggcaaggccgatgtagccgagcgacacggtggcacgctcgttcttgaacagctggtccacgttgtcgttggcaccgagacgaccgaacgcaccgaagcggaacagggtcggggcgttgaccggggtggcttccttgcagcgcatgatgcggaactggagggcctgatgggcgacttccatacgctcctcgaacagcttccagaagcgagccttgtcaccgtgggattcgatggcgatacgcggcacattgacggtgaccacgccgaggttcatacggccgtcttcttcgtccttgccggtctccgggttgatccaaccctgcaggaaggagcggcaacccatcggagccttgaaggagcctgtgatcttgacgatgttctcgtagaacaccacatccgggtacatgcgcttggtggcggactcgagggcgagctgcttcaaatcgtagttcgggtcacccgggtcggcgttcacgccgtgctgcacagtaaagacgagcttcgggaagatggcggtgtggtgttccttgccgaggccacgaatacggttcagcaggatcgcgcgctgcacctcgcgggagaaccagtcggtgccgagaccaaagccgacagtcacgaacggggtctggccgttggacacacggttggagttgatctggtattccatggtctgcatggcatcatagatggccttgcgggtacgaatcttggcgaggatttcacgctcctgctcaagttcgtcaacgtcggtgtggaacggggtgtccatcggcagcggttcacgggaaccgaaatgcagcttggcgggctcgttcctcttggcgctctcgacctggcgacgggcgaattcaaccggcatgccgtcggggatggtctcacgagcttcctcgaggaacttctcgtaatccttcttggcatactgggcaagatgctcgtcggcacggttggcggtctggccaccatactggctggaggccacgtccttcatgatctgggtaatctgggtggccgcaatggcgatggacttcggggaagccatcggagcgttgccaagagtgaagccattggccaacatgtcccagaagttcggcaaggagcagttggactgggcagtgaacggcgagtagtcggcatcgtggaagtgaatgtcgcccttcatgtgggcgttggacaccgccggcggcagcatgttgaacgcggcggccttggacacggcaccggccagcagatcacgctgggtggagtagacgttggaatccttgttcgcgttctcgtgaatcagggtcgggtcgtggttgatgaagcgggaaacggcctcgttgacatcagtggccttggcacgctgaatgtccttgtcgagacggtagttggtgtaggcgcgagccacatcgtacaggtgggcgtcaatgagggcgtgctccacgaggttctggatgtcctcgatcttggcggggccggcgtaacgccccttgatttcgccttcgacttggttggcgaaaccacggatcatggcatcttcttcggggccgacttccttgttcaggtcaccgaaagcagacttgaccgcagagatgatgttaatggggtcgaagtcgaccacacgaccatcacgcttctcaacgagcacggtggaggccttggcggccaccttggtctcgttatcggtgacgatttcctccaacacctgtgcgcccatcgggcacccctttcctataaggcgaacactctcctgagttccgcattttggccgcactcgacgtgggccacacgaaattacattgatgtcgttttttgaacctctagaagaatacggcatctccaccactatatctagtgctcaacagtggtgtgtcgaactatttatagggttttcggctattttccgccaaaaccacaagtgtgtgattagcgtaactgttttctgctcgcgtgtcgcacagcgagctcactaacgactctcaatcgtcagcgcaacgcatatctcactcctcttcatagcacccgtttcttcgccataatgactcctttcttctgatgcaccagaccatctccatcatcggctgatacatcgcttcgtacggttctcgcattcatcatcacaccgttttcaggcgacggtaaatatttaccgtcatcaaccaacgcacttatagtggagtgcatgactactgcaatgggctacccatctaccggccgtccaccgaccgccgcttcactggcctcggctggctttgagccgggtcaaggcactttcgcgcctgatcagggcaccatcaatctgccgaatgagcctcgccctatcgatcagctgcctgcacgcgccgctgaaaccagcgcgcaaaatccgtggccggtaagtgtgctgagccagaagttctacggtgccgtggaacgatggccgtccgcgtgggtcaccggccagatcacgcagatcaatacccgtcgcgccggctcggcctacatcacgctgcgcgacgacttcgaggatatcgccatggaagtcaatggcttcggcaggttcgcggccgcggccagccagttcgttcagggcgaccgcgtggtgattcatggcaaaccgaacctgtggatgaagcgcacttcgctgtcgttgcgcggggacacgattctcaaggtcggagccggtggcagcctcaaggccatgatcgacgaattgcgcaagcagcttaagggcgagggcctgttcgatgccgatcacaaactgcctctcccggagtttccgaagactattggcctgatttgcgcacctcaggcacgcgcggaaggcgatgtgatcaccaatgtgaaccttcgttggccttccgtaaccttcaaggtggtccatgtgcatgttcagggcgagcaatgcccggccgaagtggttcaggccattgcacaactcgatgccgacccgagcgtggatgtgatcatcgtggcccgtggcggcggctcgtttgaggatctcatcggtttctcggatgagcgtgtggttcgtgcggcgtatgcctgcaccacaccattaatctcctccatcgggcatgaggatgactggacgttgctggatctggtcgccgatcttagagcctccacccccaccgatgcggccaagcgcgtggtgccggatgtgcgtgagcagtcgcagctcatcgaaggtgccatcgaccgtatgcgactgcgggtccgttcgcgcgtggagaacgagattcgacttatcgagggatatgcgaaccggccaagcctgacccaaccgcataccatgctcgaaccgcatcagcggctgatcgacgattccctgcagcggcttgacatcggcctgcggcgtatcgtggatgatgcccagctcaccgtcgaacgcgcccatgcctcactgaccgcactcagcccgcaatccacattgaatcgaggctatgcggtggtgcagtcctccgatggccacgtgctggatgacgcttcgcgggtcagtaccggggatgacatcaccgtcaccctgaaaaagggcgtcattaccgccaccgccacatccgcaaccgcaaccgcgtaatgcaccatatgcattcacgcatatataccgtatatataaggagaacaagatgaccgagaacaccacacccaccgacaagaacacccccgcctcgtccctgacggacaaggaacgcgagctcatcgcccagatgccatatgaggaggcgcgcgacaagctgattcaggctgtccaggcgctggaaaccggcggcctcaatcttgaccagtcgatgcgtcaatgggaaatcggcgaggccttggccaagcgcgcccagggcctgctcaacgacgtacgagccaagctcgaccaggcacaagccgagcaagccgccaacgaagccaccgcaggcacgcagtccaacctcgactgagttgcctcccggcgcggcatcccgcggctcgcacctgaatccggactggactgagttccgcttcccggcatacgatagtggcgattaggccacattggtagcagttatagaagggaaatcccatgtcaacgctgattcttgtattccatccgcacctgaaggacggctcgcgagtgaacgcccgtctgcttgccgaactcgccgcacaaggcgaggacgacatcatcgtacgcgacgaatacgccgaatatccgaacttctccgtcaacgccgacaaggagcacgagctactggaggccgccgaccgcgtaatcctccagttcccgttctactggtactcctcccccgcgctgctcaaggaatgggaagacgaggtcatcaccgcaggctgggcctacggtggaggccacgcactcaagggcaaggagctcaagctggtggtcaccactggttccgacgccgccaagtaccgcaaggatggcgagtacagccacaccatggaggagctgctgagcccgtttgaggtcgtggcgtacaagatcggcatgaactatgctgagccgttcctggtgcagggcaccgccaccatcggcgatgcggagctggatcaggccgccgccgattatgtttcggcgattttggactgaataagctgaggccgggtgcaagtcgcacccggccttgttgtttcgcgggctagccgcggtctctcccagtcagcctgcggctgacagctccctcgtcagagagagcttattttttggatcagagggagttgatagctacttcttcaacggcacgtagatcacgtcgtcaatgagctcgcgatagtgctcaacgatttgcgcgcgacgggtcttcaggctcggggtcagcatgccgttggcctcggtgaattcgtctggcagaatctcgaacttacgaatcgactcggcgcgggaaacgccctcgttggcggcgttcaccgcacgctctacctcggcatgaacgatggcgttcttggccagcgaggccagatcgggttccggtttggcgccttgggattccaaccagttgttggcatccgccagatccagcgtgaccagagcggccacgaacggcttcttatcgccaataaccaagcactggttgaccacgggcgaggtcatcacggaagcctcaagcagacccggcgacacgttcttgccgccggcggtgatgatgaggtccttcttacggccagtgatggaaatgaatccgtcttcggagatatcgcccaaatcaccggtgtgcagccagccatcggtgatctgctgggtggtgacctcagggttgttgtggtaccccttgcacaccagcggtcccttgatcaccagctcgccatcctcggcgatgccggcggtgatgccgcacatcggcatgccgatggtgccgatgcgattgtcttccggcaagctcacgcacaccggaccacaggtttccgtcatgccgtagccttccagcaccggcatgccgatgccgttgaagaagtgggagagctcggaatccatcggggctccaccggtgacggcaaagtcggcgttcgggccaaagatggtacgaatcttcttgtacaccacctgctcgtagaaagcgtgagcaatacgaccgggaagcggcagcttctcgcccttctgctcggccttggaccattcgcgcgcgttttcggcggcgcgcatgaacatcttgcccgcaaaaccgctgccggcacgctgggaggcggcgttgtagaccttttcgtacacacgcggcacggcaagcagcagcgtggggccgaaggtctcgaagtccttgaccatggtcttcatattggagctcagggccagagaaatggtgccgccaaaactgaagaattccaggaatcgggcgaacacatggctcaggggcaggaacagcagcagacggcggttgggccatgcgccggcacgaggcatgtactgcaggccggagcgcaccaggaacgcgaagttgcggtgggtgagctccacgcctttcggggtgccggtggagccggacgtgtaaacgatggtggcgcggtcgtcgccgtgggaggcgctcttgtattcccagaattcggcatcggtgacgctttcgccataggtcttgatggcgttcaggccgcctgcttcgatgacgaacacgttgcgcagggtgggcacctcgctgcgcacggattcaatcttgtcgcgctgaccgtcatcctcggcgatggcgagcgtgaccttggaatcgttgaaaatccagctgacctggctggcggagttggtctcatataccggcacggtgagtgcgccgatggacatgatcgccatatccagagcggtccactcccaacgcgtgcgagacacgatggccacggagtcgcccttgttgacgcccagaccaatcaggcctttggccagatcgatgaccatgtcgcggaagacctgggcgctgtacggctgccaggtgccatcctcagttttatattcgatcatggcgccatcgggatcgcgcttggctcgctcatcgagcaaatcgaacaggttgatgtcgctgtcaatcggctccttgacgggattggtgaactgcttgacgatacgagtatcgtttatggccttatcagcgatgttttcagtcatactccccatgtaactccacggatgctacaaaacacgcgcgaaacaacggattgtccagaccaaatggccccggcaatccgttatttcgggcaaaccaggtaaatctgtcgcaccgtacattcggcagattactcggcggagtcattggcctttttcagctcgtcgcgaatctcctgcagcgtggcgagagtctgctcttcaacgctaggcccctgttcttcagcgtcagcctcatcctgggcagcagtgagatcacgaagcttattaatcggcaaaatcacacagaaatacaccgccacgccaacaagcaggaagctaatcagcgcgttaagaatcgcaccaaatgaaacagtcgagttgttgaacgtgatggtcagcagtccggaaagatccggtacgccgccaatcatgccgattaatggactgatgagattgtcgacgatggaattgaccacagcggtaacggcagagcccatcaccacacctaccgccatatcaatcatcgatccgcgcgacaggaatttcttaaagccattcaacggacctttatcggtcaaagcaacaactttgcgagcggttcctcccgtggccttggcaaagtcggtggcaatattcatgggattgtggttactcataacggcactccttacgaaattcagacacttcacttgtatccgactggttttcccacgactccattatgccgcttgttggaatatccctataccactgcggcgttcccgtacatgactatgtacgagaacgccgccaaccctgcttgcagagaacctgttagagctgtttagaactgaatgtaatcgacttccgtatgttcgccggtttccaagtatttcgccacatcatcaggaccgacgaacaccagttcgaccgcttgcgcaatcatcagattgacacgatccattggcgtaaggttttcgaaatagccgtacaccgggattcccagcgcatgcgcatatccgatttcgaacatcgtgcccgggtcctcgtccataagattggcgaccacggctttagcagcattaatgccatggatatcgtccgcaaagcatccttcagggcctacttcttcgatctggctgacaaaccgcggcttgaacagtaccttgccatggtcttccaatatcttttccaaacgttccatacttgccgtttgttcaggatcgaagaacggaccggccacatagaagtcatactgtttgtcttcactcatggtctctagtcatagcgcagccgcgtcggacgccagccgttattttcactgtatggacaaggggtcgtattgtgaccattgctacgggataaccgtcaatgactacgtacgttgcccccgatcagcacactccgccactttcgccccctcccgtatcgtcgagcacgcgaaccaagccgaccaaatagccgccatcccatgcgctgattaccgtatccgaatgctgcaatgccttgaacaaccgttcgggccactgcgccgattcccaaccaaccgacttgaacagcgcctcaacctgttcgacagtaaaccgcttctcttccgtgtattcgatagccatggaccctcacgataaccgtgaagccccacatgtctttgcatagtttcacatgacgggatgatggatggtggaacctatacgtttacacatgcctaatgcctatggctcatcaccgatgaatagaggctgagataccgtcatgtttccgaagccaagtgcccgagatcggattcgaaccgacgacacccgctttaggagagcggtgctctatccactgagctactcgggcaacgacgtttcattgtacacggccgcacgcccagtcgcatcatgttcgcgtggcagcctacataagacgcatggcagtctgtgtaagctatctggcagaacccgccaccaaggcatggccggttttcgtgctggtttggtgcgaactgctcttgcgcacggcgaaaagacactgaaagacaagccgcacacggtacagtggcaaatcgcacgaaaagcaaggtaacagtaaacaagccggaggaaagggcagcatggcaaaggcacgaagtactaccacaggtgcaagcgtacgagctcgcgccgctgccaagccacgctctgccaaagccacggcacgcccagtatccaagtctgccgtgaagccacacaaacggcatcgtctgcttggttttctcgccacgatgttcgcgcttcttgcccttgccggcactgccgcccgcgcgctgcctgccgatttacaggaactgccatttgtgccgattgtggtatcggcaacgccctggttcacgttgcttggcctgattgccctactgttggccatcgtgtcgcggcgtatccttgccgcactaatcgccatcgccgcaatcgcatgcaatggctattggcaatatccgttcttctactcgaccgacccactcccccaagccgcgcagaacgccgtggctgcggcctcccccaacaccagcgatgcctacgcgcgcgtcatgaccttcaatgtatacaaggggcaggccgacccacaagccatcgtcgaactagtccgcgatcagcgcgtcgaagtgctcgctttgcaggagaccaccgaggatttcgtcaaaaaactcaacgaggctggcattgagcactatctgccatatgcgcaggtctcatcgtctgacggcgtattcggtaacggcctctggtcggccacgccacttgccgatccggccgacgatgacgtgaattccagcgcctcattcatgcccggcggcacggtggatatgggtggtcagcagattcgattcgtatccgtgcacaccaccgctcccgtacccggctattggcggcagtggaagcgatcgctggatgagttgggtccgatgcgcgggcatacggatacacggtatattttcatgggcgatttcaatgccacttacgatcacacgccattccgtgattttcttggcgaccggttcgtggatgccgcacgtgaatccggacatgggtttacgttttcgtggcctacgaaccgcgtgtatatgccgatgttcgccggtattgaccacgtggtgcttgatcagggcatgaaggccgggcaatgcaaggtggtcaaagtcgagggctccgatcatgcggcgttgttggctaccgtggcggttgggtgatttcgtattcctcggccagccgcatacactgggacacggcttccagaatcgcctcgatgccggacttcttgattgagccgtcatcctttaaatacttcatcaggcgcactgtggatttggtgctggcctcggggtcagggcgagcgccgggagcggcgtcgacgataagcatgtggatagtgttcgaaccgatatcaagcacaccaagtcgcgtggtgcgcgaacgcagattgaccatgatccctattcctgaccttacccaacccgtgatggccgaacaacgggccgaccatcgcaatcagccagccgtgcgccaccatggcgagtcgttcggccggcaaccaacaccgcgaggccagccgaacatcacacaaactcgactaccgtacaacaatcacaccggatgccgcgccgttcacaacgattcgacgaacgttccgagacgttccagcccctcggtcagggcctcacgtgaggcggcatagctcaggcgcacatgcgtatccgctgtggccgcaccgaagtcgcggccaggagtcagagccacatgggcttcatccagcgcgcgttcgcagaacgtccaggcatccagaccagtacgggagatgttgaagtaggcgtagaacgcgccattcggctccacctcaaccggcaaaccgatgcgcttgagcccgtcaatcacaatgcggcgacgggcaagcaattcctgacgacgagcttcacattcggccaaactctccggcgtaaaacaggcgagcgccgcatgctgggtgggcgtgtgggcgcacaggtagtagttggtggccaggtcgtcgaccgcttccagcacggtggggtcgtcgggcagaatagcccagccgagacgccagccggtcatgccgaagaacttggagaagctgttgcacacgatggcaccgggatcgcaggccagtacggacttgacttcggtgccgtccggctcacggtcggccaaatcaaggtaggtttcgtccacgatgcgccatgcgccgcggctggcggccagcttgcacacctcgtccaatacgttgaagtcgatggtggtgccggtggggttggacggcgacgtgatcattacggccttggtcttgcttgtccagtactggctgcacaggtcggcggtcaggtggaagcgggtggcggccgaggtcggaacgtcgatgacccgcccctcaaaggagcgcacaagttcgcggttgcacgggtaggaggggtcggccacaatcacatcgtcaccggggtccacggtcagcgcggtggccaacagcagggcggccgaaccgccggcggtcacgcagatacgcttggggtcgatgtcaaggtcatgacgctcgcggtagaagtcggcgatggcttggcgcagttcaggtaggcccatggcggcggtgtacggcagggtccggccgtcgtactgttcgcgcatggcgtcgcgtacggcgggcggcgcgccgaaatcgggctcgccaaggcttaatttgatgacgctgataccttgggcgatcatcttgtctgcttgttcgccgaataccatggcacggaagggattggcctcacgcgctcggcgggacatgactggagacgcggccggagattggggctgctgcgctgcttcgttttccatatttcggttctatccgcctcacgggacaaggtttcttcttctataatcactgtaggtcgattgagtgtaccaacccgtattcaaggaggaataatgagtcgattcaatggcaaacgcgccgagttcgaggccagcggcgaaaagatcaacgtcgcgattctgggtgcgggccgcatagctcacaccatggccgacaccctgacccagatggctgaaggttcactgtattcctcatggattcacccgtatgcggtagcggcccgtgatattacgcgcgcgcaggcttttgccgaccaatggcattttgacaaggcttatggatcgtatgaggagttgacggcggacccggatgtggatctggtgtatatcgccaccccgcacagtctgcacgccgaacaggcgatcctgtgtatgaaagccggcaagaacgtgctggtggagaagtcgttcaccgcgaacgccgggcaggcacgtgaggcgctggccgtggccgaggaaaccggcatgctgtgcacggaggccatctggacgcgctacatgcccagccgcaagcttatcaacgaagttatcgagtccggcgagatcggcgaggtgaaagcggcgagcgccaacctgtgctatccggtgtccggcaaggcacgtatgaccgatccggcctgtgccggtggcgcgctgctcgatgtgggcgtgtatccgctgaacttcctggatatggcgatcggtgccgaccatggccgcacgctggaccatttcgatacgtcgatgatggccgccgaaaccggtgtggatgcacagaattccaccacgttgtattacgatgatggcacgatggccgtgtccaccagttcgatgctggtttcctccgatcgcggcggctacgtgtggggcaccgaagggtatttggtggtcaccaatatcaacaatcccgagtccatcgatatctacaacaacgatcacaagcccgtgcgcagtgttgcggtgccgtcgcagttgaccggttatgagtatgaggtggccgatgcagccaacgcgctgctggatggcaagatcgaatgcgaggcgatgccgcacgccgacaccatccgcatcatggagctgatggatgcgattcgcgaccgttggggcctgaagttcccgtttgaggtctgatttcagctcccctccagaggggagctgaaattattccgctgaatctgcatctccttcaacaatctgctcatacagccgtgcgaggcgttcgtcacgcacggctttcgttaattcgcactcccatacggtaattacacgccagccggcggcctccagttcagcccgctgcgcgatgtctcgattgtgattgcgcagtagcttcgtctgccagaattccacattcgatttcggcatcgaatgtttggaacagccttcatgcatgtgccagaaacagccgttgatgaacacgatggtgtggtatttcggcagtactacatccgggtggccggggtaacgcttgtcgttcttgcggaatcgcaaacccttgcgaaacagatagctgcgtaccagcacctcgattttggtgtctttgccacgaatatgcgacatcgtgtacgaacgggtgccccgctcatacttctccactggctgtttcttgcgattcacgcactccagactaccgtgacgttgcggcgaggatgaaagcctgaacgaacaatcacccatcttgcccgtccgtgtctcttatcgcgggcaatgatcatctgccggtcgagactgcacgattagaccgaatcaaatggatgacatgatgattcgtagggccacggcggccgatattccccaaatcgacgaactgctgcggcaggtgctcgaagtgcatcatgccggccgaccggatctgttcaaaggcggtgtcaagaaatacacggacgaggaattgaaggcgattctggccaacgatcagacccctgtgttcgtggcggttgcgccatctgccaatgacggcactgacgtcgaacataacgccgactcccccgccaccgaccaagtgcaatggcatagcgccaagcgacgtctgctttgcgagatttgcgagagatgaatgcgataccagcgttcatggctatgctccttaatccaatatcaatggatgaacctgcactgccccgtatgtcaccatcataatatatcgaatatcaatataaagatatcgaaaatcactttcaccattcacccacacacaccgcgacgcgatcgaccgttcttgccttgctcgcagcatccacgaccaacacgggaaagtcactttaaaaaagcactttatcaatgtggataactcggaagctagaaccacatacccccgttcagcttgccaatcagaaacctcatcccataccgtcagatgcacccgcacgcaacgacgcgtcagacaacagaaagaaggaccaatgaacatctctacgtttacccacaactcccacccggcaattcggtatacgcattttgtctagtgcgagattgagagttatgatgacacgaagaaaactcatcatcaagaaacttcggcaagcggcaaagcagcgagggctcgatttctatttgttacggcaaggcagcagacatgaggtttactgcctggacgggttgaggatacccatcccccgccataatgaagtctcagaacgaaccacgctggatatcatcaacgagagcgagcagaaactcggaaaggggtggtggcaatgagcaactatgacgtgcttgtgcaacccgatggccgatattggtacgttcaggtaccagctatcgaacggtcgacccaggccaaaggacttgacgatatcgagccaatggctaaagatctcatcactgtcatgaacgacgacgacaatccggagctcaaggtgacgtttgtgttgccgaaacaagccaaacaacacgtaacagaaatgttccggcagcgcgaaatagcaaaaaaagccaacgcacaagcggctgccgaatcccgactcgccgcacgggccctacgcaacgagggactcacgtatcgacaaatcggagctttattgggggtctcctaccaacgagcatttcaattggtcaacggcaaaacaaagcacaaaacgacagcgtccgaatcgcctcagccaacaactgaatcacgctccccacgcacgcaccatgccacaccgctatcgactccggtctcggcttagcgaacgggtccacaaagcccagactgtttccatcaccaagctcaagagcaccgagcaggatcttctcatcccagcagattgaggagatcgtccttggtgagggtggcgatggaggcgggggcttcggtgagggcgctggcaccggtgccagcttcgtcggcaagcaaggaagcatcggtgaactggcgggcgagctcgctcttggtatgctgaagctccaagatgcgttcttcgatggtgtccttggccaccacctgatacacgttgacgtcttcggtctggccgatacgatgtgctcggtcggtggcctgatcctgcgcggcagcgttccaccatggatcggcgtggatgaccacgctggcaccggtcaggttcagtccggtgttgccggccttcaatgaaatcaggaaggcgggcgtatcgtccgcattgaactggtcgacgagttcgagacgcttctttttaggcgtggatccggtgatggtgtagtagcgtagtccttgcgcgtcgaaacgttcggcgatcagatcaaggaagctggtgaactgggagaagatcagcgccttcttgccttcattcacgcaggtttccaccagttcggtgatggcggcaagcttggccgactgatccttggcatcggcatacagcagccttggatcacagcagatctggcgcaacttggtcagctcggcgaggatacgaatcttcgacgtgttgaaatcggcttcttcgctgtgttcgagctgcattctgagccgctgctcgtgggccgcatacagtttgcgctgttcgccggcaagctgcacggtcagcgtggtctccaacttgtccggcaaatcggtcagcacttgggacttcaacctgcgcttgatgaacacgcccaccaacgactgcaattggcgagacacccgggcggcctcaggattgacctgtgcgacggcccgaccttcggccgtgctgccatctgcagcccgggcgttggagatgggcaactcgtagcgctcatggaatcgcttgtatgagcccaatagtcccggcatcaggaagtcgaagatgctccacagttcggagagtcggttctcgatcggcgtgccggtcaaggcgaaacgatggtcggcggccacggccttgaccgctttggctatcttcgtggtgtgattcttgatgtactgggcttcatccagcgccatgacattgaaacgttgctcattggcggtgtaatcatcgacatcccggcgcagcaggtcgtatgaggtgatgagcacggtgggttcatccgcccggaacgcgcggccgatggcggtgcggcgctcggctttggtaccggccaccaccacggcgttgaagctcggggcgaacttggcgaattcggcaccccagttgtacaccaaggacgccgggcacacgatcaatgatggatgcggcccgccatcttcggaatcgaaagtaatatgaccggttacggctgattcactattaacagcattaccggcatccatgccttgagcggtcggcatgccactagattcgttgtggtatcgcgacagcaacagggcgataagctgcacggatttgcccaaacccatctcgtcggccaaaatgccgccaaaacccttgtcgcacaacgtgttcagccattggaagccttcgacctgataagggcgcagaatatgcttgagactatccggcacttcatacgacttagggtcgatgatcttgagatcgtcgatgtattcggtgaacgaagcgtccttgactacatcggagccgtcatccggcagctcaccatccagtaggaatgctcgaccgcccggcaactcgatcagcccggagttgagctgctgctcgctcagatcaaggtcgctggccaatcggtccaacgtgctgagattcgcgccgctgagtttgaccagcgtgccgtccttcaactgatggaatcgttgacgccgacgatacgaagacagcaaggcacccacttcgtccggcggtacttcatcagcgaggggtgatatctccaccaaattgcctttgatggacaatccgactttgacgcttggcggcttgggcgcgatcagccggtcaaaagccggtgtggtgaagacctcccctacttccttcagtgcgggcaatccctcgtcaaaaagacgaacaatctgcgtggtgtcatcgcgatcgatagtggccgcatcagacacgaattgtttggcggtctttcgcgcggccggcgttcggaacccattcaccgtctgatgagtggcggccgcaacgcgcttgcgccggtcaggcatggtaaagaattcacgcactacatcaatcgcaagatgctcagcgtcgaaatcacgcccaatcacgccccgagacaaggggatggaacgctcatccctagcatgcaccgtcgggccatcgggtagcaacgggacaatggcatcgccgtagtgtgccttgacctcgcattgcacaccatgctcatcacgatccagataaaactggaggctgcattccgtaggacttaattcagccagctcgcgaggaatctcactggcctccaacagtccggcaccaaccagctgaggcaatagcgtgcgtgcgaacagggcgatgtcatcgccggcaatgacctgcccctcgccatcgggttcaaacaggtctcccaatagtcctcgcaacggaatcaatcgtttcgggcaacggacgaatcggcatcccgctgcgcttttacgctgagagcccgccatcatggcggataccgcaccggccggattagtggaggcgagcaacagccatacatccttgccaccatcaatcacggtttccaccgccggcactccggcaagcaggtatccggcatccggaccatacgtattgaaatcacgccgcgcaatgcgcataagaaaatctggctcgccaccatcaaccggcaccgatgcaggctgcccggagaaccatgtgttcaacacgagctgtacgcctctgccctcacgtacggacagcaaccgggccacttccggtgctgaaagtgtcaggtgacgatcgatggcgatatgcccgtaataccggtcctgctgctcggccgcacgacgcacggccatcgcgtcgtcaaggaagcccagcagtgggcgcgaatcatcgtcgaacatatccggcgtatgggtaaaggcaagcttctgcccataatccgtatagtcgccgttcgccatggtaagcacaaattgcggaatcgatttcagtacatagctggacccattggaagtcgatccgatcttgaactccacgctccacacgccatcgatgaaactcaatatcggaacaagctgcacctgccccaagcccacagtctcactatcgccctgatacccgccgcctcgggtgccggcacgagagccgtatccgctattcgtacgtcgtccacctgcgccatttcgtctttttgcagtatcgaatcggcgcatgagcgcattgcggcgacgcgctttggcttgagcatcttgcctatcgacgtgctccatatagtcgatcagcgtccgagacggcctcacagccccggcacggtacccttcaaaacgctgcggatcatcgcagaatatgaaggcgagcgcaatcatgtgcttgcacatgccatagccacggccgtaagccgggcatgagcacttgccaccgacggcttctcccgtatcgaggtcgaattgcacgctggtacgatacctactcgatgggctggtggtgccacgtagaataccgtcaagctcggcatacccggttcgatgattttcgctgtataccggattgataaccatggtggccgctttgcgcgcaatgctacgggcacgagcgagcacggtattcgacgatgacgattccacatcgttgcgtaacgcaaggatagggacggcatgggcttcggcacgcttcgcggacccggcgaaatggccttcgtcctcatcgtcgaaccatacggaacgtcgttgcctgaaacgatagggcatcaccgcatcggcggcggacaaactgtccgttccgccaaacgttacggctctactgccggcagcgcctgcgccaccaagcattccatctgcctcgccagagataccgcctataccgctgctcttgccggcaaagaggcccctgtcctcattagtgccatctgtgtcatctgcgccataccgatcatcgtcgtaatcggcaccttcgtcgcctccccttttccaaggattgcgacggcgcaacgcatggccccaggaaacgccggaatcatcatcctcataaggcaggaggtcatcgtcatccgcattatcgggaacatggccaaatacaccataccctttgctcatgggcgagcctcctttccagcgaatgcatttcagtccaacacttctatcctagacgaggcgcgcggtagccttaatgtatggatgcagacaagccggcgcaacgcaaatcctatgcagggaacaccaccctcgaaatcttcgaggtgctgtggcgtcacagctactttggacatggcctgaccgtgcggcaaatactcgatgaacttgcccgtaaacaccagctggaagatccaagcgagctgccgaccgagaaaaccatacgaaatcagctcaaaaagcttaccgccacggaatttctcggcagacatatcgggcatctcaccgaaagcgaccttgccggcatcgaatgcaagaatccacaacccggctggtatcttgacgcattcttatccaccgccgaaatgcgactgctactcgacagcctcaccttgtctcgcatcagccttgacaccatggacgatctcatcggtaaaatccgcgaactcgcaggtgccgctgggcaagcagtaggttaccttgagcacgtggccacctacacgcatatcaacggcgagttcctatccaccatcgaccaactgaatcaggccattgaagaaggccacggcgtaaccttccaataccgtgattacggcccggacggcaccctgataccgcataaaagccgtacgggcgcaggtcgaattacctacaccgccgacccttaccagatggtgtacaagaacggacggtattacctcatctgccatctacatggcgaggataatctccgcattttcgtggtcaaccgaatcgccaacgtcagcgccaaaggcaggaacggcacagttccactggaaaaaccagcgccggctgattttgacgcagtgaacttcatgcgtcaccgcccgtatcccgtagccgatgccccgattcgcatccgcatggccgtacgagacgaatccatgctcaacaatgtgttcgaatggttcgacgaccctcagatcaaacattcgccggacggcacacagttcgaagtcatcgtcgatgctcccgaacgcgccgtgttctggtgggcattgcagtattcctgggatggccgcgtagtgattcttgagcccgattcgctcaagcgcaaactctatgatgccgggcgtcgcatggccacagcctatgctcccgaatgatgcagcatcacatcgcacacctccttgccgagttgttcaccagcgaatttcaccggagaacctatcatcccatcgccaatcacgttcggtaattttttaccgaacaactcgatttcaagccattccacgaactatggcccccgcctagccgtacttgacgctaaggtggaaccatcacatgccgcgatgcacatgcaacgcaaacgcaacgatatgtaaggagcaactatgagcgaagagcgtaccgcatggggatggggtctggccagcgtagacgccgccggcaccaccctggacgtctggtaccccgaactgaatctcggtgaggcaccggccgaggccgatcgtccaaaccacaatttcggcactctggctcacgatgaagccgacgcccgtggcatccgccgcgtgccggtattcgtcgtcagccagttggacgagccgatcagcaacgccgcggacgcttacctgaaactccatctgatgagcatgcgcatggccaagccgaacacgctgaaccttgacggcatcttcgcccaactcgccaatgtggtgtggaccaactacggtcctttcgccgttgaggacttcacactacgcaaggccgatgtcgaacgcgcctccaccgaagccgctctcgctttcgctgctcaggccggactgcctgccgcagctcctgccaccaccgtcaacgtgttcggtgtggataaattcccgcgcatgatcgattacgtagtgcccaccggcgtgcgtatcggcgacgccgaccgtgtgcgcctcggtgcttacctatcttccggcaccaccgtgatgcacgccggattcgtgaacttcaatgccggcacgctcggcgtctccatggtcgaaggccgcgtttcgcaaggtgtggtcgtgggcgacggttccgatatcggcggcggtgcctccatcatgggcaccctctccggcggcggcaagctgcgcaactccatcggcgagcactcgctgctcggcgccaacgccggtatcggcatctccctcggcgataactgcaccgtcgaagccggtctgtacatcaccgccggcaccaagatcagcatctgggacaaggccaaggccgcagccggcgagccgctcgaagtcgtcaagggtgctgagctctccggcaaagacaacatcctgttcatccgcaactcggtgaatggacgtatcgaagcccgctaccgcaaggtgggaattgagctcaacgccaagctgcacaagaactgaaattgaaataacggagcgttatcttcgttgctcctcggtcgacgtacttccgtacgccttccctcggtgcgcttcgataccgcacacattatttcaatttcagaactagccctgctcgttcttatgcagccgtcgcagcatagctggtttgcgctgtacatataggaagcgcctcactggatctccagcgaggcgctttctcaaaccaataatcaccgctcgtccatcggcacgaaatcgcgctcgaccggaccggtgtagacctggcgtgggcggccgatcttggtgttcgggtcggccagcatctcacggtactgcgcaatccaaccgggaatgcggcccagtgcgaacagcgtggtgaacatggccggatcgaagccgatcgcccgataaatcaagcccgtgtagaaatcgacgttcggatacaggttgcgcgatacgaaatactcgtcattcagcgcaatatcctcaagctcggtggccacatcgaacaacgcacgctcgtcggacggcagtttctgcgtatcctcgcgctccatgatcttctcaagatacttcttggcaatcgccgcacgcggatcatacgacttgtatacacggtggccaaggccggaaatcttctggccatcctccttggcatcacgcacgaactcggccacagacttgccggaatcacgaatcgccttcagctggcgcagtacggcctcattcgcgccaccgtgtaacggtccggacagggcattgacgccagcggccaccgccgaatacaggttagcgtgggcggaaccggcgatacgcaccaccgaggtcgagcagttctgctcgtgatcggcatgaataatcagcaaacgacccaaagcatgcacatacaacgggtcagattcgaacggctcgtacggcacagcgaagcacatgcgcaggaagtcgtccacatagccacgcgcgtaatcggggtacagcatcggctcatcgcgacgacggcggaagatgtacgacacaatcgtgcgggccttggccatgatgatcttggcggcctcatcgagctggtcggtgtcggagatatcggtggtgtccggatagaacgtggccagcgcattgatggcggaggcaagcacgctcatcggatgagcggagcgcgggaacgaacccatgaaggtacggaagtcttcgccaaccatcgtcttgtggttgatgtccgcgcagaactgctcatactcagccctgctcggcagctcgccgtggcgcagcagccacgccacttccagaaaatcggagttctcgcacaactgctcgatggggtagccacggtagcgcaggatcgaatgcttgccgtcgatgtaggtgattttcgattcgcactgtgcggtggtgaggaatccggggtcgagcgttacccagccgtcattgcgcagcttggaaacgacgatgccatccggccctgcactagccttcaccacgggcaggttgaacttgttcgaatcgacatcaagttgtgccgttgccattcgcgcgccttcctcttcatgaaccacttaccccaaacattaacgttcacgcgttcgcgaacgctagtgttcggtactttatgtcttctgtgttaccgccggcagacaccggtcgatacacgaaagccgaagtgcgctcatgctatcaaagcaaacgcacttcggcttgttacgtctcgaattcgcgggaaaaccgcaaacatatagacggttgatgagatgccgatcgcccatcacaggccaatcaggcacccgccatacgccaaacgccaatcagaggttggtgcgatcggtgaagatgatcgggccgttctcggtgatggcgatggtgtgctcggagtgggcaccgcgcgagccgtcggaggcacgcagggtccagccgtccttcggatcctggaagatctcgtcggtggtcttgaggaaccatggttcgatggcgatgaccaggccttcgcgcagcttgtagccgtggtgggcgcggccgtcgttcggtacgtgcgggtcgccgtgcatgatgtggcccacgccgtgaccgccgaactcgaggttgatcgggtagccgtattcgcgcgcgatgtcgccaatggtgttggagatgtcgccgagacggttgccgggcttggccacgtcgatggcggcggcgagcgcttcctcagtgcacttgatgatgcgcaggtcttcggggtccgggtctttgccgaccacgaagctgacggcggaatcggccacccagccatccacggagatggcgagatcgagggagacgaggtcgccgtccttcaggctgtaatcgtacggcacaccgtgcagcacggcgtcgttgacggaggtgcagatgtagtgggcgaacgggccggtgccgaagtcaggagcgtagtcaacatagcaggattcggcgcccttgcggtccacgatcttcttgtggacgaactcgtcgatttcgagcagattggtgcccaccttggtggtctcctgcagttccttcagaatgccgccgacgaaacggccggccggcttcatttcctcgatttcacgaggggtcttcaattcgatcatgaggttctttctaccttgttgagacttgttctcaactctagcccagcccggggtcaaccgccagagcatcacccgtggtctgcctagggtccgctagtagcctatcaacggccaaggccgagaaaaagcgcccggcagatacataatctgcacgggcgctttggattgattgtccggagattgattgtctggagcgcgagatcacttcctgcgcttgccaaaagtgaacgcgcgaatcactgaagtaatccccatcaccaccatggcacatccgccgaagataatcatgaatacggcggagctcagcgggctcatcagcaccacgaagccggcgataatcgagatgatggcataggcgatggcccagccggagcgcgggatgcgccatgattcgactagagccatcacgccttccataatccaaccgaaaccgaccatcagggtgatgagtaatgccaaggtctgaccggtcataccgtagtttcgtacgactacgacgcctccgaaggtcagcagaatgccgacgaacacgtccagcacacgccagccgcccggcagacccggctccacgagagcgctgacgatgcgcaccacgccggaaatcacgaaatacacgccgagcaacaatgcggccaaagccagcgtcttgttcggcaccaacaacagcgcagcgcccaaggcgatggcagccacgcccaccacgccgtaaatgatgcgaatcttggtcttggccttttccggcagccattcctcgatcaggtggaatggactgaaattgccgacataccagttggtctgctgccagccgggttgactttgatcgccccatgaaccattcggctgcccgtccgcttggctattcgattggccgtccgcctgataccgccgaccgtccggaccccatgctggctggccgttcgggccatagttcggattgtaggcgtacgggccgtagtacgggttctggttcggtccgccttgtggctggccgttctgcgcctgctgattctgagtgtcttgcgctcccggcgcaccttgcggaggatattggccgccatgattgctgtcatacgcgccatactgcggttggcccggttggcccgccggattcggctggctcggctggctctggttgggctggcccgtctggccattccactgaccctcgtttggattgctcatcgtaactccttaactcaaggtccatattcaggttccacataccatgttaggcaagttacctaatttgaaccatcactacagttaggcaatccgtctagttcactgacagcgcaatacccataacgcaatatctgcatcaccaacgcttctcccccgccgcgattaggcttagggccatgaccaacgaaaccgaaacgctgacgtcgggcatcgacccggcatcgttctcctccgtcatcaagccgaccaatgacctgttccgctacgtgaatggtccatggatcgacacctaccgcctacccgacgatcgttcgcgctacggctccttcgacaagctcgccgaagacgccgaaaaccaagtgcgcgacatcctcgacgccgacgactgcccggccaccaagtcgcaggctctgtatcattcgttcctgaacaccgacgccatcgaggccgccggccttgacccgatccgcgatgagcttgacctcatcgattccgccatcgacaaggccgctctcacgcgcgtgctcggcaccatcaacccagccggcggccccgacctgttcggcttggccgtttacggcgaccccggcgacccggaccgcaatatcgcccaccttgagcaggccggcctttgcctgccggacgaagcctactatcgtgaggaccactacgtccccgtgcgcgaagcatacgtggcgatggtcgccacccagctggtgaacgccgggtacgcgcccgccgccgaatccaacggtggcgatgaactgccggccaacaccggcgatgacgagagcaatgctcccaccacggttcccagcgaagccgcacttgatatggcccgacacttccttgccgtggaaaccaagatcgccgccaatcattgggacaatgtggccacgcgcgattcggtgaagacctacaaccccaccgattacgccgatttggccgccacgctgaagaacttcgatctcggttcctggatcgacgcctggcagaccgcctatgacgccaccgaggccgccaaggctcagccgatcgatttcaagtctgtgttcgcgcgcgtcattgtgcacgagccgagcttcctcactggtcttgatgcgttctgggccgaggccgatctggccgaccttaagctgtgggcccgtgttcacatgattctgggcttcgcctcctccctgtctcgcgacttcgacaccaccaactttgacttctacggcaaggtgctctccggtgccaagaagcagcgcgatcgttggaagcgcgcggtgagcctggtcaacggcgtctgcggtgaagatgtgggccgcgagtatgtgcgcctgcacttccccgaaagctcgaaacgccgcatggaagagctggtcgccaatctgattgacgcctaccgcgtgtccatcgccaattccgattggctgggcgaagacaccaaggccaaggctctggagaagatctccaagttcacgccaaagatcggctacaccaaccactggcgcgattactcggcactgagtgtctccgcggatgcgctgcccgccgagaacgccaaggccgcgaacctgtacgagaccggctaccagctggccaaggtcggcaaggcggtcgacaaggacgaatggctgatgaatccgcagacggtgaacgcctactacgagccgagcatgaacgtcatcgtgttcccggccgcgattctgcagcccccgttcttcgacccgaaggccgaggatgcggcgaattatggcggtatcggcgcagtgatcggacacgagatcggccatggcttcgacgatcagggttcgcagtatgacggcgacggcaagctcaacaactggtggaccgacgaggatcgcaagaacttcgaggcccgcaccggcgcattgatcgcccagtacaacagctttgtgccgctgcagctggcagagaagtacgctgacgagtctgataaggcgccgcacgtgaacggcgcgctgaccatcggcgagaacatcggcgatttgggcggcgtgaacatcgcgctcaaggcgtatgcattcgcgctcggcaaggcggcaggtaagcccgacgccaaagaaaacggctcccccgccgccatcaaggcactgttcgataccgcccccgaaatggacggattcaccggcctgcagcgcttcttcctgagctacgcctccatctggcgcaccaagaaccgcgacgagctggccgaacagtacctgcagatcgacccgcattctccagccgaattccgcaccaacggcatcgccagcaacgtggacctcttctacgatgcctttggcgtgaccgaaggcgacgccatgtggctcgcgcccaaggaccgtgtgagcatttggtaatccccgttatgtaagagaaaaccgctgtgcttgcctcgattacaggcgaacacagcggtttttcatgatgtatggttggcactcagaattcggattcgccgggatcggaagattcggcgaaaccgtcgacgtaggtttgttgggctgcggactgtggctgattagcgccagcgtccggttgcgacatgacggcatcggccatggacgcagccgctgactcggttgatggcgacggcgattggccggaatcggaggtgaccccaaattcgacggggccagattccgacgaggtcgcatacgggtcaatgcccacaccggatgcggcaccgtccacactatattgcgttggcctcatgtgcggtgacgatgctcgttgcccgtttccgccatccatgccttcggcggcaccgttggcattgccgttaccgttgccaccattgcctccgttcccattaccggcacgctgtggcttgatcagcgacgtggtgccgaaggtcaggtcatgcccaatgttggtggcttcgagaacggttctactgcgcggttcgccttgctcattggtccactgctcggtgatgagtgagccgaccacaatgatgcggtcaccgcggcgaaccgaactggcggcgttcacggccaaagcacggaacgctttgacgcccacccatgcggttccgtaatcctcccattgtctggtagtcgggttgagtcgactgcgggtgctgcccatacggaatgtcagcacgcggaaactctcagttccgcctagtgtcggatcaccggccacaaagccggtgacggtcactgctgcttgttgatttgccatgatcggtcctttcctcggcctgctggcctgttgtttggatgtggaccgccggagcctgtctccggcttcattgccggcttgcacgccccagcggtacctccactgtgaggcatgacgtttgaagcgcacaagggcaactggcaaatgtggatactgtgacgcagttgaaattttaagaatgtggataaatttcggttatccacaacaaagcgccattctgcgactgagcagaatggcgcttgatgcgattaacgccgaggctgagtaagtgggactcagctgagggcggcgaagcgctcggcgagcgcgtcggcggcttcggcggcgggcacggcgaccttgttttcgccgttgcggtcgcgcagttcgatggtgccgtcgttgacgtaatcgcggccgaccacggcgaccagcggcacgccgatcagctcggcatccttgaacttgacgcccggagacaccttcttgcggtcatcgtaaataacctcaaggcccttggcctcaagctcggagaccagcttctcggcaccttcaaacgccacggcgtccttaccggtggccaccacgtgcacggcagccggggcaatcacggacggccaagccaagccggcttcgtcgtggtgtgtttcggcgatgcaggccagcacgcgggaaacaccgatgccatagcagcccatccacaccggcacggccttgccgttctggtcgagcaccttcaggtccagtgccttggagtacttgagacccagctggaacacctggccgatttccacaccacgctcgaagctcaacggaccggaaccgtccgggctcatgtcgccgtggcgaacctcaacggcttccaccacgccgtcggccttgaagtcacggccgtacaccaggttgtagtagtcgacctcgttctcatcggcaccagtgaaccaagcggaacccttgaccacgtgcgcgtcgaccaggtagcgaaccgggttcttcacgccagcagcctcggcctgcgggccaagcaccatcggtccgatgtagcctggcaccagttcggggtgctgcttcaggtcttcttcagtggcctcctcaagctcggcgggagcgaactgggcttccagtcgcttcatatccaccgtacggtcgccgggcacgccgacgacaatcacttcacgccacggctcgtcatgctcttcatcctcagggtgcttgacggtaatcaccacgttcttgaggatgtcggaagcctgccattcacggccatcagtacgcgggtggtcggcgttggcacgctcaatcatgttatcgatggtcttggcatccggggtggcttccttggaagcggcgggagtggcggaagcatcgatttccggcagctccggagtgctcagggcctccacattccatgccttgccggaaggcgccagcgcgaaggtatcttcgccgatcggcatcggagccaggaactcctcggatgcggagccgcccatcgggccggacatggcgaacacaggtacgtacttcaggtcgagacgctggaagatgcgctcgtaggcgccgcgctcgtcatagtaggccttgcgcatgccttcttcatcgatggtgaaggagtaggcgtccttcatgatgaattcacgaccacggatcaggccggcacgcggacggaactcgtcgcggtacttggtctggatctggtacagggtgacgggcaggtctttgtaagaggagtacatgtccttgaccagaagggtgaacatctcctcgtgggtgggggccagcaggtaatcggcctcgtggcgatccttcaaacggaagatgttgtcgccgtactcctcccagcgatgggtggcctcgtagggttcgcgcggcagcagggccgggaagtgcacttcctgggcgccgatgccgttgatctcctcgcggatgatggcctcgatcttgttcagcacgcgcagaccgagcggcagccaggtccagataccgggtgcggccttgcggatatagccggcgcgctgcagcagcttggccgaatcgacatcggcatcagcggggtcctcgcgcagggtgcgcaggaacatggttgacatacgaagggtattggaagtcatgtgttccaagatattcgcgtgaaccgacaagcccgcctgctattcgcactattccggccttcatcttggcattcggactcattcgtacaacaatgatggctagaagggtaggagggcacgatgacgcagccgaccgagcaacaggggaatcagccggaacccgcggagcaaccggtgtatcaaccggcccagcatgggccccgcaattttctgctgcaaccccgcaattcccaacggcagttccgcgacaaccggtatcgcaacagccaatggccatgccaccatttgcgcaatcgcctatgtcggtcccggaacaagcggcctgtccggagcggccgcgctgattgtgggtgtgcgtttgctgcaagcaccgttgatctacggcacggtgattcttatcgtcagcacggtgactgtgctgtggccatggcgggccgaattctcccgccactaccggtgggtgtggcttgctttgggcggcatcattctgattgtggcagccgcgcgctatgaggcgagcctcaaatcgatgaggacgatcgccgcgcgtattggcgatctgcgctaaatcgcgcgggcgacctgaggcagattaccaacgtccggcgatagcagtcctgcatacggggcagtgcccattgccactgtatccggcagataaacggttggcaatgattcgataccaatcgcgttccacgagcttggccctgcattcagggtttgggcaatatgtggtatcgccttcacgatcatgcacgttgccggtgtacacataattgagtccctcttcgagggcgatgcctcgggcgcgggtcagagtctcgtgcggggtgggcgttacgtccatcatgcggtaactggagtggaatgcggaaaagtgcagcggcacgtccgggcccacgtgctcgcgtatccatgtacattcagcatgcagctgggcgtcgtcatcgttgagtccagggatgagtagcgtggtgagctccacccacacgtgttcgccttctggtgtgcgtgcctcgttgaccgcatagtcgatggtttcgagcacatcggccagatgcgtgccggtcactttccaataaaattcttcggtgaagcctttgagatcgatgttggcggcgtccatggcggcgtagaagtcgggccgggcttcggcgctcatgtatccggcagtcacggcgatgggatgaatgccgagcgctcggcaggcttcggccgtgtcgatggcatattcggcgaacacgatcggatcgttataggtgaacgccaccgaatcgatgccccggtcggccgcgacctgcgcgattttctccggactggcttccacgccgagccggtcgaaactgcgggctttggcaatatcccaattctggcagaatcggcaaccggaattgcagccagccgtgccaaaactcagcacgctggaaccggggtggaagtggttgagcggcttcttttccactgggtccacggcgaagccggagctgcggccgtaggtgtcggagacgatgagtccgtcgtggtttgagcggacgaagcaaaagccgcgttggccgggcttgaggacgcagcggcgcgggcatagttcgcagcgagcgcggttggtaccgtcgtggaattgcgtttgccagcgggctatggcggggttacgaacatctgtgactgacgccgtatgaccgcacgattcccggtggccaccctctgattctcggtgaccaccctccgtcgcttcgcgccacctcccgccagcgggaggggacatggttgctgcgttagtgctcggcataggcggtcacctcgtagcgttgacagtcgatttcgccatcgttccagtcgtaggacgggcggataccggctttggcgagcaggtgagtgacgaaatcgtgcggattgggcagctcatcccacacttgtggcaggaatgtggcgctgcggccacgacggtcggcgagaatcagaccgtctttgccggggcgtaatacttcctcaagttcagtgcgcgaacgtaccgggcgttcgacgttgctgccgtcccgtttgacggcgtcggtctgaggtccggattgcagcgatgccagagtcgcggtcttcgagccggtatcgcgcgaatcggcgtcacaggagttcacggtaatcggctcgggcgcgcccaagacggatatctccacattgagcaacgggtattccgcggcggtgaccgggttgaaacgtgggtcacgggtggcggcgtccaccgcatgtgcagctatgtccttgccgagcgagcggtgggcggccagcgaaccgatgcacccgcgtagccggccaccctcggtcagggtaacgaaacaggcaccggactcgttcagccatgggtctgcggcaagaatggacgcggtcgaatcggcggcggtcggatgctcgatatgcaaccgttcccggatagcggcacgggcgagtttcagcagcacatcaccatgggctgttcccgattcgcctaagtcatctgcaccggctggagcatctgcttctggtttggatccccacgcggcaaacgagacatatcccactaccggctcgtcggcgtctcgcattgcggggcgaggttggccggcaagcgccaccacgccgtcgtcgccggaagtggaacagccgagctcgaagagcttcatgtccttgcggccttttaacacatccagaaggccgttgatcgggtatgcgccacaggcccggcgagggtgaatcggcagatgcaaagccgcaatgtccgcaatggtctggtcatccaacgcgcgggcgacttcgtgcggatgatagtgcgagagatccgaactaatcacgatgacggtttccgggccaccccacaaagcacgcaacacatcacccgcctcttgtggcgtggcatcgcccgcgttcaacggcacaatagtgaggtctgggccgagcacggtttgcaggaacggaatctgcacttctaccgcatgttcttgtgcgtgggttgggccattgacgatcattgcgggagccgacgcgcccggacgggcatgtgtaccggagcgcaatggctcattgacagacaggcccagagccttacgctcggctgcaatgtctaccggcacagtgcccagcggcgtttcaaacgccgctgccgtggaacaggcgacgcctcgcacggccacacggtgagtcggtcccacgattaccgcgcgagtcacactcccccgccctcgttcgagcaaagcataggcaagcgcggccgccgtgccggaatacacataaccggcatgcggcacgattacagcctttggcactcccgctggaagcgtgggctccaactgttgcagaacctctcgactgtaatccaattgatggttaatgagttgcttgagcgttgtgcggtcagcggggtagaacgaaccagccaccgctggcggacgtattgcgccagtgattttgccgctgccgtctgccgcgcttgctgcatctgacgcactagccacactaaccgtatcgatttgcacaccggcccggacggcctcgcgaacctcattgtttccacgaaatatctcggatagcaccataactaccacctcttattccatggtagccgttcagttcctcaatgaagacaagttcgcagtgtcttcttcggcttcaaggggccgattccgccccttggagacatctacttgcgtttcgaggggctggtcatccgctcaatcgcacatagaaacggcttcataccaacgtcattccgccgtttttaagcgttgtctacttggacatcagccccttgaaacggaagtagatgtcccgaaaactcaaaatccgcccctcgaagtgcagaaacactcaaattagcggtcgttcgatatatcgaccgtcagaataacgcgtcctgggcgaagtcatcatcgggattgacaccgaattcgtccggctcggcgggtttgaacgcggttgcaccttcatcggccaactggtcggaggccgaggccgaggcttcgcgcaggtcgccgtcgagcaccacggcatcgggcgagacgaggaacatgcgttcgttgacgccagccaaatacagtccgcccagcgattcgacgcgggacaacgccacatatcccatgcccggcgcgaaggtgcgcttcagatccatgaccgcacgatcaagcgtcatgccttgcgacttgtggatggtgatgccccacgcgcaacgcaacggcacctgcgagacggaggcgagcacggtgtcgccgtccatcatttcccatgtggcctgtttcatggtgacgatgttgccgttttcgaattccacgatcggccagccgcccttgttctcctgcgcgaagccgcgcacggtgccgagcgag

SEQ ID NO: 1349 - DNA, 17943 bp, Unknown
  R157_18m  MAG No. k141_26141
actggatgtggaaggtgtgctgaactagcaccttttgtttccgactaagaccccttagaatgtcaacaattccaaggggtcttggcgtattggaaatgttcttggctagagaggtacagatggatttagcaacatttcgcaacaaataatatgatttaggtcttctgcacgttgcgggggttggttatggttcatccagatgagaacaggagcaaaccctatgagcaagatgagtgacatgacggaatactatgcttcagcctaccgtttgccgtcaggcttcgagcattgctcgaaactgaagccggtggcagaggcagcgacggcgttgcgtcggtggtgagacaagacatgagcttctggcgacgctgggggatgttcaatgtcagtaatggttcaaggtttggactgctgacgtcgctgagacaccttagcgtcgttaacgggtcaagttctggcgatcaaacgacggtaaaaaggggcttagcgtcgttagctgtacataagttggcacggcaacgacactggagcgcgtgatcgtcggtgccgtgccaaactttggccaacctccgacaaatgagaaggactaacgtcggtggctgctcaaagtttggcgcgctggcgacgctgtaagaaaaaaagtgtggagtcgaaccggcaatagcatttattcggtttgttctctagtccaattgcgtcaggcaaggcctgttgtaggctcgggtacgacgggctgtagcgccgaataaggatgaacgggaacagaacgaagacggactgagacgaaccgaagcggtaccagaggggagcggctcatgcaggtggtgttggagaacaacatcgtttttgtggtcatcgagtatttagcaatcctgtgttggggattgtcgggcggacttgccgccattcgcaagggctacgacatcttcaccatcatgctgtgcggatggcttaccgcactcggcggcggtcttgtgcgcgacgtgatactcggtgccctgccgccggtcggcatcaccgacaaaggctatgtgctcaccacgctgttttccggcattatcgtggtggtggcccacccggagatcaccaaactcaaatggacgatgactgtcatcgatgctctgggcctcggactattcgcagtcagcggcaccgcaaaagctctggcctacggttcctcaggcatgacagccgtattccttggcatgttcacagcactggccggcggcctcattcgtgacatcttcatcggcgatgtgccaatgattattcgagacaaacacctctatgccgtgccctcgttcatcggttgcattctgaccgtgcttgtatggcgtggtgtgcactacggttggttcgacatgtgctcggaaatgctgctcgacgtgctgatcgtcatcatcgtggtggcgctgcgcctgctctcggtcggcttcaacgtcaccttgcccggagccgtcgagcgtcatcgcgtctacctgcccagcgaaagccgatatctcaagcgcccggtcatccatccgcacgccgataccgtcgatcccggcgataccaccaaggacgaagaagacaagcctcaggatgattcaagaccgcctcagggctaactgccttcaaagaggtacatttggccttctgcaaaatgacaactgctttcaaagaggtgcctgaagcacgaaacgtcgagtataagcgttgcaatgacggcgtttatacttgggctttctcggattcggtacctttctgaacggagatgtcatttcgcaagaccgccaatgtacctctttgaacggagatataaaaagtcccgcaagccagatgacttgcgggacttgctaaaaccttaagaggcttatgctcacagagcgttgatcgcaacagcgaggccggacttgcggttggcggcctggttcttgtggatcacgccagcgccagcagccttgtcgagcttctgggcggcaaccttgtaggcggcctcggcggcagccttgtcaccggcggcgatggcttcgcgggtggcgcggatggcggtcttcaggccggacttcacagccacgttgcgaaggtgcgccttctcattggtgagcacgcgcttcttctgcgacttaatgtttgccacgtttactccaaacgatgtgtgttataaggacatacaaaaggtagaggatagcatgagccccggaaaaacccgagcaatgccacgccgaatacagtccctcggctacactaggtgaagtttgagtatatgccaagaggaggaatgcgttggtcgtccaacacaatcagccgggttccacggatcagtcggtgattcgcaacttctgtatcatcgcgcacatcgaccacggcaagtcgaccgtggccgaccgcatcctgcagttaagcggcattgtgcccgagcgcgagatgcgcgatcgcttcctcgaccgtatggatatcgagcaggagcgcggcatcaccatcaaatcccaggccgtgcgcgtgccatggacctttgacggcaccgaatacacgctcggtatgatcgacacccccggccacgtggacttcacctatgaggtgtcccgcgcactggccgcctgcgaaggcgcggtgctgctcgtcgacgctacccagggcatcgaggcgcagaccctgtctaacctgtacatggccatcgaccatgatctggccatcattcccgtgctcaacaagatcgacctgccgtccgccgagccggacaagcatgccgaggagatcgcaggtctgatcggctgcgagccgagcgacgtgctgcgcgtctccggcaaaaccggcgaaggcgtggccgacctgctcgaccagattgtcatggacgtgcccgccccgcacggcgaccccgaggcccctgcccgcgcgctgatcttcgactccgtctacgatccctaccgcggcatcgtcacctacatccgtatggaggacggcgaactgcacgaccgcgaaaaggtccacatgatgggcattggcatgacccacgatcccatcgagatcggtgtgatcagccccgatatgacccgtaccaaggcactcggtgccggtgaggtcggctacatcatcaccggtgcgaaagatgtgagtcagtccaaggtgggtgacaccctgacctcggccgtccgaccggccaccgagccgctgcccggctaccgcgaccccaagccgatggtctacgccggtttgttcccgatcgacaacgcgcaattccccgaactgcgtgatgcactcgacaagctcaagctcaacgacgccgccctgatctacacgccggaaacctccgtggccttgggcttcggcttccgctgcggcttcctgggtctgctgcacatggagatcgtcaacgagcgactctcccgcgagttcggcctcgaccttatccagaccgctccgaacgtcacctacgacgtgaccgccgaggatggtagcgaacaccacgtgactaacccgagcgagttcccggacggcaagatcaagaagatcgtcgagccgatggttgccgccgacatcatcacgccgaaggagttcattggcgcggtgatggatctgtgccaggaccatcgtggcattatgggcacgatggagtacatttccaccgatcgtgtcgagatgcactaccgcattccactggccgaaatcgtgttcgatttcttcgatcagctgaagtcccgcaccaagggctacgcttccctcgattaccatgaggatggcgagcagtccgccgatttggtcaaggtggacatccttattcagggcgagaaggtcgatgcgttcagtgccatcgttcaccgcgataaggcgtattcgtacggtgtgatgatgaccaagaaattgcgtagtctgattcctcgccaacagtttgagattccgattcaggccgcaatcggttcgcgtatcatcgcgcgtgagaacattcgtgcgttgcgcaaggacgtgctcgccaagtgctatggcggcgacatcacccgtaagcgtaagctgctcgaaaagcagaaggccggcaagaagcgtatgaagatgctcggccatgtggaggtaccgcaggaggcgttcatcgccgccctgtccaccggcgaggactccaacgaccgcgacaccaaagacaagatccgcgccgctcagaagaccgagggctagtgttcgaggtctacatccacgtcccgttctgcttgcggcgctgcggttactgcgacttcaacacctacacggctacggatcttggtgcgggggcctcgcgcggcaactatgccaatatggtcattcgtgaaatggccctgaccaagcagtggcagctcgaccacggcatcgaggagccaccggtctccaccgtgttcttcgggggtggtacacccacgattctcgccgcccgcgatctggtcgccatgctcgatgccatccgcaagatctggagcatcgcgcccgacgccgaaatcaccaccgaagccaacccggacacggtcaacgaatattacatcaatgagctcgctgccggcggcttcacccgcgtttccttcggcatgcaatctgccgtgccgcacgtgctcaaaaccctcgaccgcacgcatacgccggccaacgtggccgcaggcgttaatgccgccaataaggccggcctgcgctccagcgtggatctgatttacggcgcaccgggggagagccttgacgattggcgcacctcggtcacgaccgccatcgacctcggcgtgaaccacatctccgcctacgcactgaccgtggaacccaccacgaaaatgggtcgtcaaatcgcggccggcactctgcccaaacccaatgacgatgacgaagcagccaaatacgaaatcgccgacgacctgttcgccgccgccggcctcgaatggtatgaggtctccaactgggcccgccccggatacgagagccagcacaacctcggctattggcgcaacgtcgattgggccggtctagggccaggtgcccactcccactacaacgcggtgaccgaggctgaccacccccagtcggcttcgctgacagcccccgccagcgggggcaagtccgaagccattgcctctgcctcagctgatggacaggccaacgccgaacttggagaaaccaacgccgaactaggtatgatcaacgcgcatgggaacaactcccaagaaattcatgcccccgctggcgggggctgtccggcggatgccggactgggggtggtttctgtctcacacggtctgcgcagctgggacatcgcgcacccgcgtttgtggggcacggccatcaacgagaaccgtgtgccgtgggccgatagcgagacgatcactcccgaggaaaacctcgaagagctcatcatgctcgggctgcgcctgcacgagggccttggcctcgaccgcatcaaccgcgccatcaacgatgcaggtatgagcagcacgccccagactctccgaaccgtttcggttgaccaactcgcccccatgatcagcgaaggcctgattaccgtatccgataatcatcgagtggtgcccactcgtcgtggccggttgctcaatgactcggtaatcgaacagttcttcgattacgttggtgtatgagtcggtggtatggtgcgcggcagtcgccattacccgttcgctagttgtggttacaccgtcagagggagcttttttgttttaccggcgggggagggaaccgcgtaggactacgtccggggcgctttgcacgtagatcaggcggttggcagtgccgccggtggcctccgcgtcatcgcggttggacaggatgctgtccacggcggcctggcccatttcggccagcggcaggtgcacggtggtcagtggtgggaacacgtcggcggagtaggggatgtcgccgaaaccggtgacgccgatttcctgacccggctcgatgccgttggtgcgcaacgcggtcatcgcaccgatggccatcacgtcgttgagcgcgatgattgaatcgatgcctttgccgtcgtacagtgcgccttcgcccggcttcagcagtccggatcgggccatttgcatgacggccgcatagccgtcggtgcggctgaacttaccgtttgccacggctttcgggtccacggtgatgcctgtctcgtccaacacttccatcacaccggccagtcgttctttggaggagcggtgtgcgtcatcgcccttgagaatcgcagggcgcgtatacctggaatcgacgataagctttgcgatggcacgcgcgccgacgtcgttcgccacgtccacggccgggaagggcaggttgcggttgagtacgaacacggcatgtccgccggacgattcgtactggatgagttccgtctgcaacgcctggcgttccggcgcgtcggtgtattcgctttcggagatgatgatgccgcgcggcctggtggatacggacttacgcaccgcctccaactcctcgtgcggggtggctgccacgccgatggtcacggagatgccgcgttcggccgccgccttgaccacgccttgcgacacggatgcgaagtagggatcggagatatcggagaccagcagcacgatgttcggtgcagtgcctttggccactgcctgagcataggcgttgggacgatagttgagcctggtggctgcttccatcaccttgacatacgattggttgcgtaccttgcgggtgctgccgttgagcacacgggatgcggtggcgatggagacctgggcttctttggcgacgtccatcaatgtcgctggcgattgcgccttatcgttctgtacggccacgatcgaatcggtccttttcttccctgaaacggaaaacatgtctaaacgcttaccgcaatgatatcgcagttttgcttgcaatagtagcattgtggattggaaagcctgaattttgaacaaaaataatcacgcgaattatggaaagcgcttaccgttccgcgtgtcgtgcggtatgctcgaagcatgacgcgatacttatgtgcccctgactccttcaaagagagcctgaccgccatggaggcggcccgggcgatggctcaggggattgagaatgccgaccacgatgccgaggtccgttgcctccccatggccgacggcggtgaaggcaccgcacgtgcgcttgtcgacgccactggcggatcgatgcacgccgtgccggtccacgacccgctcggccgacctgtcgaaggccacttcggcctgctcgccgacggcacgaccgccgtggtcgagacagccgaagccagcggcctcgcactgcttgaagccaaaaaacgcaacccgttgattgcctcctcctacggcaccggcgaactcatactcgccgccgtccgttccggagccaagcgcatcatcgtcgggctcggcggcagcgccaccaacgacgccggtgccggacttctgcaggccctcggcgttcgtcttctggacgggaacggcaacgaccttaagcacgggggagcggccctcgctgatctggccaccatcgacatcagcacgatggacccggctctcaagaacgtctccatcaccgccgcctgcgacgtgaccaacccgctgaccggtcccaccggcgccagcgccgtgttcggaccgcagaaaggtgcctcccaggccgacgtcgccacactggacgccgcgttggcgcacttcgcgcaggtcatcgaaagccggctcggcgtcgctgtgaacgacgtgccgggcgcgggcgccgccggcggtatcggcgccgcgctgaaaggcttccttgacgccgaattccgtccgggcaccgccatcgtcatcgaacaatccggacttgatgcggccgcgcaatgggctgacgtggtgttcaccggcgaaggctccatcgacttccagaccaagttcggcaaaaccccggccggcgtggccgaaaccgccaagcgccacggcaagcccgtgatcgccgtcgccggacacatcggcacgggcatcgacgaactgcatgaggtcggcatcgacgcggtattcggcatcgcccccggtgccgccagcctcagcgaactgctggccgacgcggccgccaacgtgacccgcaccaccgaacaagtcgtacgaaccctacaactgaagcagcttcacaagctccctctgatgggccgagccgtgaaggaaacgccggagtcgtttccaggcgagggcttgacgacagtcaacccagccgaaggctccataattgcgggacgagctgccgcggcaaagccgtgactgagggggagacttgtggcgcagccgcaaaaaatggcatcggctttcagccgatacagtcattcgtctgcttctctccctcagtcagctgcgctgacagctccctcgtcagagggagccacacaattcggaaaggaagatatgcgcaccatgctgtacaccaaggtgaccagcatgctgagcaccacgggcatcgccagcgagaaatacgccttcggaatcggcgccttttcgaagggttcgttatccatttccgtcccttggtgttttcgttcttcagtcactgcgcgggatgccgttcggcgtgcatcacaggcattgcagaggcaacagtgtggacaacgggcggggaaagtatctcatgatgcggtgagggcgttgatgatgacgcatcgtgtattggtggccgtgtgcatcgtatgtgaacctgtgctggcacggcgtacacacgatgggaaaagaaagaatatatggaccccgttgtcccggttattgttcagttattactgtgttgaattattgcgttattcaattattgtggtgtgccggccgattgcggcctgcgggggattgccttcgtatgtgtcgtgcaatctcatgaatgggatcgttcgctagattcagcgagcgtccttgttggcggcgttgatgatgtcggcgaacatcttggagtcggcgtagccggcgcgggcgatggcgtccataccggagagggtgaaaccgcgaatcatggaatccatgaatgacataatgtgttccttgtcttgacttgcaaagccgtgggctttgcgatgtgttgttgtttacgttatgagacgggccgtgtgtgagcggcgagtcagggaagagactcagcgagcgttcttatcggtgtcgttgatgatgtcgagaatcatctgggagttggcgtgaccggactgggccagggaagtggcaccgtacatagccagaccgcgaatcatggaatccttgagagacatcatgtttcctttcgttggtcaaaaccttgtggctttgagttttgtttatcggtttctttctgaaaccggtttcagaataacgcagtccgatgacaaacgcaaggggactattccgctctcggcgtttctggcggaatatcgccgttctatagataccgttcggtagttaagaggctgtctagtcgactttctgacggtcttgttctgggcgcatggttttcacgaaatggcctcatgtcgcggaaatcgtacgctgagtcgtcgtaagcgtacggtcttcacgaaatggggtctcatctcgtgaagaacgtacactgagtcgttctgggcgtacggttttcacgaaatggggcctatcttcaccggattttgggcacaccggccttgagcagcttggtctcaagattgatggggcgtagcagatcctcatagaacacatggacgatttcggtgacgccctgttcccggagatgccgatcacgtctgcggtcgtactccattttcgcctggaggcttgcgcgattcttgttgctggtgtcggcgtatttggccatgccgtcgtattctgccacgatgatgcggccgtctgcgagcttccaacagaaatcgacgcgatatggcattgcgggattgtcgggattcatgaactgcacctgcagcaggggaatgccgaaagacaattcggtgatctggccacgcatcaatgattcgccgccgttttcgctcaggggatccgcgtacttcagcagcttggtcacggagacctcgtcgcagacgctttgaatcatcagcgactgcacctcttcgatggtcgtcagggactttctcagagccgaatcgtatatgggcagcgcctgtgggaatgggaatgccgcgcagtcgagcagcgttcgcgccggagtcgtcaagagaatgccattatgcttccgcgtcggaatccgattgatatagatgcggttgagacgcgcctcgtctccgccgccgatgccggacttcgaggcgatgtgcactgtgccgtcgtgcagggaatagttgtgctgcagtccgtatacgcacgccgcactcaaccccgcaaatacccactgagggtggattgcggatagcgcacgtatgacctgcaatgactgttgctctctggtcatggtgttccaaagtattcggtcggcgtacaggttcttatacggtgacaccagctccccggcatgcaggcgacgtttcagggcgcgccgttgcgcatcactggtgccatagcagcagcgacgctcctgcttcgcctgctgcagcagtgcagaaacttccttgtgttctttcatatctcgacgctaagggtgattttgattgttgcacaagctcaaccggcaaatgtgaatactatgtcacgcgaattgttggtgtggataacttgaatcgacgtcgacggctttgccgacggtcttgtcggaggcgatattagcctaggacaccttgctgcgccgccttccataccgagaacagtcatcagtgacaccgagggcatcttcagcgtatgttcttcacgaaatcagctgccatttcgtgaaaaccgtacgctcagaatgactcagtgtacgttcttcacgagatgaggccccatttcgtgaaaaccgtacgttgacgacgattcagtgtacgttcttcacgaaattagggatgatttcgcggaaaccgtacactcaccgcaactcagcgtacggttttcgcgaagttattgatttggatataggttccccatcatgaactacaatgaatcgcggcgaaaaacggggaaccgaagtcggagcgcggctgaacggatatgggtgtgactggatgactgccatggtgatgccggttctccttgacgtacgcaataacaacaactgacaacaacaggggagacaaggatggcgagaagtgcgggccgcacccgaccggtgatcaaggacgtggccagactggccggagtctcggcaccgaccgtctcccggtatctcaacggcaccgtcaatgtcaccgaagacaagcgtgaacgcatcgccaaggccatcaaggagctgggctatgagccgagcattgtggcgcgcgccctgtcgaaccgggagatggactccgtggtggtgttcgcggccaatccttccgccttctccacgtccgaaacgaaccatggggtcgaggccgccgcccgtaaacgtcggttcctgctcaatatcgtttctttggatgagtccgacatggactccgtcaaggctcgtgtgcgcatgggtttgtcgatcaggccggcgggcgtgatcgtctacgagtacgaccgggccggcatcgccgcactggaatacattcccaaagatatgccgatggtcgtggtgggtggcagcttcggcgacggcgaataccagatcatcaacgccgaaagggatggtggccgttggatgaccatgcatctgctggatctcggccatcgcaccgtgttccatgtggggcgcccggaaggaccgaccgataacacccgcaccaatgggtggcgtgacgcgctcaaggagcgcggcgtcacggtacctgacccaatcatcgtgcccgacgatgatttggaggagtcggtcaaggctgggcgcaccttgggccgtcgtggtgatgtgactgcgattttcgccggcaacgacgagaccgccatcgctgtgatccgaggtctaagggaggttggtcgccgcgtgcctgctgacgtgagcgtcgtaggctttgacgaccgcaacttcggtgccatgtggaatccggcgctgaccagttacacccagaacttcctggacatgggggagcggtccttccggatgctgttcgaacagattcaggccaagcgtgccggcgatgacgcgccgccctcgcaggtcgaagtggtgcaaggcaagccgtgtctgcgtgcctccgaacgcgcgtacggcgacggcgaaatcgcgtagtcgatggggcgtgcgtatcaatcgatagtgactgtagcgcattcatatcgtgacgaggagtctcccatgccgaactgtaagcgcttaccttaaatagttcataatgtgatttacgtcatactaatagatgttctgaatcatagtgttctgcaaggattccttgcggaaaatcgctatttatcaacagttttcgaaaagtccgcatgatgggcgactgtgagcacgctttatggtaatcgctttccgtagtgttattgttacagtgtgacttttgaacaatcggtaactctgaagactcagccccagacctcgggcactatctcagcggcagacgccgcgatgcaatcggcccgcgacgaacgcatccccggcaaactcatctgcgcgatcgtggccgtcggctcactcgcattcttcggcatcctgaccgaaaccgtgatgaatgtgctgttcccgcagctgatgggcgtgctccacatcagcgaggccaccatccaatggctcaccaccggctatctgctggtcgtgtcgattactgtgccgctcagcgcatggctgcgccgtcgcttccgccagcgcagcatcttcctggcggcaacgcgatgttctccacgctgcagcagttcacgggtgcggccggcaccactgtggtgggctaccgtgatctccgtgttccagtccggctcgggcaaggtgggttccgccggctatgccgccgccaccgtgaccggcgcatagattgactacgcgatcatggctgtggtcatcgttatcgtgttcgtcgccatgctccacgccctgcgtaaccggaagtagatggtaagtcgagtggcaccatgctaccgcgcaatggctgggcatggagttttggctaggaatcgttcgacaggcgttggcgcggccgctgagagcattcgcgtgaaaggtttgccggagctcgttcggcgtggaatgggccgattcaccggtgattgttggtcaaacagccaatgctgacccttctgccaatggttagcgaggttcctatcataagcatttcggagagcgatctcgaaaaaggcgacatccttcacgaggatttgaccaaggtcaacattccactcgtataaagtaaggctgtaagcgcatcttggtggcaagagtcaaggtatgtacggaatcgcggggcggaaagccactcctcaatccactgcggattggtaataatggatgattgtaacgcatgaatcacgaggcccccttacctcgtattgcaatgccccggtgacatgaaaaacggcggtcaacacggggcttgtacattaaggatacaggaagggtagttataagttgctgatatgccgttttttacgatagtcatcggcctctcccatacggcggaacaggaactgacggatgccgagatgccgtgattcggcgggaggacctgtactggcccagtccttctgctcggtagcggtaccgctacgccgactcttcccgacgctccagtgccgccgatatcagtgaatgcccagcctgatgttggtagagttaaggctattggcttggtctcgacggtgagacttctccaatggccaatatgcactgttgcaaaggagtatgcggtatgcaaccaatcaaagccattcaatacggctgcggcaaaatggcgaagtacacgattcgctatatgcacgagaaaggcattcaaatcgtcggtgccatcgacgtgaatccggaagtcgtgggcatggatgccggtgtgtttgcaggcatcggccccatcaatgtgccgattcgcgccgatgccgaggctgtactcaacgagtgcgacgcggatatcgcggtagtcacgctattcagcttcgagaacgaaatcgccaccatgtgcgagcagtgcttggcccgcggcatcagcgtgatcaccacctgcgaggaatgcatctacccgtggaccaccgatccggccaccacgaaccgtctcgacatcatcgccaaggaagccggtgccaccatggtcggctccggcatgcaggacatctactgggtgaacatggtctccaccgtcgccgccggatgccacagcatcaagaagatcaccggtgcggtgagctacaacgtcgaggattacggcctggctttggccaaagcgcacggctgcggtctgaccgccgaggagttcgaggccgagcttgcgcatcccgaaaccgtggtgccctcgtatgtatggaattccaatgaagcgctggcccagaagcttgggcttaccatcgcatcgcagacccaggccagtgtgccgtatttcagcgatgtcgacgtgtattccgagacgatggacgagacgattccggtcggcaaatgcatcggcatgtccgccgtggtaaccaccgaaacgaatcagggcatcacgttggaaactgcctgtatcggcaaggtgtacgggccggatgatggcgatatgtgcgattggaagatcgagggtgaaccggacgtggagttccacgtggtcaagccggcgaccgtcgaacatacgtgcgccacaatcgtcaaccgcattccggacgtgctcaacgcgccagccggatatgtgacggtcgatcagctcgatgaaatttcatatctcacgtatcccgccgcgctgtacgtggcatagacccatattttcagggatgaaggccggcactcataagggtgccggccggtatcaggcggccagagtcgacgtgcgtggcatcacctggaactggatatggtcatgggtgatgtcatcgggccgttcatgccgtaggttcgactcgatcagcgtcaccatgcgatcgataaccgtacgagccattgcggggacgtctatcgccacagtgctaatgggtgggttggcgcagtcggagaaggggatgccgtcgaatcccatgagccgtacgtcgtcgggcacgcggatgccatgttcggtgagttcgcggagcgcgccgatcgctatggtgtcagacatgcacaggatgccacaatcgcccgggacaggcgtcaggaccgcaagcagcatcctgctcggcatcggcggcgacatcgccaacttcaaaagcgcggcccacctggccgcccacgccggcatcgctccggtcaccggccagtccggcaccagcatcaaggggcgagagaccctccagacggggcaacaaacgcttatagactattgcgccttgtataaatgcgaactgccagtcaaccttaccgttgactggcagttcgcatttatcgctcccgctggcgggagctgtcatgcgaagcatgactgagggtggtccacagccgccaatccgtaacatcacccaacgcagcatttcacgatacggacgtttccgtatcgtattttcgtgtggccaaatagacatttcgggcgaaaaagttcgaaatacccccataactggccataaaaacaattgcttgagaatcactattgacttttatggcgactcggtatatggacacgcgaaacgaaaatgacatggagcaacggtactgtgtcaacagcaatgaacgaagaggcacgattcccttacgtgcccacaagcaattgaggtgattccggtgacattcaaagccccgctcgatctcacggtccacgctccggacggtatgtatgatcccgccaacgagcatgacgcctgtggtgtgggtatggtcaccactttgaacaagcgtcctgaacgcaaaatcgtcactgacgccattgaggtactggtcaatctcgaccaccgcggtgccgtgggtgccgaggagaacacaggtgacggcgccggcattctgatgagcatgccggatgagttcatgcgtgccaccgtgcccgccgaactgcccgaagccggccactacgccgcaggcatcgccttcctcgaccgcgacatcgaaacctccggtcagcaggaacaggccatcgccaaaatcgtgcgcgaggagggactcgaagttctcgcatggcgcgtggtgcccaccaacccggacggcctcggcctgcaggcccttgccgccatgccgggattcaagactctcgtggtcgcctctccggacggtgctctggccggcgtggacttggatcgcaagaccttccgcatccgcaagcgcgtcgagcatgaggtaggcgtctacttcgcttccctgtccgcccgtaccatcacgtacaagggcatgctcaccaccatgcagctcacccacttcttcgaggatctgaacgacgagcgcatgaaggccaccatcgccatcgtccactcccgcttctccaccaacaccttcccgagctggccgctggcccagccgttccgtctgctggcccacaatggcgagatcaacaccattcagggcaaccgcaattggctctccgcccgtgaaggtcgtctgagcagcgaactgctcggcgagttcgagccgctgctgcccatcaccactccgggctactccgattctggcaccttcgacgagtgcctcgaactactgcatctcgccggccgttccctgccgcacgccatctgcatgatgctgccgccggcttgggagaagaacccggatctcgatccggacgtgcgcgccttctacgagtacaacaacacgcttatcgagccgtgggatggcccggccgacatcgtcttcaccgacggcacccaggtcggcgccctgctcgaccgcaacggcttccgccccggccgctggcagctcaccgacgacggctacatcgtgctggcctccgaggccggcgttctgccggagatcgcgcaggagcacatcgtgtccaagggccgtcttgagcccggcaagatgttcctggtcgacaccgccgaaggccgcatcatccccgatgaagagatcaagaagaccctcgcctcccagcacccgtaccgcaagtgggtggaaggcaactcggtcgagatgagcgatctgccccgccgcgagcacgtgagccactccggacagtccgtccagcgccgtcagcgcgccttcggctacaccgaagaggatctgaagctgttgctcactccgatggccaacaccggtaaggaaccgctgggatccatgggtaacgatgcgcctatgcccgcactctccagccgcagccgcatgctgttcgactacttcacccagaagttcgcgcaggtcaccaacccgccgctggactgggagcgtgaggagatcgtcacctcgctcgaatccgccatcggccccgagcctaacctactggccgattccgagctgcacgccaagaagatcctcatcccgctgcccgtggtcaactctgatgagatggcccagctcaagcgccttgacaaggcccgcatcctcggcggctactatcgcccgtacgtggtcaagggcctctaccaggtcgccggcggcggcaaggccctcgaagagcgacttgacgagatctttgccgaaatcgacgaggccatcgccgacggcaagaacttcatcgtgctctccgaccgtgaatccaaccacacgtggggcccgatcccgtccctgctgctgacctccgccgtgcagcatcacctgctgcgtcgccacacccgtacgcagatctccatggccgtcgaggccggcgacgtgcgcgagattcaccatgtcgcgctgctcatcgcctacggtgccgcctgcgtgaacccgtacctggcattcgaatccgtggaagacctggcccgcaacggctacctcaaggtcgacgcggacaccgccgtgaagaacctcaccaaggcgctttccaccggtgtgctcaagatcatgtccaagatgggcgtctccaccatcatgagctaccgtggcgcacagctgttcgaggctgtg

SEQ ID NO: 1350 - DNA, 25825 bp, Unknown
  R157_18m  MAG No. k141_26393
ccgggcaggaacctggctatgaccataatcgcaccgggcattatttcaatcggcagcgcaacacccgacgtgaacatgataagcaggccgaagacgttggcgaacccgttggcggccgtctccgagaacccgaattcgctgagcatgaacccgcaggcgactgtcatcagcgcgtacacgcaggtcgcgccgaacgtcatcagcactcccccgacgctcagcctcagcggattgagacccgccgccaccatcaggccaaccgacaacaccagatagccaacgcatacggcgagcgcgaatccactcaacgtcagcattcgttggagtcccatcgtcgccatgcgctgcggcgacgaggtgagacgccgccgcacctcgccggtggtgaatgcgctcaggatcatcgacccgcagatggtcatcgccaggaacagcggatacagcgcggtcttcatgatgctgccgaatccgctggcgacagtacccgaagcgctcgccgtcgcctcggtcgaggtgtcgaccacggcgacgtcatggttcacgtctttgtcgcttgccgtttcggcggcctttctggcggctcgggccagatcaccggtatcgggcttttctatttgcccttccggcaacgattccaatatgtcccggtacgcgctcgcatcatccgggcctccggcttgcgctaacgacttgaagctctccggtatatccggaccggccatgccggcgagcgccgtctcgtcgaccgtcgtttgcgcgccgatcaacgcgatgcgggtgagcgagagaaacccgccgacgttcatgcgcgccatggagcctgcgccggacgtgtagctggtgaccgtgtccacgttcggcgggtctcctccatcggccacggaaccggcgaggtcatcggcgaacccgtccggaatgatgacgatcagatccacccagttcgaggcgacggcctgttgcagcgcctcgtcggcgtcgtcgatgtccaccagctcgctggaatccgacatgtaggcgcgcatcgatgtggcgatatcgcccctgtccgagtcgcggtcgatgatggcgacgcgcgttttggccggttcgaacgtcttgaccatggaaccggaggtggaggtcagcatcgcccagctgatggacatcatcagaatgcccatgaatacgaggtagatcatcaggtagatccgatgcgcgaccagtatgcgaagcgtggctttacaggtgttcatagcgttgcctcctcagcattgcgatgccggccgtgaggaatatcgcgctcatcgccagcagagtgatgcaggtggcggcgaacggctggtagctgtcgtagtacaggatgtcgtagaacaggttcgtcacctgctgggcggggttgatggtgccgaggatgggtgcgttgcgggctatccagtcgctgatctgcatcgcgaagtctccgtacaatccggtgaacagcgagagggtgcaggcgatgccgctcgacaacccgtacttcgtgttgtaggagagtttcggtatcgcgccgagcagggtgcccgcggaactggtcatgaacgcggcgacgatcacggccagcaccgccaccggctcccgccctccgagagagacgtcacaggcaaagcgtatgtacgtcaaggcgatgagcagggctcctgcggagcacagccagcaggcgaggaatcccgcgacgagctgtttgacccggctcaggggcgccgcggttcggcgtatgcccagagcggacaggttcgcctgcgctgcgatcaccgtactgatggcgtatcccatggccatcatgcatgacatggccagcagcgcgtaatagtatctggcgatggcattgggactaaagtgcgtgagcgacgtctcgtggatcatgttgatgttccgtccgacatcgttccagaaattccggctgagtgaggcctgcggattgtcggcgatggtctgccgcgtaacagcgtcggtgcggttgtacaggtcgatcgcgctgcgcagtgcggagaggctgatgcccaggttgatgttctgctgggtgctgtcggctgcgaccaccgtcgctcggctgaccgtcatcgcaaggcgcccgttgccgtcgtccgtcagatagccgttggcggtgccggtcgcgagcagccgctcggcttccttcgcgttgtcggccttggtgacggtcaacaacggctggctgatggcggtgcgcggagcgtcggccgacgaggccgccgacgttgatgactccttcgatccggacagcgcgtcgatgaaggtgcgggcgccgcccgcctgccgccagttggcgtcctcgatgacggccatcggcaccggcttgagttcgtatccttcggacagtcctccgaatattccgttgaacatcgtcgccagcacgatcgggaacacggtcatccagaacagtgccgaccggttacgcaagttcgctttcaatgcgaccaggaatgtggtccacatggttttctccttactcgttcccgccagcgggggcaagatggtcagtctctcagcgccttgccggtgagttcgaggaacacgtcgttcagtgtcggcggatggctggtaaggtggccgatgttggcgccggagcgtttgacagcgtcgagcacgtcggtcaggttgtgctcgccccgcctgcatcgtatgttcagttccttgccgtcatagacggcttcgatgacgcacggcagcgctcggacatcagccaacgcggcatctgtcaggtcgagcgtttcgatggtgatgcgctcgcccgtgtcgatcatgttcttgagttcgttggcggtgccgagcgccaggtgacggccgtgatccatgatgaggatgcggtcgcagatctgctcgacctcctccatgtaatggctcgtgtagatcaccgtggcacctgaccggttgagacgacggatgccttccaggatggaattacggctctgcgggtcgacggccacggtcggctcgtcgaaaaagatcaggtcaggcttgtgcgcgatgccgcaggcgatgttgagacgccgcagaaggccgccggaaagctttccgggccggaatttgcggaaatcctgcaatccgacgaattcgatcgcctcctcgaccagcggtgcgcggtcggctttgcccggcacgtacagcgagcagaagtagtcgatgttttccgtgacggtcagttcgttgaatacggccacgttctgcggcacgatgccgatgcgccgtttcagcgcgtatgaggtcggcgtcatcggctggccgaatacgcggatcgtgcccgaatcgtaggtgagcagcgcgaggatgcagttgatcgccgtggtcttgccggagccgttcggcccgagcaagccgaagatctcgccttgcgtcacgtcgaggtcgaaatagtcgagcgccaccatgtcaccgtagcgtttgaccagttgactgacatgcacggccggcactgcgtcgggtgccacatcgcgtccgggggctgtgttgtcggttgccatagccgctcctttctttgatgattacatcatcccaagaaagtgtcggcgatcgccacctgcaaacgtcacgacttggccgcgcacccgtgacatttgtcatcatctcgcggcgccacttgcccccgccagcggggggggcggagcacgctatacccgctcggttgggaaagagtgccgccagatgagtttgcgcagttcctctatgccgaggatcacgaacgggatgcagcacaggtatacgcagtcgtcccggcccgggggcgtggtgtggaacacggtctgcaataccggcacttcggtgatgagcacgagcagcacgatctcggtcacgatgccgatgttgatggtccggttggagaacagacccatcgtcagggagccgccacgcggattatccgccacgatcggcatgttcgtggagttccttccaccgctagactggtattgaaacgaatgacgatccgggaggtgccatgcgcgtgttggccgaggagggtgttctgctcgcgttgggcaccgtgctcgccgtgatgaccgggagccgcaccgatgccgtgttcatcgcggggcttctgctggccgtctccgtcaccggactggtcgaatggctgcatgccgatgaacgatggccgtggttgccttgcgtggcgtatctgatcgtcgccgcggcggtgcccgcatggtgctcgttcatgccgcttgtcgcctacgatatggcgcgtctggctgccgcagggcgcccctcgcggctggtgacggccgtgcgctggctatgggtgttgccgtttgcggcgctgtggttcgtccacgtgtcacatgccggtgtcgcggccggagccgcagatgccaacagccatatgcaggcgctggctcttacgttgaccgcgttgctcggattcgtcgcgggacggtcccgcgaggcttcggatgggaatcggcgtgcgctgttgcacgctcaggatatggcccgtgaagcctcccgttccgtccgctcgcgcatcgccgatatcgatgaggagcgcgcgcagtcggtccgcatggcgacgctcggcgaacgcacgcgtatcgcccgcgagatccacgacaatgtggggcacctgctgactcgtgcgatcatgcaggcgcaggccggcagggccgtggccgaggcgaccgatgacgaggtcgcggcccgtggattcaccacgctgggcgagaccttggacgatgcgatgacgatggtgcgccgctcggtgcatgaccttgaggatgatggcaccgatttcgccgcgcagatcgaagccgccgtcgcctcattcgacggcatctccccggacttctcggtgtcgttggcgaacgacgtcgacacggccccggccccggtgtcacgctgcttcgcgacggtgattcgcgaggcgctggcaaacgtcgcgcatcatagcgaggcccatgaggcgagcgtgacgctgcgtgattttccgacattgtggcagttggtcgtccaggatccagggcccgcgatccgcgcccatgatgcccgtggggagcgccggacggacggggagccgcctcgcggcatggggctcaccgacatcgaatcgcgcgtgcgctcaatcggcggaaccgccctgtgcggcccgtatgatggcggatggcgcgtgttcgtgtccgtgccgaagcaacgttggcatgcatccccgggatcttgcgcgaaaacagaccagccggcattcatgaagacgactgccagcacatcagggaacagagggaagctatgagaatcgcgatcgtggacgacgacccgatcgtctgtcagtcgctggagacgatcctgaccgccaccggcaccgccgacgtgctatggagcgccaacgacggcggcgcgacgattcgcaggtatttcgagtcgccggagaatcatccggatatcctgctcatcgacatacagatgcccggcatgaacgggctggacgccgcgcgggagatcctgacgaaggatccggcggcacgtatcctgttcctgaccacgttctctgaccaggcctatatcgagcaggcgatgcggctcggaacgaaaggctatctcatcaagcaggatgtggcggcgatcgcacccgccctgcatgcggtgatggccggtcaggtggtgctcggcgccgacgtgatcggcaaactcaccgggccgacggccggtgacggatacaaggggccggacgacgcctcggacacggccggcgacggcatcccgcacggccgtcgtacgtctgatggcatcgatcagctgctgaacgaacgggagcgtgacatcgcggcgctcgtcgccgagggactcgacaaccgcgacatcgccgccagactgtatctgagcgagggcaccgtgcgcaaccgcatcagcgcgatgctcgacaagcttgctctgaccaaccgcacccagctcgccatcgcgtggctcaacacccaccgttaggcggcattcccgtccaacgccgtggccgggacggggaaccgctctcagctgttctccatgacgatgttgtcgacgacatcggcgacatgctcgcaatcgtcggtgcacagctccagatgcacgtacacctcgtgccaggcgagcacctgcagcgggtcggtgcaggtggtgtgcaggcggcgcatcgcctctacgaacaggcggtccgcgtcctgctcgatcttgttgatgaagaacacctgctcgcgcagggtcttcgaccgcttgaaccggggtagctcgccgatcagctccgccatcttcccgcatgaacgctcgaccatgtcgaccaggtccagcgcatcgggtcgaatttccagcacgttgtcgtaatacatgcggtgcagggcgccttcgatgcggtcggtgacgtcatcgagcacgctgctcagccgcgcgatgtcgtcccggtcgaacggggtgatgaatgcggtgaccagctcgtccatcatgccgtgacggacctcgtccgccgcctgttcgatgcgatgcatctcgtcgaatcgttccagcagacgatccggttcgtaatggtgcatgacttccgacagcagatgtgccgcctggcatgcataatcggcgctctgcttgaatccgtcgaaatagaacgaatcgtttttcctcgccatatgctgatcctttcttgaaacgatgactgatgccgtgtgccggagcggtgtcagaacaccagcatgaacagttttgccatgacgtagctgatgatgccgcagccggggaacgtgaacacccaggtgagcatcatgtcgcgcacgacgccgaagttgatcgcggacagcctgcgcaccgctccgacgcccatgatggcgctggtcttggtgtgcgtggtggaaacggggatgccgagcacggtcatcaccagcaggcacagcgcactggacaggtccgcggaaaagccttggtatttctccagccggaccatgtcctgcccgacggatttgatgatgcgctcccctcccacgctggtgccgacacccatgatcgtgctgcacaggatcatcagccacactgggatgatcacgcctgcgacaccggtctgcccgctgcagaacgccatgccgaggaacaggacgccgatgaatttctggccatcctgcgcgccgtgcatgaaactcatggccgcggccccgacgatctgcgcatacgtgaagaatacgttggcgcgcctgcggtcaagccccgcgcagatcagcgtcaccagcttgcacacgatccagccgatgccaaatccgagcaggaggctggccgcgagaccatacagcactttgacccactcccccatgttgatgccgccgatgccatcctggatggcgatggcggcgccggaaaggccggcgattaggctgtggctctcggacgtggggatgcccagcagcgacgcgcccacactgtagacaacgatggagaacagcgccgcgcacaacgcgatcagcgcggcgttcgtgtcgccgccgaaatcgaccatgttgctgatggtggacgccaccgaggcgttcagctgcgtcatgatgaacacaccgaagaaattgagcaccgcggccatgatcaccgccggacggatacgtaggcatctggtggtgacgcaggtggcgatggcgttgggggcgtcggtccagccgttcacgaaaatgacgccgagcgtcagcaacgtggtgatggccagcgccggattcgaacatacctgttggatgaaatatgagaatgatacatccaagagagtcatcaccttcttcttcgagggaccgtcatgcggtgggtcgcattcagcggacgtcttgattatatatggagatgactacgtagtgtggatttacccgtcgtgtcatgacgacttgtcggtttgtaggcgatgaccattctcacgagcgatattgtcgcttggtggagcctgacgaaaaaagggcttccggattgctccggaagccctttcagctcagatcctgataagaatcaggcgatcatcactcgttgtcgccagcggtggcggcggtggcggtgacggcgcccttcttgtcggtcttgacgcccgagtacacccagtcggtgtagtccgggtggtcgtagcccttgtcgaccgcgaactggaacgcttcctgacggaagtcctccagcttctggatctcgtcggcgtacttgtcggcgtcgatcatgcgcagggcttcggcggtcagctcgtagcgatccagctcgttcacgcgaaccatgtcgtacggggtggtggtggagccctcctcctcgtagccgtggacgttgaagttgtcgtggttcgggcgatcgtagatcaggccacgcacgtcgtgggcgtaggagtggtacgcgaacagcaccggcttgtcggcggtgaagatgtcggcgaactcctcgtcggtcagcgcttcgtcgttctccttggcggactgcagggagagcagatcagccacgttgacgaccttgaacttgatgcccagggccttcaacttgtcggaagcggccatgatctcctgggtcgggacgtcgccggcggcggcgagcacgacctgagcctcatcgttggtcttcgcggtggaagcccaatcccaagcggcggcacccttggcgagctcggcacgagcctcgtccagggtcagccaggtggcggccggctgcttgccggcgatgatggcgttgatcttgttggtggacttgtagcacttctcggcgatggccagcagcatgttcgcatcggtggcgaagtagatgccgatgacgtggtcgttgtggaagcacttgttcagcaggacggaggtgacacccgggtcctggtgggagaagccgttgtggtcctgacgccaaacgtgggaggagaccagcaggttcatggaggcgatcggcttgcgccacggaatctcgcggacggtagcctcaagccacttggcgtgctggttcagcatggagtcgatcacgtggacgaaggactcgtaggagctccagatgccgtgacgaccggtcagcaggtaggcctcgaggaagccttccatctggtgctcggacagctgctcgacgacctggccggagacgtgcatgtgctcgtcaacctcgtcggagatgtagccggcgtcccactgcttgttggtgacctcgtaggaagcctgcagacggttggaagcggtctcatccggtccgaagatgcggaagtcgcgcgggttgttcttgatgatgtcgcgagtgtagacacccagacgacgggtggcctcgagctggccccagccgtggccgtactcagccacttccttgacctcgtagtcttcaaggttcggcagcttcaggtcgtcgcggatcacaccaccgttggcgttcgggttggcaccgatacgcagctcgcccttcggcatgaaggcaaggacgtcgtccttgacagcgccgttggcgtcgaacagctcttccggcttgtaggactcgagccagttcttgaggacctcgaagtgggcctcggtgtcgcgggcggaagccagcggcacctggtgagcgcgccaggagccctcggtcttcttgccgtcgatgtacttcgggcaggtccagcccttcggggtgcggaagatcagcatcgggtagaacggacggtgcacgttgtcggtctgagcggtggccttgatgtcgcagatctcatcccagatggtctcccacagctcggcgaagcgacggtggatggacatgtggtcctcatcatcgaagccagcgacgaactcgtagggctcgtaacccatgccgtggaagaactcgtggagctcttcgtcggagatgcgggacaggatggtcgggttggcgatcttgtagccgttgaggtgcaggatcggcagcacgataccgtcggtgcgcgggttcacgagcttgttggactgccaaccggtagccagcgggccggtctcggcctcgccgtcgccgacgatggccgggacgaacaggctcgggttgtccatgatggcaccgtaagcgtgggacagagcgtaacccagctcaccaccctcgtggatggagcccggggtctccggagcgaagtgggacggaataccgcccgggtaagagaactgacggaagaacttctgcagaccagcttcgtccttggtgatcttcgggaaggtctcagtgtaggtgccgtccaagtaggactgggaggtaccggccgggccaccgtggcccgggcccatgatgatcacggtgttctggccgtggtcagcaatgaaacggttgatgtggccgatgaggaagttcaggccaggggtagtgccccagtggcccaccagacggtgcttcacatcttcgcgggtgaagggctccttcatcagcgggttggaacgcagataaatctggccgatggaaaggtagttggcaacgcgccagtacttgtcaacgccttcgagggcttcctcggaaaccggagcgttgagcttcttccaaggggtgccaataacaggactcgtcatgtgtactcctgtactcctgcacgtgatcgtgcgattgattatttctgttcggtcacggttcctgacccttgcggtgccaaggttttccgttcccaatcaatcgtcatggtacgaggacaacgcgacttttgaacgatttcttgcgggtgtgttcgaaattgttgcggaaatttcagtatttgtgcggttcaactgaccgtttgtcaacattagttttttcaacatactttttcagaacggcggaagcatgcggaaatctagcatctggctagaacagcgcacgttcgatttcccatgttcgaaatcggcgtgttgtccgactacaggcatgtagtttgttcgatttgcgcacatagtccctgcgtgtcggccttgtcgccttgaccagtgataatcaggggtgttcagcccacgtaaaattccaatgaacgttaggggaatatcaatggcaaacggtcctgtgcttgtcgtcgacttcggcgcccagtacgcccagctcatcgcccgccgcgtgcgcgaggcaggcgtgtactccgagctggtccctcattccatgccggtcgacgagatcctggccaaggatccgaaggcgatcatcctgtccggcggcccggcctccgtgttcgagcccggcgcgccgaccatagataccaaggtattcgaatccggtgttccggtgcttggtatctgctacggcttccaggtcatggcctatgagctcggcggcaaggtggataaggccgctctcggcgaatacggcaagacctcagccaccatcgacgacgccgacggcatcctcgccgactcccccgccgagcagaccacgtggatgagccacggtgtggcggtcgaacaggccccggccggcttcgaagtgctggcccacaccgaaggcgcgcccgtggccgccatggcggacgaatcccgcaagctctacggtgtgcagtggcacccggaagtcaagcactccccgcttggccagaagcttatcgaaaacttcctgcaccgttgcgccgcgctgcccaacgactgggacgcctcctcgattatcgaggatcaagtcaagaagatccgcgagaaggtcggcgacgccgaggtgatctgcggcctgtccggcggcgtggactccgccgtggccgccgctctggtgcacaaggccatcggtgaccagctcacctgcgtgttcgtggaccacggcctgctgcgcaagggcgaggtcgagcaggtcaagcacgacttcgttgccgccaccggcatcaagctcatcaccgtggacgcggccgacgacttccttgaggccctgaagggagtctccgagccggagcgcaagcgcaagatcatcggtgagaagttcatccgcacgttcgagaaggcccagcgccaagtgcttgaagaggccggcgcgcgcggcaaggaagtcaagttcctcgtgcagggcaccctctaccccgacgtcgtcgaatccggcggcggcgacggcgcggccaacatcaagtcccaccacaacgtcggcggcctgcccaaggacatcaagttccagctcatcgaaccgctgcgcactctgttcaaggatgaggtgcgcgccatcggcaccgagctcggtctgcccgacgaaatcgtctggcgtcagcctttcccgggcccgggtctgggcatccgcatcatcggcgagatcaccaaggagcgcctcgacctgctgcgcgaggccgacgccatcgcccgcgaggagctctccaaggccggtctcgaccgtgacatctggcagtgcccggtcgtgctgctcgccgacgttcactcggtgggcgtccaaggcgacgagcgcacctacggctcccccatcgtgctgcgtccggtgagctcggaggacgccatgaccgccgactggtctcgcgtgccctacgatgtgctcgccacgatctccacgcgcatcaccaacgagtgccgccagatcaaccgcgtcgtcctcgattgcacgagcaagcctccggccacaattgaatgggagtaattgctctctgtgacgaatgggattctccatcggggaatccctttttgttgccgacgatgcccggtataatttttccgcttacgacgtcgtccggaaagggatgccgacctctttgcgccagggattcgacaacgaaaaatacatcgaactgcaagccgccaacatctcaacagcgtgaaccgacgcttgcactcggatgaaacgctgattgcattgtcaatcaccagcgccaccagtcctgtggccgctcgcgtcatcgacgggctcaaacagttgcagggctgcgacgcctttttctccgttatcatctcatccacggacgaggcgttgtatcgcaaactcggcatcaacgtgtgctgcgaaccgaagtacgaacgggtgagtctgtatcaccggtaaacgccaccggtaagcgcggtatgccgcgaatcgtcaagccggtaatcatgcagcatgcggcctgacgattcgctgctgtcgcattgtctctcccctctaccatgctgggcttgttttccgtttgttggagagaacgggggatgccattagcactacggtgagagaaggattatccgtgaatcggttcgtgggtctagacggtattaaaggactggcgctgatagccattgtgctgtaccactgcatgcagcaactgctgccaggcggattctacggagtcgacgtgttcttcaccgtctctggattcctgattgccgtcagtttgattcgttctctggcgaaaaccggatcgctgaatctcgtgcgatatatccccaagcgtgcagtacgtctctatccggcgctgtttctgctgattccggtcaccgtctccgtcggctggctgctcgatcacgacattctagtttccatccgcgatcaggtcatcaccgtgctgctgggctgctacaactggtacgccattgccggaggccaaagctatttcgaccaaatgaacccgcaggtgtttcgccatctgtggttcattggcgtgctcatgcagttctacgtcatcgtgccgttcatcgtctggctgatgtggaagctccgccagacgaaactgccctcactcatcccactgggactcgcggcgttcagcagtatcgccatgtgggtgatgtacgtgcccaagggcgaccccacccgcgtctacttcggtactgatacccacagcatgggcctgatgctgggtgtggctctcgcctggtgggtcaccgctcctcagttgggccacgctcgtcagggagctgtgccgatgccccgcaccattagatcgagcgcttcggccgccacgtaccgggctccgttacctcagattcctgtaaagcatcgcatctggaatgcgacggcaccggtattggcattcctcagcctgattgccttggtcaccatgacggttatcggcaaacaggatgcattcgccttccgcggcggcatcatattgtccagcctgttgtccgtgctgctgattgccggtaccatctccgacgattcctggatgcaaagcctcatggtgttcaagccattggccgccctcggcaagtattcgtacggcatttacctgtggcactggccgttgtggattctttccagcgcccttgccccgaagatcttcaaggcagcagggccttggcctctcatcatgaccgcgttgctcaccgccattgcggtgatgatttcctggctgatggtggagaaaccggcggcaatgcactcggtgatatccgtcgtggtgccccttcgcacgaacaagaagaatcatgcggcccgggttattgccgttgacgttatcctggcgctgtcgttggtcggctgcgcgcagggcattactcatgcacctgcgaaaaccgccatgcagatccagctggagcaacaggccgcacaactggaacgcatacagaaaaccgaacacgtgctgctgcgccatgccgtgccggcaccgcccaagcccaagcatgagatgcccaccggcgatcagattaccgccataggcgattcggtgatgctggcctcatcacagggcctttcggaagtcttccccggcattcagaccgacgcgagcgtttcccgctccatcatggtcgcccccgaactcatcggcaatgatctgtccgccggcagtctgcggcaatgggtgctgatcggccttggcaccaattcggcaatcacccctgatcagctggaccagattcgtaatatgatcggccccgaccgcgtgctggtactggtcaatgcccacggagaccgtacgtggattccacctaccaaccaggtgcttgccgactatgcggccgcacatccggacaatgtggtgctggtggattggaatgccacagccaacgcgaacgcgcaggtgctcggctccgacggcatccacccgagcatggatagcgatatctatgcaaaggcggtcaaacaggccatcgaacaatggatcgcaagcggcaggtgaacggcaggcaacgctgagttgtccaacaggtcgtgaagaacggctatgctgaagactgcatcaacgagaccgcacgttgggagacatggtgagcgcaatccttgaagggaagcccgataagaatcttattctcgttacgggaaggattcatccgaaattggctgaggatgtcgccgagcagctcggcatcgacgtccttgaaaccaccgcatacgatttcgccaacggcgagatgtacgtgcgctacaccgaatcggtgcgtggcgccgatgtgttcgtgctgcaaagccactacaaacccatcaacaaggcgatcatggagcagctcatcatgatcgacgcattgaagcgcgcctcggcccgttccattactgcggtctgcccgttgctcggctactcccgtcaggacaagaagcaccgcggccgcgagcccatctcctgccgtctggtgttcgacctgctgaagaccgccggtgccgaccgcatcatgtcggtcgatctgcatgccgcgcagtcccaaggcttcttcgacggcccggtcgatcatctggtggccatgccggtgctggtcgactacatccgtgatcgtttccaaggccatctcgacaacgtcgccgtcgtctcccccgacgccggccgcattcgcgtggccgagcagtgggcgcagcgtctcggcggcggtccgctcgctttcgtgcacaagactcgcgacatcacccgcccgaaccaggcggtcgccaaccgtgtggtcggcgacgtcgccggcaaggactgcgtgcttgtcgatgacctgatcgacaccgccggtaccatcgcgggcgcatgccacgtgctgcaggacgcgggagccaagtcggtgaccgtggtcgccacgcatggcgtgctctccggcccggccatcgagcggctcaagaactgcggtgcgcgcgaggtcgtactgaccgacaccgtgccgattcccgaggaaaagcgctgggatggcttgaccgtcctgtcgatcgccccgctgctggccagcgccatccgcgccgtattcgaggacggctcggtcgccgaactgttcgacacctaccccgagcaccacggtcaaggcttcctgttcgcctgatcacgtgcgtgtttgttcaaggaaagcacacgatgcgagacgcgacatggcgtagtctttcggtaaataccgacagtatggtataaatgaacacttgtgggccgaaagcccacgactcccccatggtgtaatggcagcacacgggtctttggaaccctttgtcttggttcgagtccaggtgggggaacggctgacggccgctcgacatccgggcggccgtctattgttttgaggtgtttccaccctcaatagacattccgatcgaagggaatacgtcagttatggcattatccgcagccatcgtcctcgccgccggcgagggtacccgcatgcgttccaacaagccgaaggtgctgcatacttttgcaggcaagaccttcctgaacagggtcatggattcggtgaccgccctgaaccccgacacgctggccgtggtcgtgcacttccaggccgagcgcgtcgccgaagccgcccgctcctatgacgagcaggtcaccatcgtgaaccaggacgacattcccggtaccggtcgcgccgtgcagtgcgcaatggcacagctcaccgaggctggcaaggtcgatggcccggtgctgatcgccgcctccgacatgccgctgctcgacagcgagacgctgcaccgcctggtcgaattccacaccgcctccggcaacggcgccaccgtgctcaccaccatcctcgatgacccgaccggctacggccgcatcatccgcgatcgcgaaggcaacgtgctgcgcatcgtcgagcagaaggacgccaaccgcagcgaactcgccgtgcaggaagtgaacacctcggtctacgtgttcgaggcttccgtgcttaccgaggcaatcgccggactgaagtcgaacaacgcgcagggtgagttctatctgaccgacgcgctggaaaccgccaaggccgctggcaaggtcggcgcgttcgccgctccggatccgctcaccgtcgaaggcgtgaacgaccgcgtgcagctggccgcgctgtccaagacctacaaccgccgcgtctgcgagcgctggatgcgcgacggcgtgaccattcttgacccggaaaccacttggatcgaggacgatgtccagatcggccgcgacgccaccatcctgcccggttccttcctgcaaggccacacggtggtcggcgaggacgccatcgtcggcccgtacaccaccctcattgacgcaaccgtggacgaaggtgccgtggtcgagcgttcccgcgtgcaggaatcgcacatcggcgcacgcacgaacatcggcccgtggacctacctgcgcccgggcaacgagttcggcgaggatgccaaggccggcgcgttcgtcgaaatgaagaaggcgcacatcggcaacggcaccaaggtgccgcacctgagctacgtgggcgacgcccagctcggcgaccacaccaacatcggcggcggcaccatcaccgccaactatgacggtgtgcacaagaatcgcaccaccatcggctccggctgccatgtgggcgccggcaacctgttcgtggccccggtcgaggtcggcgacaacgtgaccaccggtgccggctccgtggtgcgccacgccgtgccgagcgacacaatggtctactccgagaacacgcagcacaacgtcgagggctggaagcccgcctgggagcgctgaaccatgcccgcacttcaggattccatcaacgccgtccgcgtggccgccgaggccgcagaccgtatcaaggccaccgacatcgtggccttcgacgtagccgacctgctcggcatcaccgacatcatgatgatcgccggcgcctccaacgagcgtcaggtactggccgtggccgaggaaatcgaaaaggacctgttccttaagtgctccggccgtcagccgcgctctcgcgagggcctgaccgagggccagtgggtgctgcttgactacggtgatttcgtgattcatgtcatgcacgaagaatcgcgcgaattctacgggctcgaacgactctggcgcgactgcccggccatcgatcttgaactcgcacacccggaaacggcggagcatgcggacgctgctgccgtcaccaccgcgtaacgtgcgaatcacataacgctgatattcgctgatactcgctgatattcgtgtgtcgggctgcctgttgccgaacgtcattgacggcaccaggcagccctcccttttccctgtttcctcactggaatcgaaaggatcgtcactatggccaatcatgttcgttccattttccttatccgtcatggacgcacttcctataacgccgctcacaagctccaaggccaggtcgacattctgctggacgccgtgggtgaatggcaggtcaagcagaccgccgcggccttgaaaagcctgtacgtcgatcgtcggccggaaatcaaccaccggttcattgtctgctccgatttgaagcgtgcgcacgccaccgcgcaggctttcgccgacgtattgggtggaatcgagcccgtcgatgatcatcgcgtccgtgaacgcagcttcggcgactgggatggccatgccgtggctgaactggccgaacgctaccctgaggacttccgttcctggatggagtctcggggcggtgaactgaagtatggtgccgaacccaaggaagccgtaggcaaacgcggtgtggaggctcttgaggactggtccacgcgtgccggagacgacacggacctgttcgtgttctcgcacggcgcatggatcgcgcagacattgcagaccctgttgggcatttccgcgatcgatccgaccttctccacggtggtctcattgcgcaatgcgcactgggtgcgcttggtgccgatggacaatcccgatggcactgtgcgctggcgtctgctggactacaatcacggtccggccatcgccgacaccgacgaatgggaacgcgaacgctgatcatgttcccgactcccctgctaatccaataggtccggtgcattcggaaccgttcaagcaataactgaatggctcaatgcctgaataatggcggaaacaagccaaaaagtgtcgccaaatcacacttttgtcatttggcgacacgccggattttgccagaatcgacatctcgtcgtaatgtatacgaggtccgaacaacgggccaacaattgaaaacggggctatagcgcagctggtagcgcatctccatggcatggagagggtcgggggttcgaatccccctagctccacgacgaagccatcaaatcggatgatatggtggtttctccgctggttcgtggcgggtcttgtgactcccatgaatcggatagcttcactcggggctatagcgcagctggtagcgcatctccatggcatggagagggtcgggggttcgaatccccctagctccacaatcaaggccggtgcttcacacaccggcctttttcgttttctatcctatcgggcgacttttgtgcaacattcccgggaatgcgtcgcaaaacagggactggaatgcatgcagtgcgatactttccccggaaagtatcgccaaggggacgctcttccgattggcgcgacaccggcgtgagagataacagtaatcgccactacaatgaggtgtggtccctatcgtgttgatcatcaaaggagacaaaaacatcgtgaccgtcacccgtgtatatatcgccagccctgaaggcgccaatggccgcaacgtcgtcgcttacggcgtgctcaacgcattgacttccaagtacaagaccatggtgttccgccctgctgtgtccaaccatgacgaattcaccccgatcctgctcgccgcttccaatgccggactcggcgtggccctgtccaccggcctcgatgtgcataaggtgcgcgccgacaaggacaccgcccgcggagacatcgtcggcgagttcaactacgccatggaggtctcccgcgcgaacgccgccctgatcgtcggcaccgacaaatcccacgtcaacgacccgaccacctacgagttcaacgcggacgtcgccgccgatctgaaggccggggtgttcctggccgtgtgcaccatcgaccgctggccgcacgagctcgacgagaccgtcaagctgtccatcgagggcatgcgcgccgcgggcaatacggtgctcggcatcttcgtgaccggctgcgagccgcgtcacgccttctccgtcaaggagaccctcgccaaatacggcctgccggtctggactttgccgcaggtgcccttcaccgacgaatccaccaaggacctggcccttgagaccttccgcaagcacgctcccatcgacgaggtgctcgccgcgctcgatgtggacgtcaccgcgccggtcacgccgtacgccttccaattcgacctgctcggcaaggccaagagcaacaagaagaccatcgtgctgcccgaaggcgaggaggaccgcatcatcaaggcggccgattacctgctcgaacgtgagaccgtgaacctcatcatcgtgggcgacaaggacgccattttggcccgcggcaaggaactggggctgaacagtctggggcgcgcccgattccaggccatggacgacgagaacgtgttgaagcccatggtcgccaagctgtgcgagttgcgcgccaagaagggcatgaccgaggagcaggcccgcaagcaactgaccgacgccagctacttcggcaccatgctggtggtgctcggctacgccgatggcctggtctccggatccgtgaattccaccgccaacaccgtgcgccccgccctgcaggtcatcaagaccaagccgggccagaaactggtctcgggcgcgttcctcatgtgcttcaaggaccatgtggccgtgttcgccgactgcgccatcaacctcaacccggacgccgagcagctttccgaaatcgcgttgcagtccgccgagaccgcacgtgccttcggcatcgacccgaaggtcggtatgctctcctactccaccctcggctccggcaagggcccggacgtggacgtggtcgaggaagccaccaagctgctcaaggagaaggctccggatctgccggtggtcggttccatccagttcgacgccgcctggtcccccaccgtggccgccaccaaggccaagggcaacgatgtggccggacacgtcaacgtgttcgtcttcccggacctgtgcgccggcaacatcggctacaaagccgtgcagcgctcctccggcgccttggccatcggcccggtgctgcagggtctcaacaggccggtaaacgacctgtcccgtggtgcgatggtgcaggacatcatcaacaccatcgccctcaccgccatcgaagcgcagtgagcccggcttagctcccgccagcgggagccactgtaatgcttattttgtagcaagcaacgagtaatctaatcaacggtaacccgtgtctcacgggaacattcaatcacaatggaggatgcccacaatggcgaaaaccgtccttgtcatcaattccggctccagctcgatcaagtaccagctggttgatctcgaatccggcgaaggcctcgcttccggcctcgtcgagaagatcggtgagccggtcgacggccactacaagcacgagtacaacggcgaaaagcacgagcttgaagagccgattcacgaccacgagcagggtctgaagcgcgtgctcggcttcttcgaggagtacggcccgaacctgtctgaggctggcattgtcgccgtcggccaccgtgtggtgcagggcggctccatcttcccgaagccggccctcgtgaccaacaagaccatcaaccaggtcaaggatctggccgtgctcgccccgctgcacaacggcccggaggccaagggtgccgaagtcatgcgctccctgctgccggacgttccgcagatcttcgtcttcgattcctccttcttcttccagctgccgaaggccgccagcacctacgcgctgaacaaggaaatcgccgatcagtaccacatccgccgctacggcgcccacggcacctcccacgagtacatctcctccgtggtgccggacgtcatcggcaagccggctgaaggcctgaagcagatcgttctgcacatcggcaacggcgcttccgcttccgctgaggtctccggcaagccggttgagacctccatgggtctgaccccgcttgagggcctgatgatgggtggccgtaccggtgacatcgacccggctgtggtcttccacctgatccgcaacgcccacatgaacgtggacgagctcgatgccctgttcaacaagcgttccggcatgatgggcatgaccggctacggcgatctgcgtgaggttcaccgtctggtgtccgaaggcaacgaggacgccaagctggctctggatgtctacgtgcaccgcatcgtcagctacatcggcaactacacctaccagatgggtggctgcgacgtgatcaccttcaccgctggtgtgggcgagaacgacgacgtggtccgcaagatggtgtgcgacaagctcgctccgttcggtgtcaagctggacgaggagaagaacgccacccgctccaaggaaccgcgcatcatctccactccggactcctccgtgatcatcgccgtgatcccgacgaacgaagaactggccatcgcccgcaagtccgccgcaatcgccgaggctggcaccgatacctacggcaacaccttcgccaagtaagtaaccgccgttaggcatctcactaatctctagttgcaacactatgggggctgattccgattggaatcagcccccattcgtatatggtcaagagaccactacccctgcgtcatactcccctcagtcgcctccggcggacagatccactcagagaggggatccaggccctataacttggctcccttctctgaggggagctgtccgcgtagcggactgaggggagttccaccagaacacaggaccccttactgcctcagcatgccactccacataccgacgaaatcaggcaaggtcttgcgcgtggtggccacgttgatgacctcgatatcgggaatacgcagccccagcatcgcggcgaacgtggccatacggtgatcagcataggtttccatcacggcaccgtgcaacgtctccgccggcaccggttcgatacgcaatccatcaggcaattcctcagccgctcccccaacacgacgaatctcgttgaccaatgcctccagacgattcgtttcgtggccgcgcaggtgaccaataccaaccatgtctgtcgacttatcagcaaacaccagaatcgccgccaacgagggcgcaatctccccggccgccgtcaaatcgaacgtacccagcccacgcacggtgccgtcaccggtcacctcgcaatagcgcacgccgccgatggtcgggaacgatacttcggcacccatctgctccagatatccgggcaacaggccgcccggctgggtggtggtttcaggccaatgaggcacccggaccgtgccgccggcgatcaatgccgcgccgaggaatggcgccgcgttcgacagatcgggctcaacggtcaccttgctcggcagttgcattgcgcgcggttcaaccgtccatgtgcgggcggattcgtcggcctcaaccgcaccgccggcaccggtcacatcggccacggtcatgcgaatgtgcggcaggctcggggtcttctcccccgtgtgcgcgaggtgcagaccgccaggcagtttggaactaatcagcaacaggccggagatgaactgggaagaaccggacgaatcgatgctgacctgcgcctgggcagccggcaaggttgcaggcggcgtaatagtgaacggcagacggccaacctcgccgtggtaatcaaccgttgcacccagctgttccaaaccgtcaagcaccggcttcatcggacgtgcataagcctgttcgtcgccatcaaaattcactgggccatctgcaaacagggcaaggccgggcacgaaacgcatcaccgtgccggccagtccgcagaacacattgacgttgccatggaatcggccggatacaggaggagtaaccgttacggtggtatcggttgcggaatccacgtcgcagcggacaccgagggcttcgagtgcgcccatcataaggtccgtgtcgcgcgaacgcagcaggccaatcagagtaacgggcttgctgccgagggcggcgagaatcaggtagcggttggatagggacttgctgcccggcaccgttaccgtagcgttcaacggctgtgcggcgagcggggcaggccagagattcgtgagtcgttcagtcataaggccaaatctatcaaacaaattattcaccggtcggcagcgatgcgggattcgatctgctgatcaggtgcggaagacggctgctcaaaaccgccttcgatggcctgcgcgtgcaacaactgagcggccgcgcgatcggcctcgatggcggcgatctggcgcgagaacacgatgaaccagccgaggaacgccagaccagccaacgcctccacattggtgagggtgttgtgacccatcatcatattgacccagaatgcagcgcatacgagcgcggtcaggtcggaggccaccatcactgctttggacaggcgtggcgcaagccacggcaggagcacgaacagcagcagcatgacgaacggcaggcctttggcgcatatattgtgcaagagattgtgtggcgtgtaccgaaacacgccgatgccgatgaatgccaggccggccaccatcagcaggaaggacagaatggagatgcgcagcatgaaatgtgggatttcgtagccgcgattcggatctctgttggtgcggtcgtgccagaggcgctgtagccgttcggtggtcaccagttcggagatggcgaagtagctgacgatgatgatgcatgtgccggcaagaatcagcgtggagttgaacatacgggccgcaaacgtggttctgtcgccgagctgcgaaaagttgttgtgataccagtatgggtcgtcggtggtcatgccggcggtgaccacgccggagatgacgaagaacggcaacagactggcaatagttttggcgttcatcatctccgcctgtacaaaggtcatgtaccccaccacgccggcgaaggcggcgcagacgctggagatatagccggagaagatggcattgcccatcatgtcgttggccgcaccgatgagtgcaaaagacgacaggaaaatggtcgaggcatacactaccgaaagggcgacgatttcgaaaatgcgacgaatcggcgcaaaccaaccatgtttgaggttcaatgaacgtgatttgcgcgcatagccaataatgaaggaaatgacgccgcatgccgccacgatgcccgaacataccatgaatcggcgttgcgtcagctgccagatggccggcgcgtattccatgtacaggttcatcgataccgcgccaatgatggcgcaaatcaagaaggagatgagtccggaggtttctgcacgctgatgacgtcccatgccgggcctcccctatctattcgatgccgcgttatctttcaacaacaaacaaaactccccccgaggacaacgctttactagcaagccagcgggatttggctgtcgccattctactgaaaatctgaaacactacaaaaaaaaacgattatgtacgggcttcttagcctttgcgactatcgttaccgccttgccgagtaccgttgttcatgcagaaagaaagcagtattggacacaatcgaatgagcgtggataacgcccgattttttgcgcactttcggattccgggtctgacgtaagagggcatggcccgcgtcctgtgtacgattttcattcgccaaaacaaaaaaccgcgattggaagccaggagacggaaccaagacccttgaaca

SEQ ID NO: 1351 - DNA, 12266 bp, Unknown
  R157_18m  MAG No. k141_26434
tcacagcttgtataatcacgattatactaatcgtgatacaataaatcgtgatgcgatagaaatacgccggcgtatggcataaaggaggcgggcagcatggcattcatcggacgagacgatgacctcaagcaactgcaggaatgtttcactgagcgtagggcacagcttgtgttcgtctacggccgcaggcgcgtgggaaaaacagagacgcttattcaactcgcaaaagacaaggaaaccttattcttcgcggcgcagaatgccactaaagatgaacagctggcatcgttctcccgtctcatgttcgaggcgggtgccccgggcaaggattatctgagtcaatatccttcttgggaaagggcgttaaccgagttaacccggctgccagagccgagcgatggcggccgcaggcttgtgatattcgatgagtttccttatctggtcaaatctgatccgtcattgccgtcagtgctacagaatctttgggaccacacgttgcgtcatgcaaatctgatgattgtgatttgcggcagtgccatgagcttcatcgaaaaggagctgttgggagaaaaatcgccgctatatggtcgtgcgaccggcatcctgaagatgctgccgatgccatattgggatgcagcgcaattcttccccaactatagtagcgaggataaggcgctggcctacgcaatactgggcggtatcccgcgttacctagaggaatttgacccagatgagaccatagacgcaaatgtcaagcggcatattctgagacgcattgctccgctatacagcgagattgaatttttgttgcacgaagaactgcgggaaactgcgaaatataacagcgtgatacgggcgatcgcgctcggcgcaacttcgctgaatgagatcgcgacacacacgatgatggcaaacgcaacagtatcgtcgtatctcgccaatcttatggaactggggattgtggaacgtgagttcccagtcacggcgaagcctaaggagcgggcgaaaggttcgcgtgggctgtatcagctgagcgacaatttcttccgattctggtattcgtttgtctttccgtatcgttcggaattggagcggggcgatgtggaaggcgtatacgagcgtcatatcaagccggtattacatgattttgccggcaaaccgttcgagggtctgtgccgtgaatggatgtggcgtgagagtgctgctggacggttgcccttccgtgcgcgtgcggttggccgttggtgggatcgtcaggatgagatagacgtgatggccgttgacaatgcgtctgatgctgccattgtgggcgagtgcaaattccgcaatgcgccggtggaccgttccgtgctgaatctactgcgagaccgtgctgcgcgaaccggtatcggccagcgaacatacctgctgttttcgctcggcggtttcgatcaatcactggtcgacgatgctgcggcgtctcaatccgacgttcagctcgtcggcatcgatgagctgtttcatgaataaatcccatttgcgaatagctctcactgagtgctcatcagtgagagctatccgcaaatggagccttacttcttcgcctgagtgagctggtaggcggcgaagaggatggccagccagatcacgccggcgatgacggcgatgcggtagctggtggagaagcacatcagcaccacgaccagcgccaggaacgccagcaccacccacggggtcaccttggcaaacggcagtttgaagtgaatcgcgtccagtgcctcctggccgctcagaccggccagctcggaatcctcgggagcgccgcccgcggcgaccaccttacggaacttcatttcggtgagcatgatcatcgtccagttgatgatgccggcaatggtggcaatcgacatcaggtagttgaacgcgaactcaggccacacgaacaccacgaccacggcgatggcggtgatcgcggcggacgtcagcacgccggccactggcacgccgcgcgagttgagcttgcccaagtaagcgggcgcattgccctgcttggccagcgagtacaacatgcgggagttggcgtacaggccggagttgtagacgctcatcacagcggtcaggcacacgaagttcaaaataccggcagccgcgtgaatgcccacggaatcgaagatctgcacgaacgggctggacttgccatcgatggtgttccacggcactacggccatgatcacacccagagcgccgatgtagaacacgaggattcgccaaataatatcattggtggcgcgcggaatcgtggtcttcggatcctcggtttcgccggcggtgatgccgatgagctcggtgccgccgaagctgaacatcaccacaaccagtgccatcagcaggccggtccaggaaccgtcggaattctgccccatcaggccgttcgggaagaagccgttacccacggtgaaccagttcgcgaagcttgcgcgcacgccggatgcggtgggcaggacaaagatgatgacggccaggccgccgataatcatggcgatcacggccacaatcttgatgatggcgaaccagaactcgaactcaccgaatttagagacgcccagcaggttggcggcgcagatgatcaccaagaacacggccgccgatacccatgtcggaatcgccgggaaccagtagttcacaaacgaacccaccactgatagctccaccatcgagacgaggatgtagttgaaccagtagttccagccggaaataaagccggcgcgcttggaccagtagcgggtggcatagtagctgaacgcgcccgccttcggatcctcaacggacatttcagacagtgcacgcacaatcgcgaaaatcgcgaggccgccaaccaagtaggcgagcagaatcgagggtccggccagcgcgatggattcactggaaccatagaacaggccggttccgatggcgccgcccagcgcaatcagctggatgtggcggtttttcaatgacttgcgcagcgtggccggcaccggcacgtcgtcggtttcgcgcggcttcttaggcgcatcagtagtactcattgtgctcttctctcacatttcttgggtttggcgcacgcggggcttgccgtgatgcgcaacgttcgttattctatgccgccgtatcgtctcagaaatggtcaatcgtctatttgtgcgctattgcaagcgcgggcgtgggcgcggccggtgagcaggcgaagctatagcgagcgatgcttatgaaaccgcacgcttcactgagttcactgagttcaccgaattcactgtgctcactgcgtggcaggcatacacatggtgaagatggtgtgggacaccgattcgggagaggccgcgagatcggtggcgagccaatattgcaaaagcccaatgctgccggacacggcgaatcgcatacgcatctgcgcctcggctgggtaacccgccgaagattgcaactgttcgcctacaccgcgctggctgtaaatcaatcccagcagctgctgctggaaaccgatatccgctttcgggctcatcagcacttggagatgattgcgattgtcggcaatgtactggcagatgcgctcaataacatgctcgatgccggcaggatctggctgggcgagtagctgttcgagtgcggtggtgacccaggccatggtttcgtcttcaatgtcgtgcagcagttcctcgatgctcgcataatgcgcgtaaaacgtggaacgattcacatcggcccgctcgcacaacgctttaacggtgatggagccgagcggctgatcgcgcagcaactcgataagcgcgtcctgcatggcacgtctcgtgtagcgggtacggcggctttccgtcaattctttggccatggccttctccccaagttccgacaacccacaatccaactgttggttgcagaaccgacacagtgttgttttacttgagtatagcaggaagttctggcggggcctatggggctaggtggctgccacgagcgcgttggaggtgtgcgatggcgtatatcgaattcgaccatgtggtcaaggaatatccttctggcagcagtgtgattcgcgcgctcgacgaggccagcttcaccgccgaacaaggcgaattaagcgtgattctggggcagtccggtgccggcaaaaccacggcattgaacattctgggcggcatggataccgccacaaccggccgcgtagtggtcggcggacgcgatattacgggtctgcggaaaaaggaactggtgacctaccggcgcaacgatatcggcttcgtcttccagttctacaatctggtgcctaaccttaccgcgctcgaaaacgtggagctcgcctcgcaaatctgccctgaccatttcgatccagaggaaacgctgcgcaaagtcggactgggggagaggatggacaacttccccgcgcaactgtccggcggcgaacaacagcgtgtatccatcgcccgcgcgattgccaaaaagccgaagctgttgttgtgcgatgagccgaccggtgcgctcgattacgagaccggcaaggaagtgctgcagttgctgcaggatatttgccaaacacaaggcatgaccgtaatgatcatcacgcataattccgcgcttgcaccgatggctcacaaagtgattcgcttccgctccggcaaggtgaccagcgaggaggtcaacgcaacgccgcggcccatcgccgatatcgaatggtaggtgattggcgatgctcactgcaagacactctgtgaaacgccccgtgaaacaagcgaggcgattcgtgaaacaacctgtgaaacattctgtgaaacggcggaacctcgacgatagcggcggtcgaggagcgggcgtttctgcggtatttgccaaagatacgttgcgttgctggctgcgcagctggaagaggttcgtctcgatcgccgtcatcacgctgcttggcgtggccgtgctgaccggcatctacgccggatgccgcgatgcttttctggcggccggtcgtttttacgatcagcagggactgcatgacctgcaggtgctatccacatacggcctgaccgatgatgatgcaacggcactgcgccgaatcgacggtgtgcaaaccgtgcagcccgaacgttctcagacggtgaccacgttggtggacggcaccaagaaaaccgtgaccatgcaggaaatcggtaccgaagggcttgatcagccgtacatacggcagggcaaactgccgaacaaggccggcgaagtggcggttacgcagcaattcctgaacgatagcggactcaagattggcggcaccattactgtgacgccacaagacacctcttcatccgtcatatcggtagcggccacggagactgacgattccaataatgccgatacggtaggtgtcgccgccaatgcctcggcatccgatgcgaagtccgacgccaatacggacgccgacgccgagcaatccccgcagttccccacgaaactcaccatcaccggcgtcgtactcgacccgcgcgacctcaacaatccagacggctattcgggcatgacctccttccggtccacctcatccgaggactatacgttctttgcacccagcgacggcgtgaccggcaatatatacactgcgatatcggttgccgtcactggtgcgtccgattttgacacgttttccgatgcctacgatgaagccatcaaaaccgtggccgaccgtatcgaacatcagatacaggccacacgccagaaagcccgtcgtcaacagatcgtctccagcgcgcagcgcaaactggatgatgccaaagacgaggccaacgagcagctggacgaagcccagaagcagatcgatgacaactgggccgagctggaagccaacaaaacgacattgcaagatagccgtaccgaattggagaacaacaggacaaccattaccgatggcgaacggcagctcgccgatggacgtgcgcagattgcatcggcccgtcaacagatcgcgcaaggtcgccagcagatagccgaagcgcgcacccagctcgaatcgggcaaagcgcagctcgcctcggctcgcaaacagctcgatgcggcgcaaacggaactgactgccaatcgcacgaaaatcgaacagggcattacccaaatcgaccaaggcgtggcacaaattgatcagatgctgtccatgattcaacaggccgacaatctactggcgcaacttgacccgaatatcgacttcaactcacccacatggcaggccatcaagcaactgctcgcgcgccttggcattaccctgcctgaagtgccgtcaatcagtgagctgcggcaacagctggccgccaagcaaacggaactgcaaacgcagcgagacagtctgacccagcagaaagccgatttgcagcgcacattaaacgaaaccattgcccccgcacaatccaccttggaccagcagaacgcgcaactgaccgccaaggaacaggaagcggctgcaggagaggcacagctcaataccaaatccgcggaactcgaagcgaatgccgcaaccctcgaaacccagtcggcgcaacttgaagcgcaggccgcccaactggccagcggcaagcagcagctcgaagaaggcgagcggcagctggaagaaggcgaacaacagctcgcggacggcaaggcgaaactggatgatgcgcagtctgaactcgatgcgaagcgaagcgaagcggaaagcgaattcgccaagcagcaacggcgcatcgacgatgtggccaacgcacgttggtatgtgcagacgcgcgcttcgatcgacggattcagctcgctcaaatcagacgtcagttccatcgaatccatcggccgcgcattcccgattgtgttcctgctggtcgccgtgctcatgagcctgaccaccatgacccgcatggtcgaggaagaccgcggacttatcggcacctaccttggactcggctatggcggactcgccgtgtccagccggtatctgctgttcgcgttgctcgcctgcttggttggcggcggcatcggtctgctggtcggattcctcggcatcccggcattcctgctggtggtgattgagggactgtatatattgcccggtgtgcgactcgaatacgactggctgtacggttcggccggcatcgtgctgttcgtggtcggcgtgggcgtggccaccgcgctcgcctgtcgcgaggagatacggcacacgcccgccgcgctgatgcggccgaaggcaccgaaagcgggcgctcgcatattgctggagcggattcgcccggtatggagccggctgaacttcctcggcaaagtcaccgcgcgcaatatcttccgattcaagtcgcgcttgattatgaccgtgggcggcgtggccggttgcacagcgttgattatctgcggatttgcgattaatgacaccgtcgacacgattggcgtcaaacaatacgagcagatctaccagtacgacctgatggtcgtggccaatgacgatgacgccaccgcgatgcgcaagcaggtggcacaagatggccaaaccaccgaaacgctgaatctgcgcgtggatagcggcgaaatgagcaatgcggcgcaggaaagcgaaaccgtgcagctgatgaccgtgcccaacgattcgctgaatatcttgaacgatatggtcacgctggaacaagctggcgatgatggatggtttgggctgcccaatatcttcggcaaagcgggtggcggcactgtagcgctggacgatagtggcgtgattgtgtcgcagtccgccgccaactcgctgaatattcatgccggcgacaccgtcacgctgggcaatggcggcagcagccgggccaaggtgcaggtcgcggccgtgacgcgcaatcttattggctctgatgtgtacatcagtgagcgactgtacgaccagaagtttgcggccggcggtgtgacgtcttcggcttcgggagatggcactgcctcgaccttgacgtggaacgcgatgctcgccaagctgaaaggttccgagaccgaacaggccgaatatgcggatcggttgggcgaggaatcgtcggtgctcaaggccgtgagctgtgcgcatctggccgccacgtttaagttcgatttgatgggtgccgtggtggcgctgattgtggggctcgccggcggcctggcgctggtggtgctgtttacgttggccaatacgaacgtgtccgaacgcatccgcgagatggccacactgaaggtgctgggcttctatgaccgcgaggtgcacaactacgtgaaccgcgagatgatgatattgaccggtatgggtgtggtggttggtctgccgcttggcaggtggataggcggattactgactgctgcgttgaatatgccgtcgctgtatttcgaagtggaagtgcactggtacagctatgcgattgccgtggtggcgacgctggcgttcgcgctgctggtgcagctgttcaccaacccagtgctcgatcgcgtagacccggtcagctcgctcaagtccgtggaatagaggtagaagttcaattaggtgttggtgaattgaacttttttggcggaatatttacagcatcatcgcatgtattcttgagctgagcgttttcgtgacatatttcggtgatacagtctgaacttgttttgaacgagtatcgcgtccggtgcgtaacaatcgggcggcggagaagagaaatgaaatcagtatggccgatacgaatgtgaatggtggtacacggcaggctacgggcaaactcaagtctgtcgaaagcctggaccggaccaacgagatggagcgcggcctgaacaaccgccacgtgcagttcatcgccatcggcggcaccatcggcaccggcttgttcctgggttcgggcaagtcgctggcactgaccggcccctcgatcgtcttcgtgtatatcctggtcggcgtcatcatgttcttcctgatgcgcgccatcggcgagatgatgtaccgcgaccccagccagcacaccttcatcaatttcatcacccgttaccttggcaacgggtgggggcatttcgccggctggacgtattgggccgcgctcgtgctgctgggcatgaccgagatcacggccgtctccacgtacttcatcaccttcttcgacacgttcggcatcgacctgacccattggaaatggctgattgaactgtgcttcctggtgtcgctggtgtccgtcaacctgatcgccgtcaaggtgttcggcgaggtggaattctggttctcgatgatcaagatcacgctgatttgcgcgatgatcgtcaccgccgtggtcatgatcgtgatcggctaccattacccggccgcgcggattcatggcgtggatcatgtgagtccggcgggccacgccggactcgacaacctgttcgccggcttctcgttcgccccgaacggctggatggccttcctcatgagcttccagatggtgttcttcgcctatgagctgctcgagttcgtgggcgtcaccgtctccgagaccaagaatcctcgtgaggtgctgcccaaagccgtcaacgagatcatcgtgcgcgtgctcatcttctacgtgggcgcgctcgtggccatcatgtgcatcgtgccgtggacctcgttcaagccgaacgaggacggctccttcgcctccccgttcatcatggtgttccagtatgccgggttgaactgggcgtccgccctggtgttcttcgtggtgatcaccgccgcgtcctcgtcgctcaattcgctgttgtattccgccggccgccacctgtaccagctgtccgaggtgtcgccgaacccgatgctgaacaagctcggcaaggtgtccgatcgcaaggtgccggcccgcgccatcctggtgtccgcggcgctgatactgctgtcgccgatcgtcaacgccatccccggcatctcgggggcgtttgtgctgttctcgtccgccagctccgcggtgttcctgttcatctacatcctgacgctgctggcgcatcgcaggtatcgccgttccgccgatttcatcgcggacgggttcgtcatgcccgcgtggaaggtgctcaatacggtggcaatcgtgttcttcgtgttcatctacctgacgttgttccttgcggacgatacgcgcaattccgcgattgccggcctggtgtggcttgtgggcttcggtggattctctatgctgcgcgaacgctaccgtagccgcgatttgaaggccgcactggaacacaaggagtgattggacgggctgattggctggcggctattagttgggtggctgttggctgttggcggctgactggctagcggccgatagtcaatgactgggctgatcgtcagccaatcggctgcctataggtctcattgatacattcggtcatccgattagtgcatttgcgcggacaattagtgcattcgatcatcggattagtacatcagtgtgcaattattagtacaattagccgcctaattagtacattaggacataaaacaatgtcctaatgtactaattagatgctaaaatacgataagtgccatgtcctaatgtatgaattatcgctatgaagggcggaatgcgatgacgcaggatgaacttatgcaagtgctgcaggccggtgaatcatctatggtcgagttcaagcgctgcagcgaattgcctcatacggatacttttgagactgtatgctcattcgccaatcgttctggtggcagcatttatcttggcgttgacgatgacggtcaagtgctcggcgtcgattctaagcgcgttggtgagatagagcgcaacgttgtcaacgtagtgtctaatcgtaagatgttcgaaccggctccaatggtggaaacggaacatatcgagtacgacgaacggattattgttcgtatttgggtagctccgagttcttcggttgtgcggttcaagggcgcagtgtttgatcgcattgctgatgtggatacacacatcgaaagcgatatccagattagtcaaatgtatattcgcaagcagaactactattccgaacggcgaattttccgttacgtgactccgtttgatttgcgtcctgagctgattgcgcgaatgcggcagctggcggtcgctcagcgagctgggcacccttggggaactatgtctgacgaagaactgttccgcagcgccaagctatacgatcgtgattacacgaccggcgaagagggctttaatcttgctgcagtgctgctcttgggcaaggatgaagtcatttcctcggtttgcccagcgtatattactgatgccgtggttcggcgagacaatattgaccgatacgatgaccgacttatggtgcggaccaacttgttcgattcgtacgagcaactccgtgaatttactgagcggaatctgcctgaccgctttgtgttaaagggcgataagcgagtgagcccgcgtacgatgatcgcccgtgaattggtggcaaacagcctcatgcatcgggagtattccagtccggtggtggcgcgtgtcaccattgataatgaatccatccggacggttaatgcttcgcgctcattctttgaaggtcgaatgaagctgggcgagttcacgccaatgccaaagaatccgattatcgctaatgtgtttgtgcagaccggcatagccgagcagctgggtagcggactgcggaatctgataagagcgtcccggcaatatactgagcgagagcctgagttccgcgatggtgacatattcgaggcgacgattcctattgttcctgcgctgaagaccgtggatggttctggttttgctagcgtgagatctgtagttgagaaagatgccgaagagggtgcgaggctcattggcggggaacgtgtggatggtaagaaagcagatgcaaccgcatcgggtgaaattgattcgcgggcagcgatgctgtcggcgatgaatcgactcttgacagaggttgactatgtgactgtacctgaactcgccaagataacagagctcgataacagaacagtccgcaaattcctaaacggtttagttgcgcaaggaaagctgattgctgaaggcaacacgcgtggtcggcgttatcggaagggatagcgggcgcgatatctcgatgcagtgggattcacttaagggctacggcaaatatgattcgtagcgattgggccagcgcaattcgaatggctcatgactttgtgcgtcgtttgtggtgataacgcccgattttttgcgcactttcggattccgggtctgacgtaagagggcatggcccgcgtcctgtgtacgattttcattcgccaaaacaaaaaaccgcgattggaagccaggagacggaaccaagacccttgaaca

SEQ ID NO: 1352 - DNA, 5693 bp, Unknown
  R157_18m  MAG No. k141_26510
caagagctacgagaacctgtatccgatcgcctcgcgttgcggcgtgttcgccaaaaccgatctgcagccgctgatcaacgatggtgcggccaagcctgatctcgccgcctccatcttcaccgcagtggccacgcagaccattgccggcctggctgctggccgcccgatccacggtaccgtcatcttcctcggtggcccgctgttcttcatgtccgaactgcgcgccgccttccagcgtgcccttgaaggcaaggtcgacgagttcatcgtgccgaccgacgcccacctgtatgtggcctacggttcggcattgcaggccgacatggattccgacgatcagggccaccatttcgaggcccacacctgcgatgagatcctcatgcgtctggacgagctgaagaacctgccctccaacacgcccaccatgccgccgctgttccccaccgaggccgaccgcgaggacttcaacaagcgccaccacaaggaacacatccacatcggcaccctcgaaggcgcgcatggcccgcacttcctgggcatcgacgccggttccaccaccatcaaggccacgctcgtcaatgacgaccgtgaaatcgtctggtccagctacgccaacaacgaaggcagcccgctgaccgccgccatcaacatcgtcaagaagatccaatccgagctgcccgaaggcgcatggatcgcacgctcctgcgccaccggatacggcgaaggcctcatcaccaccggcctgcacctggacgagggcgtggtggagaccatggcccactatcgtggtgctgaaatggtcagccccggcgtcaccgccgtcatcgacatcggcggccaggatatgaaatatctggccatcactgacggcgtcatcgactcgatcgccgtcaacgaagcctgctcgtccggctgcggctcgttcctgcagaccttcgccatgtccatgggcctgacgattcaggaattcacgcaaaaggctctggcttccacccatccggtggacctcggttcgcgctgcaccgtgttcatgaactcctcggtcaagcaggcgcagaaggaaggcgcctccatcgaggacatcgctgccggcctatgctactccgtggtgcgcaacgccctgtacaaggtcatcaagttgcgtgattccggcgaactcggcgacactgtggtggtccagggcggtacgttcctcaacgacgccgtgctgcgcgccttcgagctgctcaccgaacgtcaggtcacccgcccgaacatcgccggcctcatgggcgcgtttggcgccgccctgaccgcccgcatgcactatcaggatgaggccgaccacttggacgtggtggttaaggccgatgggtccgaggaacagtccgaggccgagcccgcacccaagtccgagcccaaggccgcagccttcaagaagaccgagccggccaagcccgaagcccatgtcgttgtcgtggacggtgtgactcacaccgccagctccattctgaccggcgaagcgctcgacaacatgagcatgaccgccgagcgtgacgtgtgcaagctgtgccagaaccactgcaagctcaccatcaccacgttctccgacggctcgcgcttcgtgaccggcaaccgctgcgaacgcggcggcgatgccaagaagaagcgttccgaccgtccgaacctgtacgactacaagtacaagcgttgcttcgcctaccgccgtttgaccgacaagaaggccactcgtggcgagatcggcattccgcgcgccctcaacatgtacgagaactacccgttctggttcacgctgctcaccacgctgggcttcaaggtgatgatctccggccgcagctcccacgagctgttcgagaccggcatcgaatccatcgcctccgaaaacatctgctatccggccaagctggtgcatggccatatcaagtggctgatcaacaagggcatcaagaccatcttctacccgtgcgtgagctacgaggagaacctcgtgcccaacacggacaatcattacaactgcccggttgtggccaactatccgctcgtcgtcggcgccaacgttcctgagctgcgtgaggacggcgtgcgctacatgcacccgtacttcaacctcgccaaccatgagctcatggttggccgcatcgtcgaagagtttgcgtgggccaacgtgacccgcgaagaggccgaaaccgcggtcaaggccgcctatgccgaagacaaggtcttcaagcatgacgtgcagcaggaaggtttgaccgcgctcgcctacatgaaggagcacaactgccgcggcatcgtgctcgccggccgcccctaccacatcgaccccgaaatcaaccacggcatccccgaaaccatctgctcgctcggcatggtggtgctctccgaggattccatctgcgaactgcagccgggggagaagctcaacctcaccgaattcctctcggaaggcgaagccgacccgcgctccaagaacgccgccggattccgccacgtgggagaccgcacagtcaccaagatgccgttgcgcgtcaccaaccagtgggcctaccactcccgtctgtacgcggccgcacacttcgtggcctcctacccgggcctcgaactcgtgcagctcaattccttcggctgtggccttgacgccatcaccaccgatcaggtggccgaaatcctggcagacaaggcggacgtgtacacgctgctgaagattgacgaggtctccaacctgggtgccgccaagattcgactgcgctcgctcaaggccgccgtcgaggaacgcgaagccaacaaggcccgcgaagccgccgcggccaaggccgtgcaaggccccaagtccgccggattccgcaagaccggctccaccgcgccaacccccggccgccagattctgcttgacagcaccatggccgccaacccgaagctcaccaaggccatgcgcgccgcctccaagcgtgccgccgaacgcgacctgcaggccgcagtcgccagcaagaacggcacttcggacggcaccaccggcgtgacgaacgccaagaacgccaagaagtccggccacaacaacgccaccatgtcccgctacgctcatcgcgagaagttcgtcaaggacatgaagaagaactatacgattgttggccctcagatgagcccgatccacatgtccttggtcgaagcggtgattcgttccggtgggtacaagttcgacatcctgaagcacgcgagccgtggcgatgtggaaaccggcctcaaatacgtgaacaacgacgcctgctacccggccatcatggtcgtcggccagctcatcgacgcgattctggaaggcgaatacgatcccgaccatgtagcgctcgccatcacccagaccggcggcatgtgccgtgcgaccaactacttcggcctgatccgcaaggctttggtcgatgccggctacccgcagattccggtcatcgccatttctacccagggcctcgaagacaaccccggcttcaaggccaccctgcccctgctgcaccgtgccatcaaggcgctgattctgggcgacttgctcatgaagtgcctctaccgcgtacgcccgtatgaggtggagaaaggttcggccaacaagctgtacgagctgtgggacaccatcgtgcgtgagaccatcgagcatcacggctattccaagaccgcagccaaggcgccgagcatcaagaagggctatctgccgtataacgtgctggccaaggagatcgtgaaatcctttgatgcattgccgctgcgcgacatcccgcgcaaggtgcgtgtcggcgtggtcggcgagattcttgtcaagtaccagccggacgcgaacaaccacgtggtcgacgtcatcgaatcccaggattgcgaggccgtggtgcccggcatcatggaattcatgaccacccgcccctacatcaccgactggaacgagaagaacctcggcatgggcggcaacaagacggtttacgccctgatgcgcaagggcctcgacctgtacaacgcgccgatcaaggccgcgctggccacatcgaacggcaagttcaagcaggacgagccgatgcccgaactggtcaagaaggccgccgaagtcacctccatcggcgtgcaggccggtgaaggctggctgctgacggccgagattctggaactcatcgaacagggttgcccgaacgtgatctgcgcgcagccgttcgcctgcctgcccaaccatgtgaccggccgtggcatgttcggcaagattcgtcgtctgcatccggaagccaacatcgtctccatcgattacgatccgggtgcctccgaggccaatcagctcaaccgtatcaagctgatgattgccgctgccaagaaggcccacaacgccaagttcgccgaggccggcgagccgcagggcttcacctccgcggactgatttatgctctggctcgtccgcaattaaggacgagcttcgctcgcgacatgctggttcgcctatcggctcaccctcgcctacggacagtccactgggctgtccgctttacggctcggcctctgtgaggggagctgtcgcgcagcgactgaggggagtctctagagcgagaaaccgggccggagcctgctatcggtttttcgtatagcgtattacgggctttcgggcacgcgcaccggccggctcgaatacgatacaaagcatggttactccccgaatcagttacgcgcacctgctcgccaagccgaaccccaagcacgtcgaaagcctgctcaagttctttgagaatggacgctcccagcggggcgccggcggcttcggcgtggagatcgagcacctgcccgtgcacaacagcgacgacaccgccgtgacctactacgagccgaacggcatcgaaacgctgctcaaacgtctcgtaccctactatgacgaggagaaggaatactgggagaacggccatctggtggggctcgcgcgccccggcgtcgccgtctcgctcgaacccggcggccaggtggagacttcaatcggcattctgaagaagccgtccgacctgaatacgttgtattccaagttccgtcgcgagctcgccccgattcttgacgatctcgacttccgactggtcaactacggttaccagcccaaatccagctttgcggatgtgccggtcaaccccaaggatcgctacgatgcaatgaccgactacctcggccgcgtgggtcagttcggcccatgcatgatgcgttgctccgcctccacccaggtcagcattgactacgtggacgagcgcgattccatcgaaaaactgcggttgggcaccgtcatcggtccgattctggcgtacttcttccgcaacaccccgtatttcgaaggtgagacgaacccatggccgttgctgcgccagcgcatgtgggattatctcgacttccagcgcacgaatgtgctgccgggcctgttcgacccgcgctatgggtgggaggattacgccatcgacgtgctgtccacgccgctcatgttcgctgacctgacccatacccctgaagctgtggcttctggagcaagtcccaaggaactgcatcgcccggccttccgcgagaacgcgggggaggtgtacccggaccgcgaactcaacccgtacgagatcaaccacatcatctccacgcacttcaatgacgtacgcctgaagaacttcatcgagcttcgccactgggattccttgccgatcgagcgtgcc

SEQ ID NO: 1353 - DNA, 17175 bp, Unknown
  R157_18m  MAG No. k141_27648
cggcattacgcatatcggccaggatcgtcttgatgaggattccggtttccgcgtggtgctgagctccggcgcgccgaagaagacgttcatcgcttcctatggcgccgaggctcatggcgacgcggacacgttcaacacgctagagccgcagcccaaagacgtggtgcacatcagcggcaacacactgatggaccatacggccaccggcgtggacggattcctactcaaggccggtaccgacccggctacacgcgactacacgctggtgatcaatcccaccaatacgttgcgtctggtcaacgaccacatgctcgaggatctggtgcttgcgcgcccggtctggtcctgcaaccgtcaggaggccatgacgctggccgagcgcctgggcgcgccgatcgacgacagcaaggtcaccatcggcggtggactcgacgacttcatgcaccagttgtgtgacggcttgggcactacactgcgcgcgccgctggtggtgcgtgtcggcgcccgcggcgcttggattcgtgagccaggtggcgagacgattcatatcgagggatacccgaccaaggccgtacacacccgttcggcgggcggttgccacaccggcgtgatgtgcgcgatgctggcaaagggccatagtctggccgaatcggtaaagatcgccaacgcggcggcatccatcgccatccagcgcagcctcaacggcgtgccgcaatgccccgattacgacgaggccatcgcgctgatcggcgaatagtttccggacgattgagtggatttcctcatctgggggaatccacgatcggctcccttcagtccgcttcgcggccagctcccctcagcgaggggagctatttttttgctctggctccccttagaaaggggcccggcattattcacccgccgttcaactttggcggttttctaccctagtccgcgcttctacgatagattgagttgaatactgtcgaggagtgcatatgactgatcccgcaaatgtccacgaaccggtgccgcaaagcgccaaactgaccgcccgcgagaagaagtggatcatctacgacgtcggcaattcggcattcgtgctgctctccaccgccgtcatccccatttacgccaaatcgctgatgccggcggacggcaatatcgtgtccgcctggggctacgcgcaaaccattgcttccttggtcatcgcgctgctcatgccgttgctcggctccatcgccgacgtgcaaggcatgaaaatcaagttcttccttggcttcttcggcaccggcgtggtcacctgctgcgcaatggccctgcccctgacctggctgccgttcctggtcgtctacattctggcgaccatcggcctcaacggctcgctgacgttctatgattcgatgctcatcgacaccacctcgaacgagcgcatggacaaggtctcctcgcacggctacggctggggctacatcggctccaccgtgccgttcatcttctgcatcgcgctgattttcggcggcccgtcgctcttcggctggtccacggtggcttgcacgcgcgcctcattcatcatcaccgccatctggtgggtggcgttcaccatcccgctgcttaccagctaccgccaggtgcactaccgtgccacccgcgaccagctgggctcggccgtgcgcggcacgttcagcgaactggcgggcacgttcggcaaaatcgtgaagaacaagccgttgtggatgttcatgatcgcgttcttcttctacatcgacgccgtgaacacggtgatttcgatgagtacctcctacggtgccgagcttggcatcgactccacccagctggtggtggcactgctcgtcacgcagttcgtggccttcccctgcgcgattctctacggccgtctggccggccggctcggctgcaaagtgatgatcacggcggcggtcgtagcatacatgtgcatcgtgttcttcgccgcgttcttcatgaaatcggccgtggagttctggattctggcgattctggtcggcatgttccaaggcggtatccaggcgctctcccgctcgtactacggcaagatcatccccaaggaccacgccaacgagtactacggcttctacgatatcttcggcaagacagcctcaatcatcggcaccttcctggtggccaccaccacgtccctgaccggcaacgcctcgttcggcgtgctctccatcgctgtcctgctcgttgcggcgctcatcttcctgctcctgcagaaggacccgacgcgggagtgatttgccggccctcggcaactctgcgccgcgggcgacatctcgcaacccctgcaacgggccctaatagcaatggaccatcgccacttgatcacttacgctcgcgataatccttgatcagctgaatggcgacggccgcaacgccgcacagcacaccgccaatcggccacggcagccagaacatcgccccgtccgcggcgctcgacccgacggccgaccaatcgccgcgcaatgccgcagggttcaaaaacagcaggcacaagccagtcgccgtggctatcagcataatgatgccgcacaccgcgccggtcagtctggcatagaaatcctgttcgcccgcatgctccttgcggtcgtcctcggccgctttgttgtatgcgtcgatattgagcagactgtatctcatgccgcagtagacaaacccgaaaacaccgggcgcacagagcagcagaaaaattgcgttgggccagccatcggagacgccgagcatgtcatcggcatacaccgtcaccgcaatgccaatcagaatagccgagatgccaccgacgatgccgattaccagcagccgcaattctcggctgcggtcctccccggtgtagaaatcttctacgtatgggtgacgccgtttgaagtcaatacgcgacagacctcctggaatcagcatcgccagccccgcaatcacacccacacagacgcacagaaacgtcagaaaatcgttgagcggcgtcgctccgagaatggaattgttggaatcgaacaggttgccgatgccaaccccggcgacaatcgcagcaacaccgccggcaatcagcagcgcgaatcggcggcgatgttcatcgtagccagtgatatcctgcgcaagctccgcgataggagcgattatgcccgccgttttggaagaagcggctaaaggcgatgccgtctcagccgaggagtcaacattcgacgaaccggccgcagaagccgacgcggcaggccgactcacatcgccaagtaccagatcatcaagcgtgcagccgaacaggtcgcagatcataagcagcttgtccatctcgggataggccttttcggattcccatttcgaaatggcctgacgcgagacgccaagcaacatggccaatcgttcctgggtcaggttgcgttgcgcacgtaggtactgcaggttagcgcgaaaactcattggaatgtcccttcatacgtaatctttatcatgtcatgttcggccgatgggctcactatggcatgccgtccatgtcacccgccaccatctttgggttgcaatcgccggttattcgagcgcaaccacaagttgcatcggcggaattccgccattccgttgacctgagcagctttaacatcgcactccacgagaccgaagcttttccagccatgcgagggcagcttgtctcacctgccaccacgaatccgcttcgacccacgtacacatctgtgtacagcagcgctcgcaatcggttacctacgacccatatgatttgctgagcgaccgcaaaacacgcaatagccgagacaacaccgtcagcgttaaagcttaaggcgactacttgcccaatagtccggaaatctggctgatgatgtcagcgggcagtcctgcttgttcggcaatggatccgaggtccagattggcaccctgctcctgaattgcgccagcgacctgactgatctggtcggcggagatgttttcctccgccagcgcctgcagctcgtcaagtcggtcggcgttcaaatggtcgccaacgacctgttgatttcacccaactgatcggcattgaaatgctcaccgattaccgccggcaaatcaccaatcgaaccgagattgaaatccccgccaagcacattgcctagattgtctgcggcaaaatttttcaggctatcgaacagtcccacatgtgccgctgatactgcttgttcagcaactgctgcagagcatcgcacagaccctgcatcaatcgccgctcttcggcagacaagtcccgcgtgaaaccaatctctgcctttgcgctcatcagctggggagctcacggtcacactcatgcgtcgcagaccacgagcctcacgcgcctcctcattccacatctgtgttaacaacatgtgttaatcgcatgcatcgccaccatgattccccaatgatttcaagggttccccggtctcactattgtttcttccttaaaacggcctcaatcatcggcaccttcctggtagccaccaccacgtccctgaccggcaacgcctcgctcggcgtgctgcccatcgccgtcctgctcgtcgcggcgctcgttttcctgctgctccagaaggatccgacgcgcgcaaacgtgctgagacatcgccggtgaaccaagttctgcctttttaccgacgccagctcgcataagcaggaatcaaacgtcggcgctgggacacagaacgggaatccgccgacgttcagagtatctgatgccggtgccgggccatgttttggacgccaccgacacaagtaccactcttggcgacggtggtggggcatccgctgtcccaccaccgtcgccaatcgttctcagcggcgttgacaatccattatctgtccctccaacgccgccaaacgtccacagcgtcggcgacggtccggattttgacgcaccaccgatgcaaaaccattgcaggctccgtacggaacatcagccgcgaccaccgaacgagcaccagatgcggcatcagccgcgacaccagccgcacttatcgacgcgcccttaccgcgtcatcacgtccatcaatacaatgactcatcggcatatccggctgcagcccaataatcgtcggccgatagcgagcgattgaaaccggtggcatgatcgcttccgaggtcgccctcgccaccgaaatcgacatcgaaatcagtaccagcatcggaagtaccgccggacataccggcaacggacctgacttcggttttcagcaggtatttctccgcgaaattcagcgtggtgcacaccatcgcaaacccctttccatgcgcgttgccctggcggaccaagacgtccttgtgtaagtaagtatggcggctccccttccacaccgccatatccactatggaagcgcgccgcggcacacgacacaagccccgggacatatgaagaagttatggccggttcaaagcacccgtattacagcccaaacggcaccgcgcgcagcgggattgcacgacggccggacgccactcataatcggaaaccgctcacagccaaatgccacccgaggccggacgccatataaggaaccgtggcacggcagatatagaaaatgcccgccatcatagactgacgagcgtgatatcgggtgggcgatgtaggaatcgaacctacgaccccttcggtgtgaacgaagtgcgctagccgctgcgccaatcgcccgagcttgtgatgaaaaaaccggcaacattctgccggcgattcatcgagtgggcgatacaagattcgaacttgtgaccccttccgtgtcagggaagtgcgctaccactgcgccaaccgcccgggtcatcctcaggctgaatcaatcatcctgaaccagccatccgagagcggacaacgggactcgaacccgcggtctcaaccttggcaaggttgcgctttaccaactaagctatgtccgcatgtgttaccttcacgggcaacaggtgacaaagatacgccaatctcaggaaaaagccaagcccccgcgtgtcccaccggttttccaacgattatcgggtgccgccgtgcacataactcgcggtgaccgtatacagcagccaagcgatgggcatggccagcataaacagcgggtagaaccaagcgatgggcacattgcacggccatggccgtggaaatcaggaacgcatgacgataaccgatcagctggccgaagaggccaaggccttgatcggcgaccgtgccgaagtgaagttcctgaactacgccgacgtgccgttcttcaaccaggacgaggaattcccgaacccgacagccgccgtggccgccgccttcctggcgctcgttgcggagtaatcccgcccgaatcttggttacgttccgcctcaaggcggacggcggaccagctgcatcagcaatgtgccgaacccctctgatcgactccaatcagaggggtcgctgcgtttcaaggggctgatttggccttctccggaggtctactcccgtttcaaggggctggtggctgagtagacacgggccaaaaacggcgtaatgacgttagcccggagccgtttatacttgtggtttcccggatgaggagcccctcgaaacggagatagacctccggaacagcccaaatcagcccctcgaaacggagttagacggttgggatgtcggaaagaacactcatgccggcccaagaacccccactatgtcagatatcgctgcccagcacgcaatactgaccgtacagcacgacccgtccttcatgaaatcaggcacggtatgggcttcatccctcaacgcgcgataatggcggtatgacgcaacgacaactgatgcgggccacagtcgaaacgcccatcggccggatgatgatggcctcggacggcgagggcctgaccgagctctgtcttgaagactggtggtgggccaccgatcaccaagccgttctcgattcgaatcgcgaatccgatcgtgaacccgatgtgttccgtatgacccgcgtatggctgaccgcctatttcgccggcgagcgccccggcctagatcagacgccgccgttgcatcccgccggcacgccattccaacatgaagtgtggaatctggtggccgagattccctatggcatgacggtaagttacggcgaactcgccgccgaattggccgaacgacgcggtggcggccgcatggccgcgcaggcggtcggaggcgcagtgaagcgcaatccggttactatcatcgtgccctgtcaccgcgtagtcggctcgggccgcgcatttggcggctacggcggccgactcgacatcaaggccgaactgctcgaccacgaaggcgtggatctggcccgcttcaatctgccgaacctttgacggccccagcggtccgcctcgtcaaaaggattgagtggttacccctcccgctggcgggaagtggcacgtaacgccggagggtggtcggctggctggcatcgcaacccccgctacccgacaattttcgacaagctgacgggaatcctcccacgaattgttcgccgtcggtgcagtcttgctcgatcgcgccggccaaaaccgtacaatccctacaatggaatgtatatggttaattgctgcgcgcagccgcacggccgcacgcaatcgcaagaccacatggcccaaggggatatgcaatatcaacggaagcaggaggtgcgtatgaccggcattatcgattacgcgcacaccgaaacgcgctccttcgccgacttgccgttcaatgaaatcgacgccttgatcatctccacgctcatctatgaggatgtggccagtatctgtccgacgttgatgctggatgagacgcagtcaggctcgttcgccgcacgcattcgcgctttcgagcccaagcatccactgatctggctgaagggtatctggcatcccgagcttgaatcggtaagccttgacgaggccaaccgcgagctgcatcgttcgccggaaacgcatgccgacgacaagccgcacgaagcccaaatggtttcagtggtcaatccggacctgacccacgacctgttccaggccgcgggcgagaacccccgctacgccaacgttcgtctgggcgcggtggtcgagcacatcaatcagggtgagcaaacccaattcgccgccgccaccttccaactgcccgacggccacaagcgccgaaagccgacctacaaaggcacgttggttatttccttccgcggcaccgatgattcgctcatcggatggaaggaagatttcaatatggctttccagtatccggtgccggcgcaacgttcagccagcgcctatctggatacggtggcgcgactgtgggagggtccgattattctggtcggccattccaagggaggcaatctggcgatttacgcggccatgaacgccgaccccaaggtgcgcaagcgcattcagcatgtctattcactggacggccccggtttcccgccggagattgtgaccagccccgcctaccgcaccatccagccgaaggtgacgaaaatcgtgccaagttcgtcgattgtgggcatgattttcgagaccccggagccttgccgcgtggtctcttccgattcggatggcattatgcagcattccgccttcacctggctattggatggcgaccagttcatcaccgagccggatttgagttccagctcgcagttgtttaacgaggagctgaaccattggatcgccacgcttacgcccgaacagcgcgagcgtgcggtggacgcgctgttcaccgtgctgcacgccaacggcgccaccagcttcagcgaggtgatgagcaacttccccgcttcgattccggcgatgcttggcgcgtatgtagggctgacccccgcagaccggcgtcatttggttgaggccctggcgatactgttcaaggcgtccacggccaaacgcaggccgacgcccgccccggcttccgcgccgagttctgcgaccgccaaaggaacagccgaaaccccagcaggaactgcgacaggaacagatagcgcggccccggccagcgccgataccgacaccgacactgacaccgcagcttcgccctcagcggaggacgcaactgaaatcgccgattagctcatagacatgtccacaaataatagttatactgcccaataagttattagacagcgtgaccatatcacgctggtgcatcaggaggaagagatgccacgtccacgccatgattccgaggtgctgcccgccaaagaacgcctagagaacgctttctgggaattgctcgccgaccgcgactaccgcaagatcaccgtcaccgatgtggtgcgtgaggctggcgtgaaccgtaattcgttctattatcacttctccagcctgcccgaattggccgattcagccatcctacatcaggtcgaatcgattccgatcaaccgcacccccgacccaaatggcaatcccgaggaacaatggcgagaccgcgtcaccgccacgctctccgacccggagcagcggcagcgcctcgaccgcctggccctgttggccggcccgcacagcacgcttgaactgaccgaatcgctgcgcgacttctgccgtctgcaaatgctcagcacattgcaacgcgaccccaagaaccttgacctgaaaaccgatctcatggtcgagttcaccgtgggcggcatgctcgccgtgctgcaacgttggcccgaattgagcgacgccatcgaaatcaaagacctgcttaaagaagatgtggccgtgctggccatgggcatatacctggccatgagccaaaaggacatgcttaattactggaatcgcatcttcgtgcacaatgcgcaggattcggccgcccccggcatgccggccgccgccacgcatgccgcgccatcccccatctcaccgtcgaacggccccgcaggattccccgggtacaccgcttgaccaaaaaccagtgagtctggattgtttccgtcgaatgaacccccgcgtgaggtttctcacaaggcgcaatcagcctctcatgctggcgtttccagccctcacacaggaagatggaagcatgagcgaaacatcgaacaaaacccgtctggaacatgactgcatcggccagatggaggtgccggcgaacgtctactggggcattcacacccagcgcgctatcggcaacttcccggtctccggcatcaccgatagccaacatcccgagctgattcgcgcctatgccacggtcaagcgcgcctgcgccatcgccaatgaggaattaggcctgatcgacccggccaaggccgaggccattcgcgccgcctgcctagaaatcgaggccggcaaactggccgatcagttcccggtcgatgtgatgcagggcggtgccggcacctcgtcgaacatgaacatgaacgaggtgatcgccaaccgtgcgctggaaatcgccggccaccagcgtggcgattacacatacatccatccgaacgacgacgtcaacgagtcgcagtccacgaacgacacctacccggccgcctgcaaactcgcgcttatcgacgcgatcgggccgctcgccgagtccaccaagaaactcgccaaggccttccacgatctggccgacaaacatatcaatgacgtgacgattggccgcacgcagctgcaggacgccgtaccaatgacctatggtcaggaattccatgcgtttgccacgctgttgaagtctgatttggctgcattcgatcgcgtggtgccgctgctggcccagctcaacctcggtgccaccgccatcggcaccggcatttgcgcggatctgcgattccgcaagtccgccatcaagcatctggcgcagatcaccggcttgccggtcaccgccgcgcccgatccggtggccgccatgacggatatgggcgcgtacgtggccacgtcggccgccatcaagagccttgccgtgcacctgaagaaggccgccgacgatttgcgactgctcaattccgggccgcgctgcgggttcaacgatctcaacgtgccggctcgccaggccggatcatcgatcatgccggccaaagtgaacccggtgatccccgaatgcgtcaaccagtgctgcttcacgatcttcggcatggacgtgactgtgaactgggctgtggccgagggccagttgcagctgaacgccttcgacccggtgatggtgcatgagctgctgaccggcatggcgttgctgacgcgcgccatggagacgttccgcgtcaactgcgtggaaggcatcgaaatcaatgctgacctggggcgttcatatgcccagtcctcaccgtcgatttccgccgcgctcaaccattacatcggctacgagcacgcggccgacatcgccgccgaagccgtgcacaccggccgtaccgtgcgcgaggtggccggcgaacgtaccgacctgcccgccgagcagctggacgagattctcgatccgattcgactggcccgtggcctcggccaaacctgccgcgagcatcgggactaggcgtcacggcgacgtcatcaccacgacgatgctgcaccgcggtgccgcggtggtgccggtggtgccgacggcacgccaccggtatcgcaccatcggcaccaccgcaacggccaaaacccgacgtgggcccgcatgtttacgacttcaccagaaatggtcgatacagtagggcatatgaccgaatatgcacaagacatcgcacactggttccaagtcaatgcgggcaagctcatctggctggccgtcgtgctggccgtcgtgttcgcggccgaccgcgtgatcagccgcgtgctgcgcagggttctggatagttcgcagattcccagcgcctcgattttcgtgaatctcacgcgcgtgaccatctgggtcaccggtacggcgatggtgctgcaaccggtgttcggcatcaatccgaccaccctggtcaccgccctcggcgtcggaggcgtggcgatttcactgggtttgaaggatacgatcgccaacgtcatcggcggcttcggcctgatgctgggccgcgtgatccaacccggcgatctggtgaccattcaaggcgtcacaggtaccgtgcacgacatcacctggcgacagaccgtggtgcgcacccgttccggagacatgatggtcatccccaattcggtactcaataccgccgccctgaccaagctcacgccggtcagcgaaggcatggccgcgcttgaattcacggccaaggcctccggtgacccgtccgctatcagtcaggatattctcgaccgcgtaaccaaagccaccgccgacgtggcactggagggccagccaccgctggtcaagttcaccggcttctccccttacggcatgaccggccaagtgcttgtgttcgcgcgcgagggtgtgctgccttccaccatcaaagatatggccgcgcgcgccatcgccggttcgggcaccaaataccttgttgaagatggcggctcgtcagacaatctgtgatatctcccggctcgcctctctgggtccggctatgacagtcatgcgaacagcatccaaccggtaagcatcacagtcagcagtaggtacgcaataacgccgggattggcataggcggtgcgtattttaagccccgccggcaactcctctggcgcaagatagaactcccagctcttacgcttggtgataagcagcacgataccggcaatgcagaggcccaacatcactgtgccgtacaacatcatgatgcccatgccgcccatgttgccggtttcagccatacgcatgatttcggcctcgctgattgtgccgtcgaggatgcggggatcgatctgttgtatcaccaatggggcgagcactgccccgttcaggttgatcagcatgtgcatagccactgaataccgcaggcgggaggtgcgtgtgtatacatatccgaacatcagtcctaggccaaaggcgtagaagaactggaacacgttcatatggaatagcgcgaacgccaatgcggagaacatgattgcggtcttttctccgtaccggcgcaggcgggagataatctccttgcgaaaaatccattcttcgcaaaccggtgccaacaggcctatgaacaatgcgttcacccgccagtcgctgccaagaatcacgtcgttgatgcgattggtggcctgaccatcagtggctccggcagacaatatattgccgatcatattgcccaagagcattaccggaatgcacatgacgaaaatccgaatgaactcccccgccttcatggggtactgccgggtgcgaataaccggtacgcgagtgaaggccaacatactcagcggcatggccaccacatacagcggcccggaggaggcgagcagcacagcccaagcgggcacatcggcgccaagcagcgttcgtagtgcttcagtggccagaatattcagcccgatccagaacaccatcataatggcgagcgccgagccgattgtcgaaaaccggcgatgggccgtgaaccaccaatcgcgtggggtttgttgcggctgctgcgccgacggcattggttcgctcatacttatcccccatagtcactggccgcaaacggaccgatcacacgtgcaatactcttcaagaatacggcacggcgtttcgattgcattgggaatggggaaaatcatcaatgggcaaggaatgatctacgtcaatcaatccccatgccgagagagtcctctactctgcgggattgttgtgggacggcacgcgattttacccgattttttcgcggcggcccacaccactccacatatgactgatgacgccgcacgaagaaatggcgtcattgcaacgattccccaatacattctgtgggacggcacgaatgtacatcgtttgacgttcatgccgtcccgcaccggcgtgggacggcacgcgataatcgcccaaaaatcgccgccgtcccacacacatcattgccgataagccattcgacgatcgtacagtcacaaaacagaacagaaccgcacgatcatcgcaacgccattcagcaggcgagcgcggcgaccggacgcggggcgacaatcacgtcatcgcccaccgccagaccggccggcagctcgctggcgggcagctgcacggtggccttgagctgttcacctttgttccagcgctggtattcgccggaggtgatgaccgtgtccacacgaaccaaagagccaaggaagtgaatgacctccacgcgggcgcgttcgccgacgtgcgaatcgctgctgccagccaaggccagcatcaggttctccgggcgcacgagcacggccacggaatcgcccttggcggagccggcgagcagcggcacgcgctggccgaagaccacggcctcgtcgccattggaagcgccgagcaggcggttggtgagtccaatgaacgtggccacgtactcggtggcagggcgctggtacaggtcctgcggggcggcgatctgctcgatcttgcccttgttcatcacgccgatgcggtcggccacggccagcgcctcttcctgatcgtgggtcacgaagacggttgtggtgccggtggtgagttggatgcggcgaatctggtcacgcagctggacgcgcactttggcgtcgagcgcggacaacggctcgtcgagcagcagcacgcgcggcttgatggccagcgcccgggccagggccacgcgctgctgctggccgccggacatctgctgcgtgtacttcttggcctgatcggcaagccccacgagctccagctgttccatggcgatcttgcggcgttcggccttgcccatgccgcgcacttcgaggccgaattccacgttctccagggcggtcatgtgcgggaacagcgagtacgcctggaacaccatggccatctcgcgcttgttcaccggcacaccggtgacgtcctgtccgccgaccatgatgcgtccgccttggatgtcttcgagaccggcaagcgatcgcagcgcggtggacttgccgcaaccggatccaccgagcagcacgaccatttcgccgggcttgatgtccaggttgaagtcgtcgagcgcgtgaacggtggagccgggatagatcttgacgacgttctgcatctgaatggaaccaccgccgcgcttggcggtgtctttgagcagggccttggcggccttggtcacgtccttgccgcgcacgccctcgagggtagcggtgggatcgttcttgaaggcgtcctcggcagtggaggacacggctgccggaatggccggggacgccggggcggcgtccactgcggtaccggtttcctgacgggtgggagttgaatcgttgttcatcgggtcacttaccttcccttgacttacgcattgcgtcggagatcaggtcgagcgcaacgaggagcaccacgccgaagagcagagccagcagcgacatggcggtggaaatttgggcattggattggccgagctggtagagcgcgacctgcaggttcatacggccgagcagcgaggcgacggtgtattcaccgagtaccacggcgatggagatgaaggatgccgagaggatcgactgccacaggttcgggatgatcaccttgaagaacactttgggccaggaggcgccgagcgatcgggaggcttcgaccaacgtcttgacgtcgatggagttgaggcccacggcgatcgcgcggaaggcgaacggcatcacgagaatcacataggcgaagcacagccagatcgggttggtgctcaacacgtcggcggaaagccaacggtagatcggcccaagacccaccaccagcacgatggccggaatggtcagcggcagcgtggccacccattcgattgcacgctccaaggctttggagcgaatatgcacgatgaccatggtgggcaccagcaggatgagcatgatcacgacggtgacggcgctcaacgacagcgagatgccgacgccctgccatagcacgctcagatcggcgcccaacgattcgccgttgccggtgaaaatcgccgtccacggcgcggccgaccagcgaccggacaacgggtgacgcagggtgaagatgaacatggccagcagcggcacgaacaggaacgccagggtgacgaacaggatcacgaatttgatgatgctctgtttgcgcacgcgggcggcacgcagctgcggcggcttggttgtggaagtttcggtcattgccaacgtccggccctcttttccacggcgtggctcagcagcatgacgatggccacgacgatgatcattgcgaatgccagcacctgcgcgaagccctgctggttggggtccatctcattgcgcatggcaccttggatcatcaacggcaccagaatcgagcgctgcgagaacagggctgcggcggtcgcgtatgcggagaacgcggaggcgaacaacagcaggaacgccgagatgaagcggggtgcgaggatcgggcaggccacgcgcgtccagtattggacggtgttgccgccgagcgactcgcaggcttcgcgccactgtggacgaatggaatcgaccgcaggcaggaagatgatgatcatcagcggaatctggaagtagcagtagacggtcaccagccccggcagggagctgagccaattcgggttcacggtatagccagtcagggttttgatgagcatggtgccgatgccgttgatgccaagagtggcgatgaacgcgaacgcgagcatcacgccgccgaactgggcgagcaccgatgagatggcggcgaccatacggcgcagcggtccgttcggcttggcgccgatcaccagcgcgtaggaggcgagcgcgcccaccacggcaccgatcagggatgaggccacggacaccaggattgacgtgccgaacgcggcgatggtgttggcttcgaacatcttgtggaagttcgcaagcgtgaaaccgccgctgcgatcctggaacgcgccgatgatcacgatcacggtgggtgccagcaggaagcaggcggtgtaggcgaagaacgggagcgtggtggcgagcgtgccaagctcctgacggtgcttcgccagtgcggacgaagcgggggtcgaggcggcggacggacccgcggccttggaggcggcgggtccgttcggtgcgatgggtgcgatgggtgcgattgcggcggtcatcgtggactctcagttgccgatcgtcttgtcccagttgttttgaagccactcggtgatgcgggtggagtcatcgttgctgtaggtgaccggctggccttcgatggtgatggcgtccttcagggtggcctggtcgacggtgccgtcggccttcatggagtcgagcagcacc

SEQ ID NO: 1354 - DNA, 24430 bp, Unknown
  R157_18m  MAG No. k141_27942
agagaatgaatgtttcttgcggtttttggggaacgatggaggaagaattcagtatcatgccgaaggacagaggcacagcagcagagtcgcaggcaacaagcaccgcgaccatggcaatgcccaaagtacgggcgagcgggagccggtcctcggcttcgttctcccccgttgccgaatgtgacattgcgccgacattctttgacggcacctacttctcctctacaccggacggcagctccacacataacgacaccacgaacatacgtccattgatgggccattctgtgccgaagtggcgatatctctataacacgaccttggtcgtgcttgatctgctgatgaccattgtggccacgtacatcgtgttcctgctccgacctttcgcttatacctatgtgcagagcattggtcccggcgaatacggcgtttttagcttcctgctgttggcctgcgtatcgtggctcatcagtctgcattccgcacgctcctatgaacggcacaccatgggtgagggctatgccctgtacgccaagctgttgaacgctgcgttcatcgatttcattatgctgtgcacgttggggtacctgttccacctcaatcttccccggtcgttgaatgtgttcattccgctggtttcactggtattggttattatcgagcgttggattatgcgccgcgcgctgcaccgcaaccgcatgaatggcgaattcaactacccgactgtggttattgggtctccggaaggtatccaccggacggtcgaacaattgcgccagtgccgtggcctcggctacgcgccaattgcggtgtgcccagtggcttcagtcaagaacgaggatgacccggattcggcgcagcatttggtgtcggtgcccttcactcctgccaacgatgctgaggcacgactgaaggtgttgccactcaactcgcatttgccgcaaaccgcgaagcgtatgaaggcacgtaccgtattggtagctgatgtacttacccgtgattctgagaccatgcgtacattgtccctggccgtggaatccatgggcattgaattggccctcactacctctgtggctgatttgagcggcgctgacctgcatttccgcaacgatccgacgatgccagtagtcactgcacgactgacgcagtactcaaccgttacccgcatcctcaagcgtgtgtgcgatatcgtgctttccggtatcgccattatcttgagctcgcccatcatgctatgggtggcatacaaggtcaagcgggaagacggcggccctgtgttctattcgcagacgcgcatcggcatttacggcaagccgtttaccatgtacaagttccgttccatgcgcactgatgccgacgagatcaaggcgaaactggctaaggaacgcggcattgaggatcgttttatcttcaagctcaaggacgatccacgcgtgactaagatcggtcactttattcgtaaaacatcactggatgagttcccgcagttctttaacgtgttcaagggcgatatgagcttggttgggcctcgcccgccgctgcctgaagaagtcgcgcgatatgacatgctgtattccacgagactgctggttaagcctggtattactggaccgtggcagatttccggacgcagcgatttgactcaggaacagtcagagtatgcggatgtgtcgtatattcaggactggtctattacgggagacatcgtgattctgttgaagactgtggtggcagtgtttaaggggactggatcgtactgagttttctttgggaatgttgaaatgttgagagggcgtcagcttcttgctgacgcccttcttttgtctctccctcagagcctgtggctgacgtcctcgtcagagggaatttttactgcttgttgatggagcaggcagcagtgtcggtggtgacgccggaatcggtccagcccataggagtttggtcgatggtgaggccggagacagccttggtggatgtggccacgtcgaaggaataggtgacggattcgccgggcgctatcgtggcgatgctcgcatacacggttttaccattcagtgtttcttgacgactccccgtcactgaaccaccactggtcttaagatttgagatagagcccccggcgggcgcataaatcaaagttttttctactccttgtccgccggagccaagaatatagctcgttagagcaccaatctggctgttctcaagtgtatttgtcatcttatattccacatgataggtctgggaaccatcattaccacaggtggaacgagtcaccttcgaagtacgatgaatataccatcccatctttgacggattctgctcagtcacatacactcccacctgcggatgctcttcactgctcggagtctgtgcagtaaagcctgcatcactaatggttttttcagcagtctcatcaaatgcgtacatggagaagtggcggccttcggccatgctgcccatgagctgggcgaccttggtgagtttagtcaaatcaacattgctgaacatactaccgactgtttgttctgcgacttgagcaaatagggcgtcctgcatggagactgggtaatcgacatacaccttgttcaacaaaaactcagcagtgttatctcccgtaagcaccgttccatcaggaatagtgacattaccactgattttcgtaagttcctgcaaaaatacaggatcaaccatgagcacgccgtccagctgagtattgctcccccacggcgtgcgctgccaaatcgcgcgcataccttcggcactgcgtgaagtatcagggtatacggccaaatctcgtatatcgaacgacatgttcaatggtccccactgccggaagatgcgctgctcgtcttccgtaggatcaccagcaccatatggaatatattcaccattcgaacggaaatcgccaatattgattttgccgttgtcagtagttaccacacctacggaaccgatcagaccgccggacgaacgttcctccgaagtggtcatagccatcaacgcatacgtgcgcggctgatcggaaccgaggaagttcggcagaatctggaacgtgccggatagctgattgaccttgtccgccatcttggtcagctgcgtattgccggcggcataggcgttcttcaccatgccgatatgggccttcggcagctgctgatacttctgcacctgctgctgcagtgactggttcgcggtggcaatattcttctgggcttccagaatcggctgcagattcagctgaccgtcgcctgagctgagctgtgcgctcttcagcgtggaaagcacgtccatgaactgcggcaccgaatcactgaccagcgaatcccccaccgaagtcataccctgcactgtggtgatgtcaccgccgtacaccggcgccttcgaggcgatgttccacagcgtgccgtgcgcaatctcgttcgcagccgcggtctcggtctttgcctggctgatctgctggctcaccgtatcgaggttgtcgaggttactgaggtcggtcacaccgcccagcagctgcatcgcctgttcctcatgcgcctttacctgcttggcttcggaatacagcttcaaaccgaagaatccgctcacgcctagcagcaccacaagtagcgccagaatcaacaccactcacggccagatgcggtgccttctgcgtggaatacttgttgcgtgacttgccctatgaacgctcatactaacttccaaactggtcttattgacttgtaacctcttgcaataaccaaccgcctattatgccccggtcttgtgcacaaagcgtgttcgtcccccgcttctgcacatattccgaaccgactggaccacccctgggtatagcgtattggggtgctttgagaggctgctcggccaagcacgcgaagacgacggtcgccgaatacatcgaatacgcattgatatgcgaggcgcatatatcactgaacagatacgccaccgacaccgccaaggcaacaggccgagcaacagaagtgggggagtgcgtgaacggagctcagggaatcaagaatcgtcgcggcgaattgcagcgggtgctgagccacgaggaatcatatgtagacggcaaactcagccgggcggcgttcatctccatcgcgatattgacctttattaccttcgtgggcaacttcacgcagctgcagctgagttccgcgctgccgattatcgtttccgaattccacatctccgtaaccaccgggcagtggctcacctccgtgttccagctggtcatgggcgttatggtgccgctgaccgcgttcctgacccggcgcttctccacccgccaaatcgtgatctgctcaatggcggtgttcacggtcggatcgctgatggcttgggtcgggccgagcttcatctgggtgctgctcgggcgcgtgcttgaggctgcgggcacgggtgtgatgtggccggtgctgcagatcaccgtattctccatttatcccctgtctcgccgcgggttcgccatgggcacggtgggcatggccatgagcgtggcgccggccattggacccacgctgggcggctggcaaaccgatgcgaacggctggcgttccatctttctgactatgaccgtgatcggcgtaatctcgctcgtggcggccatgttcggactacataatttcggctcgcatgacccgtctgcccgcacggactttttctcggtgagcctgtcggtgattggctttggtgggctgatgttcggcttcaccaattcggagacctatggatttgcggcaccggtcacgtgggggccgatggttgtgggactggtcggcatcgtgtggtttgtgatgcgcaacctgcgtcacggtcggcggtatcgcgaagccaaggcggcgcagtcgggagcggagccggccgcactcccccagcctccgctgctggaccttgaggtgttgaagaatcggtcctttaccgtcggcaccatcacggcgtctttggcgttctttgcgttcagctcgattctggtcatcatgccgctgtacatccagaccgaccgtggttactcggccaccatgagcggcctgatcatgctgccgggcgccataggccagtgtgtttcccaattctttggcggtcgtgcgatggatcgtttcggcgcgcggcccgtggcgttgtgcggctcgattgtgctgaccgtcggtacgatcggcatgtctttggtgtctatggatacatggatttggtgggtgtcgatctgccagttcacgcgccagatcggcatgggattcctgcttatgccgattaccacatggtcgctgaactgcctgaacgggccggatgaggtgtctgccggatcgtcggtcacgaacaccgcgcggcagatcgcgggcgccgtgggtgcacctgtgctggtaattcttatggaaacgttcgccgcatggaggcatcaggcgggagtctcagccgttgcggcttccatcttcggcatccagtgggcgctgcgattctccgcgctgctgtgcttcgcgatggtgcttatggtgttcttcggcgtcaagggcgacggtgccggtcgtacgcgagacattatttccctgcgttcgctgcgcgaacggcgtgcgcggcgtatggctgcgaactgacggcagatccaaccattctcaacataataagaagccccggtttccaacaccggggcttctgttgtgctatcgcaggatttcagctggagtctattacgccctgcccattagcgtcaggacaatcagcagcacgttcaacgccacaatcagcgccacgacgatcatgaagatcacgtgcttgacggttccatcagcccacttgcccatgagttccttgttatgcgtgtatcgcatcagcggaatcacggcgaacgggatgccgatggaaagcaccacctggccgatgaccagcgcctgagtcgggtccttggcgaaccacagcacaatcagtgccggcaccagcgtgaccacgcggcaggcccacatcggggcgttgacgtgcagcagaccgtgcatgatttccgagccggcgtacgtgccgaccgatgtggagctcagcgacgaagccagcaggccgatggaaaagatcgtgccgatcaccgggccgagcacctgcgtgatcgcccgctgtgcgccgtcgatggagtccgtgccagacatgccatgcagcgagttggcggcgagcaccagcatcgccagattcacggtgccggccagcaacagcgcccaggccacatcgattttcgagcctctcagctgcgttttgatcgacggcttttcgccgcctgcgtaatggtcgttcaccagcgtggagtgcaggtagatggcgtgcggcatcacggtggcgcccagaatcgaggcggccatcaacaccgagtcggcgccttggaagcgtggaatcatgcctttgaccacttcgccggggttcggcggggctacgaacagacccgcgatgaagccgaatgtgataatcagcagcatcacgatgatgatgcgctcgaatgtggtctgtgtcttgccgccttggaaccacagcatcaccgtggagattacgccaatcgccaaaccgccgatgaacagtggaaatccgaacagcaggttcagggcgatggcgccgccgatcacctcggccagatcggtggcgatggcgatgacctcggcctgcatgaagaacatgaagcggccggcatcgctcatacgctcgcccagcagttccggcagggatttgttggtcacgatgccgagtttggcggactgatactggatgagcacgctcatggcgttggcgagcaccagcacccacaccaacaggtagccgtatcgtgcgccggaggtgatgttggccgccacattaccaggatcgacgtaggccacggccgccacgaacgcggggccaaggatgctggccagcgcatggtcatgcggcttcttattgttattcgtccctgctccggccccggttccgactccggcaagctggcgttccttcccgatttccggtgtttcctgttcgatgtctgccacagcgttcgtcatagcggttgccgcagtggcatctgcttcggtgtgtgttactgccatatcgtttgtacctgttcccttcataccgcgcacagttatagcgcaggcatgtttcccgagtcaacagacggacaatctgcggacgattgatggatgaccggcggactggcagctggcatttcccgccatctcgctcatgaaatgtgaaaaaccgccgaaaactcgctcatgaaatgtgccagacggtagaaaactcgctcatgaaatgtgccagacggtagaaaactcgctcatgaaagtgtaaaatcattgatatagcagtaattcggaaaggggctcctcatgtatctcaaacgcaaagccgatgcctatctcaatgcatggaaatccgacccgaatcgctccccgctaatcatcaagggccctcgtcaagtaggcaagacagagactatcgattactttgccgcacacaactaccgttcggtagtggaaatcaacttcgttgaggaaccgaaatatcgtgcaatcactgcggacggttatggcgcgaataccatcgtccgcaatatttccctgatcgacccagccaaaaagttcattccgggcgatacgctcatctttttcgacgaaatccaggcccatcctgatatcgccactgcactgaagttctttaaaatcgacggcaaatatgatgtgatttgcagcggttcaatgttgggcatcagctataagcaaatcgaaagcaatagcgtgggatataagaccgactacgaaatgcgatcgttggacttcgaagaatttctgtgggctcgcggatacgatgaggccgtcatcgaaagcatgttcacccacctgtgtgatgctacgccattctctgaagtggaaatgaacgtcttctccacggcatttatggattactgcgtgcttggcggcatgcctgcggttgtcgcctcccatatacgcactggcacgttcgagggaacactgcaattgcagcgccagcttattttggactaccaggaggatatccgcaaatacacgcaaggactcgatcagacacgaattctcaacgtgttcaaccatattcccgtgcaactcgccaaggaaaacaagaagttccaaatcagcaaggttgccagcggagcgcgtttcaaagactatcgaggatgcgtggaatggcttgagacctcgggaatggtgaatatctgccgatgtatgtcctatcctgaactgccgttgaaaggcaattatgacgaaaacaagttcaagatatatttcggcgataccggtctgttcgtagcgatgcttgacgacgaggccagtgatgatctgcgggccaatcgtaatcttggtgtctataagggtgctatgtacgagagcatcgtctctgaagcgctacggaaatccggctatgacctgtactactacaaaaaagaggattccacactggaacaggatttcttcgtccgcacgcgcgaatggctggtgccggtggaggtgaaatcgaaaaaaggcaccgccaaatccatgcggacgctaatcacttcggattcttatccggaaattcagttcggcgtgaaactatccgccggcaatatcggtagcagcgaacacgtgttcaccgcaccatacttcaccacatttttgctccgacggctcctgcgcgcttatgacgaggggcaggcacctatgctcaacaatcctgagcggtagcccctattcgtctgcgggcacggcctggcccgggcaggtatggaggacggcgagcatggcgtccttttcttgggaggtgacggtgagctggtacttgtctttgacgccaatctggcgggccacgtagtcgcaacggtagtcggcgttggtgggtagccagtaggcggcggaagccgaacccttctcctgattggccggaccgtcgacggccagcaggttataggggtcattgccgaattcatggcgtttggcagtggaccagtcgtgcgcaccggattgccaagcgttttcaagggccaccacatggtcgatctgcactttggcgctggtggcgcggccacgtacgaaatggatggtctgggcggtgtacggatcggccagtgtgccggactcgaccacacaggaaccggcgtatttgtaggtgatgtccgtgagatcgcgggcgagcacgtcgtcgcgtacgtcgcagccattgccgtcgacgtcggtggtgcggaaaccgaaggaatcgcggtcgtagccggaggagctttggttgtcgtctacggcgagcgcgttcaaagtgtcggcggctgaaccggtggcagtgtagccaccggtgattttggccacgtcggagctgacctgcggcagtaacaggccgatggtcacgccgattgctacggcgagaacgatgagaatcagcacgcgctccagcggtccagaggcgttgaaacgacggcggaagtgggcgttacgacgtgccatcaatcacgcataggtgaaggtgagggggtcgtggccggcgcgggtggggccgtcgagggcgtcgatggcagcgtgttcatcggcggtcagggcgaagccgaacaggtcgagattctccctctgacggtcggcatgcacggacttggggatgatgatcgtgccgttttcgatgtgccagcgcagaatcacctgggccgggctgacctcatgggcggcggcgatcttctcgatggtgccgtcgccggcgttgaggtcggcgccacgcgccatcggcgagtaggcctccacggcgatgccgtgcttcttgcagaacgccaccacttcgcgctgctgccacgtggggtgcagctcaatctgattgacggccggccatgcgccggtctcctcgtgcagacgcttcagatcggcgggcatgaagttgcatacgccgagcgtgcgtgccatgccttcgtcgcgcagcttgacgaacgccttccaggtgtcggtgctgcgccagtcgaacggcgtgggccaatggatcatgtacatgtccacgtaatcgagctggaggagtttcagggagttgtcgaatgccttgagcgcggagtcgtagccctgctcggagtcgcgcagcttggtggtgacccacagggtctcgcgcttggcgccggtgttgtatccggaagcggcgagcgcacgacccacgccggcctcgttgttgtatccggcggcgccatcgatgtggcggtatccggcttccagcgcagattcgacgacagggaccacgccctcgtcatcgatacgtagcatgccaaggccgacctgcggaatggaatggccgtctttcaaggcgatgtccggcacgttggcgggattgatgtgtccgttggtcatggcttgtgatgctccttcatgtactgcaactacacgccactgtacacggttatgcaggcgatgtgcgggtgctgcaaccaaacggcatgattgcgcccggccttccgtgtgggagagccgggcgcaatcatgacaacatcacgctctactcctgcgaccggccctcgccctattgttcccgggcgcgaatttgccccggtacaggcgtcaatcgattgacgtttgcaccggggcagaaatcgttgtcccggtacgcaatttcgggccattttcgagaaccaggacaagacaatccccaaagtccacataccccgacaaacagaatcggcggaatacagccaatcccgaaatcaacatactgtcccggttctcacgtagaacgattgacgtgcaaaccggggcaacgggaattgtcccggtacgcgaaaaacacccgttttcgcaaaccaggacagtgatttctgtcctggtacccacatcaaacgattgatgcacgaaccgggacagaatcgcatcgctgcgccgagacagacgcatctgacagccgacaaccgataaacgacagccgacagatggcatctggcagccggttgccggctgccggcaaccgcatcataatgccgcatcagtctctatcaggagcgcttacgacgcaaagcaagcgagaccccgccggccacgccgagaacgacaaccgcaagacccacggcagtcaccgcgctaccggtattgctcagcacaccagtgatcttgtcgccattcgcaccgttggtcttatcgccctcgcccgtatcgggattgatagtagccccgccattacccgcaccgtccgagccgttgccggaaccaccttcggcccgagcggtaaccgcaaccgtataggtttcggtgacattcggattcgacttgagcgttacggtaaccttcgccgcatcagcgggagcggagaaatcgtaatcgagcgtgaactggtcggcggaaagcgtcacgttacccatgcctgcggaatagttgcccacgaccttgagatcatggtcggcatcgatggcatcgcccacctgataggtggttttgcttggcgtgacggtcaggctggagacctccttttgggcgaggccggcaatggcatcggcaacaagcttgatcacatcgttcacgtcctgctcggtgtaggtgctgccggcaagcagcacgtcagcggcggcaagcgcctgatcgagtttggcgagcgactcgttggtgtactcatcgcgattgattttcccggcttcggccacggccttgtccaggttctccgtggatggcttcaccggagtttcggtctttttgacgagtgagaccttgtccacattgtggttgctcaactgtttggcgtaagtggcgtaggtgccggctttctccgggttggtgaaatgaatgacgaccttggcttcggggagcacttcgcgtatggctttggaacctgcggagaatactttggacatgccgtcccagccggagatgccggcgattttcgcagtggtttcgttgccgacctgcaccatgccgacgtccacgccggcttgtttgaacgtggtcagagtctgcttggtgtagtcgtatacggtgtcggcggttttgtccgcgtcgccttcaaaggatttccacgccttgggcacctgctgcttgctggggtcggcccagaaatcggagtaatggaagtcgaccagcactttcagccctgctgccgtggctcgcttggccatggtcagtgcgcgatcggcgttgacgttgccgccgccatatccttggccgtctgcggtgaacggatcgttccacacacgcagacgcacatagttcacgccggattccttgagcaacgtgaacaaatcctcgacctcgccattggcgttcttgaacgtgacgccgctttcttccagcgagagcatggatgagacgtccataccgccgatgaaatcatcgcttaagccttggatggccttgaccgagacgtcggctttaactggttcttcttcggcggcgtttacagtgaacgtgcctcctgcgcagagcattatggcggccacgccggatgtcataatgcgagtaagcgcggtatttcggcgtatgctttttctcctttgaatggtgaacgctcagaacgaacgcccagtgatgcttggcgcttcctttccttatgcgccacgcggtacagctgtgtaccacgcaatcgtcaccttagtactttatgccgtgttggtcaaccggtgtatcaacgcctcgtacggcccagtacagcaacaccagcattacagcaatgtcgttcagcgtgtggaggcgcgggcgatgacctgggattcggtggtgagcagttcggacttggcgatgctgccgtcgatgcgtccgaggatgcgatccactgccgtgggagccgtccagtcaaggcgggaatccatggtggtcagcggaatctgcaggtagggggcttcctcgttgttatcgaagccgatgacctgcacctgcacgggcacctcataaccagcggtgcgcagagcggtcaatgcgccgatggccaactgatcgttcaaggcaatcacaccgtcgaatggcacgccggaatcaatgagccgctgggtcacacgggcaccggctccgatggtccaatcctgatcggtgttgccaatcagctgcggatccaaggagagcccacgcctacgggtctcttcgatgatgccgcgcagacgcagctgcgcgttgccttctacggcattcagcaatgcatcttcgtcgtaaacgtcacgggcaccgatcactgcaagtctggtggaaccgcggtcatacaggtaacctgcggccatggcggctgcggatacatcgtctggggtcacgtgatccacaatgccccacgtggtacgcgcgccaacgatgaccagcggaaaatcaaccttcagatcatcgggcgaaatgttttccacctcgctcatggaaaggatcatgccatcggacaccgtggagttgaacttcttcagcagatcgcgcgcgccttccgcggagccttccgcatacgtggtgacgtatacggaatagtcgcgctgacgggcggcctcgatggtgcggttggcgagctcggccagatatggcggaatcagcgaaggcacggcgagggtgatgaagccggtgtgatcgcggttgaggttgcgggcggccacgttgactcggtagtcgaggtccttaatgaccgactcgaccttggcacgggtctcatctgtcatacgcccggagccattgatcacgttcgacgcagttttgagcgatacaccggcggcctgagcgacatcgcgtagcgtcactcgacgcttggctgttttctcgtcgctcatgccgcactcctctatccggacaacattgccattctagcgcggtttagcaggacgttttagcgataagaatggcgttgcggttcagcgtatatccaacggcgtcagtctcgcaacggtgggcgatgatgggatcaccttccacaccgttgatggcgacgggctggtttgagcggttgaggtagaaatcgaagcgggtggagccgtctgcggatcggcggatggtgtgcaggatgcggggatctgtggtgggataggttggagtttgaccactctcagtcggctgcgccgacaactcctgccatcgggagccaagtgctttgagcaactgggcaatgtcgtgacggttgaggtcgcagcccacgtagatggcggtaccgttgccataggggcggctggtgatggcgggggtgcgctccagctcccagtcggcggcggactcacctgcgtaagaggcaagcactgtggtgtccgcggctacggaagtcacgtcgttctgccacaggcgggtcgtcagaccattggacaggctgatttcgctgggctcgccttcggcttcttcaccgaggatgttgaattcttcggagcggatgccgagcatgtcgcgtaggagcccgttgccggcgccggggtagccgccgaggccgatgtggaagtgctcgtcgatcaggccggcggcatagccgacgatgacggttccgccggccttcgcgaagtcggcgatacggagaacgtcttcgtcggacaggctgagcacggtgggcagcacgatggttttgtagccggtccagtcgtaggcgagcggcaccacgtccgcgcgcagcccggcatccaggaagccgcggtaccagtcgcgcacgtcgtgccagtggttgagtttcatgctgggcagggtttcggagcgtgtggcccattcggattccgcgctgaacaggatcgccgtgccggcacgctcgagctcagtgccctgcagcccggcgtcggagagggtcttcagcgccttaccgagctcgcatacgccgcggaagaccttggaatcggcgcccgcgtggggcagcatggcggagtggaacgcctcggcgcccgacttggattgccgccattggaaaaagcagatggcgtcggcgcccatggccacgtgggccagggagtcgcgcatgagttcgccggcccgtttgcgtgtgttcagcggcttccactgcacggctgaggtggagtgctccatcacgtaccacggcttgcccagcgcgagggagtccatgagcgcgtccgagcaggcgagttcgtccaggtgggattcgccctcatggaagtagtgatcgttggacacgaagtccacctcatccgcccatttggcgtagttcatgacgcactggtcggtggagaccatgaagttcgtggtgaacggcttgtcggggcagatctgctcgatggcgtcgcgttcggctttgtagaagtcgagcagcatgtcgttgccgaaccgctcgtaatccaactgctgcgacgggttgaccatggcgtcgccgcccatgtgacgtggcagcagcacctcgtcgaaactgttcacgtgctgcgaccagaaggccgtgccccacgcctcgttcaacgcgtcgatggtaccgtacttggcctcgcaccacgtgcggaacgcggccaaggcgttgtcggagtagtcgtagcggttgttccagccgtattcgttgcccatgtgccaggcggtcacatacgggttgtccttgtagtgttcggcaagtttgcggcacaggcgcagcgcgtattccttgaacaccgggcttgtgggctgccacgactggcgtgagcccgcgttgacggtatgaccataccggtctaccggcagcacctctggatgggattcgtacagccacagcggcgcggcggctgtggcggaggccaagtccacggcgatgccggctctgccgagcctgtcgatcacatggtcgagccactcgaacgtgaacgcgccctcgaccggctcgatcttgtcccagctgaaaattgccagcgatacgacgttcacgccggcctcacccatgagacggatatcctcgtccagcgtctcctcgggccactggtccgggttgtagtcgccgccgaacgcgatgccgcggccggattccgtcagcagggacggccacctaaatgctctatgagtagtcatattaatcaaatcctttattgtatcggctcatggccggtgctgtgtttgccggttttgggctttggctcccctcagtctcactgcgttcgacagcgtcatcgacgctttgatcaaggcgtgaatgctgcgttgcgttactgcattgccatgttgccatgttaccgcgttattgcatcgctacgttgccacgttgccacatcacattgcattgccgcattgctgcgttgccgcatcacatatcgcaacacaaacgcagcaacgcaatgacgaccggagatggcatcgccgccacccgcgaggaaccgcaatgcaacgcggtaacgtaacgcaatgcgatgtgattcccgcgtagttacaggcagttacagattgagtaccgcatcagcaatgcgcatggcggattcgcggtgggagaccagcaccacagccgcgccgcgctccttgtctgcatgctgctcacccacggccatagcgtgaatggaacgtagaataatagcctcgttcaaagcatccaaacggctggtcggctcgtcgaaaagcaccagatcagcattgcgcaggaacacacgagccaaaccgatacgctggcgttcaccttcggatagacggtcgcccaactcgcctacctgagtatcaaggccatcgggcagggaatcaatgagatcaagcacggaggccttggcgagagcctgacgcaaacgagcatcgagaccgtcagctgctgccacctgaacggcatcgccctctgccgattgcgccgccaactgctgctgtcgggaatcaacggtcttggcacccacttccccattgcctgcaacatttgcagcttcaacctcggactcaggcaaagcaatcagcagattgtctcggatagagccatcaaacaggtgggtttcctggctcatcatggcctgaatacgtcggcgagcatgcacatcgacctcgggcaacggcgtgccggacaacgtcacctgaccgcgctgcggatcccagtagcgcagcagcagcttgagcatggtggacttgcctcggccggacggcccctggatacccagcacgccatgctgcggcacgtcaagcgagaagtcggacaggacttcatgctcccccgcatatgcaaaggtgacgtcatcaagacgcatgcccatatactcctgcggcacaacagtgccgttctcggtcacagcgggcatctcgtccatcagtccgaacagtcggctagcggacgcgaaggtctgagtcaggttagcgggcaaggcggcgagcgccaaagtcggttcgaacgagctggcgaacagcacgaaggcggcaatcagagccggaatgctctgcgggttcgcgccggcacaggcaatagccacggcgaccgaagccgctgtgagcacagccaccaagagtccgctgattccggtgaaacggccgttgaccttgctgagtttggtgtgatccttccacaacgcatgggtacggtcctcgatggcctgcgcacgttcctcgccgcggccaaatcggatgatttcgtccaggccgcgcatgtcatcgagtatcacatcgtcgagttctccggcagcgccacggatggcagggccaaggttacgtacgccggtggcaaagaatcgcggcacaaggatgccgataaccaggtgggcggcaatcaacgccagcgccatccatgggcttagggtggcggccacaatcgtgtagatgatggtggaggttaccgcgatggccaccggactgatggtgtggacaaagaagatctcaagcagttccacatcggtggtcagcatggcgataaggttgcccttacctttgcccgcgagcttggccggcgccagtctgcgcaacgcggcgaacgccttggaacggaagagtgcgagcagatggaatgccacattgtggttcagatattgttcaatgtatcgggtgatgccacgcagaagagcacagataatcatcatgatgacggcgggcgcaacacccatgccccacaccggattaccggtaagtgcaaatgccgcgataatgccgaacacgggcaggaaagtggccgaaagatggccgatggtgccggcggtggaggccgctgccatcagtcctgccagaggtcgggcttccttaagcagtcgcctgatcacttggaatgtgctcattttggaagacgaatcgctatttgcaacaccagccggagtctcagccgaggcctgctcactcccgccaacggaagccgtcggcaaagctgactgcaggcggtcaaccgtcatacccgcctctgcgcttacgcgcgctgcgccaccctcagtccgactgtcgtcggacagctcctgcttgcgggaaccaacctgcagcacacgccgagcacggccttctccgaagttctcaatatctgcctgcgtggtaaacagcttggcgtagacaccgtccgccgtcatcagctcggtatgggtgcccctctcaaccgacttgccgtgttcgagcaccaccacttgatcagcgtgttcggcgttggccatgcgatgggtgatcataataaccgtcttgccgcgggattgcgccaattcgcgaattgtatccaggatcagctcttcggattccatgtcaacgctgctggtcgcctcatcgaacacaaataccggcgaatcatgcaggagcgcgcgggcgatggcgatgcgctggcgttggccgccggacaggttggcggcatcggactcaatcggcatgcccagtccgttcggctgtgcgtgcacgaagtcggcaatgcgcgcctgctcgagcgcggaccacagacgggagtccacggaatccggcgaatcaggaatctcgtcatcgggcaaggccatcagaagattctcgcgcaatgcgcccgcaaacagatggctgctggcaccaatcacagtgacggctccggccagtgtttcgcctgacaaatcggatacctcgacgccgttcagcgtgagcgaacctcggtaaccggccagtgtaccggcgagcagcgaggcggccgtggacttgccggaaccggagatgccaacaatggcggtgaactgaccgggccgtgcggcgaaggtgatgttggtgagcgcaggagcgacggcggaattggggctggtttcaccttgcttatcggtctttgcggatgcggacttggagtcgccgtgcccggcatcatcataggaatagccgacgtggtcgaagcggaccgtcagaccgtcgtcagcggaatcggaatcgttggccggcagggtcgccgtgccatgctcgggctccggggtgtccagcagagcgaagatgcgcttggtggaggtcatgccgttcatcgccacgtggaagaacgagccaagctgacgcatgggaataaagaattcggcggacagcagcacaatcagcagcagtccggcgagggtgagcggaagcccgcaccgaacggcatcaggtattgcaggccgtaggccagataggcgaatgcgccgggcaggtgggcggcgagcatgatcggcgaccagccggcggtgctggctcctgcggcggctgcggtggtatgcgcatactgccatagagccacaccaatgccggccgcagcaccgccgtaggccactatgtccatggcggtcagcgagcgcagctggatctgcagcacgcgcatggtcatgaccctgcgctccacattccgcgcaatcccattcaccttaagcgaacgccctcgcacacgccagacttttaaagtgagagaggccacagaattatcgattgcggagtgcgcatgctagacgcgccaaccagaaaaaatatgcttcgatatcaggggctgaagcatccactacacccaatacgtgcatttatccgtttcgaggaggctaatttttgcgtttgccggaggcctacttccgtttcaaggggctgatttcgcatttgccggaagtctatctccgcttcgaggggctcctcatccatgtaatcggaagtataaacggctacacgtcaacgtcattccgccgttttagggccgtgtctacttgggcatcagcccctcgaagtggaagtagacttccagataaggcaaaatcagcccctcgaagccgagaaagcacgtttctacggtgtcagaagccgacggaacgcaaaagggtcgtctgcacgcagacgacccatatgatcaattcgccaatagacgcagcaaacgcggcctagtgctgctttttgcgcggcgaccagtgcttcggcggcggccgtacttatcggacaggaagccggagaagccggcgccgatcacgccgccgatcatgatggagctgatgaccagaccctgcagggccgggctcagcgcgtacttgtcctgcaggaagtcgatggctcccgaaatggacacggtgtcataaccgtagagcaaaccggttagacacggcgttgtatacaatccacaaaaccagacagacaacttctccattgcccacaacgcgcgcaaccttacgccagcgtaacctaacttgtcagaatggctcgattttgtcaacagccatcacgcaacgcacgtaaggacacggcccgcttatgcttgaccactacaccacgcctggcgaatccatcgaaatccgcgacaaccagaccatctactccctacttaccgatcgccttgcccgcaccggcgcggacacggtaatcgccgccaagaaaatcggccccggccgctggcagaacgtcaccaccggcgaattccacgagcgcgtggtctcggccgccaagggcctgatcgcgctcggcatcgccaagggcgacgcggtgaccatcttttcctccacccgtctagaatggggcattctcgatttcgcactggccgcggtgggcgcggtaagcgtgccgatctatgacaccgactccgccccgcaggcccagcgcatcatgaatgattcggtggtcaagctggcctttgccgacaatcgcgagcgcttcgaccggctcgactcggtcaaggaccactgccctgccttgaagcagattctcatgctcgagggcaacgcactgggcgcgctcgaaggtctgggcgtggctgtttcggacgaggaactgaacgagcgcgtggccaccgtgcgcacggacgatctggccaccatcgtctacacctcgggctccaccggcaacccgaagggtgccgaactgacccataagaacttcgtgtccatcaccatcaccgcttcgcaggcgcttcatgaagtggtgcttgacgaccatccacgcctgctgctcttcctgccgctggcccactgcttcgcacgattcatccagtacgcctccatcgcctccgatgacggcgtggtcggctatctgccggacaccaaaaccctgctgccggacctgcgttcgtttgaaccgacctacctgctgggcgtgccgcgcgtgttcgagaaggtgtacaacgccgcctcgcataaggccggtgccggctggaagggccgcctgtttgtcaaagccgccgaggccgcgcgcgtctggagccgcaaggagcaggccggcgagcagcacacgtttgccgaaatcgccgagcgcgccaagtacgaaacgctcgtctaccgcacggtgcgcggcgctctgggcccgaagatcaagtacgtggcctgcggcggcgcaccgctgtcgctcgatctagcgcatttctacaacggcatcggtctgccgatgattcagggttacggcatgaccgaaaccgccgccccgttcgccgccacgcgcgtgaccgacaatgtgatcggcaccgtaggccagcccgcgcccggctcctcgattcgcatttccgacgaaggcgaactgcaggtcaagggcccgaacgtgttccgcggctaccacaatctgccggagaagacggccgaggcattcaccgccgacggctggctcaggaccggcgacttggccgagatcgatgacgccggccgcatcatcatcaccggtcgaatcaaggacattattattaccgccggcggcaagaacgtctcccccattccgctggaggaggagatcgccaagtgcccgatcgtggagcactgcgtggtggtgggcgaccagcgcccgttcatcggcgcgctggtgacacttgacccggagtcgctggccatttggctgcccgcgcacggcctgtccacggagacgccggtcgaccggctcgccacgaacgccgcggtgcgcgaggagatccagcagtacgtggacaaggcgaatgcgacggtctcgcgtgccgaatccgtgcgcaagttcgccgtgctgggcacgcagttcacgcaggagaacaagtgcctgacgccgtcgctgaaggtagtgcgcccggccgtcaaccgcgtgttcgccgatgtgatcgacaacgagatctacaacggcaagcggtgaaacgcgcggttcgtaatccgacacaaaaaagggccttttgaaccgcacctccgatcatcgaatctggattactccagtccaacaatcggggtgcggttcaacctcgccgggcacttcatcattcatcactggcatgattccattatcacgcacattatggcgcagagcgaatacggcaccccggcaacgcgagtgggtcgccggggtgccggagcgcgggggtgccagaatgccgaagggccgggataccggagtgcccggtcgccggggtgccgaaatgccgaagcggtgtatgggtgccgcccggcccaggtgggtcacgcccgggtcagtttcttgctcctgagacgcagcacgacatcggcggagtcggcgacacgcttggaatgcgtcaccacgattacgcatttgccgagctgatgggcggcatgctgcagcagatgaatcacctcgtcggtcatctccgggtcgaggctgcccgtcggctcgtccgcgaggatcgcgcggcccggggcgaccagcgcgcggccgaccgccacccgttgacgctggccgcccgacaggtgcatgatgttgcgcttggattcctcacggctcaaacccagttcctcgaggatcttcatatcggccttggtgctgaccagccgcaggttctcttcgggggtgaggtagtcgatcaggttatggtcctggaacaccagggacacgtgctcccgacggtgcttcgcatagcccgatgcggcgatgtcctccccctcgaagcggaccactccccgggagggggcgtccaggccggccagcagagacagcagcgtgctcttgccggcgccggacgggccggtgatcgcatacatcttcccggattcgaaatccgcgctgacatccgagagaacaaggatcttcgccgcgccgtaggcgtaatcgacatggtccagttgcagacagttagacatgattggtgactcctaacgcatagaggaaagaatggatttcggggatttggacagcacggcggcgcatgacacggcaagggccacggcgatgaccgcgcatccgagcagcaggatgagcaccgtctgctcaggcggcaaggcctccacgtgcaacgattccaatggcgcgacgcccgaatcgcgcaacagtcgggaagacacgtatcccgacagcatggcgccggtgcccagcgaacacagggcggcgaccgccgccatgagtccggtttcgatggcgagttgtgcgactatccgcatcttgtcgatgccgagggccagaagcgtgcctatctcatggatgcgtgagcgaatccagaagaccagcgccatcgccagcaccagtacgtccgcgaggcagacggacagcagcaccatgcgtaccagatcacgcaccgtctgcacggattgcaggacgccggagagccgggccgaatcgtcggtgacgtcgtacttgccaccggccatggtcttggcctgactgaccgccgcggacaggtcctgcggattatccgacaggcatcggatcatgccgatccggtcgtttccggtcagagcggaggtcactcgcctgcccgaatagatgaggttctcggaagtgtccgagggcagggggctttgggcctgcacgttgccggagaagatcccggccacacgcaccgtggcgttgcgcccctcctgccggagacggaatgtcgagccgatcgataggccgttctgcagcgcgaagtcgcggtggaccagcacatcgtcgccgtcgcccgagatatggccgccctgctccaggcggtacaggccgctctggaattcctctgacaatgaggaatcggtggtgcccagcacgctgacctgcatggccagatcggagtccagccgggggccctgccggggcatgaccgggcgcgcgccatccacctgcgccaaggtcttcgtcgcataggcggtcttcgtcacaccggggatatgcgagaaccggctcgcctcctcggcgctgatgggattctcgccggcgctgacggtaaaccctatgcccatgcccgcgccgatgccgtcggacatggtacgcagggccgtcgagactccgacctgcgccaccaggctcgtgaagaccatcagcatcagcagaccgatgatgccgctgcgtaccggcttgcgtacgatcgccaacgtggcacgcttccacacattcatgctcatcatcga

SEQ ID NO: 1355 - DNA, 9246 bp, Unknown
  R157_18m  MAG No. k141_28110
ggaataaagcaaaaaacagttggctaggattatcatgcgaggtgcgcatgataatggtagtcatggctccaagtgtctcatgggcttgagaccggggaagagacgtgattgcgggaatggcgcggagagctgggaatgggcatgggcaatagccgggacaacatgccgcagcgtgaagcgtcatacgagttgtctcgcgatggccaacgcgccggcaacgaccatgagcgctgagaagacacgcaaaagagtccttttggcgttctcttcccggtttttggatccaatcacgacgtatatcaggactaatccgacggccagcggcaccaaggccagtagaagcagtggcttttccatggcgcctcctttctgaacgctgtgattcagagatatctttagctaatcatgggatatgggcggcttggcgccgattggtgatggggctcgatcctgatgttcgtcggtgccggaatatggtgcattccgtcaaatagaggtgggcacttggatacggtgtcgctttattggatttctttgtttctatggtttgattatgccacgagtccaacaaaacgttaccggccccagcggctattgacaaacttgtcagtttggacgtattgcgtgtcgaacacgctgagccgcgacaaattagatgcctgctgctcggatgcgggtctattggaagtcatatttatcggcacatttcaatgcttgctttggaacatattactttggtcgatcatgatgttgtcactgtagacaacatttaccgtcaggattacgtgcgaacagacattgggaagaaaaaggttgatgtgctgaaatccagggcgtcaagatgtctttctatagatagcattgataaaatgataacttgtcatagtgaacttgatgaattaattgaccgagagaaaatcaacttagtaattcaagcggcagacgttccaagcaccaccgaagtcgcaaggatgattaactactcatgtgataagaaagatatagcgttcattgttaatccaggctattttggtaattcggtaagtttgcctgaattctattatccgaacaataaatatgactatatttcttcacacttggcaatcaaaggcaagctattgctgcaccatgagtccggtaagcttagctatcgattatgttcaacattgggatcgttggtagcggaacaggttgaagattatcgatgtcattgctgtcctgctcattatggagaaaagggttacttcgatatatatgattatgcttggcatactgagcaagtttgtaaagaaccagtgccgcctaatcttctgtaggattccagtactggtagggtaaggataaattattagatgagtaattcgttaaagctcgtttctgctcctgtgcgcgaaagcaggttgtgggatatcccaggttacgtgccatggttcacggcggacagcgcgacggccatcggcgtggccctgcggtatctggcggtctctctgatcggatacaagctcaccggatcgaccacagcagcgggttggttgggctcgctggccgcgatcgcacagcaggcggccgccgtgttcggcgggacattcgccgaccgtcacgatcgcaagacactgatcatcgtgaacgcgacagcgggcgtcatctgttgggggtcagtcgctgcgctgctcatggccggcaagctggtcttccccgtgctgcttgccatcgcggtgttcgagtctgcggtcaacgggtttctcggccccgcctcggatgcgatgctcaaatccatcgtcgatattcgctcatatccgaaagcgcgcagtctcaacgaaggccgtgacgcgaccatcaacatggccggcagcccagtcggcggcctgctgtacggcatcgccccgtggttgccgttcctgtcggctgcggtcatgtacctgctggcaggcgtggctgcgacacgtatccgagtcggcggaaatccgcggaacggcagcgatagcggcaacggcgatagcgacgatgacggtgggaaagcgggcggcgcgtcatttttccgtgatttcgccgaaggatggtcgtggtcgctgcaccgcaggatgctggtgttgacgatggtgtcgtccgcgctggcgaatttcggggtcaatggcttccagtatgcgattcagctgcatctgatgcgcaccggcgtgaacgcgacgctcatcggattcgtgaatacgggcgtattcctcgcgatgctggcgggtgcgttcatcgccggacggatcagcgataccgcaccggtcgggccggtgacatgctgcggattcgtgttcatctgcatcgcttcgctgccgatgctgctgaccgacaactactgggtgctgcttatcgccaacgccgtgatgtgcctgccgttcccgatcatcaacgcgttgcagctcgggttcattttcggtaagacgcccgacacgatgcaggggcgtatcaccgtgacgcttaccgtaccggcccaggcactgtccgcgttctgctcagcgacggccggaagtctgctgcccgctttcggattcagcgggactatgctggtgttctgggcggtgatgctcgtcagtatgctgctaatcgtcagttcgcgcagcctgcgtaccattccacgcgccgaccagtgggatcgcacaccgctggagtagccgcggacggccaccaaccatggggactatgcaccgctgcgcgctgctctccgcacacgtcttccattccgcaaaccggctgcgctgacaggacgatgagtgcggtcagtttgtggcagtcagtttgggaagaactcaaaatctcgattcagcaggctcaaatcacgagttttcagattgtggtctggaaaactcggtggaagaggctgatcccgggagaaattgagaaatccggatgtccgtttgcgcgaccgattctatgaaaacttccggatgcgcgcgggagtttagcgcgaaacatgaatccggcgaagttctcccgggaacggcttcaaggtcgatttttgagaatcgcggaattccaacgtttttgttgagagattatgcatgagagtaccggattctcgtaaactcccgcgtccggcacgggagttcagcggcgaattcccgaagtcagcgtaaactcccgcagaatctgggagattatggcccgacgaggtctaccagaacgaactcccagattggccgccgttcagccagacgaaaacgacccagcaccggcggaatcgaacaaacaagcaccacaaccaccatcaagcagtcggcaacgtcattatgagctgataggaaccaaccttcttgtccgtcatcccagtaaacgttgcgttagttgacatgtcagggtattattctcgaacagtgtgtaaacacactattcacgtatacctctggcgtgtccggcgatgggatgcccgcggcggatatcggacacgatcttcccgatccggcactgttcccggaccacgcagtccgcgaccatgcacgccaggggaaccggattgccgtacgcctgccactgctcgagccgtccggcgtaggtgctgccggcatcatgcctgatggcgatgggctcgtaccccgcctgcatgagcatcatgttgaggatctggcgtccggtacgcccgttgtcgtcggcgaacgggtggatgttctcgagtgcctccgcggaggcgcgctccgacgggggggtaccatcatcggaaagtccgccggaaacggcggacttttccatatccgcctccgcatcgtccgaaacgcccattctcctcatcagagaatcatcaagaagttgttccgtgcttactttcaagaatcttgatgcattaaccaggtcgtatacagaccagcctgttttccccgacatctttagggacatggccgaacggccaattcccatcgcttcggccaagctggactgcgaataaccataagccgtcaatagcattttgacattgaaggtgattgtcgactccagctgcttttgataaggggctgcggacattttcttggagaccgaacggaaagattttcgtatgttcagtcttgaggaacgagagcgtgcggtggagttgtatttcaccacgccgatgacgacggcccaggtggtggagcatctgggttatccgaccaggcagtgcctggagcgttggctggcgatggattcccggtatgctggccatatggccaaacccatcatcccactggagaccaggcgaagggcagtcgagctggtgctgggcggcatgcagcagaagcaggccgccaaacagctcggcgtgagcgtcggcgcggtgcatggctgggtcagggcgtaccgcaagggcggcatggccgcgttgcagcccaaaaacaggaactccgcgcagggcaataagcccgctgactcccgtcgccggccgtccgcagccgatgatgatgacgcggaggctttgcgccgcagggtcgaggaaccggaaccgggggaacgcgttgatgagggaggtggcggaggctcgcagaaaaagaccccggcgccgacctgcggcgcctgtcgaacagggagaagaccctgttgatcgaccggttgaggccggcgtattcgcccggctcgatggcatgcttgcccggcatcgcgccgagcggccacctactgccaccacgcccggctcggagttgacaagtacgccggactcggggcggaggtggccggggcgttcgccgattccaagggcaggtacgggtaccgcaggatcaaggcggtgctcaagaccggcgtatcggagaagtcggtccgcaggatcatggcggaggaagggctcgtggcgcatgtgcccaagcgacgcaggtatagttcctacgagggcgagacgacgccggctcccgccaatctcgtcgaccgggacttcacggccgagcgtccgaacgagaagtggctgacggacatcagcgagatcaaggccagggacgggaagggcgtgcctttcgccgccggtcgactgcttcgatggcaagatcgtcgcatacaccgccggcttcagccccaacgcggagctggccaaccggatgccggagaaagcggcctcgacgctgccggggaacgcgcgtcccctggtgcattccgaccgtggatgccactgccggtggcccggatggctcgggctcatggaacgcttcgggctgacgcgctccatgagcgcgaagggctgttcgccggacaacgcggccgcggagggattcttcggcaggatgaagaccgaggcggtctaccccgagaagtgggaggaacacacccgcaacgaggtgctcgccttggtcgatgagtacatacgctggtacaaccacgagcgcatcaaacagtcgcttggttggatgagcccggtacaataccgtcaaagccagggaatggctgcgtgattatctccaagaaaatgtccgcagccccttatcccctaccccttgtggcatgattggtggcggtgagatcaatgacgagtccggcgaaacgtcaccagtcccgacacgcggatttatttggcgaaagacatctttaatgagccgcaagcgctaggccaacacttgcggctcacattatagataaaactagtccggctttaccagacagatttggttatctaattattgttattactctttatgggaggatagccataatatacggaaccgtaatgcggtgaagaagtattgtactttaacaacgtgtatgattctgcctcgccaactttactgctgccactagcaattgaattccaaatttttgaagcgaaagtagaacagttgttaagatagccccatctatcgttatttttaatattagaattcactgtatctaaatcaatttgccttaagggtaattgaatggaaacattctgaagattaataccattggaattaagcttcgaataaagattgagccacagacccttatattctctactgacatctacggattcatcccaagtgcttgctgttatagatttaccatcagcaacgttaatcccagcaatgtctgccgtagaaccagacaggtttgtgatcataagccaagaatgaccgagattcgtgaaactagatgacgagccggatcctgtagtagaataaatccgcagtaaagctacagcctctgcagcgcacgttttgtaattagcaccccgagaaggagatgagataattctcagatcttcgttatctgaggctttctcaagatcttccagagaagcattagacggaaagctggatagggtaggactcctatagggagtttcgatagattctgctgccgacgcatttactgtcacagttccagccaatattacagatactagagcagtgacaatttgtttgagtttctttatttatttctcctttttgtcaggaataaaatagtttcgatagcaccagcagcgacaaggaagggaaccgctcgtaaaaaataaagatatgaaggaaagctagacacgtattctggatgcaggtagtcaaaaataaagccgcttactgtgcgtaggagtccggcacacactaggagacctgcaagaatgtggcaaattcggcacatattgactcgattctcgaactgcggaggagtgagtcctattgtagtagggcttgccggagaggccaggcccagttcaaggagcggaaggcttgcgtcgctcctgcggaatcgacgagaaagtgttccagcctcctggtgaagagccacgagcaccctgcttggggacccgacatcatcgatgtacgacatacggcatctacgacttcgcccggttcgtgcagacgcttgaaagagcgagggtcatacaggcctcgtggaggcgcgcgtcttctcctttgtgggcgtttgggtttttctggtggtggtcttgatggactggcgtgtgcctctggaatgatgatatggaggtttcattatatcgtccgccgtctggctgggttgcattcgcgggggattggcgctattctgtaacagcgaaataagctggacttcgttcggttcgctgaggccattccgtggacgcggggtggcctcagtgctttcatcgctggattgggggaggtcggatccatgtcgttgcgcaagccctacaggagtgtgaacgaacagctgcgcattctgcgctcccgtggcatggccgtcgatgccggtgcgggtcatgtgctcaggcgcgagggctattatccgatcgtcaatggctataaggatttgttcctcgaccgaaaggcatgcctgaccgctggtgatgaccggtacggaacgggcgcgcgtttcgatgatctgtacgccctgttcctgttcgaccgtgagttgcgtgaactgttgttttcctccatcacacgggcggaggccgcgctcaaggcagtgtgcgcgcatgagttcaccgggctgcaccccgacgaggtcaacccgtatctcaatcccgactattatgattccaggtgccgtccgagcgccatggcattgatcgacaaggtcttcaagcggatacttgagttggacggcaacccgcgcaacaggggcgactatggcggcaaggcgtatatccgccattgcatggaagaccacaacggccaggtcccgttgtgggtgctggccaacgatctttccttcggccagacggtatggttcttccaagtccagtccccggccgtccgattggcggtcgccgaaagtttcaccggtttgtatgcggacacgcacgacaggccacggcgcatcaccatcaagcggctggacagcatcttcaacagactggtgttctaccgcaacctgtgcgcgcatgacgagcgctgctattgtgcccggtacgatgggcgcgctaacgagaacgtgtatcaggccatcggtgatcttggttatttgcttgacaaggacgattacttggaattgttcggtcgcttctccgcattggtcgcacgggtgacctccaccatgccatcgcggagccaagcgatcctgtctgccatgggtgtgcgcgaacgggaactggccgacagggcggaaatcatactgcgcagctgaccgttcctgctattgggacggtggcgtcgcaggcggctttggaccatgagccagctgatctgggctgtctgcaatgggcctgtgggattcgggatggatttggatgccattggcggctgggacggttgcacgggctgcgtatcgttctgtctattgtccgccatggagacatgctgccgggtgaatgcttctgggcaccacccatgcggaacatcatgaaaccacagggggtattgcgcttttccgtgccggtcggcgaagacgctgagcgccggcagggtggtggaacgttcccggattattcttgggtgcctgtaggtgcctcgtggaaaacgagcgtaaccggcaggtttcccaaaaattgaaaaccttggaacaaagccaaaaacgaccacatgcgattatcatcagaggtgcgcatgatgatggtagtcattgtcttaagtgtctcatgtgcttgagaccgggtggtgatgcctgattgcaggaatgcgggttgtgattaggggcatggggtagccgaccaccaagattgagaccaatgcattgggtaacgatgcggcgagcggttccggcattctgccgttggaccgtgactgagatgccgtgttcttcgataatttgtgtcacgttggccctgtagatccagttctcgccacagtaagcgcccgatgtctatttagaggtgcaacacccctgttggtcctgcaattctagcagttcgtcggcgaatgcctcggcgggtgtccggtagtccagcacgcgcatgggacggttgtcggcctcgtcgacaatctcccgcagttccccggccatgtccatccggatctcgctgcgttcgggcagatgccggcggatcatgccgttcctgttctcgttgcttccccgccgccggctggagtacgggtcggcgaagcacgtgtccatgcccggctcgtcgcgcaggcgcgtgtggcgggcgaactcggtgccgttgtcgtgcgtgacgccgccgcgcgcgccggccggcagcggcgagaacatcgccagctgcgcccccgacgctttccccggcggtcttgccgggcacgatcccggccatgaggaacctggtcttcctctcgacctcggtgtgcaggttgcatccggcgccgatcacgccgtcggcctcccaatggccgaaaccgctgcggtcgccggcctccggcggacgctcggagatgggaacccgtccgggaatcgggaaac

SEQ ID NO: 1356 - DNA, 7371 bp, Unknown
  R157_18m  MAG No. k141_28393
cggcacaacgatatgccgtgcttgacccttgtgagaggagttttatatgaccatcgcaagtatgttgggcggaaccatgctgttggtgctaattctattagtcgttcttatcgtgctgctgggcgccgcattgttcatcgttccgcagcagcaggcgtacatcatcgaacgcttcggcaagttcctgaaggttcagttcgccggcattcacatccgtatcccgttcgtcgaccgcatcgccatgaagaccaacatgcgcgtcaaccagctcaacgtgcagctggaaaccaagactcttgacaacgtgttcgtgaccgtcgtggcctccacccagttccgcgtgaacccgaacgacgtggccaccgcctactacgagctgcgcgatccggctggccagctcaggagctacatggaggatgcgttgcgctccgccatccccgctctgaccttggacgacgccttcgcccgaaaggacgatgtggcgttcgacgtgcagaaaaccgtcggcgccgagatgagccgtttcggcttcaccgtggtcaagacgctgatcaccgccatcgatccgagcccgcaggtcaagaacgcgatggactccatcaacgccgcccagcgcgagaaggaagccacccgccagcgtgccgaagcccagcgcatccagatcgagacgcaggccgccgccgaagccgagaagacccgtctgcagggcgagggccaggccaactaccgccgtgaaatcgccaatggcatcgtcgatcagatcaagagtctgcaggccgtgggcatggacatcaacgatgtgaacaacgtggtgctgttcaaccagtatcttgacgtgatgcgttcgttgtccgaatcgaagaacaccaagaccgtggtgctgcccgcctccacgcccggcggttaccaggacctgtacgaacaggtcaccaaggccatgctcaccgcggccgagacgaagtaatcaccccgtttgcaaatcctcatccatcgatagtgaagcccctccaagcgaggggcttcactgcgttccgcgctgattccgacaagtgcgcaaatgggccgtatacagattgtgacgagtgtgagaatcatctacttatagattgtgacgaatgcaaaaatacggcatttatagaactcgataagtgtaaaatacaggatattacaaaatcagacgagtgtgaaacgaaggggtggaacatgttgaaacgcaaggcatatcagcgtattgctttctggaaagagcataagaccaaccaagcattgctcattaccggtgcacggcaggttgggaagacatatctggttgaggaatttgggcagaacgagtatgagcatatggctgagttcaacctattgcttgacgacagcgtgcgtcgttcgtttgcgcaagccaccagtcccgatgatttgatgctgcgtatttctgttgctgcacaagggccgttggttgtagggaagacgcttatcttcattgatgaaattcaagcatgtccacagattgtcacttttatcaaaggactggtggaccggggagactatgactatattctttccggctcattattgggcgtagaactggaggatgtgcgctccctgcctgtcggatacttggatgaatttatcatgtatccactggattttgaagaattctgttgggcactggggctgtcggaaaccgtcttcgacattgttcgtgacagttacggtgccgtaaaacccgttcctgattttgtccatcagcgtttgacggatttgttccaccggtatctgttagtcggtggtatgccggctgcagtgacttcgtttgttgagagcaaggtcatcgatccagtgcgtgcgattcagaccaatattcgcgcatactatgagcatgacattaagcagtatgcgccgaaggataagagactggtcattcaagaaatgtatcgacttatccctagtgaactgcaaagtcaaaatcgcagattccaagtcagttctattgccgaagtcaaacgattctcgcagattgaagatgaattcctttggcttacccgtgctaatgttgcgctgcccgtatttaatgttgccgcccccgtggccccgctgagagccagcaaagaacgtcgattgctaaaactgttctattccgatgttggattgctgaccagctcgtatggaaaaaagtcagcactgggcatactggatggtcaggctgcgatgaacatggggggagtctatgagaatgtcgtggctcaggaacttaccgcgcatggattcaccaatctgtattactttacgaaaaaaggaattggcgaactggatttcctgatagagaccgatgatggtgatgttttggccctggagattaagtcgggcagatattaccgttctcatgcggcgcttgacaatgcgttgagcgctgatggctacaccattgacaaggcgatggtgttcgcggaaaccaacgtgttccaagaggaaggcgtcacatatttgccgatgtatatgctcacgatgctggttaatgagtgatcggtgccttggtggtgcgatgcaggcgatatttgtgatggcggtcgataaggaggtgctcaacgattctgttgtcggaccggttccgagctggtcatgaggcgtcattggaaagttgcggtgtgtagggtggtgtctttgccgagagtacagtgtttctcgaaaaatgcggtgcatgcgatatgtttaatgtaattctaaatattacattaaacatgagtgagcttcccgaattcaatttgtaagtgcaacgttcgtctttgggtagcttgtcttcgacattagcttgccgagttcgcggtatcaaacctcgttgggtgtttcccagtccaggaccttcatgggggtgtcgttgatctcgtcgacgatggcctgcaggtccgcgtccgtcaggtcgtcgaagctggttctcttgggcaggtagcggcggatgcgcccgttgcggttctcgttcgtgccgcgctggtacgaggagtacgggtccgcataataggtgagcatgccgagcgactcgtccacgagcaggtggcaggaggattcggtgccgttgtcccaggtgcggtcgatgcgcgcgggcgcggggatgcggctgtagatgtcgtattcggcacgcgccgtggccagcgcgctcttgtcggggatgaaccgggcaaacagcctgcggctcctgcgttcgacctgcgtgtcgccgcaccgcctcgacggggaggcgccgatgaccgtgtctgactcataatggccgaactcgcggcgcgagtccacgcgtttcggacgttcgccgatcggctgtgtcctcagctcgtcgatccggacacgttcctctgccgacaggtgggaatacactctcatatcgagcgcgacactttctctctggttatgaacttgaacacttccagccatggagcgggtgctgcgcttctatttagaactcgtgcggtctatcattacatctgtgtttcgctattgtggggaggtgtcgtaaatgccgattgtcgcgggattccggccgttttgtgatgcggtggcgacgtcgtggcggacgagtgcgtatgcgttgcgtaggcgtccggtgcgtacggtggtgatgtggctgtcgatgttggtgatgatggcgatgccgtcgttgcaggtgtggctgatcggttgggcgtgcggcccggacgggcttggtatggggtcggggctgggcgtgggccggttcgcagtgatcctggcggtgctgacggtgggcgcggtgttgatgtcggtgtcgtcgtcgttggcgcagaacatgcgtgacttgttgcaggagccattgatggccgaataccagtccgatctgaccgacgcgctggcgcgtctgactcccgcgcagacgttggacgacgaggtgacgacgcaggtgcgggccgcgcgcgacgcgatcccgtacaacgtggcttcgcaggccgcggacgcgacctcagtggtgggcgcgctggcgtcgatggtcatgctggccgcgtccttgtggcatatgcatccgttggcggcgctgatgatcgcgttggcgatggtcccggagttgttggcccagttcggcgtggagaagctcacgaacgagttatggcccaagcgcggcagggagtcgcgtcgggcgaactatttcgagcggttgttggattatccaccgtcgagcacggagatcgcggccacggccggttcgttcggcatccctgcgcaggcgcgcgtgcgctatttcaatatggccggcatgtgggagcgtatctcgtggcgcacggtgcagttgaccggtgtgagttcgctcgtgttcgccgtgctgacgggcggcgcgttctggctgatcctgacgtccggccatgcgtccgtgtcgagcatcccggccgcgttggtgggcatcatgacgggattgtcggtcacgcgcaccactggcgaggcgttcggcaacctcatggcgtccacgccgatgattcttgcctacgaacggctcatgggcctgctgcgcgcgaaccccgcgatccccgaaacgaccggtccggtcggcgtgcacgtggagcatctgacgtacgcgtatccgactgttgcaaagcatgacgatgacgcggatgacgcgtcggcagcgtcggttccggccgttcagactccggcgttggacgacgtgtcgttggatgtcgaagcgggatcgatcgtcgcactggtgggcgagaacgggtcaggcaagaccacgctcgtcaagctcatcgccggcatcctcgacgccccggacggcaccgtgaccctgccctcgggcgcggacggcgggaacggtcgtaccttggggtcgtgggccgaacggttgggcgcgtcgagcatggtgttccaggatttcacgcacatcgaggtgaccgtgcgcgagttcatcgatcccgctctgcggcaatcggacgatgagttatgtgacgggttgcgtcgcgcccgcgcgctcgacatcgtggatgggcttcccggcggcttggatacgcagctcggtcaggagtggggcggcgttggcctgtccggcgggcaatggcagcggcttgcgctggcccgcacgttcctgtccggcaagccgttgtggatactcgacgagccgaccgccgcggtcgacgccaccgccgaggccgcaatctaccatgatctgatcgccaaccgtccggcgggcaccactgtgatcgtcatcagccaccggccccgcgtgctaaccggcatggaccggattatcgtcctcgaccacggccacgtcaatgaaaccggcacctaccgtcaactggtcgaccgcaacggcaccttcgcccggctcgcacacgacagcctcgaatgagctcgatggcatatccggttgattgttaaaaactcagtggccggccgacagattcgtccgacgaggctcgcgcgagtgatcataacgcgggtcgcgtcggatatgcgggagatggcacgccttatatcaaaagcgatgattttcaaataaggacacggccccatcagccggtcgcgggtactacagtgaaccacaacgttcctcccccgatggtttggggaaacacagaaagaggttggtcgtcggcctgatcatcattgcgattcgcaccggcttcttccgcaagaagctgggtgccagcgagaaccttcaggagtatttcgcctgaatcgggcttgtcgtccatccgcattccgcctcagctactcatatcgataacttactaacaatccattcattgtcttcttaccagtaaaggaaatcgccatgtccaacttcattcccaacaccgtttccgcagaacgcaagcccgtggacatcgtcaccggcacctatgtggactatgccggcgtgacccgtgccaaatccgttcccgcccgcaggcgtgaagccttcgaacgcaacggattgggcgccgccctggtctgggtggtgttcggcgcggacaactcgttcgccgaaaacgagaaattcaacgtgtccggcgatctgcgcctgcaccttgacacttccgcttctgcattgcgtgccatacgagcgtgaagcggcgtttctctgctcggtgcatgccaacgtatacatggatgtcagccttgccaatacgcatatgggagcgcaggtgagggaagtgctgcgcaatgttctggcgtggtgcgcatttgacaagttgctctatgcgtcggacggcgtcggcatcagtgaattgcattatctggccgcggtgctgttccgcaggtatattgcgcgaatcgccatcgactgggtatcggatggcgcatggaacgcgaatcaggcgaaacgggttatcgacgccatcgcgcatgccaacgcggaacggctatacggtttggcgtgaacgggtacttcgccggtgccgtcacttcccgaggaatgccggaatggcttcggccgccgcgtatcccttgcgatacatcatttccaggccctcgaagttcttcttcagggtgttgagaccatacaggtcttcgggtgcgaggatcagcactttgccttccgcttcgtaatgcttggcgagttcgagttcgtcgttgtaggtcttgtagcgtatgcgcagcctctcggctgcggcagggtgggagcgttcgaggatgcgggccggagccagatccttctgctgcttgcgtacttcgtcacgcaagcgggacagaatcaggatcacgcgatcatagccgtcatccagcgccttctgtaccgggatcggatcggcgatgccgccatcgaaatacggcacgccatccaccacatacggctcgcaggccaccggcacggcggacgaggccttgatgatgtcgaaatcatcgaagcggacgcgcgacttgtcgaaatacttggtcgagccgtcttcggcattgcaggccaccacggtgaatccggtcggattggcctcgaacgccgcgaaatccaccggattctcaccatcgtgattgctcagcgtgccgtagatgtagtcgagattggcgaagttgtggtttctgaggaagctttccgcgctcgcatactccttgcggaacgcgtatctggtgtagaaggtgtggttgcggccgtgctggcgggcgatgaacgaggtcatgttggccgcgccggcggaaacgccatagcacatgtccacgtcgatgccgtcctccagcatgcggtccataacgccgcagccgaaaatcgcgcggaacccgccgcccacatcaatcatcgcggtcttcagtgccatatcagcctcctattcatcatcatgcatccgatcacgcattcagcaggtcgcgtgaaagccgtgtaacacgttcggacagatcggaattggcgagttccacgccgccggtcgcgtcttcgggtgccagtttgcccagggactccagcac

SEQ ID NO: 1357 - DNA, 3530 bp, Unknown
  R157_18m  MAG No. k141_29651
aaatccgcccaaaaagtgaatcccttgtaacattcatgtgaagatgaagtggtggtgggcggacacggattggtcacagtccgacgtatcggactaaaatggtgcactagtggtttgtacgcaggcccgcaaggtagcgttgtaagtatgaagaaggactgagcccatgcacattatgttcgtctgcaccggcaatatttgtcgttctcccatgggcgagctattgctcactcgctacctctctggcaccacggtgcaggtttccagcgcgggtacgcatggtttgcccatgcatcagattgatcccaacagcgccctgcttatggaaagcgtagggatcgaaccgagtgggttccgttctcggcgcctgacgcagccgatggcaaagtccgctgatctgatcctgtgctttgaaaaggatcagcgtaaagacattgtcacgttggctcccactgctgtgaaatacacgttcctattgggtgacttcgcaaacatgtgcgagtactgcgcacgtaacgggctggtcaagggcttgaccattcaggaacgcttgcagtcagtgattgactctgcttccattattcggcccatgcttcccgaacccgaggatattgaagatccgcacggcaaggaatacgcaaaattccgcactgccgccgagcagacaaacaaggcgctgcgcaccatcctgaccagcatgcgcaagcactaccgcgttgaggaagctccggtgcgccctcaaatcacgcggcagtatgcttacacggtctgacatcaagctgacgtaagacgtaagtattcacgtcattctcacgccggtttcatctcccgatacgatttgtccgttacagtggcatgctgttgggtgatgacagtgggagtaatgagtgactgattctaatattgccggcatcgccgaggcggatttcgggaaagccggcgtctcgtttgataatgatcgaccgatattggtcgattcctcagattttttgttctatgcggcgctcgccatgctgccgattgacggcacagtagcaggcccatacatgccgttttggacgccgctttctccgtggttgtttatggcgtatgcggtagcgaactggcgtttgctgccgcaggtttggcaccgtttccgcgcattcttcctgtttccggtgctgttaatcgcgctgtctgcagtggattggtatctggtagcattccatcggcttccggcgctggtgtcgctggccggcgtggctggggctctcgcctgcctgtgtgcgttggacatggcattacgtatcaagcgcttgtcttggcggcgcatgttggatctgctgattctcgtatattggttcgccttcgcagtcggcgtggtgcagcggttgtcaatcatgtttgattggacttccgtaaagaacttcttcattcatctgatgagccgccagtacatcagcagcacttcgcattggggcggtggccgcccgcagtttctgttcgcagaaccgagctatataggtatgcacctgttcggtgtgctgctgccgctgatctggctggtgcgtggtcgtgaccacaagcgtgcaaaccaactgcgcgtccttatcatggtattcgctgcaggctcggtgctcatgggtgcaggcgtgcgcatcattcttgactcgattatcgcgttggtgtttgtgattatcgagatgaacagttggcacacgtggcgcggccggcttgtggcgttcggggaactggtggtcacggtcggtctcggcgcatgcagcgtggcagtgaaccatcggttgagctccatagccgagcttggctttgacggtgacggttcgttctatgcccgtttatggcagtcactgggaccaggtgcgggtgcgttgaagcatccaaagcagttgttgctcggctatggcgcaggcaatctatccgatgccacccatcagggtgccgatgccgcagtgcggtctctggaacgtctgggcctgaacgcttcggcaccgaagggctggtacgcacaagtgacaccagcaaacatgttcacgatgagcgcctacaccagctttttcgtggagttcggcctgattgcttctgtaattctcgtggtactagtgctgtggtggattagccataaccatgcctggaacaagaccactgtctgctggctgctgttgaccatatacctgtatgtgcagttcgaaggatatgccttttatgcccttccactactcctatgggcagtggctgccgtgccaaggcttaaatcaaaacgagaattctgatgacttatatatttggagtattccgatcatggtgattgtgcattggcttatttcggcggtttactcgaagttattcttgctcgtgtgaagaatagcctcattaagcccaatatggcagatacctgacatatcgcttgccggcatcgggatctgctattttcaatagattactactgatgcaggttttaataagtctggatacttgggaggctccactcgccggcagatcaaatctttcgcgaaggctggcgttagtcatcggcaaatagctgccttttttcgttgcgcgaatgaggggggatcattaagcaatctggcgacatctacaagagaacttcctggattagtaaattcgatacggccatcgaaaatacagatcataggtccggtaccggtaatagaaaaatcttggtgaataagcatatttgccatcaattcacgaagtgccatatgtgggaacatcctcagggtgacacgtcgtgcaccttgaatgacttcctgctcaggcaacagtgcttcgacatattccaacgcttgatccaacttggcataccctgagaaaaaagttttgctgcgagatggggagattggtgatggaccatcgtaacgaataacgcgcaatgctttacgcgccacggttgggaaatcattgagatcgcgagcgaataggagagcaccaagattggtgatggcgtcccgatgtctatttagaggtgcagcacccctgttggtcctgcaattctagcagttcgtcggcgaatgcctcggcgggcgtccggtagtccagcacgcgcatgggacggttgtcggtctcgtcgacgatctcccgcagttccccggccatgtccatccggatctcgctgcgtttgggcagataccggcggatgatgccgttccggttctcgttgcctccccgccgccggctggagtacgggtcggcgaagtacgtgtccatgcccggcccgtcgcgcagtcgcgtgtggcgggcgaactcggtgccgttgtcgtgcgtgacgctgacgcgcgcgccggccggcagcggcgagaacatcgccagccgcgccccgacgctttccccggcggtcttgtcgggcacgatcctggccatgaggaacctggtgtatttcgtcaagtcggtgtttcgtgtttagtcatgtatttttttcgggtttaggcagttgcatgcattttccttatttttccggttgcgcggaggtgttcctgccgaacatgagggcctcactgacgcggcggctctgg

SEQ ID NO: 1358 - DNA, 20518 bp, Unknown
  R157_18m  MAG No. k141_30079
agatttgcggcggccatggcccaggagagacgcccggtcccattccgaacccggaagctaaggcctggcacggcgatggtactgcacccgacagggtgtgggagagtagcacgccgccgcaccacacgtacaggaagccccgatacccctcaaaggtaccggggcttcccgcatatcaggacacttgcgcgtgggggggggtatctcgcgtccttgggccccggcaggagtatcccgtcggggcccagtgcgttttgggcggcaacccgctgaatacccggtaagatgtctgaggtatcaacaaacaggtcaggaggtgacgcgcatggtggcgccaagccgtgatgaccgtagcgtagatgcattggtgaaatccaaggcagtacttgatgtattggcggaactgggaccaagcaccgcaaaaaccataagcgaacgtactggtgaacccgtaagctcaacgtatcgtttgctggataatctcgtcgcagtcggttgggtggaacggggcatcaatcgtggcgagtatcggcttggcatcgattgtgtacgtatcggcggccaaatcgaaagcagactggacattcagcagatcgctcgccgtaccttccgcgcccatcacggccagttcggcatctggggtctgttcgttcggaggcgattgcgcacggtgtgcatcgagacacgcacccgtgagacattgcaaagctatgcacagctggtgggcaatagcttgcctctgagcatgagcgctccctctcatgtactgacggcctggcttcccccggctcgctacgagcagctgttggaacactatgcctataccaacgagctcggcggcacattctccacgatgcgtgccacagcaatgggacaggctcgtcatatacgcgaatgcggcttcacctatgacgtcggccagaccatggccggctccgtgactatcagcgtaccggtattcaatcacgccggagagattcaagcggcaatcgccctgagtggcctttcccgctccttggaacctgagctggcctgtctggtagatgggcaaccggcaacggcatcggctcaagacatggtgcgattggtgcagactgccggccgtgaggtgtcgcgaggccttggatacagtggtgatcatcttggcctgaacagttgaatatgatgagtcagggataagtcaggggaaggaacgtcgacgatggcggaagacaaacgtgaaccgacccgcgctttagacaaggcgagtcgcgtgatggacgcattggcggcggagaatggcctgtcgccggcagatatcgccgacgcctgtgatatcccgcgatcctccgtataccgcgtgctggatggactggtcgatgtggggtgggccgtaacggatacggatggtaactactcattatcactggactggctgcgattggctgatgccgctcgcacgtctcgtaccgaatggcagcctgcgattgcggtcatgcatgccatcaccgcgcaaaccggcatgacctcattcctcagtgtggtctccggcactgaattggtatgcgtggaatgtgcgcaaggtcatgccatcgattcgctgatcctgcgcccgggccgcgtgctgcctctgcatgctggcgcggccggccgcgtggccttggcgtatttcgaggatgccgatgtcgaacgctatcttgcaggagcgccgtttccggcatataacgagaacacgctggtcagtgtggaacagttgcgcgaggatattcgcttgactcgcgaacgtggatatgcactgtcggatgaggatgtgacgttgggtgtcggtgccgtcggtgtaccgattgtggacaacgagtccggtcgcgtgatcgccagcctgtccgccggtggattcgtggacgaagtgttagccactcaagaatccttggccgcgttactgcgcgatggcgtacgcgaaattcaggcagcctgattcggcccgctaggctgtcgggctggacggttatgtccggtcagctatggcctttgccggctacggttctgctggttatgcttctgcccgactacgctgcggtccgttacgcttcggccacacgacccaacgcgatggcggtgatcagcacgtacgcctcgcgcgggtcggtggcatcccagccgatggattcggcggcgcgcttcaaacggtagcggatcgtattgggatgtacgttgagctccttggccgtggtctcgagcgaaccgccgaacttcaggaatgtggagacggtgagcagcgtcggatcatccgggcctgctgctgtcaggcttccgtagaccacgcggaccagttcgtcacgggcgtccgcgtcgccgatcaacgcacgttcgggcagggcgtcgtcggtgcgtaacgggcgcggcaatggctgcacggtggcggccagggccggcgcggcctgaagacagtagagcgtggcctgaatcgaacgcatcgcgccatcggcaccggtgcgctgtggacccaaggcgattggccgatcggcggcgaacgacggggcgatggtattgcagatgatttccggcgtggccgcaccgaccggacgaatcaacgccactacggcggtgctgttgccgatcgggcgcttggcggtcagacacacaccgccgaaatcggccacgattttctcgatttccttggccgtacgtgcggcggaccgggcagggtatccggcgatggcgtaacaatcgaagtcatgctcgaaaccgaggatggtgaacagggactccactcgttcgtcggccagatgattgaacaggcactcgaacagcacggtgcgtacgcggttggtcgcggcgatgccgggtgcggtcgaaccggatgaatcgggcgcactgggcgtaccggatgcaccggacgaatcggcaacgtcggcagcgagaagttcgagaaaatctgacatagtcactagtgtagcgtcgctgattggcgttgcctttcagtcaaagactctcgccaatacgtcagcaccacgaatccgaatacaaacgcaaccggcaacatgtgccgctcgaaattattggccggcgcggtaatcatcacgcccatcagtagtagcagcggaatatgggtcatgagggtgggccaacgtcggcgaatcacctcggccgcgccgatcagcaatgtcatcaccacgtagaaattgccgtgcgtgggccagccgagtacgggaatgctgccccatacgcgagtgaagccggcgatgtgctcacgccagtcatggttgtaatccttgatccatgtggagtttttctgcacgtaatcgctggtcacgtaataatccatcgatacgtacggctgatcgttcacattgaagtatccgaagcatttggccagcagcgcatccaacgcgatgatcggattgtccttgacgatttcgaaccatgccttgttgaaattggtcatatcctcgggcgtcaccgtgcgccacttgtagctgaccttcttggcctgaataccggaggatttcaccgggtcggcatcctgctgggagtaagcgtcggccatctgatcgagattgaagacgggcgcgaggttctttttggcttcgtctgaaatgccgtccggattgcgctgggccacgcgggcgatcatttgcagctgtacgccgcggctttcgattgggtcgccgccgatgatcgcgccagaggagatggcgaaggagatgccgccgtgaatcagtacggtggggatgagcagcgccacgacgtaagtcgcccagcgcttgcggtcggcgatcagagccagcacgatttgtagggcgatgatgtaccacgcatatttcgcggaaatcagcatcaccgatgtggccaggataaaggcgatgaaactgtggcgcggcaagtggacgggcgtggcgatggcagtggcctgaggatgtttgcgggtgccgacggggtgccaggtctggacgagttcataccagacgctgaaccaccagacgaacgagaacgcgaacagcggcgatttggtgatggagatagtggaaaacacggccagcgggcagaccatgaagaacagcagaatcaggaatcgagccaatcctccggcctgtgggggaacggcggaatccgttgccgtttttcctatccaaggccggttcaggaatcgattggcggcggcagcgcagcagaacacggcgaacagcgtctgcagggcagccaacgtcacgatgccggcatcgtttgagccggtcagatgcctcgcaaacgtgactatcgcgccatagaacacagtgagtaccacattgtgctggtcggtcagatacgtgggatcggacggccacatgtagtgcgcagtggggtagatgtccatcggcacgaaggaaaagaagccgatatagggctgtttcaggccggtccactggttccaggcccagctgaattcgcggatctgtgagcggaggtccgcgccgaatgcggccagcagagtggtcggcacccagagccagccgacaaaaaacatcagcataagcttccagaaccggttcgtgccgcgtgtgatccagcggtccagaacagtgacggtggacgtgacgatagcgcgaacggtacgacgggtcttggctggttggctgccctgctgatcggcggcgggccgtgatgtttcgctattctgctgatggtggcgtaggcgctcgccgatagccctcggcagtatgcgctggcctgctgcgaatcgcaccatcagcgtgatgattccgagatatatcaggaatgacacgacgaatattgcggtattggcccagttccaatgggcgagggtgccgttctcctcgtcccagtacagcgggccgaccgccgtgcacagtgcaagccacaggcaggccagcgcggccagtgtccagcgcgcggcagcgcccacgtgcgcaagatgcgggtgggactggcggctggatacggcggcaagcttcgcggtggctggtgacgtcatgacaatatatggtagccgcacaggtcaacggttgatattcgatgtctgccgggcattgccattgttcgcaagccaatacgacgaccgggtgcatgcgtgggttcggcgaatgcggaatttccgaagttgtgaacgctaacacgggctgtccggcccaaaatggttgattttgtgcgcttttccgtggaatatcgcgggcaaaaaacggcgcaaccgaggtaacgtagtgtccatgatgattgcattgaaagctgcaacgccgcagctacccagaactacagccgtcgcggatcatgtggtcgccgtggacgaaaccgattcgaccaacgcgctggccgcgcagatgatcggcgacgggtcgttgacgctgcccgaccaccaggatggcgaactggcggtggccgtggtggccgccgaccggcagaccgccggccgtggccgcaatggtcacaagtggatcagtcagcccggccgttgctcgacgatgtcctatgccgtgcgcattccgcgcgcgatcgccaccgacgaatccgtcaatggctggctgcagatgatcgccggactggtcacgctggacgccctgaacggcatgatcgaggaatacggtgccgcgccgaaccagccggactgcttgctggaactcaaatggccgaacgacgtgttctgccacgggctcaagctgggcgggctgctctcggaactggtgattccgccgtcgtccggtactgatgctgatgccgatgacgacgtcgtcatcgtgttcggcgtaggcctgaatctggcgctgggtgcctgttggctgcccacgccgcagtcgacttcgctgcagctgcatgtcacgggcttgccgtcgtttggcgagatgcgcgatgcggtggccgaacgtcaggtcgagggcttccgtgaacgactggcgaagttcatcgccgacccgaagggccaggccgagtcgttgcgcaaggaaatgaaggcggtgtgctgggcgcgcggccgtcaggtcgaggcgcatttcacggacggcaccacgctgaccggcgaagccatcggcctcaacgaagacgcctcactgatcctgagaacacaagacggcacggaccatacggtccgcaccgccgatgtgggagtgctgtaatagccggccagtagctagctagtagctcaggtcagcgaccgagcttggacaggccggcggcggccagagaggccaccacggccttgatggcgtcgccgacgacgaagcccatggaggccagggccacggcggcgagcggcgcaccggtcaacgcggactggatgatgaagccgaaggcgtacaccaccacgacgccgccgaccagcgcggccagcaggtagcggcccgcggtgcgcgcggcggccgcgaaggacgaagtgtcggacttgccgcgcagcagggcgatgaccaccacacccggcaggaagccgaagaggaagccggcgctcgggccgaccagggccagcgtggaggtgccgccggcgaacaccggcaggccgaccgcaccggccgccagataggtggcgacggcggcaccggcctgacgccacggcagcatgagaccggcgagcatcaccacgaacgtctgcagcgtgatcggcaccggcgtgcccggaatcggaatctcgccggcggccgcggacagccacatcagcacggcgaacagcaccggcttccaggatgcggcgacgatacgacgggcgagcggcgtggtggccgctgcggatgcggtggtgtgtgaagtctgcatatcaataacccctatgttgtgtgatatcgccgtgaacggcgggcggtatgcgatggatgaggggaggttccggcgggccgtgcggtatccccgacagcccgaaccgtccatatggtggacggtcccaaatgaatccggccctgtgcgggcgaatcgtgcggcgatggaccgatgccggtccggtcgccttccgttcgcccgcagatgagccttcccccgaacttacggttgccatcgtagaggtgttcgatttcgtgcggtttcgtaccaacttacaaaattgtcgatttcgatttgtcataagttgacgaacgcaaccgtaacgtcaacttcttgaaccggcgcgcaaggatgtgcaatcggcggatttgcaacgtttttgatagccggcgccaacggttgcgttgccggaacctacgcgcgcgtttgttcgtagcctacaaaagggcgtgaaagcttttgtgcgaacgcggcttgccctctcctctatatggagagcacaatttgacactatggctcatactgtcaaaaaactgctgattgcgaaccgaggtgagatcgctctgcgcgtggtgcgcacggccaaggagatgggtatctccaccgtggccgtctactccgaacaagaccgcaatagccgctatgtggacatggccgacgaggcatacctgctctccggcgacacctacaaggacacgtacctcaacgaggatctgctgatcgacatcctgcacaaaaccggtgcggacgccgtgcaccccggctacggattcctttccgaagtgccgagcttcgcgcagaaggtcgaggatgccggtgccatctgggtgggtccgcaccacaccgcgctggtggatttgggcgacaagatcaccgcccgccgagtggccttgcgcgccaaagtgccgccggtgcctggcctgtccgaaccggtgaccgacgtgcgaacgctgctcgacttcgcacacacccacggctacccgatcatgatgaagcgcactgatggcggtggcggccacggcatcaccgtggtgcatgacgacgaggagctgcgccgcttctacatgaaccacgacgcgctgcaaggcggcgatctgaaggaatacttcatcgagaagttcgtggacaaggcacgccacgtcgagacccagtccgggcgcgactcgcacggcaacttcaccgtgtactccacccgtgactgctcgctgcagcgccgcaaccagaaactcgtggaagaggcgcccgcgcccttcctgtccgaggaaatcgtcagcacgctggaggaatactcccgccgcctgttcaccacggtcggctacgtgggcctcgggacctgcgaattcatggtgaccccgaacggcaaagtgtacttcctggaagtcaacccgcgtctgcaggtggagcacaccgtctccgaagaggtcagcggcctcgacctggtgcgcgaacagctcaatatcgccgccggtggcgagctcacccgcgcccccgaaccgcgcggccacagcttcgaactgcgcatcaccagcgaagacccggccaccaacctgacccccggctccggcaccttggagaagatccagtggccggccggccccggcgtgcgcatcgataccggtgtggaacagggcgacaccatctccccgaagttcgattcgatgatgggcaaggtcatcgtcaccgcccagaaccgtctcgatgccgtggcccgtgtgcgccgcgtgctcgacgagctcgtgatcgaaggcgtgcccacgccgattccgctgttcaaggagatcttccgcaacgacgacttcaccgccgagcatggccatccgttcgccgtgtccaccaagtggctggagcgcacgtacctgaaccgcacaccggcttccgccgcctccggccagccggcctccttggccaccgccccgggtgccgctgccccggccgcgcccgacaagtccaagtcggagacgttcgtcatcgagatgaacaaccgccgcgtcaagctcaccgtgccactcgacatcgtggagaacatcaccggctcggcccgcgcccgcggtgccaagcgccccacccagccgttgcgcggcgcaggcttgcacaacgtggcctccggtgccgccacggccaacgacggtgccaaatccggcgtcatcgcctccccgatgcaggccgtggtcacgcgcatcaacgtgtccgaaggccagcaagtggccaagggcgaccttctggtggtgctcgaatccatgaagatggagaactacgtgtacgcgccggccgccggcgaagtgaagaagattttcgttggcccggccgatggcgtggaggccggcgacacgctggtcacgctggacgtgaacgccggcaaggccaaggccgccgacgccaagaaggagggcggcaatgactgacatcatggattcgccggccgtgaaggccgcggctgcggcctcggccgccaacgccgcccagccctcggcccaccagccgctgcgcaccgccgtggtcaaggccgccgaactggcccgcgccgccgaagagcgcgcccgcgacaagcagcacgctaaaggcaagaaaaccgcgcgcgaacgcctcgacctgctcttcgacaccggcacgttcgaggagatcggccgcttccagggcggcaacatcgccggcggcaacgccggtgcagctgtcatcaccggcttcggccaggtctacggccgcaaagtggccgtctacgcccaggacttctccgtcaagggcggcaccctcggcaccgccgaaggcgagaagatctgccgactgatggacatggccatcgacctcaaagtgccgatcgtggccatcgtggactccggcggcgcccgcatacaggagggcgtggccgctctgacccagtacggccgcattttccgcaagacttgcgaggccagcggcttcgtgccccagctgagcctgattctcggcccctgcgccggcggtgccgtctactgcccggctctgacggacctcatcatcatgacccgtgagaactcgaacatgttcgtcaccgggccggacgtggtcaaggcctcgaccggcgagaccatctccatggccgaccttggcggcggcgaagtgcacaaccgggtgtccggcgtggcccactacctcggcgaggacgaatccgacgccatcgactatgcgcgcaccgtgctcgcctacctgccgtccaacagcgaaagcaagccgccggtctacgcctacgccgtcacccgcgccgaacgcgagaccgccaagcgactcgccaccatcgtgcccgccaacgaacgtcagccctacgacatgctcgaagtgattcgttgcatcgtcgattacggcgaattcgtgcaggtgcaggaactgttcggcgcctccgcgctcgtcggcttcgcctgcatcgacggcaagccggtcggcatcgtggcgaaccagccgaacgtgctcgccggcatcctggacgtcgactcgtccgagaaggtcgcccgattcgtacgcctgtgcgacgcgttcaacctgcccgtggtcaccctcgtggatgtgcccggctacaagcccggctccgaccaggaacacgccggcatcatccgccgcggcgccaaggtgatctacgcctacgccaacgcgcaagtgccgatggtgaccgtggtgttgcgcaaggcgttcggcggcgcgtacatcgtgatgggctccaaagccatcggcgcggacctgaacttcgcgtggccctcctcccagatcgcggtgctcggcgcggccggcgcggtgaacatcatccaccgccacgacctggccaaggccaaagcctccgggcaggacgtcgatgcgctgcgggccaagtacatcaaggagtacgagaccagcaccgtcaacgcgaacctgtcgctggaaatcgggcagatcgacggcatgatcgaccccgaacagacccgtgaggtgatcgtcgaatcgctggccacgctcgccaccaagcggcgcgtcaagcgcaccaccaaacaccacggcaaccagcccctctgatttctgaagacatcaaccaaacacaagtaaggaaagcaatgaccaccttcttcctcaatcgcctggccaccgagccccatgcgctcgccttcgccggccagtccaccccgtggccggtagccctggcagaccagaccaccgatcccagccttgacgaggccctgcgcggccacatcgccgcagccaaccgactgctcaccccggtcgccgccgacctgctgaccaccaccggacgtccggtcgacctgttcggcttcactccgaacccggcccgcctcggcgccgcagccgacgccaccgcgtccgtggaaggcgtggcactgacccagctcggcgccctgctcgacctcgaacaccttggctacagtgtggcccaggccaagccgctcgccgtgctcggccactcccagggcgtgctcgccgtgcacatggcccgcgccatcgaggccgccggctccatcgaggccgccggcaagaccctcgacgagattctggccgtcgccgccctgatcggcgccgccggaacccgccgtgtgcgcgaactgggcctgaaccccaagtatggcgaagccagtccgatgctctccgtcaagggcgccacccgcgaacaggttgaggctctggtcaagcgcgtgaacaacgcccgaggcccgatctccatcgccgtcaccaactccgacaaccaccacgtgctttccggctacccggaagacctggcagccttcgccctcgaagccgagcgcgagcacaagcaccaggccaagctgcgcgagcagaagctccacggcggcaccgtgttcaacccgaccctcgaataccttgaagtcaccctgcccttccactctccgctcatggccgacgccgtcgagcagaccgtggcctgggccggcgcctgcggctttgaccaggatcgcacccgcgcactcgctgcggaagtgctgctcaaccatgtggactggaatgcccgcgtcaaggcgctgttcaacgccgccgacccggccaagctgtggattgtggacctcggccccggcaacacgctcggcaagctgatcggcaacgtggtgcagggcaccggcatcggcgtggtcgaagccaccacgctgtccgaacgctccacgctctccacgctggaaagcgagcctgagcgcacccagaactggaaggcgttcgccccgcgcgtcatcaacaccccggccggcgccaagctggtcaccaagttctccaagctcaccggcaagccgccggtactgctgcccggcatgacccccaccaccgtggaaccggaaatcgtggccgccgcggccaacgccggctactgggccgagctcgccggcggcggccaggtgaccgccgaagtgttcgaccgccacatcgccgccctcgaagacgagctggaggaaggccgcacggtcgaattcaacgcgatgttcatggaccgttacctgtggaacctgcagttcggctcctcccgcatcgtgcccaagaagcgtgcttccggcgcgccgatcgacggcgtggtcgtctccgccggcatccccgagctggacgaagccgtggccctgatcgagtcgctgcaggcggacggtctgccgtacgtgagtttcaagcccggcaccgtggaccagattcgccaggtcgtgcgcatcgccaaggccgtgtcccccaccaccatcatggttcaggtcgagggcggtgaagccggcggccaccacagctgggaagcgctggacgacctgcttgccgccacctacgccgaagtgcgcgcctgtgacaacctcgtgctggtcgccggcggcggcatcggcacccccgaacgcgcggccgactacatttccggccagtgggcccacgcctacggcctgcccgacatgccggtcgacggcgtgcttatcggtaccgccgcgatgaccgccaaggaggctcacaccagccccgaagtcaagcagctgctcgtcaagacgcccggtattccggccgacgccaagtccgacgacgtgttcgccccgcaggccgcccactgggtgccgtccggcaagtccgtcggtggcatgtcctccggcctgagccacctgcacgccgacatttacgagctcgagaacgactccgccgaatgcggccgtctgctcgtgcgcgtcatgaagcaccccgaagagctcgactcccgccgcaaggaaatcatcgaagccctgaacaagaccgccaagccttacttcggcgacctggcctccatgacctaccttgagtgggcgcagcgcttcgccgaactcgccttcccgtgggtcgacccgacttacgccgaccgcttccagcacctgctgcagcgcatcgaagcccgtgtgaacgacacggactccggcgaattcacctccaagttgttcgccgctgatggcgtttctgctgaagaggcagctgccgctggcctgctgacccacgacgacattctcgccgacccggcccccgcgctcgaaaagctcgcactggcctacccgcagaccgccgaactcaaggtggtcccgaccgacgtggcttggttcccggtgctcgtgcgcgaataccccaagcccatgccgttcgtacccgtcatcgacaacgacctgctgcgttggtggggtcaggaccagctctggcagtccgaagaccagcgctactccgccgattccgtgcgtgccatccccggcccgatctccgttgccggcatcaccaccatcgacgagccgatcgccgacatcctcggccgcttcgaaaccgccgccatcaagcgcgtgcaggacgaacagcaagccgccgatgccgctgagaacgacgatttcgccgcacttggcgaggccaccagcgccgaagacttcatccgcaagtccccgaacatctcctgggtcggccacatcaccgacaacccggcctacggcaccgccctgggcgaccagtactacgaaatccgcgcgtttgacgccgcggccggcaagtacgatctggacatccacctcgacacctactgggacaacgatccggacggcggcacctccaagcacgccgtgcgcgatatcgtcatcccgctcatcgtggaaggcaccgagcccggccgtgtgccggtcgtggaccgcgaacgcctgattccggacgtctacgcgatgctcgccgccaccgcaggcatcggcaacaccgccatcaccggcgacaagctcaccgagatgccgcagcttgacgacaagacctctgacgagcgtccgttcggtaccgcaaccgcaacctacaccctatccgccaacctcggcttcgaccacgaagcggccactggcgccgctctgccgaccaccctgcagcccagccgcatcgcccccgatgcgctggtcggccctgcctggccggcaatctacacggcgctcggctccgtgtacgtcaagggctacccggtgattgaaggcctgctcaacgccgtccacctcgaccacctcatcgaacttgaggtgaacgaggaggacctgctcaagcacaccggcgaaaccatcaccctgaagtcttgggccgaggattacttcgagtccgcctccggccgcgtggtcaccatccacgtgacccacaccgccgccgacggcacgccgcttgcccgcgaaaccgagcgtttcgcgatccgtggccgcgtctactccgatgctttgcccgcagacgcccccgagtatggtggtgccctcctgaataaggaagcggatggctccgtcgccggacagtccactggactgtccgcctcctcgcgcggcctgcaagtagtgcaggccactccgcgccgtctgctgcgccgcgtgaaggtcgtcgccccacacgacatgaccgccttcgcccgcacttccggcgacttcaacccgatccacacctccactcgtggcgctcgcatctccggcctggccgccccgctcgtgcacggcatgtggctgtccgccaccgcccagcacgccgtgcaggcgaccgacgagaagggtgcccactacgagattgccggctggacctacaacatgtacggcatggtccagcttgacgacaccgtcgaaatctccgtcgagcgagtcggcaaagtgcgccacggcggcatgaccctcgaagtcacctgccgtatcgacggccagctcgtctcccgcggcaccgcactggtccgcgcaccgcgcgccgccttcgtctaccccggccagggcatccagaagcagggcatggttctggacgagcgtgccaagtccgccgccgcccgcgacgtgtgggagcgcgccgacaagctcacccgctccaagctcggcttctcgatcctgggcctcgtgcgtgacaacccgaaggaactcaccgccaacggcgtgacctaccgtcaccccgaaggcctgctcaacctgacgcagttcacgcaggtggcgctcgcgacggttgcttttgctcagaccgcccgtctgcgcgaagccggcgccgacatctggcccgcctacttcgccggccactcgctcggcgaatacaacgcgttgtccgcgttcgccgacgtgattccgctggaaaccgtgctggagctcgtgttccaccgtggttccaccatgcaccacctcatcgagcgtgacgcacagggtcgctccaactaccgcatgggtgcccttcgtccgaaccagttcggtgtggacgacgcgcacgtcaaggaatatgtggaatccgtggccaaggcgtccggcgaattcctggagattgtgaactacaacctcgccggccagcagtacgccatcgccggtacgatcgccggactcaaagccctgaaggccgattccgcccgccgcgtggccgcattcggtggcaagcccgcgttcatgctggtgcccggcatcgatgtgccgttccactccacgctactgcgcaagggcgtgccggaattccgcgacaagctcgacgcgctgcttcctgcttacatcgactaccgtggccgtctggtggaccgctacatcccgaacctggtggccaccccgttcgagatgaccaaggaattcgccgccaagatcctcgaagccgtgccgtccgaacgcatcaaggccgtgctcgacgacccggccgtgtgggattcctacgccgccgacgaccagaagctcggccgtctgctcttgaccgaactgctctcctggcagttcgcctccccggtgcgttggattgaaacccaggcgctgctcttcggtcagcgcgaacagggcggcctcggcgtggaagaatacgtcgaagtcggcctcggcaacgccccgaccctggccaacctcggtaccaagaccctacgtctgcccgagttcgccggcaacgatacggtcgtctacaacgtcggccgcgatgaaggccgcgtctacatgaccgacaccgattcgctggttcccgacgacgagccggaagaggctgcggcctcggccccggtcgaaaccgctcctgccggtggttccgccgtcgccaagctcggatcgggtgctgctccggcaaatgccgcgactgaggctgctcagacaacggatggctccgtcgccggacagtccactggactgtccgcctcctcgcgcggcctgcaatcagggcaggccgctgctggcgcaccgtctggtgccgccgtcgccgacctgcccttcaaggcttccgatgccatcggcgtactcatggcctactccgccaaggtgcgcctcgaccagatcggcagcaacgacaccaccgacaccctgaccaacggtgtctcttctcgccgcaaccagctgctcatggacatcagctccgagctgggagtcgccagcgtggacggtgctgctgaagcgacgctcgacaagctcgcccaaatcgtcaacaaggccgccccgaactacaagccgttcggtgccgtgctctccgaggcgctgcgcgaccgcctgcgctcgctgttcggtgccgccggcgtcaaacagcagtacatccgcgaccgcgtgaccaacgtatggcagctcggcgaaggctgggtggccagcgtgctcgccgcactgctgctcgacactcgcgagggtgccagctcccgtggcggcgacctggccaagctgcccaccgccgccgtgcagaacaagccggaagccgacaagctgatcgatgcggccgttgaggtcgtcgcccagctcaagggtgttgccgtggccctgccgtccgccggtggtgccgctggtggcgctgtggtcgattccgccgcgctcgacgccttcgccgagaaggtcaccggttccaacggcgtgctcgccgccaccgcccgcttcgtgctgaacgagctcggcgtggccgctccggctccggaagaatccgaggacgagaacgccgccgtcgtggccgcggtcgaagccgaacttggctccgactggcccatgcaggtcgctccgcgcttcgacgccaacaaggccatcctcttcgatgaccggtgggcctccgcccgtgaagacctcgcccgcgcctactacggcaacgaccccgccgccttgaacggcagcttcatcggccttggcaagaccatcgccgccgaagcccagtggttcgccaacgagtcggagagcgaggagcttaaggccgccttccagaaggccggctccgaggccctcgaacaggtcgcttccaacaagaacgcctcccgttacgcgaatgatatcgccatcgtcaccggcgtgagcccgaactcgattgccgctcaggtggtcgaaggcctgctcgcaggcggtgccactgtggtggccacctcgcacagcttcaagccgtccatcaaggcttgggccaagcaggcctaccgcgagcacgccaccggcaacgccaagctgtggctggttccggccaacctctccagctaccgcgacgtcgacgctctggtcgactgggtgggccacgagcagaagaagacctccggtgccaccaccacgattctgaagcccgcgtgggagccgaccctgttcttcccgttcgccgctccgccggtccatggcacgctcgccgactccggcgacctgttcgaatcacaggcgcgactgatgctgtggggcgtggaacgcgccatcgtcggcttcagccacatcggtgccgacaccaacgtgcagcacaagctccacgtggtgctgcccggttccccgaaccgcggcgtattcggcggcgacggtgcctacggcgaagtcaagagcgcctttgacgccatcgtcaaccgtgcccgcgctgaaaaggtgtggtcgagccgcgtcaccttcgctcacccgaagatcggctgggtgcgtggcaccggcctgatgggcggtaacgacccgctggtcgccgtcgttgagcgtcacggcatccacacctactccaccgcacagattgcggccaagctgctcgacctgtgcactgccgaatcgcgcgagcaggccctcaaggccccgctcgatgtggacctgaccggtggcctcggctccgagcccatcgacatcaaggcgttgcgcgcggaggccatggccgatgcggagaaggaagctgctgcggcctcgtctcaggaaacggatggctccgtcgccggacagtccactggactgtccgactcctcgcgtgggcagcaaatcaaggcgctgcccaccccgatcatcaccaagcaggcttcggtcgacctcaacgactggaccaacgtcaccgccaagccggaagacgaaatcgtcatcgtttccgtcggtgagctgggcccgtggggctccggtcgtacgcgcacccaggccgagctcggcatccactcggacggcactgtagacctgagcgccggagcagtgctcgaacttgcgtggaacatgggtctgctgacttgggccgacagcccgaagcccggctggtacgacaccgacggcaacctcgtgcccgaagaggacatcgccgagcgctgccacgacgaggtcgtggcccgctccggcatccgcccgttcgaggaaggcatgggcaacgactacaaggacggtgctgacgaagaagaagccgaggtcttcctcgaccacgacgtcaccttctctgtgcccacccgcgaagtcgccgccgaatacgtcaagttggacgaggctcacaccaccatcgccccggatgaggaatccggcgaatggaacgtgacccgccacgccggctcgatgatccgcgtgccgcgccgcgccaccatgacccgcacagtcggcggccagttcccgaagggcttcgacccgacccgttggggcatccccgcttcgatggtcggcgacgtcgacaagatcgccctgtggaacatcgtcaccactgtggacgcctacctgggcgccggcttcaccccggccgaaatcctcgagtccatccacccctcgctggtggcttcgacccagggcaccggcttcggcggcatgatgtcgatgcgcaagctgtacctcgaccgcttcctcaaccacgagatcccgaccgacatcctgcaggaggccctgccgaacgtggtcgcggctcacgtgatgcagtcctacatcggcggttacggcaacatgatccagcccgtctccgcctgcgccaccgcggccgtctcccttgaagagggcgtcgacaagatcgccctcggcaaggccgatttcgtggtcaccggcgcgatcgacgacatcggcgtggaatccgtgatcggcttcggcaacatgaacgccaccgccaactcggaggaaatgtacggcaagggcatcgacgcgcgcttcttcagccgcgcgaacgatcgtcgccgtggcggcttcctggaatcccagggcggcggcacgatcctcgtgacccgtggtgacatcgccgaaaagctcggcctgccggtcgcggccgtggtcggcttcatccactcctacgcggatggtgcccacacctcgatcccggctccgggcctcggtgccctggctgccggcctcggtggcaaggactccaagctcgtgtacgacctggctaagctcggcgtctcagccgacgacatcgccgtggtctccaagcacgacacgtccaccaacgccaacgacccgaacgaatccgagctgcacaacacgctggcccacgccatcggccgcaccgacggcaacccgctgttcgtgatctcgcagaagacgcttaccggccacgccaagggtggtgcctgcatcttccaggtcaacggtctgacgcagctgttcaagtccggcgtgattccggcgaacgcggcgctcgattgcgtggatccgaagctccagcgcgacgaccacatggtctgggttaggaagcccctgcgcatcggcggtggcgaggacgagttcggtcgcgagaccgctggtcgcccggtcaaggccggtctggccacctcgctcggcttcggacatgtttccggcttcgtggccctggttcatccgggtgccttcgaagcggccgtggccaaggccgacggtgaggccgcactggaagcttggcgtgagcgtgccaacgcccgcctggccgccggccagcgtcacctcgaggaaggcatgatgggtcgcgccgcgctctacgagccgatcgacaaccgtcgcttccgcgaggatcaccgtggctacgaccaccacgaggtcgaaaaggcgatgctcctcaacccggacgcccgcctcggtgccgacggctactacgaggcctgattcctctggctcccctcggttgaggggagccagtagcgcaccggatctcggctcccctctttgaggggagctcccgcgaagcgggtgaggggagtttcccctggagctttctcgctggcacaaactcagtgagagaaatatgcagaacatacgaaagcccctcc

SEQ ID NO: 1359 - DNA, 66972 bp, Unknown
  R157_18m  MAG No. k141_30604
ctcggtcagcttcttcagaccgcgctcatccagctcaggatcggcgatgaacatcagttcgtacttgtgcgcagacatcacccacctccttcggactattcggccacggacgttccgtggcaggagtgtgtatgcgtgttagcccatgacgcagcaccaaaccggcaccgcatcttcgggcaacttggacagtctatatataaggcgggacagggtatggccatattcctgccggtttcgcgatgcccaccattttggccaagcccgcgcagccaagcccgcgcagccaagcccgcgcgccatcacccagtattgtccatttcgagcctcgccctatggtcatggcgctgattttgcgggtacgatagtgctcgaagaagcatcagaagaaagggggactatatgttctgtcctaattgtggcgcagctgtgcgcgaaggagcgtaattctgcggttcctgcggcaaccatcttgccgcggcgtcagctccagcagcagcgacgcccaccgcacccacgcccggtcaacccaccggcgccgttcccacgaccgcacagcctgcggctcccgcaccatcgattccgttgcccggcgcagcggctgtgcagccgacgcctcagcccgctgcacagccgcaggcccagcccgcaggcggaccggcattcaccgcaccgaccacggccattccgaacccagggcagcccggcccatcgccggctcccgccgctccggcacaacccatctcttccagcccactggtcaaggaactgttcggcgcccccaacatgcagaccatcggcattgcggccggcatcggtacggcagccgccttggtgctttcgattttccctgcaatcgcaatgaattccatgagcaccgcagcacccagcctcggggccgattcaacactgaaccaagccgttggcggcatgttcatcaccggcaacggcatgaacttcttccactacctgttcctatcgttggtcatgggcctgtctggcggtattcatttcgacatcgtcgacctctcatcctccagcatggacgccagcaacatgatgtcgtacccactggggctcaccggcttggcattgctggtcggcaccgcattcggcgcattcatgctggcccgttccaagagcattcgattcaagttcaccggcctgatctccggctttatcaccggattgctgccggccgtggtcatcacgctgcttgcggccatcacggcggcaccactcgccagtggcaccaccatcgtggccaaggtgaccggcgccacagtgcgtacgttctttatggcctacctgctctccgcgctcggcgctctggccggctatgcactggcccaatatgcttccgattccaagaatgtgttcggagctacttggcagtgggcacaccgcgttcgcggatacacgcgcacggtggtcagcgtcttgagcttccagctggctttgctcttcatcgtcggcctggtggccctgttcgccgtggcattctcctcaggtcagggaatcctgatactgacgttcccggtcacactgctgatgatcggcgagttcttctttacctggggaaccttcggcgccattacactgaccgagtccggtcagctgccgcaggatctcagcctgttcagcatcaacctcagcgttaccgtatggcctatttggatcctgttcgccgtgttcctggtcctcaccttctacacggcattgcgcgtctccgcacgcaacctgtacgaccgtgcctacatgggctggcagcactgctggaaagccccgatcgccatcatggtgttctgggcgattgccacgctgctgatgggtactatgggcaaccgcacctccgtcacgcaagttcaggccaccggacctgccatgtggtacttcctggtcatgggcctgtgggcattcctggttgaggtcgttgcactgacgttcggcccgaccatggtggtttccatgccgggactgcgggccctacttgtaggcggcactgtgcgtgccacgcctcagcctgtggtcgactacatctatgccagcggcgcaatggtcggcaagtggcccacgtggggcacgccaagcgccggcgtgggtacgggcgcaaacgctgcgcagcctcacgtcaacgtcacgccgacgtccgccggccagcctcctgttgctggtgtcggtgtacccgcgcccgctgccccgggtgctccggccgcccctgcaacccccggtgctccgggcaccacattcgcaaccgcggctcccaccactcccggagcggcaccggtagccgcacctggcgcgacctccaccaccatgaatgagcagcagaagaagatcttcatcatcgttggtgccgtggccggcttcctcgtactgttcggtatcgtgtatggcgtgctgtcttccgccgtgttcagcgcgaagagcgtggcgaacagctatgtggccgccatctcctccggcgactacgacaaggccaacaccatcgccgatcctcacgtggatacgaaccagcgcgcactgctgaccagcaaggcatcctcgggcgagaacacgcacatcaccaacgcgcgcatctcgcagacttccaacaatgccgatggcaccgtgagcgcccagctgacgtacacgcttgaaggcaaggaggtcaccggcgattccatcaagatggtggccaacggcagcaagttcctgatcttcaagaactggaccgtcgccgaaccgttggtcaagaccatttcggtatatgcgccaagctcgctgggcagcatcaccgtcaatggcgtgaccgtaacgcccaagaacgccgtgaacaacgacgcggacgaaaccggcaactaccggctcaaggtgtaccccggcgtctacaaagttggcgtggtgaagtccgactattacaccgccaagaccgtgtctctgagcaccaacagctccgatagcggcactcttgacgctcagcctacggacaagttgacgtcggaaatcgacacggcggtgaagagcaagctggatgaatgcgcggcttccaccgatgcggaaccgcagggctgcccgttcggctactacacctccaattccagccgataccgcaacttcaagtggacgattgacggttatccgaaggtcaccagcgtgagcctgtcggatagctcgttcagcaccgacgaaggtgatgtgacggcgaattacgagtaccgttacagcgatggctgggaaccggaagacgattccagcactttctcggtgtacggcaccttcaccatcaaagacaataaggtcagtgtcgagttctccgaataatttcggcaatctcaacactcttacgaaataggcaccccgccgtggcgttcgctgcggcggggtgcttgtacactggttaaggcgtaaatcacacagcgactcaaacaaaggatgcgaacgcatgtcggcgattcttgaaggcactccggataaacgactcgtattggtcacgggccgcgcctaccccgagctagctgagaaggtggccgaatgcttgggaaccgaaatcctcgaaaccacgtcctatgactttgccaatggcgagatgtacgtgcgtttcaccgaaccggtgcgtggtgcggacgtgttcgtgctgcagtgtcattcgggcgatatcaacaagtggatcatggaacagctcatcatgatcgacgctttgaagcgcgcctccgccaagtcgattaccgtggtggcgcccttcctcggctactcgcgccaggataagaagcaccgcggtcgtgagcccatcaccgcccgtctgattttcgatctgttccacgccgccggtgccgaccgcattatgacggtcgatctgcacgccgctcaggagcagggtttcttcgatggtccggtcgatcatctaaccgccatgccggtgctgctcgattacgtgcgttccacccttgatctgggcaacaccaccatcgtgtccccggatgccggccgtatcaaggtgtccgaacagtgggccgccaagctaggcaatctgccgctggcgttcatccacaaacagcgtgatattactcgtccgaaccatgccgaggcacatggcatcatcggcgatgtcgacggccgcgactgcgtggtcatcgacgacatggtcgataccgccggtactatctgcgaagccgtgcgcacactgaacgaatccggcgccaagtcggtgaccttggtcgccactcatggcttgctttccggcccggccgtggagcgactggccaactgtggcgcgcatgaaatcgtgtttatggacaccgtgccgattcctgaagagaagcgcctgccgaatatgaccgtgctgtcttgcgcaccgctgctggccgcgggtattcgctccgtgttcgaggaaggttctgtggcgattctgctcgacggcctgcccgaagacatgcgtccgcgcaatatctatgcgtgattgatacgccgaaaatccttacgaaaaaacgccgcttgactatagttgggtgtacgtaagacagtattgcgccgagatcgacgaagcggcacgaaaccgcatggagctgatcgtgcggtcactggcagagcaaaacggcgtgaccgagcaactgaaagccgaaaaccaaatggaatgggtgcggcagatgaacgcttgcaaggcacaggcagaggagattgtgaaagcggaattgatttatgattgagtgagaaaagtccgggcagaaaactgtccggacttttctcatacagtccaaaatgacggtagaattattcacaattttatggtataatttgaatacgaaaattgagaaacaaatcggaatttataaagaagaatattgatgaaactatttttatgttcacacttttcaagtgtaggaagtctgataaaggaagaaattgaaaataagaaagtcgcatttattccaacagcttcactgcgtgaaggctacaccggttatgtcggctcggctcgaaaattattcaaaaagttgagagcaatcgtaactgaaattgatatttcaacggaggcttattcaacgatacagtctgtttttgaagaagcaaatgtgatatattttaccggcggaaattctttctttcttatggaccagctccgtaaaacgggaactgatggactactgaaaaaggaattggcaaatggaaaattgatgatcggtgagtcggcaggcgcaattatatgcgctccaagcatccaatatatcgagcaaatggatgaaaagccagaggactactcacaagaagatgatgcagggcttgatttgattgatttctatgttcttccgcattatcttacagcaccatttaagaaagttactgagaaaataatgactgagttttcggatttgaatctatgcccaattaacaaccgtcagggaattgtaattgatggtgaagattcaaaggttatttgcaaagactaatttgaaaattccgatttgtcgagaagttaagcggagcaaatccctttaggaactaaagggcgcacttctatactctcctatcgggaatatgtgcgtcctgggtcgcttcattctccgtcagcaggaggatactgcatgaccgagaatgttgcgtcacgaccttccgtcaaggtggctacacccccttgcgctgctaaagcggctatcccctgtggacttgctggcggcaaacggttttgacaaaccgtttgccgccagcaagtttgaagattagacataaacaaatcctccgcatggtctacgccatacggaggatcaactgttttacggacacccgtctattgatcaagcggcgttttttcgtatagctccaatcagatgaaagcgcgctcgccgaagatggcggtgccgacgcgcacgatggtggagccttcttcgatggcgtaggccatgtcgtgggtcatgcccattgacagttcggtgcagtcggccgtgccttcggcaccggaggcaagaatctggtcacgagtgcgacgcagatgcgcgaagcccgcacgaatcgtgcgctcatcatccacatgggcgccaatggtcatcaatccttgcaagcgcagtccgcccatcgcaccgatgcgctgggccaagtcgatggcgtggctgggtgcgcagccggacttcgattcctcgccggattcgttcacctccagcaacacgccgaccgtgatgccgcgcatggtggcgcggcgggcgatcttctccgccagttcgatggaatccacggattcgatggtgtccactaccggcagcaccttgccgattttattggcttgcaattggccgatgagatggaagggaatatgcgttgcagctgcggcattggccgtgtcagcctcagcggcatcaatcacgcctagcgaataaccacgctcccccagtcgttttgccagaccgtcagccttgacagtaatctcctgtggacgattctcaccaatcacgcgaataccagcatcgatagccgccagaatctcgccgacatcgcgcgtcttggtggcagccagcaattggaccgaaccggcagcacgcccggctgcggactccgctgaggcaatccggtcaagcacgcgatgcacaccatcagtaatctcttgtgcgcgcgcctgatcgataacttcgttggcgagatccttatggtccatgtatgccgtcattgctgcccctgttcgtagattccccaccatcgtagtctcatacgcgcacataatgcttgttattgaacaaaagtgaagcccccgctgttcatgcgcgggggcttggtgatgctaggccgagcgagtgggactagcaggtaccggacttgcggcgcttgaggatgattacacccgcaacagcaagtaccacggcgaggatgccaacaccaagcacggctgcaccggtgtcaggtatcttcttgtgcttgccggagtctgcatcacccttgttctggttggaatcgttgccttggttgggcttgtccgtgccggaaccgggcttatcgccaccctggccaggcttcgtggtgctcttctcaaccagacccgcgatggcatcgctgattgcctcagtcgcagcctgtacgtcagactgggcggcctgaccatcactcgtcagcgcattcgccgtagcgactgccgaatcaagcacggccagcgattcatcagtccactttgtgcgatccacggcagcagcggcatcgagctgagcgctcagcgcggcacgatcttgcaccgtagctacaagcaccagcttcttcgctgcctgcttcagctgggttgcggcatccaccaccgcagcttcggtggcatcctcagccttatacacctgctgcgccgaatccaataccgccgcgtactccgcccatgaagtctcggtgtacttggaggcatcgtcagccttaggcgagtcagcgagcgcctgcttgagctcggtcttgtcgatcggtgtgggctcaggcggctcaggcgtactgtcgtcaatggcatgaacctgccattcggcaacagccggagaagccgagccggacgtgataaccatacgcaacttggtagtcttgaccggagtgttccacgtgccatcagaccaccccttggcatcgccggtggcccagccagcagacggtgaattggcggtcacagtgtaggtggcgtcgggaatatccacgaagttgccggcaccgttgttcgccaaggcgtcccagtactgcaattcccacgatgccggaatacccaatccgccatcatccgaggtgaattgcacgcggctagagtcgatagtcacttcacggtcccactcgtagtcgaggcgcatctcaccggtgttgggccaagtgccccagacatcctcgttggcaatggtgatatcgggaatgatcttgccgtcgttcaacgcggcggcacccttgacccagccggatgccttgccgtccacatcggtggcggtggcatcgccctcaatgtagccggtcagcggcacggaagtgtcggatggaatgtcggttttcgccgaagcggacacgttgccggccttatcggtggcgcggtagtacacggtggcgcgcgacgcgctcggtgcagcaatcggcttgctgtacgtggcccattgaccgtctgtgccaatgcggtattcaattgatgcgacaccggaaccggtgccgtcatcagcggtcaaggtcagcgtgcgctcctccttatcggcggcggcggtcacggttggcgcggcggagtccaccttgccgccggccttggccacgtcggaaacgttgccggcctgatcggtggcgcgagcccacacttcgacatcgccctgctgggaaagcgtggcaatggccgcgtttgcattcgcggcgatggtggtccagctcttgccttgatcagcggaaatctccagcttggcgataggtgcggtgtcgtccgtggcctgcacggtggcgaacggagcggtggtgagccactcgctattgcctgcgttagcagtaacggcaacggttacagtcggcttcgtggtatcagcggcaggctggtagccgtcctgcacggtgacatttaccgacacattgccctgctcgcttgcctcaccgggcacgccggcgaccacgccgtaggccgtaaacgaaccgaccttggcatacgaggaagcatcaactggacgccaaattactggggaggcaacagttgggttcccgtacttcacatccactgtggccggcagagtaggcgcagtaccggtggcggtggtcacgctcttcggcgcagtgattgccggcgattcgctggagtcggagccgacttcccattcagcaacggccacggaggcatagccgccatccacagcttgaccggtcatgtcgagctttaaggcagtagtggtcaccgcatcgaaggtgacggcgttggggttggccttgcctgtggtcgttgtataggcactcgggttggtgacatccttccatgtgccgtccgcgtccaagtactgaatcttccacgaggcgggcgcgcgcagagcgttggaatccacgtcgaaccaaaccttagacgagttgacgcgcacagtgccatcccattggtagaccagagaatcgccggactgcgattgcgggatagaacggtagttggtccagtgattcggcgggaccacagcggtttgcaacacacggccgtcgttcaccgaacccttccaagcaggcgtttcagtgaacgtggcgctcacctttgcgtacggagccacgttggtggagggctgcgttttctcggccttggttggatgggcggtggaaaccatctggccgtcggcggtccaatcgacttcatcaatgcacacggcacggcggaaatcggtgccgccttccttgtcgccggtgtgataggtcacataccatttgtcgccgaactggagcaccgaggggtgcatcgtggtggccgagccagaaggcacgattacgccttggtacttccatgggccgagcgggctgtcggaagtggagtactggatgcaagcttgatagttcgattccacgcaggtggccgtgcccgaaccgggcttaccgccgtcgtacacgttgtaataggtatcgcccttacggaacacccacgccgcctcgaagaatcccttcgggccgttcgcgttgctgtccgtgtccttcatggtgtggaggttcggcgtggtgccatcagccttggtttccacctcggtgtatgaggtgcggccggttgtggcgtccttcttcatcttgatggcgagctgagtgccgaacgtaccaaagtgcaaatatccggtgccatcctcgtccacaaagaatgccggatcgatggtttcaatctgggtttgcgatgtggtgagcagcggcttgccgatggcatccttccacgggccgagcggactcttcgacttggccacgccgatggcgaacgggtcctgtccagccgcctcagaagccttgtccttcaccggcacgtagtagtagaaccaatcatcggaagtgtcgctcggggtgccgttatcgtcggctacgacttggccggcgtacgcgccatcgccggtggcccagctgaacaggtctgccttggcgatggtcttgtaatgtgtccatttgccttgattcaggccgtcttcatcggtgacgtatacgccccagtccttcatgttgaaggagccgtagtcgggcgaagcctcatcgtgaccggtgaagacgaagagtttgccgtcatagctcagcgcggatgcatctgcagagtagtagttctgcgaaagatcgttcggggtgtcaataccctcgttctgcccgatggggttgcgcatgtagctgggcagtgcgctattgtcgatttgggtgacggtgacatcaggattgttatacggcagttcgttatacgcgtgaccggcaacgctgggcgcgttgtcagcggtggctgaatcggcggccattgcggtcggcgcaagggcaaggcctgacagcaatgtcgctgcggcgacgagtccaccggccaccgcgcgaaccgattgcgcggatacatggaaactcatagtgctcctcattgagtgagtgaaaagagtaatgatgggtagaaggaaaaggctagagccccctctgtgagggggctcactcggcagaatgactccgttgcgggtcaggccgagtggcgagccgaaccgtggtcgccggactggcgacgcttcaggatggtcacgcctgcggcggtgagcagcacggcagccgcagcaactacggaaaccgcggcaccagtcggaggcacacgatcacccttgttgtccttatcatccttatcagtgtcggtcacaccaggctgctgggagccgggcttctgctcaaccttggtggcccaaaatgccttgtcaagggcatcctgtgcggcatcgacatcggcctgcttggcatccttgtcgtcgtacaccttctgagcggcggcaatctggctctgcagagcctgccatgcctcctcggtgtacttcgacttgtcagccttcttggcctgctcgatggaagcctcgagggactccttcttcaccgtttcggcggcgggcttctcttccaaggccttgacggccttgttcagcgaagcggacgcttcctggacggcggcctgagtgacctcaccgacctcaccgaccttgagcacaccttccgcagcctcgatggccttgttcaaggcctcgacactcttatccgtgtacttgccggaagcggcctcggctttggccgcatcgatggccgcctgcaacgtggacttctccacgtcggtggcgagcgcaacgagtgccttctggccgtcctcgagcttggtcacctgctcggcgacctgttctgcggtggcgttggcatcgtcgtacacagcctgggcagcgtcaatgatttgctggaactcagcccatgaagcggcggtgtagcggcttgcatcgaggccgttggctgtgtcaagagccgactcgagcgcggtcttgtcgaccggggtaggttcaggctcggtgccgtcaataccatgcacgccccactcggccacggcggccccgaaggtgctgctgccggtgtgcggagtgagcacgagtcgcagcgacttggtggcgaccggcttgaaggtcacagtgctccaacctttggcatcggtatccgcacgagaagccggcgagttacgcacaatggtgtaatcctcggtgggctcgacatccttccaagaaccatcctcggcgaggtactgaatcttccaagcgtccgggacttccagaccacccttcgaatcgtcagtctcagcgaagttggcccagaactgggcgcggctctggtcaacggtcacggactgaccgaagtcgtactgggcgtacatgccgtcctttgccttgccccaagaaccccagaccttgtcgttgacgttctgatcatccgtggtcggccaagtatcatcgacgactacgccgtcgttgagcttgccttcggccggtgaccaggtcgcctcggaatcaggcgaaatggtggtcttggtcgccttgccttcaatccaaccgaccaacggctcaggctcaggctcaggagtggaggaaccgttcgggtcggcaaccacgtggacagtgagcttggcagctgcggaagacgaaccgtcgtcgacggtaccagccacctcgtagtcaccaaccttggtcaggtcgatggccttgatgtcggcatccttccacgtgaccttgcggtcgtcgttgtatccgttcgggaacttcaccggaaccgtggcgggcaggtcgatggacttggcgttctggtagacggtctgctcaaccggctgcgcattacccacggtctgcaatgcggtatcggaacgagctgcgatgtgtgcaaccgtaccgctcagcgcaccagcgacgatgcccttgacatcgaatacggcatcggcggccagctgagcgtcggtcaccttatcccacgtgacggcgaggtcacggcgagaaccgtcggtgtatacggcgctcacggtggagggcagcttcagatcatcggccttggaaccggtctgcaccagtcggttgacttcgtccacgctcaccggctcgatggcgtacgcctcgaactcggaagcacccacgatggcgcccttcgggaagaccacgcgcagcttgtcggtttcgacggtgtcggcgaacttcacttcgttgccttcgttctgattgaccgtgtaggactggccgtcagccagcttcacatcctgccagttaccgtcagcgtcagcgtactggagcttccaagatgaggccatcggcacgccaccgccatcggtccagaagaagaccttggccttcttcagtggcaccttgccggcccacttcagttgcagccacggctccacaccagtgttgtcgccccagttgttccaggtctcgttcggcgtgttggtgtataccacctgaccgtcgatgaccttcttggcgttgtccttcggctggtagccgttggtgtagctggcagaggcgctcgactgcggggctacgttcacggtaccgtcagaggggatgccgtgaacggtgatttccttggagccttccttctcgccatcggaagcggtgagcttcagaacgtagtcgccttccttgttgaaggtgacggtggtgctggcagcagtatcgtccacgaacttcgcggtaccgccctcggggccggaaaccagctcccacttggtggtgacgtcgccttctgcgggcagaccgtcatccttcaccgtaccgacgagcttggcaccggatgaggtgctggaagacacgtaagcatccacctgcggagcctggttctcggaagtgccgtcagccttgataccggtgttgtaggcttcgatctccttgacaccgacggccatgccggcctgcggcgtgaaggtgacgcggatagtcgtggtctccaccggagtgaactggatacggttgtagttcgcgcccgcgtagttcggggtgcgcacctgatccgcaatcggggcccatgtgccgtcatccttctggtactccaacttgtagttggcgggctcggcatagccggagatggtctggctggacgagctctggtagaagtacaagcggaggtcgtcgatcttctgcttgccgtccttgaacttgatattgagcgtgtcggtcttgttctcagaacccttggtaccccagaacgattccatcacggtcttgccgtccaccgcgttcttggccgggtagttggtgtccttctcggcgtaggtggtaccggtcacgtccgcgtccttggccacattcgtggtggacttggaagcggagtcgacgttggcaccggacttggcgaacaggtcggtcacacgctggtcggcggtgaaggcaacctggttggcggccttgatatcagaaccagcggcattggtgatggttacgccggccttgtcggcatcctcaacggtgcccgtggacggatcgtaaatgaggtgtgcgagcttgtcggaagtgaaggcgagcttgccccccacgtacaggctgtagccagcaggtccaccatagtggctgccgtccttatcccacacgatggaaacatcttgaccgtggtagctcaggttgttcaccgtgaagtagttccagccggggatctcaatcgggttcagctcaatcttgttatcctcgcgcggcaccataccggctacgtcctcgaccatcgtccagttcgtggtgccgagctgggtgtggtggatccaggagcggtaggtgatcttgccgccgttctgtgcggcgtcaaggttcttgtcgaggttgttgatcacgccgtcaccgtttacatcgccgacgttgttgttatcctcgttccagaactcgttttgatcaaggtagttgttatcgccgccctgatagtgcgcgaacgccacccagtacagcagtttcttgaactgctcattggtgatgtaaccgttcttggctgcatcgtaattgcggatgccggctgaatagacctgcagcagcggctgtgcgttgataatggagaagttgttggaaccggggaagttcagcgccgccttgtccgcctggttggcggtgaagaacgggaagatcgggaactcgttggaatcctcgaacaggcgcagagccttgttgtaatcttcgttgccggtaggcatcaggccttcggagtacgggtagtagttattgatctccttgtacttggcgaaagcaccgtcgttcagccacttgtgcttgagcaggttgtcggacttgtcccacagttcagtggtggcttctttctggatcttgtcggcgatggcctgcatcttctcggcgttggcggtatcgccagcggccttgtaggcctgagcagccgcattggcgttggcccacatattggcggaaccatcggcgcgatccatgcgctggccggagcgacccggctcagagaaggaaacggcgtcggcatcgttaccggtcatcgaccaccaggaccagtcaatcaagctgttgtcattgttgttctggttgtcgttgttgtccggctcgctcttggaagcgagtagaccttgcacgtcctcggcaccctggtcggccagctcctcggccacggtggacggaccgccgtgcaccttgtaggagtcccagccggcgcgcgtgatgcactgcgtgtagctatggttccagttggccgggtcgcccggattgtcgtggtagtagtaatagcccgccttgctcttcttggcggtatcgccggcggaaagccaggtgccgtaggagtactcggggttgcggaaccacttggtgtccatcatgaacatgccggaggtgagcacgatttggttgttgtagccgagcacaccctcgatggaggtcgggtactggaaggtgttgccaggcatgttggcgtcgagcatgttgaaacggctcagccaccagcggtagaccacggtcttatcgatattgtcttccggagtgtccacgtagggagcgttatcgacccaccacttgttgtaggtggtcacggaatccttgtaggaggcggcagcatccttaaggtcgccggtgtaacgggcctcatattccttggtggagtcaggcagttcgttggcgatcaggccgagctgaatcttgacggtctgcggttcgttggccttgaggctcaacgtgctggtgagtttgccaccgctgacgatccagttggaaccgtcctggttgttggcggagaagcgcggatagatggtcgtcaggttgttcttgacgttcacgcggccagtaagttcggtggcaccatcagcaccctcggcggcgaacggcgaggccgtggtcagtgtgacatcgcggtcctgcgtgctttccacggtgaggttcgcaaccatcacgttgttgtaggtgatgtacttgacttccttgatcttgaggctcttgccaccggtctggaacagggaggtgaagtagctcggcgtctgcttgcgctgggaggcgtcttcgttaagggtctggtttgatccatcagcgtttacggtaacggtgaagccgctcctgctggtctggtcccagtaggcggtatcacccacaaaaccgagctgattaggcgtgtgcgtgtacatgtaggcggcgcgaccacgggtgaacaggtagttgttgccgtcggagccttcatacgagtaagcacccttgtcgttcgtgcctttaccagttggctgtgcaccagtacgggtgagaatcttatcgatccagaagtcatggtcggtgtcgatgccggccaggttcttcacgtcgttatcgaatgtctcctgcagatagctgacggcagggttatatgtggtgttgttcgccgccgtcttcatcggatcatcagatcccttgaacgacggatatgccacatccgcattcttgatgacgggcgcatcggctgcctgcgcggtgactgcaccgccggtggccagtgtggcgaccgctgcaaccgcgccgattgacgcaagccaccgctttcgtgttgattgatgcattcctgcttggacctctccgccccggtctttcgcgtcttcgctcaggctacgtcgcatctatgcgaccaggacttcttctgtggatgctgggccgcagagcccgttctccgtcagtttcctttattggctattgggttcaccggaatgagtatcttcagtgaatctggtgtgatatccgccatggatatcacggttggagcaattcaccgaagctgattccacatcataaccgagcgaatacggtttcgcaactttccctcagcgatatcaaccatcttatacaacaaaaacccggcaatttctcagttttcgcatttactttcgcattagagcattgctgcgtttcgccgtgtcgcagtacctacggcgcgccgattcagcctcgctgaatcaggaaccaacaggctcccgctggcgggagctggctcgcaaagcgagactgagggtggcttacacggtaccgcttatgaccaccctcagtcgactccgccgacagctctcacagcgggagcatataattaaaaatctcctgcacgggtattaccccacacaggagacctcattccccggatgtgttttcggctccaatcgatactgacatccggcctatgccgtcatcgacttattgcagacgatggcggcataagtattattttgccggccagttgcgcgcaggccggcatatcgccgatatttatcgacgctggaagacacgcatctcgcctatctcgcggttggcccacgagtagtacggcaccaagcgcagcgtcgcgggctcacccgcacgcggttcgtcggcatccacgtacagcggcgcgtcatcctcgtcggcgtgctcgcgcactgccggcaaatcaacggtatcgactccacccagcaagtcggcctggaaagccacagcggcatccgcaccggtgacgccatcggccagacgatagttccacaaatcaccgggattatcgacctgttcggcgcagtagaccagcggtccgcgcatcacggccacctgaccggcatcggagcgcacgcgggagttggcgcgcacgaacttcacggacatgtcgagctcgagcgcaatctccaacgtatcgccggcgttgaccacaaggtatacgaagccgtcttccagcgaacccactgcgggcttgccgttcacggtcagcgtgtaggagccccgcgaccagccggggatgcgcagtccgaaacggaccgagctgtcagtggcgctggcgggcaggctcaccgtgtattccacatggccatcccacgggaagttcgaacgctgctcgaccgtcaggccggaagcgaattcggctgtgttggcgatgaactggtggctcagcacggtcttgccgccgtcgcgctcggtgtagatgtagcggtccacggaggcgatgagtcgggcgatgttggccgggcagcaggcgcagccgaaccagtcgacgcggtgggagagcacgtggtgacggtccgggttatccagtccgtcaggcgtggtctccagtgcattgacgtagtagtactgcttgccgtcgagcgagatgccggcaatggaaccgttgaacagttccttctccagcacgtcggcgtattcgcccttgggctcgaggtcgagcatctgctgggcgaacatgctcatagccacggaagcacaggtctcaccgtacatcgtgtcgttcggcagatcatagtcgtaggtgaacgactcgcccacgtgggtggaaccaatcgcgccggtgacatacatacgacgggtgacgatgttcttccagaaacgcttggcggtgtcgatcagtccccgatcgccgagcagtcggcccacatgggccacaccagtgcacaggtagccgacgcgcacggcgtggccatccgcggtctgctggtcgcgcacaggttcggcggcctggaagtaggtgggcttgtagaagccgaggtcggggaagatgttgtcgccgttcagggccttcagctgcttggtgtagaactgagggtcttggccgcgcacgtcgatgaggtattgggagagcgtcaggtaacgcttttcgccggtttcctcgtacagtttggcgagggcgagttcgatttccgggtggccgtcggcgccatgaatcttgccttcttcgggcccgaagttggcatccaggcagtcggccatcttcttggcgacttcaagggcctgctcgttgccggtcacctgatggtaggcgacggcggcttcgatgtagtgacccatcacatacatctcgtggctttgctgaatcaggctgaagcgcgggcggtcggcccatacgccggacttgatctggtacggagtgtccaagtagccgtccggctgctgagcgcgggcgatgagatcgaccgtgcgatcgcacagcgccttgagttcgggatccggatggtaggccagcgcataagcggcttcctcaagccacttgtagacgtcggaatcctggaacaccatgccgtggaattcgtcgtccaattcgccggcggcaaccttcagattggcgaccgcgtggcttttgctgtcagccagctggttaccggccgggtcgtcgggcactgtggtgtcgatttcgtcgttcatcacgccccactggtaggggatgacggattcgacaatctggtcgcgacgccgcttccagaacggggaagtgattgtaacgttcatgatcagcccttcacggctccagccataaagcccttgacgtagtacttctggagtgcgaggaacaggatggcgcagggaatcagcaggatcacgacgccggcctcagtggcaccgtagtcgataacacccatggtctgctgacgcatgttcaccatcgccagcggcagggtggacttggacgaagagctcaagtacagcggaatcatgaagttgttccatgcttcaaggaaggcgagcaggccgaccgtaaccatcgaaggcttgaccacaggcaccagaatcttgaacaaggcctggaggctgttgcagccgtcgaccatggcggcctcttccatgtccttcgggatcgcgtcaaatgcgttacgcatgatgaacgtgctcataggcagctggaacagggtgatgactaggccgacgcccagcaggctgtcgttcagaccgatgtccttgtaccagaccatcagcgggatcagcagcgaggcgtacggcaccatcaggatggacaaggtgaccatgaagccgaggttacggcccgggtagtcgaagcgggagaacgagtagccggccagtgtgcagacgaccacggagaacacgaccgcgaccagggtcacgattatcgagttgaacaggtacttgggcagaccttcctgataaccgaacagggtcaggtagttggccacgccccagcccttggactgggccgaaccggcctgcgggctgaacgagcagatgatgacccagaccagcgggctgatgaagatgatggcgagcagagcctcaaggattcgagcgatgacgcgcttccacaatggggtagtcataatgtgttacctcccctttctcacttggtgttgtcgcgcatgccgcgcatctggatggagttgatgatgaccagggccaccagcacgatcagcgagagcgccgcggccatacccagatccttcttggaatcgaaggcgaagttgtagatgagctgcaccacggtcatggtggagttgttcggaccacccttggtcagaatgaagaactgatcgaaggcgaggatcgagccggtcacgcagtagaccaggcacatcacgatggtcggcttcatcagcggcagggtgatcgagcggaagatacgccaggaaccggcaccgtccatgcgggccgcctcgtacagatcaccggggatggcctgcagaccgatcatcatcagcagcatgtagtagcccgagaatcgccagacaatcacgataatcgtggcccacagggccgactggccggtggccagcaccgaaccgccctcctgcatcaggcccaacgagctcagaatcttggtgacagggcccacctgcggggaatacagtgcgtagaacagcagggacgcggacgccaggcccgtcgcggacggcagcaggaagcaggtacgcagcacgttgttccacttcgagctctcctgcacgatcatggccatgcccaggcccaggaccagcaggaagaccgtgacgatcacggtgtactccaacgtgaaccagatcgagggccagaacaatttgttctcgaacaccttgacgaagttgtccgggaagttcacgccgcggttgccgcccagcaggctccaacgcgagcaggccatcaccaccagcagcacgatcggcacgaagaacaggacgacgatcatcaaccagtccggcagcgagtacaacaggccgcgacgcgtctcggccgccttcgccttggacttatgcacgggcaccgccccggcgctcttggaaacactcgacatgtttctctctcctttggggaataactgtgaaatggtaatcacggaatccgaatgcaatccgatgtcagggcttcgaggaaggaggactccgaagccccgccaacacaccgcattcaagaggtatgtaatgatgaaggaagaaaaggaatgaagaagaagatagaagttcaattatgtggttgagccggcccctgccctcacaaggaagggaccggctcaatctgttcagttgttattcagttattgctgtgatttgatgagcgatggtgaggagcatcaccaccgaatcactgggcagacaggacgtcggtgacggccttgttgtcggccttgaggtcaccggaaccccacacggcgttctgcacgagcagctgccacggggagccagcggcgttgaaggcttcattgaaggccggggacttcggggtctggccgttgccgtcgatgatcacggagttgatggtctggatgcgcgggtcagcgtcgttgtaagcggtcttcagggtctggatgttggaggcggtgtcgccccggtcagcgaaaacttccttctgagtgtcagactgcatcagccagtagaggaagttccaggcctgagcaacgtgcttggagtccttggagatacccatggcatcgccaccgaggaacgtggaggtcttgccttccttggtgcccgggatcggagcgacgccgacctcgaagcctccgtccttctcagcatcgaacagagcagtggtggaggtgttcgggtaaggcatgacaccgatcttgccgttcgcgaacggagcggtccaagtggcaccggtctcttccttggagcctgcgcccaaaccgttggtggtgttggccagttccttgtaagcgtccagaacgcccttcatggagtcgttgtccagagtggcctcggagccatccttgttcataacggattcaccgtcagcccacacggacgggaagaggtcgaagaccagagcaccaccggactgaccggcgaggtaggaaccggcaacgccatccttgttgagggcggcgaccttcttggcctgctcggtgaactcagcgatggacttcgggccctgctccgggtccaggccagcttccttgtacagggccttgttccagaccatcacggaaacatcggtgatgaacggcagggtgtactcggtgccgtccacggtgccggcctcaatgtggccctgctgcaggtcggccttgttgtccagaccgtcgatctgcttggtgatgtcagtgaagatgccctcggaagcccagtacggaatacggaccacgtcgccggcgaggatgtcaggcagagagtcggtctgcgaagcaccgccgaccttgccttccatatcgtcgttcgggatgatctcgagcttgacctggttcttgtggctcttgttgtaagcctcgaccacgttcttggcctgacgctccagcggggaacgggtccacagggtgatctcggtgccatcgtcggtgcccttggccgggatgccttcggcggtggcggtaccgccattgccggagccaccacaggcggccagcggaacaatcaacgcggcggcagcgatgccagcaagagtacgggtcagtttattgaaagacaccatgttcgcttctttctctatttatccgctcaactatgagaggcggtggcggacggtccgcctccttggtcttcgccctgctcgctcctttgctcggaacaggtaacactgcgaaagccttttctcaatataaacgaacatcgccatttttgcaaaaacgctttcgcactttcgcatattttcgcatatcgaacaggtttgatatgcattttgcgcgattgtttgactcaaacaaacacttatttttagcgctttcttacggcgtgtcgccaaaagccaacatattcgaacgtgaacacaacgctttctttcattctcttttcaatcgcacaaaaatgatcactgcgccacgccaaaaaatagacttgcgaaagttttcgcgtcatgtctacaatagaaaacaatacaaaggggtatcggtacaatcactactttcgcacgaaagagtgcagcaatatactgctgagaaagaaacgaggaatcgaggcattatggcccagacattgaccggacgcgcggcacggctcgaagacgttgccgctttggcgggagtctctttggccactgcgtccaaggcactgcacaacaagccccgcattagcgaagaaaccaagcagcgcgttctggacgccgcccgccagctcaactactcccccaacaaactcgcccaatccctggcccgcggcaccaccggcactatcggcctggtcacctccgatctgcagggccgtttctccacaccgattcttatcggcgcagagaacgagttgcgagcacaatcgacctcagtattgttggccaacgctcgtggcgacgccgcgctggaacgtcagcatgtcaagaaactgctgtccctcaaggtcgacggcctgctcatcgtgcagtgcgaaaccaacccccggcccacgcttggccatgactggggcgtgccactggtctacgtctacggcccctccaccgatatcgaagattgttcggtcacctgtgacaatgtggacgccgggcgcatggccatcaaccatctcatctcttgtggtcgccggcacattgccattatcggtggcgacgaaacctataccgccgccaccgaccgcaccaagggtgcggtcgaggcactggccgagctgggcatcgaaccggccgggccaatccggtacggcaagtgggacgaaggttggggccgcgccgccacccgtctgctgctcgatcagggcgtcacgttcgacgccgtggtctgtcaaaacgaccagctggccagaggctgcattgatgcgctcaagcagcagggcctgcgcattccggatgatgtcgctgttatcggccatgacaactggtctgtgctgacctccagctcgaggcccgcactgacgtcgatcgacaatgaaaccgagaccatcggccgccgcgcggcacgatacttggtcgatgccatcgaaggcaacccccatcacggtgtcgactacgtaccctgccgccttatccagcgcgaatccaccctcccgctggactgatatcaatcgataccctaccgcttcttggttttgcggccctttaagtagatgtcgatgacgatccatacgccaagggcgaaggccacgacgtagcccatgaagccgatgaccggaatgccgaagataatcggcttcatgccggcgtagtagacaatcgacgagccaacgaacaaaccgaccacaatcagggccatcgtcagacgattcgccatatccgaaagcagctggaacggctcttcggagccgaccagttccatgttgacgcgcaactgaccacgggtcagcatacgggccacggtcttgagttcggtcatggtgccgagcgtggcatgcaaagcctgatgcccctcaacgcccagcgacttgatctcgtctttggtggcgttcttcagcgatttcgacgtggcgatatggtcggagataatttcgatcatattcacatcaggaatgaactcgtccagcaagccttcgagcgtaaccaacgcgcggccgacggtggtcaccgtactgggcacctcgatgttgtggcggccggccatctgcgtcagcgcggtcaggaaggcggcgatgtccagttcggccagatccacggtgccgaattccttgacgatcacgtccagatcggccaatagcgcgggatagtcctccggatcggcctcggtgccggcaaatcgcagcaacccctcggccagagcgggcgaatcctgtttggcgacggcgaaaatcatttctttgaggactgcacgggtgcgctggtcgagccgaccggtcataccgaggtcgataagtacgatctggccgccccggatgaggatattgccgggatgtgggtcggcgtggaagaagccgtcgtcgagaatctgtgtggcgtaattgtcgacgagcttggtgccgatctccttcaagtcataaccggcgtcgatgagctggcccgggtgggagacggagatgccgtcgatgtactccatgaccaccacatgctcggtgcacagttcggcgtacaccgtcgggcagtccatgtatttgaatcgggcggcgaaacgcttgaattcggcgagattgcgggcctcgatcagaaagtcagtctccgattcgaaggtgtcccacagctcctcgaccacgcccttcaggtccacgatctgtgaggtgcgaatcaccttagtggcggccttggctatggagcgcatgatggagacgtcctgggccatgatttcgcgcacacccgggcgctgcactttaatggccacatcttcgccggttttcagcgtggcgcgatgcacttgcgccagtgaagcagagcccaacggcttggggtcgatatgcgcgaacacctcgtcggcgggacgcccgtattcggcggcaagcacatccaacaccgtggaatacggcattgggtcggcgtcggcgcgcagtttggcgagttcgtcgcagaagctttgcggcagaatctcggagcgcatcgacagaatctggcccactttgacgaacgtggggccgagcgcctcgaacatgaggcgcatcttgaccggagtcaggccgtgcagcacgtcgaattgctcgacgattctggtgatctgccccagtcgtttgatcttgccacggcgcgtcagatggtagcgcgtggcgaaatcgttcctgcgtccgaacaatgccagcgtttcgtcggatacgctcggagtcgccttggtaacggtctgcttgagcgtgtccggcgtgtcgacggaccggttcgccgccgcctcacgttcggctttcgcaggcgtcagaatagggtcgaccctgctggaaagcggggtcgactctgattccggcgtagtgcgtgtgggcttggtcactcggccttgccctcgtcggcgggcttgtcggcggcactggtgtcggctgcggcagcagctttgtcgccggcttcggcggcggccttcttggcgtcatccaccgtctcgctcaccttgcgcttgagctcggtgttcagcgccttgccctgctcgaccgtaatctcacccttcttgacgagttcgtcgacgagctcgctgctcttctcatatccggtggcaagggctccgatgcccgccagcaggaccttgcgcaggccatcacccagaagatcaaaatcagccatgatacccctccttcgaggtccgacatggcctggtgccatgtctcgtaccaccaagcctagcgcaaacaacagggcaatgtactagaccctcagactgatttcgactgatttttcgctgattggtacttaccgaggactcaccgagaattcaccgaggacgttcggcggcagccttgcgcgcgttggtggctacttgatcgatccgggcgagctccttggcttgttcgggggtctgatcggacgtatcgaacgtaccgtaacgacgagtcacggcggtttcgataaggaaatcgctgatggcggggtttttaggcagcaacgagccgtgcatgtaggtgccgatcacgttgtgcacgcgcgcgccctcggtatgatcttcgccattgttgcctcggccgtcctgatcgacggtgccgagtggctgaacgccttcgcgcaggagggtctggccggagtggttctcgtagccaatcacatcgccgaactggtcggaatgctcaacaagattgccgatcatacgcacgttctggcccacggtataagcaccgataacgccgatgccatccagacgggtgccgtccacggtttcaaagtactcgccgaacagctggtacaggccgcagatcatcagcatcggcgtaccgtctgcggcaagcgagcgcagcaggtcggcgcgatggtagaagtcgtcgatgattttcttctggccggtgtcttggccgccgcctcccagaataaggtccacctggtcgggccagtcgtcgccttgattgtactggtggacgaccggttcgtaaccgtacagttccagccggcggcggatagtcagcacgttgccggaatcgccgtagatgttcatgtctttgggatacagggacaccacatcgattgttctggccatgtcacgttctccttgtcgatgtcttcccgctaaggggaagtcttattcctcaccatgtcctcctgcaggcgggaggtggcgcgcgggcgctagagggtggttacttgcccacgccagcgtcccgtacttcggtgatgcggcccagtacggcgcgggttttgagcatggcggtgtaggtgcagtagatgtgcttgcgtgtgccgggattggcgttgacgaatgcggtgaccgcctgttcgaggtcggtgttcgtatcggcgactggcacttggtcataccccaagcgcaatgccatgtcccaggcgcgcacgccggagaccatggcgacaccggacgcgcgcaaagaggtgaagtccacgtcccatagccagctcatgtcgcggccgtcggcatattcgtcgttgatggcgatcatggtgtccgcgttggccgggtcgaagctggcgagcgagaggcggaagcccatcgggttcttgaccagcagcagttcgaccggggaaccgttgacgtcgatgacctcgccacggccgaaagccggcgtgacgcgggaaacggcggcgatgagctcgtcggcggacacggcgcaggcgttggctgcggcggtggccttggatgcggcggcattgtcttgcatcaccgcacgtaccacggcgagcgcggcggccgcgttgtacaggttgtagacgccttcaagtttgacgtcggtggcgtagtcctggctgtccatctggaaggtggccttgtggtcgcccacggcggtaagtgtcacgtcggcggggagttctgccgtgcctgcggaagctcccctctccgaggggagctgtccgcgaagcggactgaggggagtactgactgaagggagcggcccggccataccttccaccgacacggtcgtggccatgtcgtcatcggacgggaaatagtggcgcaaatcgtcggcgaggccgaagtatcgcactgtggtgccagccggggccttcgcggcgagcgcggcgatacgcgggtcctcgcggttcagtaccacagtgccggtagtcgccgcagccacatggctgagcagtttggccgtggtgtcgatttcaccgaatcggtcaagctgatcgcgcatcacgttcagcagcaacgcataacggggcttgacctgcttgacgaagtggacggcgtacgcctcatcgagctcgagtacggcgatgtccgcgtccaatttgccgccgaaagtgacttcggtgagcagtgcggagaccacgccgcgcacgaagttcgagccggtcggattggtgaacaccttcaatcccagatcggagagcatcgaggcgaccatgcgggtggtggtggtcttgccgttcgtgccggacaccaataccacgccaagcggcaactgcccgagcgtacgggtcaggaagccggggtcaatcttttctacgactttgccgggcaaagccgaaccgccatgtttggtgacgcgggatgcaaaccgcacgaagcggcctgcggccacggtggcgaacgcataccacggtttgcgggtctgcaccacggacgattggtcttgcgaaacatcgcgtgaaacgttgcttgccatcatcacaccccctgattgctgttgtagtcctgcggcatgtccttgaatttggacgtggcaccgaggaaggcgaggtggaaggtttcggtcgggccgttacggtgcttggccatgatgatatcggcctcgccggggcggtcttccttgtcgtagaagtcagggcggtggaccaggaacaccacgtcggcgtcctgttcgattgagccggattcacgcaggtcggagagctgcggcttcttgtcgttacgcatttccgggccacggttcagctgggaaagggccacgaccggcacttcgagttccttggccaagagcttcagggcacgggagaattcggacacctcttgctgacgggattccacggccttgcccgaggtcatcagctgcaggtagtcgatgactacgagtttcagatcgttggtctgcttcagacgacggcatttcgcacggatctccatgaggctcatgttcgggctgtcgtcaatgaacagtggcgcattctgcatcttggtccagaactggttcagggtgttccagcgttcgggggtgatgtcgtcggcgcggcgcagggcggccatcggaatattggtttcggcggagataatacgctgagcgagctccaccttgctcatctccaagctgaagaccacggaagtcatgttgtggtgcaacgcggcggcgcgggcgaagtcgatgccgagcgtggacttacccatggccggacgtcctgcgacgacgaccatctgtccgggctgcaggccctgggtcacgtcgtcgatgtcgcggaatccggtcggcacgcccttgttgacgagaccctgctgcagtttgtccagctggtcgagcgcgtcgtggaccaccgggccgatggcggcatagtcctgacgcaccttgcccatcgacatctcgtagatctcggactgggcgaggttaaccacatcctcagcctgcgatccctcggcggaataaccgagctgggcgattttggtgccggcggcgatcacattgcgcaaaatggcccgctgatggacgatctccgcgtagtacatggcattggcggcggtcggtacggatgcgacgaggctgtgcagatagtccgcgccgccgaccttgtcgaggttgccatccgccaacagctggttggccacgagcaccacgtccaccggctggctggcggaaaacagatcaatgatcgcgttgtagatcgtctggtgcttgggctggtagaaatcggtgacgtcaatggtctgcgaaacttcgccgatggcatccttactcatcagcatgccgccgagcacggccatttccgcgtcgtcatcgtgcgggggcacgcggtcgaaaatcgggtcgccagctgccgccgcctgcgcgccgccccggcccgcgcggtcgccacgatcgccacgatccgagccactgccgaacccattctgatacgagtgttcacttccttctgccatagccctcaagtataggaggtggcgtggcgagcggaagatatcgcacgactacgttcattaggtcgattcctcactcattaggtcactgtgcttggtaacaccacaaaccatgcgcttggaatggcggcattctgaggcgctcgatcaatatctctcaaagtccaccgacctaatgaatgcacaatcgacctaatgaacgcatgaaagtgcaagtcgtgccgaatcatcgcgcaccaatttcatcgttggttcaccttgcggtcagcgcggcgacacgctgaagcgtcaaatgtggatagaaaaaatagttatccacattttggggataagtctggggataatccactcatttatccacatattggggataacttggtggacaagctgaggataactttgtacggctgcactaggtgcttgcgcaacgtagctaagcatgatatgcgtgtgagcgtgcatagcaactccaccagcattcatcgccaaatcattgcgttggcgctaccgacttttgggcagctcatcgcagaaccgacttttatccttattgacaccgccatcgtcggtcacattggcgatgccgctttggccggactgtccatcggatcgaccatcatcctcacggcagtcggactgtgtatattcctggcctactcgaccactgctcaggtggcgcatctgctgggagcgggtcatcgtcgtgagggactgcaggcaggcattgacggcctatggctggccttgagcatcggcaccgtgttgggattaggactgtttgcggctgccgagccattatgccgggcgctcggagggcagggcgaagtgttggaacaagccgtgacctatacgcgcgcaatcgtgctgggtgcgccaggcatgctgatggtatatgcggcgaacggcattttccgaggattgcagaaggttcgtatcacgctgatcgctgcggtgggcggcgcggtggtgaacacgacgcttgatgtgttgttcgttattgtgctgaattggggcattgccggctccggagtggcgacgctgatagctcagtggttcatggggctgttcctggtaatccccgccattctgtggtcccgggcggacggtgcgagtctgcggcctcgtttggccggtattgcggcagccgggggcgacggactgccattgttcattcgtacattggcgattcgtgcggccatggtggctacggtcgcctgtgccgcgcgcatgggtactgccgtgttggccgggtttcaggccgtgaactcctcttggaattttgcgatgaacatgctggattccgtgggcatcgccggccagacgctggtggccacaacgctgggcgctggcagcgtgcagcaggcgcggcggttgacgcgggcgaccgggcgtgcggggctggtcaccggcgcggtaatcggcacggcttttgcggcagtcggcctgttcgccgggcacttcttctcccctacgccaaatattcagacgttgattgccgttgacatggtgacgatgggcatcttcttcccactgcaaggctggatgatggcaatcgacggcattcttatcggcgcgcgcgactaccgctatctggcaggcacctgcacgctgaccgccgtggtgtatgtgacgctcatactcatactggccaatatggtgacgccggcgctgacgagcgacctgatgcgtaccgccgtgctctgggccgcgttcaacgtggtgctcatgggcgggcgcggcctgtccaacgggctgcgcgtgcgctcggacgcatggatgaagtaggcatcggccgcgcgaagtgctgggcgattccgtttacatcgcggcgcgagcggcggaatacatgccgcgcacgatttgttcgcgccacttggaccagccgtattgcttggtgatggtctcaccggcggtggcaccgagcgaggagccgtcggcccgggtcaggtcgaacagcatatccaacagcatcttgtcgtggtgcaagcggtcggccaactcctccgccacggccggatcataggggtccttacccgtggcaaattcggatagggtcaaatgctcacgcaccagcacggtggcccagtcgacgatgtccggcgcgtagcccatacgcttgagaatcaccggcacatggcgggcaccctcggcggcgtgatcggccacgaacgcgcgcttgccgatgtcatgggtaataccggccaacagcaacgccttgaaatgatcgtcatcataccgtcccccggacggtgtctcacgacccagacgcgacgtgacctccaccatatgccgatcgatggtgtaccggtgggcggccgaggcggacggacggttgcggacgccgagccattccggcatccatcgacccggaatgtccacgaagtcgatgctctcccacacttccataagattcggcccgcatgcaagcagacgaataaacagctcgcgcgattcgtcatcccactggttgtcgtgaatcgggcagtgcttcagattaaccaaggtagacgggttgatgggcaaaccgaattcgccggccgccacggccatacgcaacgccagcttggcatccttggcaggctcggcaccgggtgccaacaccaattcgccttcgtgcttggccacgccgggagccaccacgtcgaattgcggggcttcacgcttgccgccagagcgctgagagaacatctggaagaacgcgaatcgcggcttttcgtgggtcagcgaatgtccagcgcgggatgcggtggaatcaagcgagaaggagatgcgccggccgatacgggcaagcagcgtctgcaaatcgtcgatcgagtaggcggcacgctcgttttcgggccaagtcggatcggcaaggccaagcatggcagccactttggcctgatagggcgtcagcatcaggttggtatccttgccggccaccagatggatgcagtcgcgtacgtcgagcagacgttccacggcttcgtcgtagatgccgtgcgggcggtcggccagccatgagacggcgagcgcggagacgagcaccgaatcgcgcaaacccccacgggtctccttgatgtcgggctgattgacgtattggaggcggccgaattcgtcgagtcgggctttggcggagtcgagcagttcgggcaggcgcttgcgggcggccttgcgccagcgttcgaggatggatgtggcggtggtggtaatcagagcggtgtcgccggcgatgggcttcacgtccagccagcccatggcggcgggaaggtcatggtcggtgacttcctcgcattgggcgcgcgtgcggatggagtggtcgaggtccagaccgctgtcccatagcgggtaccagagtttgttggccaactcgttgagctgctggtcgttcaacgtgcgaggctcgtagatgatgaccaagtcgaggtcggagctggggcccagttgaccacgtgccagcgagcctaccgcggcgaagccgatgccggagtcgggcacggggaaagagacatccttgcaggccgcattccacagctccgtgaggcattgcatggccagttccgtgcgggctttacgcttggtcgcaccattccggtagacaccatcgtcatccggctggctcatatccatgaatcgttgtttcaagccatctactgctgaagtcattgcttcatctttcattgccaaaaaggtccccgcacggcgtcaattcgcggcgtgcggggacctttcccatgcagtccatcccctgctaggcatggacgtctgtgttatcagatcgcggcggaaccggtctcaccggtacgcacgcgggccacggagtccagcggagcgacccacaccttgccgtcaccgatggtgccggtgccggcggacttgatgatcacaccgaccagcgtctcggcatccgcgtcatcggacagcacttcaacgcgaatcttcggaatcaggtccacggtgtactcagcgccacggtagacctcggtgtggccgcgctgacggccgtagccgttggcctcggacacggtcagaccgtgcactccggcggccgcgagggcctccttgacgtcgtcgagcttatggggctggatgatagcggtgatgagcttcatctcacctcacctccttgagaacagagctggcagtaccagcaaaatcgtaagcacgttcgccctggtcggcaagatcgatgccgccgacttcctgagcttcggtgacgcgccaaccgatggtcttctccagagcgaaggcgatgatcgcggtgatcaccgcggagtagaggatggcgacgagagcgatgaccagctgaacgacaagctgcttccagtcgccgccagccagcaggccggtgccttcgccgaagaagccgacgaggacagtaccggtgaaaccaccaacgccatgcacgccgacgacgtcgagggagtcatcgtagccgaacttgaacttgagaccgcaggccaggcaggtcagaacaccagcgatggcgcccatcacgatggcccacagcggggaaaccacatcggcggccggggtgatggcaaccaagccggcgaccatacccgaggcggcacccatagcggtgtagtggccggagcgaatcttctcggtgaagccccaggagagcatggcagcggcagtggcggcggaagtggagacccaagcgtagccagcggtgccgttggcggcgaaggcggaaccagcgttgaagccgaaccagccgaaccacagcaggaaggcgccgagcatcacgaacggcacgttgtgcgggcggaacggctgcgtgccgaagcccttacgcttgccgatgatgagcacgataatcagggcggcgactgcggcgttgatgtgcaccacggtaccacctgcgaaatcgtgggcggccgcgccgatagccttggagatggcgccgtcagcagacagcagaccaccgttccagaccatgtgggccataggagcgtagtcgaaggtaacccacagcgccacgaagatcatccaggtgctgtacttcacacgctcggcgatggcgccgcagatcaggccgacggtaatcatcgcgaaagcgacctggaaggcaacgtccacggaaaccgggtagttgttgtcgttcagaccggtggcggtgaacacgccgtcctgcgcgaccatggaatccttgagcaggaagccgctggccgggtcgccgaaaataccgccgatgtcggaaccggcgtatgcgatggaccaaccccacaaagtccaaataatcatggtgaccgacagcgcggccgcctcaagcatcagcatgttcagtacggccttggcgcgaaccataccgccgtagaagaacgccacaccaggcgtcatgaggaaaaccaaggacgcggatgtcaggatccatgcggtgttaccggaatcaatcgctcccatgtctacctccctctctttcgttcagggcaccgggggctttgtgcggccggcgtcttatttgtctctacaatgccgtcccccttatgggggctaacagtttgtcagttaaagccggtctcgttttggtttcgttacgccaagttacgcgattgttaagcgtggctggaagcgtacgtgcgaccactcgaggaaattttggcgcgattccaacggatatgacgaagccccgaccatgtttcgagcatgattcggggcttggtttataggtaagtcgcgcgttttgcgctctcacaacgtggacgttggcttacgcgagaatgccgtccacgaaaccttcgggatcgaaaggtgccaaatcgtccgggccttcgccaagaccgacgagcttgaccggcacgccgagctccttctgcacgctgatcacgatgccgcccttggcggaaccgtcaagtttggagagcaccacaccggtaatgccgatggcttcggcgaacaccttggcctgggccatgccgttttggccggtggtggcgtcgagcacgagcagcacctcgtccaccggcaggttcttttcggtgacgcggcgaatcttgccgagctcgtccatcaggttcgacttgttctgcagtcggccggcggtgtcgatgatgagcacgtccgcgttcgcttccttggccttggcggatgcctcgaaggcgacggatgccgggtcggcaccgtccttgtcggagcggacgaccggaacgccgaccttggcgccccaggtttccaactggtcggcggccgccgcgcggaaggtatcggcggcgcccagcatgacctgcttgccttcggaaacaagcaggcgggaaagcttgcccgcggtggtggttttgccagtgccgttcacaccgaccatgatgacgacgctcggcttgttcgcgccgtccttgtcggcgttgagccggcggtcgatgtcagtgccgacgagcttgagcagtttgtctttcagcgccgcgcgcacttcggccggatcggactggcctgcgattcgggcgtcgttgcgtagttcctcgacgagctgttcgctggcttccgcgccaacatcggcgagcagaagggtgtcttcgacgtcttcccaatcggcttcggagagctgatccttcgcaagaatgttgaacagggccttgccgaacggattgccggatttcgacagccgcgccttaagacgctgcatgcgtgtgccggcggattcgggggtgtcacgaaccggttcgggcttggcttcggtggctggtgcaggagccgccgtttcggaagaggaagcttgagctgaggacttctgctgactttcagccggagctttttcagctgcatcaacattggaatcaacggacggcttcaccgtggaagaatcagatgcggccgactccgcttccgcagcaagacgggcgtcggccttggctttcgcggcttcggtggacttggccacggcagccttgcggctcttgccgaaccaccatccgccgatcaccagaattgccgcgatgacggcgacggcgacaatcgcaataatcacattcgtatccatggctccagcctaagaagcgcaacggacacaccggctccgccccgcggacgcaccacgaatgtccgattcgccagggggataaggtgctctgccatgcaaggcatcgataatgcgatcttgacttcgatacatctggtgacgtttttatagatcatgaagagtgattcttttgtcttccgctgtctgctttgaaggactgcttcctttctttagggaatttgcgtagcgaatcagactcctcgcgatgaggaagaccagaacgaatacggcgattacgcctaggatctcaatcaataatgcaatccatgtccagctcatgattcatcctttctctttctgtactcgtctatgagtattcgagccgtgtcgacgtcgtatctatcgtcaatggcgagactcttcaccaagaggatgaatggatcctccgtatcgttgtcgttcaaccgtattttttcgataagcctgtcaagccggatcctcatggtcgggtaagagacttgatacagctgggacatttgcttcagagatcctgacgatagcacgaagttcttgatgaaggccaaatcctcctccgtaaggctggccaaccattctggtagacgatccacatcaccctctttaataaaatttattatttattaaatatattaaagccgcgatgaagcattgtcaatatgacacacatgtccgattcactagaatcggacgatacgtgggggcggacggtcagggagctatccacggggcgtgaaaaactggacagcatggccaatacatccagaatgacgtcgtatcagcggcgcgagcagctcatcgaaatcggtcgttcgctgttcgcgtcgaagggttttgaagcagtgagcgtggaggagatcgccgccaccgcaaaagtatcgaaacccatcgtatatgagcatttcggcggcaaagagggcctgtacgccgtcattgtggaccgtgagatgcgcgcgttgaccagtgtgctcaccgccgcgcttgacgatccgaccgtgcacccacgccagatcgtggaacgcaccgcactcgcactgctcacctatatcgaagaggacgccgagggattccaggtgctggcgcgcgactcgcccagcaccgaaccgtccggctcgttcagctcactgctgggagacatcgccgtgcgcgtcgaagacatcctttccgaaacgttcaaacggcagaaactctccaccaaaggcgtgccgtactatgcgcagatgctggtgggcatgaccgtgttcaccggccagtactgggccgaccggcccaaggtgagcaaggagcagctggccgcgtacatcgtggacctggcatggcatggcctgagccggctcgattccaagccgcagctgttgtttgaaggcgtcaaggcccggaaggaggccgagcgccgggccaagcgcgggatcgatgccgaaacaccggccccggacggcaaggcatcatcgcccttagagcagacggacctcgaccacacgctcagggaagattcagggttgcagaatgtgagttcaggggcacaggttgcgcaacactctgccgagtcgggagacgaggtgctacggtttgaacaggaaactgaacagaacgactaaatatgtgaggacgtaagactttcatggccagcacggcaaagacgctcacctttgtgatccccgcatacaatatggagtcctatctcgaccgttgcgtgaactcgctgctttcggcaagcgacaccagcgacctcgaggtgctgattgtggacgacggttcgaaagacggcacgctggagtacgcgcgcaaactggaacgcaccaatccaggtgtcgtgcgcgcgattcaccaggagaacaaaggccacggcggcgcggtgaacaccggtatcacggcggcgaccggcatgtatgtcaaggtggtggatgcggatgattgggtcgacccgcaggccatcgacacggttctggccacgttgcgcgcgcaacgtgaggccagcgagccgatcgacatgctggtgaccaactatgtgtatgacaaagtgaccaagcgccacaagatcgtggtgaacttccgtcatgtgatggaggccggccgcgtgctcggctgggatgacctgggcaagttcggtctggcgcagtacatcatcatgcatgcgctcactttccgcacgcaggtggtgcgcgattccgggctgaagctgccggagcatacgttctacgtcgatttctattactcgtaccagccgttcccgtgggtgaagcgcatccagtatctcgacgtgccgttctaccactacttcatcgggcgcgagggtcagagcgtgcagaccgacgtgatgattaagcgtgtggatcagctgcggctcgtcaatcggctgatgaccgaggccacgcccgaacgtggtacggtgccggaggggctgtaccggtacatgattcacttcctgacgatcgaatcatgcgttacctcggcgttcctgattctctcgcgcgatccggccaactacattaagaaaaccgagctgtgggatgcgattgacgcctattctccggccatcggcaaggatgtgcgctcgaagctgatgtcccgcgcgctcaatctgcctggtaaaaccggccgctggatcgtgcgcaacggctatctcatcgccgaacgcatcgtcggcttcaactgattcggattgcggctttgccctgctgacgcgttatcagcagggcatccctattacctccccagccgaggttttgctactcggcccaacggtcggacattgcgaagctgttgtgcatcaggttgctggaggtgtatagcacgtcgttcagcagcttggttgtatgctcgcgcaggtagtcggccatctcgtcgttggccgcttcgagcacatccgccacgccctgcacatccttctcatcgccgtggccgccatcgagcggccatgcattcgtacccgtcgattcggcatcgcttcgagcaagcaactgctcatccgtgcgctcgatgagccggtgcccgaacgcgcgcacgccttccgcatagccctcgatgaaccggttcgtctcataccaatgcgcgtcggccacgacggcgatcaggcggttcgtccaatacaggttgccggtggagacttcgggcgtggtgtcgcgcaggtaggcaggcgtgtcgttgacgttcgcgtagaacggcgcggcggcggtgaacggaccggagccgaacgatacccacatcaccgtgcgattggccgccggcacatacgggcggacctgaatcgccaccatatggccggtgcggttcacgccgatcggacggtaacggtggcgcgattccgccgtgccggtcgtgccgtacgggtcgtacggcgtgccttcgaagtgcgaggacagcaggaaatcaacgtcttcgaggctcaccttgtcttccggcacgcggcaccacgggatgtcgtcggattcgggcgtgtagcgggcggccggcgaatcccagtcctcgctggggttgaggcggcgttgcatgtaccaggcacgcggcgtgttgtagatatggtccttcggcgtcgcggtgccgaaggccttgcgcgggttgaagcgggtgggaagggcaacggttgttccgaatccggcgctatgcacgtgacggccgttggaagagaccgacgttcccattgtgcggtcaaggtgatgcgtggccatgaactcgcgcaggtcggcgctgcataggtattcgcgctgctcgccgaacgcatcggcgaggtcgaagtcgtcgatgccgagctggttggggatcgtggcatagcagtcgtcgggcactcggcgggcgatccaatgatggccgccgatggtctcgacgtaccagatctcgtccgcatccgaaataatcacgccgttcgattcgtaggtgccgtaggtttcgagcagttcgcccaaccgcgcgacgccctcgcgcgcggtggtgacgtacggcagcacaagggtgatgatgtcttcctcaccgataccgccgggctgctcggcctgataatcggtgctgtccggcccgccgacagccggccgcaactcgaccatcgggtccgcaccgagcacgcgctcgttgacagcgatggtttcggtggcgctcatcgccacgttgtgttcgttggcaccggcttcggccagaatgccacgattattcagcacgttcggtgcgatggtgtaccggcaaggattgtccggtagttcgatttcgacatggctcagcacgctgcggtagtggcgcggctggtcgtcgggggcgacggcgacgaagcgcttgggatcgtaacggcccgagcccgaatcgtcatcgcgggcgatgatggtggaaccgtcgtaactggcatttttgccgacaagaatcgtggtgcatgacatggggcaccactctaggagccaggctggtcgaaacaaaaaatccttggaaccattgcgattccaaggatctgttgtgccccctgtgggattcgaacccacaacccacgacttaaaaggacgctgctctaaccgttgagctaaaggggcaactcttctaaaatacacaccgttttgggatatttcaactacggcgttgcgtacacgtttgcgtacgcgattggcccaacgcacggcacagcacacgcaatgtggcccaaatcgcagcccaaatcgcatatcgcctctagcgatagatagccgccggcggctacccttgtacattatgagtgaatcccccaattggagcaatcccctgcgcgattcgcgcgacctcagactgccccgtatcgccggcccgtgcagcctcgtcattttcggtgtcacgggcgatctggcacaaaagaaactgctgccggccgtctacgacctggcgaaccgtggcctactgccgccgagcttcggcctgaccggcttcgcccgccgagactggacacaggagcggttcatcgaattcgtcaaggccgccgtccgggcgcattgccgtacgccgttcaaggagtcgacttggcgcaatctggccgccggcatccgcttcgtgcagggtacgttcgacgatccggaggccttcgagcgtctgagcgccaccgtgcaggagcttgaccgcgaccgcggcacgcagggtaaccatgccttctacatgtcggtgccgccgcgcgccttcccgcaggttgccaagcagttggccgcctccggcctgtcgcgctcgtccgagggcgcatggcgccgcgtgatcatcgagaagccgttcggccatgatctggccagcgccaaggaactcgacagcgtggtatccgaagtgttcgacccgagctccgtgttccgcatcgaccactacctcggcaaggaaaccgtgcagaacctgctggccctgcgtttcgccaacgccatgtacgagccgatctggaacgccaactatgtggaccacgtgcagatcacgatggccgaggacatcggcatcggcggccgcgccggctattacgacggcatcggcgccgcacgcgacgtcatccagaaccacctgcttcagctcatggctctgaccgccatggaggagccggtgagcttcaccgccaaggacctgaccgccgaaaagaccaaggtgctttccgccgtgcgcctgcccaaggacctcgccgccaacaccgcgcgcggtcagtacgccaagggctggcagggctcgcacgaagtggtcggctacttggaagaaaaaggcatcgaccccaagagcaccactgaaacgtacgccgccatccgcctcgatatcgacacccgccgctgggctggcgtgccgttctacctgcgttgcggcaagcgcctcggcaagcgtgtaaccgaaatcgccgtggcgttcaagcgcgccccgcatctgccgttcgagcagaccgccgtgcgcgaactcggcaagaacgccatcgtgattcgcgtgcagcccgacgagggcgttaccatgcgcttcggagccaaggtgccgggcggctccaccatggaggtccgtgacgtgaacatggacttcagctacggccgctccttcaccgagaactcgccggaagcctatgagcgactgattctggacgtgctgctcggtgatccgccgttgttcccgaccaccgaagaggtgaacctcagctgggagatcctcgatccgattgaacaattctggtccacgcttggccagccgcaggcctaccgcgccggtacgtggggtccggcacaggccgacgaaatgctggcgcgcgacggccgccactggaggatgccatgatcatcgatatgccgaacacccgcacccgcgagattgcgcacaaaatcgaacagctgcacgaggagcgcggcgaatcggcgaccggccgcgtgctgacgctactcatcgccaccgaggacgcggacctagagcatgcgctggaaatcgcgaactcggccagccgtgagcacccgtgccgcgtgattgccgtagtaccggataccaatcctgccgatcagtccggcgaaggcgaaccgaacgagaccgaagtggccgccgaggtgagcgcgaatcgcgataatccggccgtcgatttgaccgacggcccgaacgatccgaacgattccaacctgaacgcccaagtgcgattcggcgcggacgccggtgccggtgagattatcatcttgcgtccgcgcggtggccttatcaaccacccggatacgctggttatcccgctgcttgtgccggatgcgcctgtagtggcgtggtggccgaccacaccgccgtcgaacccggccaaggatctgatgggtgcgatggcccgcagtcgcatcaccgacgcgctgcactccaataatccggaggccacgatcgagcgtttgcgccgcaattggacaccggaagacatcgacttgtcctggacacgactgaccgtctggcgcgcaatgctcgcctcgatgctcgatcagccgccgcacctgcccatcaccgccgtgaaggtgaccggcaaggccgacttcctgcctctggaaatgctgtgcgcatggctgcgtctgaaactcggcgtaccagtcgaaactgagttcgtgcccgacgcgcaggccgtgaccggcgtgtacctgacccgtgaggacggtgtgatctcactggaacgcccgtatgaggaccaagcgctgatctcgctgcccggccagactccgcaggaagtgtccgtgccgatgcgcaccatcgaggactgtctgaccgaggaactgcgccgcatcgatcccgatgagatctacgccgaggtcatcaacgaaggctgggatctgattcgtcactgaagtcggtagaaccgttgccacagcggcgttggcatgagttcggcaattgtggtcgagccatgccaacgccgttgctcatcgtttcctacctcatgcgatgccgaagctcatgaccgcggagtaataaagtgacatatgcgatgtcgcacaatgtacattgtgttgtcaactgacaacacatttcattgctgcaaatggctggattcccggcatgccacccgtattatgcgttgtcaactgacaacacaatccacattgcaaagtacgacacataccccatataaggaccatacatggcaactcgaaaactcattgtgtatccgaataaagatctgatgattcaggctggcgcgcaacgttttgtcttggcgctactcgatttgctcgccgaacgattgcctgatggcacgcatcgcacacgtgtggatgtggcgctgtctggcggttcggccgcacagccgttgggtttggcgctgaacgatccactggctgatgcggttgattggtcgcgcgtgcatttctggtggagcgacgaacgttttgtgccggcttacgacaccgatcgcaatgctctggaggcccgtcgcctgctgcttgaccagctggtggcggatggcaagctgcctgaatcgaatattcatgagatggcggccgatacccgttcagccgatgacatcgccgatgtgatggatcaggccgatagtgatgacgcttccgttcgcgccgccgccgatgccgcgaatgatgcgctgctggacgatgccgcgagcgactatgagcgcgagttggtgaatgaattggggccggaaccggtcatcgatctgatgattctcggcatgggaccggacggtcactatgcgtcgctgttcccgggtcatgatgaggtcaaggttaccgataggctcaccgtgggtgtgaaccactcccccaagatgccgccgttgcgcgtctcgttgaccgcgccgctgattgcccgctcgcgccgtacatggttcttcgccgccggtgccggcaaagccgaatcgctggcccatgtcttcgagcggcccaacaacccggattacccgtcctcctacgccaacggagtggacgagttcacctggttctccaccgaagaaaccgtcaccgagttgtgatggcgtctcctgtgggccgaaccctgaatgaggggcccggcccacagattgtcgcagacgctcaagcctgctgttcctcgggctggccttcctgcgcccagagggtgtggaacacgccgggcttgtcgacgcggccgtaggtgtgggcaccgaagaagtcacgctgggactgggtcagggcggtgggcagacgcttggagcgcagaccatcgtagtacgccagggagctggagaacaccggggtcgggataccggcctccacggcacgcacgattacacgacgccatgcatcctgcgattcgccgatgatcttctcgaagtacggatcgaacaacagggaagccggcaaattatcgcccttgaaggcctcggtgatgcggtcgagcaggaactgggcgcgaataatgcagccgccacgccaaatgcgggccacttcggacaggttgatatcccagccgtattccttagcaccgtcctgaatctcgttcaggccctgagcataggccacgaccttggaagcgaacagggccttgcgcacgtcctcgacgaacgcggccttgtcttctccggccagatcgatggtcttgttcgggccagccagaccttctttctgagcgtcttcacgcagctcaccgtgcgaagacagtgcacgagtgaacacggcttcaccgatagcagccacaggagaaccaaattccagaccagcctgcacggtccaagtaccagtacccttcatgccggcatgatccacgaccacgtccacgaacggcttgccggtctcggcatccttgtggtgcagaatctcagcggtgatctcgatcaggtaggagtcgaggtcgcccttgttccattcagcgaacacgtcgccaatctcctcggtatccatgccgagtccacggcgcagaatgtcatacgcctcaccaatcacctgcatatcggcatactcgatgccgttgtgcaccatcttgacaaagtgaccggcaccatcggtgccgatgtgggtcacgcacggttcaccgttcaccttggcggcgatggactgaagaatcgggcccaaggtcttccaggattccgcagtgccaccaggcatcagagacgggccgttgagcgcgccttcctcaccaccggacacgccgcaacccacgaagtggaagcccttggcacgtacttccttctcacgcttgatggtgtccttgaagaaggagttgccaccgtcgacgatgatgtcgcccggttcgaacacctcttccagctgcgcgatagttgcgtcggtcggagcaccggccttgaccatgatgatggcggtacgcggacgcttcagggacgcggcgaattcctcgagcgtttcggccggcacgaagttaccttcggcgccatgctcgttcatgagcttctcggtacgcgagtagtgacggttgaacaacgccaccgtgttgccatggtgcgccagattacgcgccagattggagcccatcgtggccagtccaatcacaccaatgtttgctgtagcttcggccatgcgccttgcctttcgtttgattgtcccatcgtcatcacgcgcgtcacaaaacagcacatcagcggagggaatcattccttcaacgcttgaaagtgtatcccacttaccacccacacgcgaaggctgtcttaggttctacgcaccttctgcccgcgaagcgtaattacttgccagccattcacatacgcccggccttggaagggtcgatatgcatggtctggaagcgattggccatgtaagcgtcgctgtagcgttcgctgaaccacatcgcgaccggtgaatcctgcggctggccggccatgcgcccataccagcaatccaaggccatcagcgtgaaggcaatgtcgatcaccatcagcaccgtgcataccgcagtcagcgaataccgtactttccatggaatgcgattaatcagagccagcagtcgcggcaacagccacttgacccacaccacaccaatcagtccccagaagaacatgaattggcccgaagtacgtccgtcgatggacagccaacggccggtgtaatcccacgcggtaataccgaacgccacttccatgaaccagctggtgcagtattcgaacgcgccgccgatcaccgccgaagcgcagaagatcaagaacggattcgccttccacaggcgattcaggcacacggttaccaataccgcaccacagccgtaaatcggcgagaacgggccccacagcaaacccgcgcggtcctgaagttcaccgttatacagcgccatatggtagatcgtctccataatcaggccacccaccgaagcgatggtaaacagccagaagatattgaagaagtccagtgcaatatagcccttgccggattggtcgcggcccagcatgccggccgccaccgccgattcataatcatcgcgatcgtccatgcgtttgagcgcgcgctgcaaacggcgttcctcgctcagggagggatcggcggtcaccgaaatcacgacgagaataatcatctgaatcagcggcagcagcaggttgaagccaaggccggtcagggccagcgacagcatgccgtcggccaacgtcaacggcatcagcacgtaggtccagcgcgcggcataccggcgatgattgcgcagcagcatcacgccgaacacaatcaggcatgcggcactgactaccagcaccaccgcatgaatcgcggacaggatgaaagtcaggctcatcgcatcgacgtgcacatgaccatccagaatctcgcgcacggcatagaggatggaaatcaccataatcggcaatgtggcgagtccgtccagcagcacgaccgcgccatagatgcgcgccagaatcggtaatcgcttggcgttcgggttcaagccgacgtcgtccagttcgacggccaccagatcagccacgactgcggactcggcgtcacggttctcccgcggcttgccaggggtagtggccgtgccatcgtccttgaattcaaccatggtttcctccccacatagcgtctccttacactatcacccgattgcagttttgccgaacttgatggacagccggtacatgtctgtctacattgccggacaccgagcccgctatcgctttcaggaaacatccaaaaaccatccagaaatcttgtcaataagttccagaacgcctttcgctccagccaaggcactgatggccagtccggcaccggcagcagctccggcacaggttctgatacttccggtaactccaactccgaccagtcatccagccagaacgagcagtcggccattgatggtcaatccggcaccatcgaaagctgatacaacggtttacccatggggcggtagctctctcatgaggcggtaattaccccatggggcggttagcccaaaaccgcattccgcggaataaagccattttaagccaccgccccatgggaattttaccgccccatgggccacttaccacccaatgaaggttttaccgccccatggagggcagcctcacaccaacacacacagcacacccggccacacagcaccccagccacaaaaaattaggcacactgcccagcgacacacgataagccgctgggcagcggcgttattccgccaaaaccatcatcaatcaccccaataatctccggcagccgtattacgctactacaaccgtagcgctacgattaacgtatcgctacggaaaacgtagcaatcaagcaacaccaagctccggaggtatcagtgggcaatatcttcaaggtcctcaaacgcgacttcctgcgcctgttcaaggtgccggccgcatgggtgatcctgttcggcatggtgtttatcccgccactgtattcgtggtacaacatcgtcggcttctgggacccgtacggcaataccaaaggcatcaccgtcgccatcgccaacaatgacgacggcaccgacaacgcgctcatcggcaagcaaaacctcggcgatcaaatcgtcaagcagctgaaaagcaacgaccagctcggctggaccttcgtcaccgaagccgaggccatggaccaggtggaatccggcaaggcatacgcagccatcatcatccccaaagacttttccgacgatctcgccggcgtggtgaccggcggcaagagtcggcccactctggagtattacgtcaacgaaaaagccagcgccatcgcccccaaagtcaccgacgtaggcgcgtccactgtggaccgcacggtcaattccacattcgtctccaccgtatccgaagtacttaccgaagtcatcaatacggttggcggcaaagccatcagcaccgaagacaccaccaaagccaaggccctcacggcccttgccgaggcctccggcgacgtgcagcacacacgcagcaccatcgccaagctcaccaccaaactcaccgataccccggagcagacacgcaccgcacgtcaggcgctggacgacgcgcgcgcacttggcatcgacaccgcggaaggtctggccggcgtctccaccctgatcggcactacccaagccagtctgaacggcttcgtcacctccacgtccgaagcgcttgaccaaggctcaagcctgctgagccaggccgcagcacaggccaaccaaagcgtgggcacggtagccggaaccatcagcgccgccaatcagcaggtaggcggactgatcaatacggcggaagacatcaaccaagcgaacgccgacatcatcgaccaactcaaagggctgccgaacgccgatcgagaaccgctgcaatccgccattgccacactggaaagccacaatagcgagcttgccggcgcactgggcaacctcgatagcctgaacaccactatcggcaacgcctccacagacaccgccggattggcgcagcatctcaataccgccacccaaaccacggtgcgcgaggccaataccgctcgcggcaccatcatctccggcgccattcctcagctcaacaccggtctcaacaccctcagctcgaccgccaacactctgtcgaccggcatcacgtcgcaaggctcactcatcgatcagtcgaagagcaccctcgatcaactcgacaaagccgcctccaccacggtgaccgccctgcacgacaccgataaggcgctggccggcatgcaaaccaagctcgaaacgctgaccaccgacgtcaaagccctgagcatctccagttcactcagttccctgatcggcaccgacggcaaactggatgccgccacaatcgccgacttcatgctctcccccactgttatcagcgaacgggccgtctacccggtcgcctcctatggttccggcatggcaccgctgttcaccaccctgtctttgtgggtgggcgcgttcgtgctcgtggtcattcccaaactcgaaaccgacgacgagggcatcgacgatctcacgccaacccaaggctatctcggccgtttcctgctgctggccacgctggccgccgtccaaggcctggtcacggccatcggcgatcttgtcatcggcattcaatgcgcgagcgccccggtgtttctgctcacctgcgtcatcacctcactggtgtatatgtcggtgattttcgccctctccaccacgttcatgcacgtgggcaaaggcgtgtgcgtggcactggtcattctgcaggtgccgggcgcctccggcctgtacccgattgaaatgatgcccgcgttcttccgcgccatctatccgctgctgccgttcacctattcgattgacgcaatgcgtgaaaccatcggcggcttctacgacggcctctggttcgcctatatcggcaaattgctggttttcgcggttctggcctttgtgcttggcctcggcgcccggccgaaactggccaatctcaaccgcctgttcgcgcgggaaatcaaggaaagcgacatgattatcggcgagccggtgcacctgcctggcagcgaataccgtgtcactcaggccattgcggcactggccgaccgcgacgaataccgtcatgccatcgaacgtcgggccgccaaattcgcctaccagtatccccggctgctgctgggtgcgcttatcgccggattcatggtgccggccgcgctcattatcgtgtttgtgctgaccaccagcgagaaaatcgtggtcatgggcacatggctggcatgggtgctcatcatcatgggcttcctgatggtcgtggaattcatgcgcgattccatccgccgccaaaccgagctcggcaacctttccgacgagtcgatccgcgccatgctgtacgggcataaggccaagcgtcgcgacacctccgccgaacgccacgaagaagcggacccgagcgccgccgttaccgcaatcatccccactattccgccgaccaaggaaggcaggcacgcacgatgaacaccatgtggaaactatttaccggcgacatcaaacgcctgaccagcaacgtggtctccatcatcatcgtgatcggcttggtgatgattcccggcctgttcacctggttcaacgtggccgcatgctgggacccgttctcgaatatgaagaacctgaaattcgcggtggcgaatgtggatgaggggtatcgttccgacctgatcccgatgaaagtcacggtcggtgatcaggtggtgaacgcgctgcgcgccaacagtcagctcgattggacgatcacgtccaaagccgatgccgtcgagggcgcacgatccggcaaatactacgcggccatcgtaattccgaagtcgttcagcaaagacatgatgaccttcttctccgacgatgtgcagcatgccgaactgacctattaccgcaacgagaagaagaacgcgctggcaccgaatctgctcaacgagggcacggacgaggtggcggcggaaatcaacaccacgttcgccaagaccatcacttcggcagggctggaaatcgcgtcttcgctggccgatcagctgtccaagcccgaagccaaagagcaactgaataccttcaacgccaatatcgccgatttcgccacacggcttgacgatacggcggatttgcttggcacatacagcgcattgaccgatacggccggcgccttgcttgacacctcgaactcgctgatcactcaggtttcctctgccgccaaacaaggaggcaaggatctcgccagcgccaagcagggagtcaccgacgtggtcggagccctgggcaccaccgctgacgcgatgagcagctcactggacgcgagcgcctccagtttcggcgcggtgtccgattccatagacaagctgtattccgacgcgaatgatggtgccaccacggccgccgacgaattggaccgtcaagccacggccattggcaagcagacggagaaatacactgaaattcgcaacacgttggccggcatactgggcaacgactcatccatcatcacggcgattgaccgttcaatcgcacggcagaacaggctgcggcaagcgctgaatacagcggcgaccaatattcgccaaggtaatcaggacgcgcaggatcagcatgcgcaggtcaaggatctggccgatcaagcgcagaacagtatcgccaatatcaagtcggatttcacggccacggtgaaaccgcagatcgactccctgtcgtccaccgtctctgacgcctccggcatactgagttccggcgccacccagttggactccacgctcggcgacctgaaaaggacttccgacgacgccagcgatatgctcagcgacgctcgcaccaccttgggcaaggtgtccggcaaactgcgttccgccggtgccgaactggcttcgttcaacagcacactgagcgacgcactaaacagtggcgatatgagcatggtcaaagaggtgctgggcaatgatcccgaaacgctggccagtacgttggccgcgccggtgcagctcaggcgcaaggccgtattcccggtggcgaatttcggttcgtcgatggcgccgttctacacgctgctgccgttgtgggtgggcgcgctgctgatggtggtgacgctgaaaaccaccgtgtctcgccggacgcgcaaagcattgggcgagccgcggccgcatcggctcttccttgggcattacggggtgttcgcgctgattgcgctgctgcaatccacggtgtcgctcggtggcgatctgctgttcctgcgcgtgcaggccgtgcatccgctgctgtttatgttgtccggatggctggcctcgctggtgttctcgttcttcacctatacgatggtggtgagtttcggcaatgtgggtaaggcaatcggcgtgcttatgctcatcgtgcagatttcgggtgcgaacgccgcctacccggtgcagatgttgcccgacttcatcgccaaagtcagtccgttcttgccgctcacccatgcggtgacgatgatgcgtgcggccatcgccggcatctacgacatggattactggcgggccgccggaatgctgctggcgttcgtgccgccgctgctgttgcttgggctgttgctcaggaagccactggtgcggttcaaccagtggtatgtggccaaagtcgagagcactaaagtgctgagctagtaggtattatccgggggttgcctacaaacggcatggacttaccaccctcagtctggctttgccagtcagctcccgccaacgggagcgtacgggagcatatttcgaagagaagagatgacggagatgacaggtacgacggcgacaccgcgcggtgagcgcacgcgcgaggcgacggatcgcaagctcatgcgagccacgctgcagattgcggtggaccgcggcatcagcggcgtgaccatcgaggaggtggcccggcgctccggcgtggccaaaaccacgatttaccgtcgataccataatgccgacgagctgctgcgcgagatcagcgcgatgtatctggccatcccggattccgacccagtgcccagccccacgcgtgagcatttcacgcaactattgcagcgattggtcgattgggtgctcgacaacgacatcgacgtcaagcgcgtgggcattgtattgtccagcgaggccgagttcttccagcacatcgtcgaccaggtggtgaccccgtggctggagcatgtgggggcgttcctcaagcagggagtcgcgcagggcgtgtttcgcgaggacgttgacgagaagttgctgttgtccacgattatcgggtctttggtggcgtatgaggccatcgagggcaaagcgatggacgacgacaccgcctgggcctcgcgcatggccgatctgctgtggccagcattgctgaagtagcggtcttactcctgaatcgaagcctcctggcgggcgacttcgagggctttgttgaaggcgtcggaggtccagctggcaccggcgaccttgtccactttgagtcccttcaggggcttgccgtccactacgccgttgatggctttggcgaagtcgtcctgatggttcttggaaatcgtggtgaacgggtgcccaatgattttgacggtctcgacgttgccgtccttgatggtcagatggacgtcgatggaatcctcgccgaccgggccgtactggccgttgatcgagtagttgccgtccttgtagttgccggtgtccttcttgtcggacgtggtggtggacgggtcgttgtgcgatgagccggaatcggagccgtcggagctatcggagccgttcgactgggattgcgactgctcttcctgcgacttctcggtctcgcccgagttgccggcgtacgcatcgtccatcggcgtggccttggattcgccgcacccggccagcagcgcgccagccacgaccagtccggccgccgccaatgtcgcggatttcttcaacgtattcttttcggtcatattcacgctccttaagccccctctgacgagggggctgtcagcgaagctgactgggggagagaccatcagcttgccatgtattcctcacatactgctcgatgcccctgacggccctactcctcgccgccggttttcgcggccttggtggggtcagcgaaaccaatggcggtctcgccgttctgcgcgccctcgacctgtgcacccgtggaggcgggcttgccgccggccgcctcgtaggccttgcgcgcatcctcgtcattccacttctcaccgacgagcacgccatggttgagcatgatctcgcgctgcgcgcagctggcgacaagcgcatcgtgggtgaccacgataatcgtggtgccctgctcgtgcagcttgcggaacaggtcgagcacgattttctcgttcttctcgtcgaggttgccggtgggctcatcggccagaatcagcttcgggtcgttgatcagcgcgcgggccacgcacacgcgctgctgctcgccgccggagagctggccgggcaggtggtgggcgcggtccttcaggccgaccttttccagcgcctccatggcctgcttctcatcgaccaccgaatggtagtactgggccaccatcacgttttccacggcggtcaggtgcggcaccagatagaacttctggaacaccagtccgatgaggttcttgcgcacgtcggccagctgcgtggcgttcaggtcctccagcttgcggccttccagcttcacggagcccttggagggcgtgtccatgcagccgatcatgttcatcagcgtggtcttgcctgagccggaggagccgacgatggcgagccattcgccttccggcacggtcaggttgaggtcgtccacggcatgcaggtcgccgtagatcttcgagatgtggtcgagttcaagtagcatgacgtttctctttctttattcttcgcgaagcacgacggcggggtcgatgcgggtggcgcggtggacgggcgggatggaggcgacgatggcgaccagcgcgctgaacagcacggagatcagcgccagccaccagttgaatccgatggagcgttcgaacaccgccacgcacagccaactggcgagtccgtagccgattgcggtgccgatgaggccgccaatcaggccgtagagcgatgattcgatgtagaactcggtgccgatggcacgcgagctggcaccgagggccttgcgcaggccgatctcgttgcgtcgctgcgagacgatcgagctgattgtggtgccgacgccgacgagcgtcagcaccagcaccaccaacgagacgatccagaacagcgtctgcagcatggtgatgatgcgggtgtcggaggcggtgatcttggtgacctgctgcgccttgacgtgcatggaggtcatgtcgttgatgctggacaccaggcctgcgaggtcgctggcgccggccgaatactcgatgacgtccacgccgcgcgtgatgccggtgagcttgttgacgtcggcgttggtggcgtagatgatcgagtcttcgctgccgccggtgtccacgatgccggccacgcggaattcggtgccggaggtgtccatgatgtcactggagacacggccgtctttggtttgctggtcgatcgaggagttcgacgaagtgccgttggtgctggcgttatcggatgcacggtagccgatggtgatggcggagccgattctcagaccgatggcgtcggcgatgtcacgtccgaccagcaccttgccgtcggtcggccacgagccgtcgaccacccagtgatggttgaggttcttgacctgcgccgcattcacgccggccatcacgtacggcgaggcgttgacgcgcacgttctcgtatcggtaagtggcgtatttcgcggaacccttggccttgaccatttcagtggtgtgctgcaccatcgccttgtcgatgccggccttgccgtcggcattggtcgattcagtgggtgtgacaatcaggttcgcgccgtacgcacgcatctcctcgttcatctgctgcggcacggcgaggcagatcatcgccaggcagaacagtgtggccgcgccgaccagcgacgccaccacggccatcaccgcgcgcgaacgccggcggaacacggcgctgaacagcattctgaagaacataccggtgttggtcatcggtttcctccttccacacctacgtagataaactcagcggccatggagcacctccgcgggcttgagattcagaatcgaacgaatcgaggaggcggacgccagcagcacggtgacagccagcagcacgaacaccagcacgaacaccatcggccgcatcgtgatgccggaaccgaataccacccggcctatcagctgggccacgccggaaccaagcaacgcgcccacaatcgcgcccagcagcgagattgccgccgtttcggccagcatcaggcgggataccgcggcatcggtggcaccgagcgccttgagcagcgccagctcgccagaccgttcgccgatcgaggcgaccatcaggttggccacggccacggctgcggcgatcaggctcagcacggtcatcagaatcatcacggcctgcgtcttctgcagcacattgccctgcaacgcggcgacctgacgcacctgcttggccaccgcgcccggaatcacctcttcgatctggtaggcgatcgagctcgggtaggcggtgcagtaccaggtctcccattcctcctggctcagcgcggccgggttcgcggcggccttacgggccaggtcgttctccggcgtggtcagggccttgacctcgattttgtcgaccgaatcgggcaggtcggcgagcacctgggccgtggaggaggcgatgtagagcgagccgttgtcctcgtcgccggaatcgtagacgccggtgagcttgattttctgctcgttcttcttgcccgaggcggtggtcttgttgagggtgatggtgtcgccggtggtcacaccgagttcggaggccagcgtcttgccgatcacgccctgatcggaatcgtccttgggccacttgccgtccagctgccaccacgagcgcatgccttccacgcccacgacggtggtctcgccggtggagatcttgaggtccttgttgaaccacgtgccgacgaccggcacgttggcaccgttcaccgtggcgtggatgttgagctgcggcgcgaagttggtgatgttgaacgaccagaagatcgtcttgatcttggccgcgtccgactccttcagaaaagcggtcgggtcgctggtggacgccgcgccgcccgactcggtgttgtacaggtcggaaacgaccgcgtccgccttgggctgcacggtgatgttcgaaccgtaggtggacagctcggcgttgagcttgtcgcccacgtcgaacacgacgcccagcatcgatacggacacggtcgccgacaggcatacggtcagcgcgataagcaggcgccggcgcagctgtcgggtgaacgagcgagtaatcatacgcagaaagaacatgattcttgtctcctgcctgactcactggaagtgggcgctcagcgcgtccagatccgtagtctgaatggtgatcttgccgtggccggtcttgtacgggaatggtatcgggttgcagccacccttgaagccgatggtcgccaggttgatggccacctcgcacttcttgcagatgatcttgccgtccttctcgtagtagccggcgtcgccgcagttctcgcaggcgtccaggccgatgccgtacgcgccaccgttctttcggatgatgatgaagcgcatgacggtgccgtccttggccttgtattcgaaacggtgcaggtggccgtcctcgacctggctgaaggggatggtggccacgccgtccttgagcgagtaggcttccggcggcgaaagagtgatggtctgatgggtcgcggcgacgccgacggtgagggtcagcgtgacgccgatcatggccacgaggctccagacggcggaggccacggcgcggcggcggaacgccttgtgcttgcggccgatggcttcgttcgcgccggtcagcggcatgcggaagccggccaccacggaggcgatggccggaatcaggaacacgaacgcctgggccatgatcatccagtcgttgtggttgatcgaccaggcgagggccacgaatcccgtgtggcccatcgggaaaccgcgtgcctgcaggatctgcatgacaccggtcaggtgccggacgaacagaatcaccagcaccgcgagaacggcggcggtgaacgaggcacgcaccgcggtcgaacgcatcgtgcggaagatcgcggccacgatgatcgacatggccaggcccagcgcgaagccgagcgcgcgcagcaacatgtcggacgtgaagatcgggtcgccgggctccacccagatggtcagctgcagaatcacgtccggcagcgcgtagaacagggtgagcgcgatgtcgatggcggccacggcgttcgcaatgtgcatgaacaccttgtgctgctgccaattggtggtgatgcggcgtgcgaacaccaccacgacgatggtgaggatgtcggcaatgatcgcgcaccacagcaccggatagttgacgaacgtgcgctggttgatcacggccgaggcgcgcaggccggcgaatgtgatagcggcgatcaggccgacggtcaggccgatgagacgccaatgcgagcttatcggcttatctcgcccctcgccgaccgtgagcatcacgctcaggctcatcaccagcaatgcgggggccaaggtgcccggcatcactgccacgaattgttcaagcattcgcgtcctttctctgttcatcttaggctcccctccctgaggggagctgtccgcaaagcggactgaggggagtttttagaccgtcctaagaattatctccctaaagcggcgtaaagccccctctgacgagggggctgtctgcttagtcaatcaccactgacgcggggtgtagtcccagttgtcgaaggtgacctcgatgggctcggtccagaacttgtggttcttgacaccggtctccgggtcaacgtggagcatccagccgttcttctcaggggactcgatggagagcttgagttggtaggtgccggccttgtcgagcttgacgttggcgccgtagtgcgggccgtcggaggcgttcatctgcatgaaggtaccggaggtggcctggccgccctcgacttccttgccggtggacttgtcgatgatggtgtagttcacagtaaggtcagggacgaagtcgcccttgccgtagccgtagtcggtgccttcctgggaggcgtggatgtcggcttccaggtggaaggaagcgtcagcagccttcagacccatggaagcagggtacatgtcgatgggctggaagtagacggcgcccacggtcagcgggccagcggccttgtcctgctccttggcggtgccggaggggccgaccgggacctcttcgaagccggaggtctcagtcggggcgtcggccttcttggagtcgtctttcttggcggtgtcggaggagctggtcgaggacttggtatcggaagcgttgttggtggaaccgcaagcagccatcgaaacagccatggagccggcgagcagcacgccgagcagagcggcaagcttcttgttcttcatcatttctcttattccttctgttgtggtgaatggattattcacgacttatctgtttttagttgtggcggcgtgggctggaatcgcttccattgccatgtcgcaagttgtgttgcgcgagatggtcgcaccgggcgttgtgctacgcctgcgcgctctcctcgtcagccttcgcgtccgacttgctcgcaccggccgcaagccgggccttggccttacgctgtttggcaaagccgaccacgaacagcgcgatgacggcgatggctgccagtacctgggcgatgatgcattcggcgtacgggtagaatccgagccagtcgttggtgggaacgcccggcaggtagttggcgggcagcaggtcgccctcgatgagcgcgtgcacgccgccgccggcgaagacaaccaccagcacggacatgaggatcgaggtgaccaggaagaacgggccaatcggaatctttacggaggtgaagcgaatcaccaggaagatgatcacgagcaccacggcggcggcgagtgcgccgaccaccatgccatgcgtatcctggctcatcgtgtagatggactggtagaagatcacggtttcggcgccctcacggaacacggcgaggaagctcagcatggcgagcgaaatcaccgtgcgggaagccaccttctcgccggattcgacctgcgaggagacagaggccaccgcggcttcggtcttttccctgatgtagcggttccacgcttccaccgaggacttgttgagcatccagttgctggtccacagcagcatgcacatggcgacgagcgcgcacacgccttccatgatctcctgcagcgggccggagccgccgaacgcgagcatgaagatgaccgccacgatgcctgcgccggccagaccggcgagcacgcccacgtagatccacttggtgaagcgcttgttgccggacttgacgaggtaggccaccacagcggcgaccacgagcagggcctcgagaccctcgcggatcagaatcaggaacgcctggccgaccgagctggtgatgaacttgaggaagccaccctcctcatcggccgcgccgccgtcgagcttggcggcatcggtggccagcatgttcttcaggtcgtcgatgtacttcttgacttcggaagcaggcttgccggtgttcatcgaggagcggcacagcttgaactggtattccacctgggagacgcggttgccgctgatggcgctcagcacggtcttctcgaagccgagcttctcgtagtgctggtagtaggcgtcgttcacgagcgtggcgcccttggcggcgtcgccaccctcataggccttgtaggcgttgtccaggatcggaagcatcgcatccgcgacttccttccaagtcttggccgtttcctcggtgcgcttcttcttggcgtcgagctccttgcgctccttggcgatctgcttctggaggtcttcggagtactgcttcgggttggcgaggctggtgttggcgtcgagctgctgggccgtggcgtcgaggtcggcggtcaggtcgttgaccttctgggtaagctgatcggcctggtctgacgtgaacacctggctttgcaggtcctggaaggcctgctgctgcgcggtctgcttgtctgcgccgatggtgtcgctcaccactttgttgaagttggacgtcacgtagacggtggtgtatgcagccccgaaatcggacttggcacccattgggttgccgtccttgtattccttaaggccttcctgcaactgcgcttcgacggccttggcaacgtcggcccaggtcgcgtaatcgacgctggtgatgtcgtcgctcttgacggtggcagcagtggcagtggttgccggcgtcacggcgaacgcggactgcggaatgatggcggaggggaggaaggtcgcggcgatcatcgcaaacagaaaaacgatgaccgcaaatgcacgagccgagaccgtggccgactgcagacgacaggcgctgcccgacttcgcgcgcacgcgagaaacggcaacgcgcgtatcacgttcccgcatcgtgttcatttcagcggactgcgcgcaggcgcgacgaaccatgctgaattcctctcacttcaagtactcgaatggtccaaaaacaactatgaactctatagaaaaaaattcttgaacaacagtcttgattttttgacgggtgcgaggtaatagaaggcgttttagtgcttttcaaccccgcaattatttcactatctgagataactatgctcagagaggatggctttcccggaatgtgaacggcaacaccacaaaaagcggcaacgtgaggaataccggaatcggataccaaaatagtgccacgggtgaggcatacagcgacagcaccgtgaatgccagcaagccgtaagcggccagtgcggggccgtagcgtcgtcgcgcaggccgcaccgccagcgcaagaccagcagccagcggaatccacgtgacgtacagggccatcgaagtcagcggattgcctttgcgaacaccgacatgaccatccgaacgcacccaccgatgaatcgcccgcaatatgtttttctgccattgcggcttgtcggaggtacccctcagcggcgcaaggtcatgttcgatggcggcaagccgttcggccgccacggtatcggcatcgccgtcggaagtatgcttccaagcaccttcagtcaggaaagacgcccattgcctgagatagctaggcgtgaacaggtagtcggaatcagtggggtacgcgaaattgacgcgcgggtcccaccatccgcgagtcaccccggcataggccgtggcatattcaaccggatgcgcgaggccgagctgcacccagacctgcagggccgcgagttgttgcgccgcggttggcctagggtgctcgcgcagagtgcggaaggtctcatcggtgcggtgcgggttgatgccggcggcggcccagtcgagatccatgatcgcgttcagccgccgccgctgaatcttgtctatcgcactgggatcatcgtgcgcgagccgggccacgggctgggtgaccaggccccacacctcacgtccgggcgatcgattcgcatgcgtggcggccgcgcttaatggcgtccacacgccctgcgccacaacgatggcaaccgcaagacacgcgaacgcacgacgccgcgcgcctttgggcgtgcagacggcgagcaaacagcagccggcgcatagcacgattatgagcgccgtccgcttggagacgatggtggcgaacaacaggatgacgaatgcgaatgccaccggacggcgagccagtaccgagccgcgcgtcagacaagcctccacgaacagcacggccaacggcagatagaacacggcgtgcaacgagtccttacccatcgtggtgattgcaccgaccaccacatagttggtggcaagatagacgaggccgagaccgatgagccagcgcggcgagccgattttgcggatgtagcacagcagaagcgcgcacccggcggcgagtagaaccgcttgggtcacggtgtacagggcctgcccgatcagaggggagccgagtgcgctgccgatatgccagaacaagccgaacgtgagagtatcaaacagcggatgctgggtgtagtagttgtgcagaccggacgattgcagatattgggcaagcgtatcgtcgcgcatcgagcccggccaggtgagtatgagccacggcagccaggcgatagcgagcgtgagcaggtaagggaggaatcgcgcgcgcagcgatgtggataacgtggtcgggcggcgggccgtgagccaactaaggatcgcggatatgctgcggtacgtctttgagtgtttcttcgattggcgcgaccggccgccatgtgctgtggttacgtcggccgctgtcccctcgttcatgactcaacagcctaggcgcgattgcgggcgcgcgccgggcgaacatcgaaaattcacctggacacggtgatttctttaccgggggttgtgtaggtgcgcgcgggtgtgtgggccctgcacaagcatgcggtccttgtgcggatgttgcgcgggactttccagtgagcctttcactcgcagtgatcattcttcgcatccgcgtcgcgacacgcgccacgccgaagcgtgcacttatccgaaacctgtggtaacttattcgagttgcctgcggaacacagttcaactgcgcgctgcaaagcatggaggattcgcctagtggtctatggcgcacgcttggaaagcgtgttggtgtaacagcctcacgagttcgaatctcgtatcctccgcccggattggagccccggaaaccgttgaaatcattcggtttccggggtttcgctttgattccccccgattgtcggttccctccaggtaccctccgtttggacacctttggccccgacccgccgcgcgtgtcacatatcggaaccgacgattccgaaaacgccttcgggccttcgcccgccgtgtgttcgtcatcgaagtccgaccgcgtcccatgtgtcccgtcagtgggccgattcgaatcccttcatgttttccgcgcagttttttcgttttggttcgcaacaatcccggacgcccgccgcgcagcgcgatgcgccccatgcggtccggcccagcgcgaaggttccccctgacccccctccgatgaacgccacacgaacgcatacgggtgccataacagcccattcgaaccgtcaatcgactccttgatacatagacaggaagccgaggaacgtccgtcggtcggatgggtccgaggagataacggcaaaccccgccgacatccctcccccgggtattcgccagcgaacggcaccggcaccgccatgaccgccaaggagaagacatgagcccggaccccatccgccgcaaaggcaggaagacactcgccaagatatacgactccctaaccgacctggaagaagccgtggacaggtcgcgcatcatcgggctgcccaccaagaaggaggcgcgcgacatccgggacgaattgacggcggcggcgtgggtcggcggcagatcggtgtcgcgcatacggacggccaaggaatacatcagcatcgccgaatcattcttccgcaagctgcgggccatcaaaaacgcggaggcacgaaccccgcagacgggtattccgaccctgcgggaactgctgaaggacacccgcgtaaccaacctcgacgagcatgaaggaatgcttgagatcacaagcgcggatacggagaaatccacttaacaaattcaaccaatttctgccagaagccaacaaactccaaggccactggactcaaccaagacaaacgggctcatcaaagacaacatgccataagccaatctcattgcaaccaacaaagcctattcgtcttattctgaacgccttatttcaccgcagaatcacttgttttcgttgaaattccaacgatttcacgaccacacatctagttcaagcttcagccgttttcaacctttgcgctccttggaataacgtcatattctgaattccagcttcccaggggccggcaaaaacctggggaacatgcaccggtgcagccaacaaccacaacagaaccatctagggcgaagtgcgtccgaattcgacggaagcacttcgctcctcaggctctgttccgcacgagagcaaggaaacatatggctgcaattccaacgaagaatgactacccgcgcctcaccgccaagccagcgcaagtggcggagatgctgggctacaaggacgtgaaaagcgtttacggattgatcagaaccggaaagatacgcgctcgcaaggtaggcaacacgtttctggtgattctcaccagcgtgcgcgaattcgcaggtgaggagtgagcatggcaacctcatacgagcgagtgctcgaagccgcgagacgctattctcgagatcctaggctccaagagcttccgcgcgacacctccggaagacaacacgctcagtgcagctgccccgcccatgacggagacggcggcacttcgctgcacatcacctacgaccagtccaacggcaaaaccatgctgcactgcttcggagcggaacactgcgatgccgcttccattgccggtgcacttggattgaaaatcatcgacctgttcgatcaacaaagcggacctcaaggccatgccgattacagcggctacaacagttacagctgcgatagccggctcac

SEQ ID NO: 1360 - DNA, 5876 bp, Unknown
  R157_18m  MAG No. k141_31704
ccgtcctccaattcgatgccggtcagatcggcgaagtcctcaatggtcatgctggcctcgatcgtggccacaccattgacgaacgcggtgcgggtggtgcgttcgccgcccttctcgctgggcagatcgtactcatcgcgaatatcgcccacaagctcctcggtcatatcctcaagcgtcacgatgccgtccgtgcctccgtactcgtcgatgaccacggccagatggatgccgcgcttacgcagcagttccaggctcggcagcagcttggaggtgccgggcagggagatgccttcgcgcaccacatcgcgcacgatcttggcgttcggatcgcgcacgtccagcagatcgcgcacatgcacgaagccgatcacgtcgtcgaaatccttgccggtcaccgggtaacgggagtacggctggtcgcgtacgaacgcggcggcctcggccaggggctggtcgccctcgatgaagaccacgtcggcacgcgggcgcatcacctcggcgacgatggtttcggacgcgtcgaacacatcgtccagaatcgtgcgttcgtccttggaaaggttggtgttggagctgaccagcacgcgcagctcgtcgtcggacacctcggactcggtctgctgcgggtcgaagccgagcaggcggacgatgccgttcgtgttcttgccgatgagccagatgatcgggcggcagacggcggcgaaggcgtcgatggcgggcaccacggcgcgcgcgatctgctcggtgcgctgcatggcgatgcgcttgggcaccatctcggagatcacgatggagcagtaggagatgatgagggtcaggatgatgttcaccaggccgccggcgatgccggggtgcacaccccagctttcgaccaccggaatcaggtagggggcgatggaagaggcgccgaacgaggcggacaggaagccggagagcgtcacgccgatctgcacggtggagaggaaggtgttcgggtcacgtgcgattttggcgactttggcgccgcgagcgtcctcctgctccatttgctcgatctgcgagccgcgcagagagaccaatgccaactcggtgccggagaacacggaaccgataacgagaaatacaaaaatcaggaggatgttcaaaccaagtgacatgcctttaactctaggggagtggcacgtcaaattggggtgtgctggctgggcagggtttgctagctgcgctggctatgtgaggcgtgatgtgtgttgacgtgtgtgatggtgtgaaagagtacgcaatgatacgcaatcgtgtcatatggtgtaatttcgtgtaatttggtacgcaatcgtgtaatatggtacgcaatcgtggcagatggtatgtgttgtggacaggagtgtggtcatggcagtcaatcccttcaaaccaaccgccggtaaaatgccgccgattcttattggccggcactccattatcgaagatttttccgaggcgctgaccaacggggtaggggctcctgggcgcatcatgctggtcaccgggcagcgcggcttcggaaagacggttatgctcaccgaatttcggcgcatcgccaaagcgcagcattgggaagtcattggagagacggcgtccgcaggactggtcacgagactcatagcggcattatcgccttcgggattgcgtctggatcaggccaatatcagtccttccattggaatttccggcattgccacggcgagtctcgggcaagcgcacttttccgcggaatccaatccgctgacgttgcgcaacgcgttgaacaagcggctgggcagtaagaaactcggcaaggggaagggcattctcatcaccatcgatgagacgcaagcggcctcacacgatgatttggttgccattgctacagccgtgcagcacgtcattacggatgccgatgaaagtgatacgcctgatgaggataagaagggcgttgccatcgtatttgccggcttgccgtatatggtcaacgatttgctggataacgaggtaaccacattcctgcgccgtgcgctacgccgcgaattggataacgtgccgcttccagacgtcaagaatgcgttcctggaaacagttgcggattccggcaagaccatcagtggggaagatgcgcttgaagccgctcgccagtctgaaggatacccgtacatggtgcagcttgttggctactacatgtggcaatctgcgcagcgtcgaggttcagatgtcattaccgcggacgacgtgtcgaccggtgtttccgatgcgctgctcgccttcgacgatgccgtatgcgctccagcgctggacggcattactagtgcagagaggctgtttctcgcggctatggccaaggattcgccaaatcccacgcaggtgggtgatattgcggatcgtacgcgcagaagtcgaagctgggtgagcaagtaccgggcggttcttatcaaggacaaactcatccgcccggcaggtcatgggcagctggaatttgcggtgccgcatttggggcagtatttgcagtcgttgtagcaccaaatatagggctgggttcattcatttggtaggttgcgcgttcatttggtgggttgtcggcatggtgaggcgttggaatggcggcatttcaatggtcagtgttggagtgcagtgaccaaatgaacgcataattgacctaatgaatgaagtaagccggttgcgggctagtttcgatccagttctatgagcgccgacgcatcttggccacggcattgctgacgcaaatacgcagcacaatggtgaagacgactaccataatccccagaatgccaatgttgaaccagaactgatccgtggtgtgctcccacagatcatcctttttgaacatcggcaccttggtggggccatacagcagatcgttgagcccgatatccgaggcggcggcggagaagccccaacgtccggggaagatcatgctgaccagctcgaggctgtcgcggccggtgaccggaatcatgccgccggagaacaccaactgggccatgaccagcaccaccagcaatggcatcgtctgttctcccgacttcaccaacgccgagccgacttcgcccaacaatgcggaagtccacgcagtcagccaaatcgccaacaccagttcgggtatgccggaatcagtgaccacaccatggtccgggccgggcttgccgaggctgaccgcagtggtcagaatcgccgcctgcaacaaggtctgcaaacccatcacgatgagtttcgaggcggtgtatgacgtgggcgacaaacccaccgcgcgttcgcggccgtaaatcgctcgctcggagacgatgtctcgcacggacaaagccgatcccataaaacaggcacccagtatgacgagcacaagcagctggttcggctcggtggcggcgtctttgaaatcgggctcacccaagccatgagaaccgggcacaaccagcgacagcagtcctaggagcaatggcagcaacagcaggaagatcagcaatccggggtcggcgatgatcaaatgcagctgacgaatcaccagagtgatggtctgtttgatgcggaatggctttgccggtttctcatgctcggtgtgccgcgtgatggtggactcggcctgcatggtgcgctggcgtgaatcagtaatcgaatacacccgttccggagattcggcgacatcgttgaagatgtcggcccattccttgccgttgaacgcctggctcatctcctgcacggtgccgaagaatgccggatggccgccgggagcgagcatgagcacgttatcgcacaacttgttgatatacgacagtgaatgggtgaccatgataaccacgcggccggcatccgccagttggcgcaacatggtcatcaccgtaagatccagcgccgggtcgaggcccgaggtcggttcgtcgagaatcagcagttcgggttcggtgagtagctcgatagcggtggacacgcgcttgcgttggccgccggacagtctgtcaatgcgattcttacggcgagacgtgagttccagctcattgagcacgttgtcgatgatttcggcgcgctcggccttggttgagccgggcaggcgcagcttggcggcgtattcgagcgccgcgtccacagagagcttgcggtgcaccacgtcgtcctgcggcacgaatccgatacggctgcgcaacagttcgatgttctgatgcacgtcgtatccatcaaacagcacgcgcccgtccgtggggctgttgagcccggcgacgatggaggtgaatgttgatttgccggcgccggaaggtccgattacggcggtgagcgtgcccttggcgaatacggcgttgatgccgtcaagcagccgggtgcctttgcccacggtcagtccgatgttttcggcgataaccgcgtcgttgctgacaaacggcgtgcggtcgcacagcacgccttcatgcacgatcaggtcggtgttgccgacggtgacgacgtcgtcttcccgcagccagatcttcgcgacgcggcggccgttgacgtaagtgccgttggcggagttcaggtcagtgagcaggatgccgctgctggtggtttccagcgagcagtgtttgcgggagaccagataatcgttgatgcgaatcaggcaggcggtatcgcggccgatgacgcctgtggtgtcgtgctcggggctgaaggacccgtgcacgcggttggtggtgagttgggattcgagccttaccgcttgcgtgctgcctgccagaacggtgccggcggcattcgatggggaaggggatgcgcagggagacggagatggtgatgcgggtgataccggcactggcgatactgccgtcggtgccactgctgttgggcggggttgctgttgcaggtgcgcgagggccggggatacgcggtgcggggccagcggggctggcgttggttgcggttgtaccggttgtgccggttgcggtgctggtggtgtgggttgcactactgggcgtgcctgttgcggcgcgagttgcgtgggttgtgccggttgcgctgatggtgccggcggtagcgcaggctgggccacgtttgccgcagggcgtcgcgggggctgtgccggcgtggacggcccgctggttccgacgatgcagacgatggtggcaccttgtgccagcgtcactttggtgctgttcagcagcagtacggaagtggtgtgaatgccgttgatggacagtccgtttgcactacccgtgtcttccaagagccaaccatcgtcggtaaaggtgacgcgagcatgatggtgagatacgtacgggttgtgaatcaccagatcgcaatccggcgcacgcccgatggtcgtggcacgtgcaggattgggggtataggtggcggatccgtagtgaatagtaagggcaggtggcattggttcagacttccgtgttcttcgatctctctgcacacagatgtaccacgaccgcattacccccggtgaacggggtctgactgatggtcagaaactcagcacctcgaccttgccggtgtcgagctggtaacgggcgccgacgatcatcagctggtcggcagccaatgcctgctgaatgatgggggattgttccaccagcgtctcgatggtgtgggccacgtgtacgcgctcgatgtcttcatgcgcgtcgagctcggcttcgcgcgcctgccagacggacatgccggcctggcgcagaataatcgattcggcggcggcgatgtgctcgtcgaggtcgtccatcgcatccgcggcctccagtgagccgtcggcttcggaagtgatggtgtgcatcaggtcgtccagctcctgctcggcggcctcgattgcgccgcagtgctcgtgaccgagcacacagatcaggctgacgtgcagtttcttgaccgcgtactccagcgaggcgataaccgcgctatcg

SEQ ID NO: 1361 - DNA, 32624 bp, Unknown
  R157_18m  MAG No. k141_32593
ggtgtggcggctctcgccgtggccggctggtgcttcctgcctgatttgggcgcgatgctcgccaagggcaccgttgcgggaaccgttgccctgatcatcctcatcgttttgggactggccttggccgtggcctccacgttgtgggtgcgtgacgccgatccggacccggatatccgctatccgtggatcggtaccggcctgatgccggtaatgctgatgggcgtgaccatcgccgcaaccgcactggtgctcggccgtgtcatcggttgatggacgtctgccgttccatattccgcaaacttgtaacccatgtgtccactacaagcgcgtagaataatgaaaaaccgcgcgaaagcggcataacgccgctgacgactcgtacagccacaccaagcaattgcgtaacacattgcaggataaagggggattagcgtgacggatcttacgttgatgactttcgccagcgaccccgccaccgttttgccatcactcgccctgctttctcatcgcgtccgcgtgctgccgatggatgcagccagcttggtgaagatgccggagaacaccattctgtttctggatgcacgcgatgatctggcgaccgccaaaaccttgtgccgtctcatccacgcttccggcctgtccacgccaatcgtgctggtgctgaccgaaggcggcttcaccgtggtcaactcccagtggggcattgcggatgtggtggtcgccaccgcttccccggctgaagtcgagggccgattgcgattggtctccgagcgcggcaacgctcccgcagccgcagcagccggttctcccgccgaatccaccaccacggtggaagatggccagattcgctccggcgacctcattgtggacaccaacggctataccgcctccctgcatggacgccccatcgatctggcatacaaggagttcgaactcctcaagtacttggtccagcaccccggccgcgtgttcacgcgcgcccagttgctgcaggaagtatggggctacgactactacggtggcactcgtacggtcgacgtgcatatccgtcgtctgcgcgccaagcttggcggcgaatacgaacacctcatcggcaccgtgcgcaacgtgggctaccgattcgacccgccggagacggataaggaaactgccgccgcacagcaggccgccaaagcatcctctgccgccatcggcaccgatgacgatacccccgatctcaacaccgccgcctgacagaccagcagcgctacaaaccatcaatcatcgacatcacgccgcttaggtccatacgatgagagaaaccaaatccgcgcgtctcacgcgcatgcatgacgaatacgacattctgcgccaggtgattccggcacccgcttgcgcactgcatttctcgaatccgctcgaattgctgatcgccaccgtgctcagcgcccagaccaccgacaagcgtgtcaacacggtcaccccggaactgttcgccacctaccccaccgcccgtgacttggcggccgcgaacccggcccaagtcgaagacatcattcatccgctggggttctaccgttcgaaaacccagcatctcatcggactggccacggcactggacgaacggttcggcggcgtggtgccgcgcacgatggatgaactgaccagcttgccgggggtcggccgcaaaaccgcgaacgtcgtgctcggcaacgcgttcgatatccccggattcccggtcgatacgcatgtgatgcgcgtaaccggacgactgcgttggcggtcggattggcggtccgcacaccctgatcccgtgaaaatcgagaaggaaatcaccgcctgttttccgcccgaagagtggacgaatctcagccaccgactgattctgttcggccgggccacctgccacgcacgtacccccgactgcgccaactgcccgctgtccgacacctgccctagctatgcgccgcccgccggcaagagcacgtccaagcgctaactcatacctcatcatggtgaattgcggattctaggctgaatccaccgctagactgaaaaccatgcagcacagcaagcggaacaatacatggtccaagtgggggatttttctcggagtcgccgtggcactcggcgcactcgtggttgcgggatggacgttcatgcaaaaccggttccagccgggatcatccctcgatgccgatgtgaccattggcatcgacgatatgccgcaatccttggatattcggtccgattcctctgcggcagccgagcgcctgctcgtcgacaatgtgtatgagacattagtgaccgtcgatcaagacaacaagattcagccgggactggcgacaagctggaagacttccgatgacggactgaccgtcaccctgacactgcaatcgggcgtcaccttctcgaacggtcatacgttggacgcctcggacgccgtgtggtcgttgcaacagaacgtgaccaacaaggtggcggacgtcgacgaattgggcgatctgacgtcggtcgccaatccgaacgccaccacggtggtcattacgcttgccaagcccaatccgacgctgctgcgagcgctgtccggcaaactcggcattgtctacgattccgagtcgtccagtgccgattatcaacgcaaggccataggttccggaccattcaccgtggccgatttccagcctggccattccctgaagctggcgcgcagcgatacctaccatggcaccaaagcggccagcaatatcgttgaatttatgcaatactccgacgccgatgcgctcagcaaggccctgaccgacggcagtctcgatatggcggcaccggtttcggcttcgacggccaccggtttgaacggcaaggatggcctgaccgtcaaggagggggccactacggataaggtgctgctggcctacaacaacggcatcgattcgctgctctccgacgaacaggcgcgtaaagccttccgctatcaaatcgacgcagccggcatcgcctccgcccaacccgacgcagccggagcattgggcggccccatcagcccgctggaacccggatacgaagatttgaccggactgtatccgcatgacgaaaaccaagctgggcagatgttctcctacttcggtgcgcaatatctgactacggtgaatctggtggttcccgaagaataccggtcgttggccgaaaccatcaagcagcagatcgagcggcagccgcgccccacggtgaaccttgaagtgctctccgatgaggattatgccaaacgaatcaaggacggcaaatgggaactgaccgtgatgagcatggacggcacggatgatgccggcatattcgccgaccccgattccatgttccattacgaccataccgaagcgcaacaggcctatgcggatgctcgcgccgccactaatgacgccgattatgaggcacgaatgaaggcgtacgcccggctgatcagcgaggatgcggccagtgattggctgtatacccgcaaatgcttcactgtggcgtccaccaaggtctccggctacccgacctcgatgatcaatcgtcgcatgccgctggccgggttgacggtgaagtaggcaaccttcagtcacggacgggccacgcccgatagtccttggctcactatcgttcgatcgttcgtatctcgcctgcgaacagcctactgggctgtttactgtacagttcggcttgtcatgcaacgtgcataaactttggctttatgactgaaggcaaatccatcatcaacgccaacctcaccccgctgcccgacaaggtcggtgtggacggacttgaagacaagtggcgcgccgtctgggatgaagacggcacctacaaattccgcaatacccgcgaccgcaaggccgtctactccatcgacaccccgccgcccaccgtctccggttcgctgcacgtgggtcacgtgttctcttacacgcacaccgatgtgattgcgcgttacaagcgcatgcgcggctacgacgtgttctacccgatgggttgggatgacaacggcctgcctaccgagcgccgtgtgcagaactactatggcgtgcgcgtggacgtgtctctgccttacgacccggacttcaagccgccgttcgagggcaccgatggcaagaagatcgacgccaaggatcaggtgccgatttcccgcaagaacttcatcgagctgtgcgagcgtctgactgctcaggatgagaagctgttcgaggccctgtggcgcaagctgggtctgtccattgactggtcgcagacctaccacaccattggtcaacacccgcagcgtgtggcccagaaggccttcctgcgcaaccttgcccgcggcgaggcctaccagcaggacgcccccggcctgtgggacgtgaccttccagaccgcagtggctcaggccgagcttgagtcccgcgaatacccgggcttctaccacaaggtggctttccgctttgaggacggcaccccgatctacatcgagaccacccgccccgagctgctggccgcttgcacctcgctgatcgccaacccgaatgacgaacgttacaagcagtacttcggccaggaagtctactccccgctgttcaaggtcaaggtgccgattctggctcacccggccgccgaaatggacaagggtgccggcatcgccatgtgctgtacgttcggtgatgtgaccgacgttgagtggtggcgcgatctgaagctgcccacccgcccgatcattcagcgcaacggccgtatcgtgatggacaccccggattggatcaccgacccggccggccgtgaggtctttgccgagaccgctggcaagaccacgttctccgcccgtaaggtcatcgtagacaaactgcgtgagtccggcgacctggacggtgagccgacgccgaccaagcgtatgacgaacttctacgagaagggcgacaagccgctcgagatcgtcacctcccgccagtggtacctgaagaacggcggtaccgacgagaaactgaacgccgagctcatcgagcgcggcaaggaactgaacttccaccccgacttcatgcgcgtgcgctacgagaactgggtgcacggcctgaacggcgactggctgatttcccgccagcgcttcttcggtgtaccgttcccgctgtggtacccggtgaacgcttccggcgagccggattacgatcgcccgatcaccccgagcgaggatcgtctgccgatcgacccgaccatcgatgtgccggagggctacgacgagtcccagcgtgatgtgcccggcggcttcaccgccgaaaaggacatcatggatacctgggccacctcttcggtgaccccgcagatcgtgacccactgggctgagccggacgaggcctccaaggccctgttcgcttccaccttcccgatggaccttcgcccgcagggtcaggacatcatccgcacctggctgttctcgactgtggaccgcgcgcacttggagaacaagtgtctgccgtgggcccatgccacgctgtccggctggattctggaccccgaccacaagaagatgtcgaagtccaagggcaacgtcgtggtgccgaacgagccgatcgagaagttcggcgcggacgccgtgcgttactgggccgccgccgctcgcctgggcctcgatgccacgtacgacatcggccagatgaagattggccgtcgactggccatcaagctgctgaacgccaccaagttcgcgctggccatcggccgtgaggacgagaaccatcacgtgggcgctgccgccgagacctcgtggaacccggccgatgtgaccgaaccgctggatcgcgccgctatggccaagctggctttggtggtgcgtcaggccaccgaggcgctggaatcctacgagcattccaaggcgctggaagtcatcgaatcctacttctggcagttctgcgacgactacatcgagctggtcaagaaccgcgcctatggcactccggacgagcacggcaatgtgccgtccgagaaggctgtgaagtccgcccgcaccgctctgggtctgggcttggacgccttcgcacgtctgctggccccgtacctgccgtacgccaccgaggaagtgtggagctggatgcacgccggttccggttccgtgcatcgcgccgcctggccggtcgtggacccgtatgtcgaggccgccaccggtgcttcccccgagctgctgacttgggccggcaaggccgtggagcagctgcgtaagatcaagtccgaggccaaggtctccatgaagaccccaatcctgtctgtggcactgtccgctgcttcggaaggtgtgaacgcgattcacgccgccttgggcgatatcgcgcaggccggtcgcgtggtcggcaagttcgacttggtggccaagcacgccgaggaatccgccgccgaagacgcgcccgaaaccgaggtcgccgtcgaagccagcgagctcggtgagccgccagccaagaagccaaagcactgagcgttgcgcacaacaacagtaggtctcacggcaatgccgctcgttccgagcctacgggaagcccaccgggcttcccgcttaacggctcggccagccaagaagccaaagcactgagcgttgcgcacaacaacaaaagaggggaacctcctattgaggttcccctcttttgttttttgacgttcggatgacacgactgtgggacggcacgcaaatatcccgcattgtaagctggcggcccacaatagcgtgggccaccacgcgtgtcaaacgttttatatacgcggcgtcccacagaccgaatcaacaaatccttggaatttagccattcttcaaactatagttagctctgacttacaagagggtgtgggacgccgcatcgaaaaagccagtttttgatgcggcgtcccacaccgataacgcactttacgcgtattgggcacctgtcgcatgcggattttcccgcatacaccatcacaccgtcggaatcacgatgaggtatcgggtttcggcggttttttgttgcgtattggggctatcgagctgcgcgacggcctgcgccaagagcgtgccagcatcgctgatctccacggtctcattgatcagcgcgctcatgtcatgcttgagcagcgtgccgccagtgccaaagccgaacagtactggagcggtgtcaagattgttgccggaatcgccagtatcgctcgacttggctgagtcgttcgttcccgaaccatcgctcttggacgaatcgaacttacctccaccaccgatggccgaagtaagaccacccgcatagttcatcacatcgccagcagacatggacatggtgtcatcgaccagtgaggccttggaatgctgcgactgctgctgctgttgcgcggctttggcctgcttacgggcggcatcggccttacgcttggcttgggcggcccgggtcttgccatagaacgattgcgattgcgaatcgaccaggccagtcagtgcctgagcctcggtcaccggaccggaagagacatcaccggacgagccatcgccatcgctgccggaagccgaggacgcgaatccttcgaactgatcggagaatcgcaatacaatctggcgcaaggccgtggctttgcccgtatgctcggaggcggtggcaagcgtgctcatcgcggcatcgaccttggattgatcgtcggcgagttcatcgctaccgttggtttcggcgatggcttggctctcgtaagcggtggcgcccgaagacgtgccgccggtcagggcgctcaaattggccgtgtagacgtccgtgtatttcatcgaatacggaatcattgcggcggagagctggctctggccatcggcgtattgcttggagcctcgagtggcttcctccgaagcctcggcggtcagatcatccaccagtccggtggtgccttgctgctggatgcggcgaatcacctcatccaacgcatcgaccgcaccggcatgctgatgtgcggcactgacgttgttcaccgcgttggccaagtcgagtacggcttgtgccaaaggcgtatccccggacagttcgccggccgtgcccatcaacgccgacaactgggtggaggtaccaatcgatccagacaggtgcgtggtatatgagcccacatacgcggccatatagtcttcaaacgtccgcttatgggcggtttcgcgttcggccactacggacttgtccagcgcacgctcattatcgcgcagggtttgaagctgctcgatgagctgttgatgctccccggaaccggcgtcggtcagtgaatcgaccagtatggcggcagaggcgacgagttgggcgacatccgtatcggcagcaggctgtgcggcggcattcgcggcatcgggattagcaccaaccaccggactgctggaattggaaggcaatacggcgagcgccacggaactcatggagaagtctttggcgttcatatagcagctgaattccaagccggttgcggcttttccagctgcggcgactacggtattggaaccttgcgtggttaccgtaatggagttgtcagcggaaacatcatcggctacctgcgtaggcacggtaaaggcgacaaccgggatcgtacggttggcctccttggtttgcggcttaatatcgatatacacgccgatcagtccagatgcgccggcaacctcgtttgcctcgacgtttggaccgtcaagcgagtaggtgacgctgactttccatggcagggtggcggcggaagcggggatacgagaagccttggacgtgccggaatcactattggcggaatcggtatcagtggaaccgctattgccggaatcggcactggcgccattgccggcgccgcccttccctaccacataccaacggaccggctccccctcggcatcggcgacggcgtacatatcacttgccgtagcgagcaccggaccgtaatcaaccggagtcggacgagacatccaagcaccgccgagaatcgaagccacgcacaatgcgcaactgaccagtgcggcaccacatctcatctacgtatcccattcatacagtcggccactatgggcattccattcccgtattaatgtagtcgctgccggcaacttgccctatagacgaatatccgaaaggtgcccattcgctgcgggcgaatcaggcgaatacgtcgagtacgcccgggtcgccaccggcatcggcgatgcgctggtggcgcttcttggcttcggtaaccacgaattcacggtacatttcggcaatttccggatcaagcccggcatcgatggcgatgcggtggaggcgttcgatctgatagtcctcacgcttggtgtcttcgggcgcgaatccggcgttggctttgagcacgccgacctgcgaggtggccttgaaccgctcggccagtaatgcgatggccgccgaatcgatgttatcgatggtttggcgcagcgctttgatgcgcgccaccgcttgtgcggtttccgggtgggccgccgcctgggcggagtcgatggtggtcctttgccagccgctgctcgtttcgctcatagattcgaggatactcccgattgcggctttgcacgatgcgcaaagtcagatatctcagatgtcatagtcgccgtaggggatatggctggcatccgcatcgccgaacatggccgcaccattgcccactcccaaaacaatcgaacccattgatacatctttcatctcatatatcgtcagcgtgcatgtgaacgttgacggcaatactacaactgcaatgtgatagttgatgtatttgcatcatatacggcaagggctgcgccccgtatcaatcggggtgcagcccttacactattgttcagcggtctggtcagttgccgttgaccgcgttgccggtgttggcctgctgcacgatggcggcgaggaagtcgcggttggtggcggtcttcttgaggcgcggcaccagcgtctggtaggcctgctcgggctccatgcctcccagcagacgacgcagacggtagatgaccggcagttcctgcggattggtgatgagctcctcgcggcgggtgccggaagcgttgatgtcgatggccgggaacagtcgcttgtccgccagctcgcgggacaggcgcagttccatgttgccggtgcccttgaactcctcgaaaatcacctcgtccatcttggagccggtttccaccagcgcagaggagatgatggtcagggagccgccgttttcgatgttgcgggccgcgccgaagaacttcttcggcgggtagagggcctgcgcgtccacaccaccggacaggatgcggccggaggcgggggcggcgatgttgtaagcgcgagccagtcgggtcatggaatcgagcagtacgaccacgtcctggccgagctccacaagacgcttggcgcgttcgatggccagttcggcaaccgtggtgtgatcggaggccggacggtcgaaggtggaggagatgacctcgccctggaccgtgcgctccatatcggtgacctcttcggggcgctcgtccacgagcaccaccataaggtggacctcggggttgttggcggcgatggagttggcgatgttctgcagggtgatggtcttaccggccttcggcggggagacaatcagaccacgctggcccttgccgatcggggaaacgatgtccatgatacggccggtgagcttgttcggggcggtttcctgcttcaaacgctcctgcgggtacagcggcgtgagcttggagaactgcggacggttgagcgcttcttcaacgctttggccgttgatggaatcgatggcctgcagtggcacgaacttctggcgttggttgcgacgatcgccttcgcgcggggcgcgaatcgaaccatggacggcatcgcccttgcgcaggccgtacttcttgacctggcccatggaaacgtacacgtcgttcgggccgggcaggtagccggaagtgcgcacaaaagcgtaggagtcgagcacatcgacgatgccggccaccggcaccagatcctcctgcggctcttcacggcggctatcacggtcattgcgatcgctacgattatcgcgatcatcatagcgacgatcatcatcggcgttgtcgcgatcacggccacgcatgcggcggttacggcgatcgttgcgatcattacggttatcgcgatcgttgcgatcgctacggtcgcggcggttacgacgcacaaactcgtgatcgtcgttctgctcgccgtcttcggacgtttcctcgtgcttctgcgtgggcagcgtggccaggatatcgtcgaggtcacgcacggtttcttcgctgttttccgcagtgcgacgacggcggcgaggctgctcgtcctcatcatcacggactcggcgaatcagcggaacttccacgtcctcatggcgctcgcggcgacgctcggtaggcgctgcatctcccaaatcgagcgtggccagcagatcgccggcctcatcggccttcttgcgcggcttgcggcgagcgaaatcggactggtcgtcatcgcgacgatggcgggccgcacgcggttcggatgcggcatcatcggcggccttacgacgggtgcgtcgcggttcggtctcgtccttcttggcatcgtcggccacgggaagcggcaaatcgagctgcggttccgtggcggccggagccggcgactgggtggccacgtcagcattgtctgtggtattggcctcagcggcatcggactgcggagccttgacgaccttggcggttttggcggccttgggagcgcgcacggtcacaccggccggcggctctccaccattgcgcgccgcctgcagggtggcgagcagctcgggcttgcgcatggtcgacgtgccgcgcaggcccatctgtttagcgagctctttgagctcaggcagcttcatatcctcaagattctggctatttgccactggttgccctttccataccgaacagacccatgcctatccaggcgttaagagtgattattgcggttgcaccgctcatgaatgttcgctgcgtctctgagttttcacgaacttcgtttactgtacaacgccaactcgaccaacgcaaaacggcccgccgaaaaccaaaaaaagctccctctgtgacgagggagctcaacaaggtttattcacttttcttcgtggtaggacttttcggtgttgacggaccacacgttcttcttggacgtcttgccggtcttgatgttgccgacggcctccatggcggtggccatggagtggtccatgttgttgtagcggtgctggccgttgcggcccacgcagtagaggttgccgaagccgtcgaggtactcgatgagctcgtccatgtgctcgtaggtgtcgaagtaggcggggtacgccttcttgacgcgctcacgatgggagtcgatgacctcgtccgggccgttgatcacacgcatgcgggtgagctcggagatcgcgaacttggtgacgtcctcctcgctcatgttccagaacgagtcaccctcctcgcagaagtactcgaggccgacccacacggtgtcgtccacgttcttgaccagatacggactccagttgttgaagatctgcagacggccgaccttgtagcccgggtcctgcacgtagatccagcagtccggcacgatcggcggattgccgagggtggggatgttggtggtgttcttgagcttcaggtgcttgaccagcaggcccacggtcacgaagtcgcggtacggcaggccgttggccacctcggtcatatcggccggggcgggcttggaatcagcggcctcgggatcgtcgccggccgcgtcgatggcgtcgaccaggtccttgaccggcatcgaggagatgaactggtcgccggaaagctcggtgcggttgccctcggaatcctcgtacaccacggaagacacggcgccatcggtctggcggacctcgaccaccctggcgtcggtcagcaccttgacgccggcggcctcgcaattggactcgacggtctcccacagctggccgggaccgtacttcggataccagaactcctcgatcagcgaggtctcgacctccgcgttggagcgcttcctggggctaagcttctggaaggcgttcttgagcacgcccatgatggacaggcccttgacgcgctgggcgccccagtcggcggagatctgggaggggtggcggccccacagcttctccgtgtagccctcgaagaacatcgaatacagcttgcggccgaaacgattgatgtagaagttctccaggttgtcttccggcagcttgtggaacatggacttcaggtagctgaagccggccaccatggtgagcttgaagcccatggccttcaacgtgttggggctcagcgaaatcgggtaatcgaagaagtggcggttccagaagatacgggacacgcggtggcgcttgagcatcaccttgtcctccgtctccggatcggggccgcccggctccatgtcgtggtcgcggccgagcttcttgtcatcataggagggtgcgccctgcaacggcagaacggtcttccaccaatccatgatgcgttcgtctttggagaagaaacggtggccgccgatatccatgcggttgccgttgtgcttcacggtgcgcgagataccgccgaattcgcgggtcccctccagcacggtcacgtcatagttttccgcgccgccatccttgacgagttcccatgcggcggtaagtccagccggaccgccgccgataatcactacggattgcttgtcggtcattatgctccttataaacgcaaaatcagagacagtttactagaagccccggaatcgcacaccgaaagatgagcgaatgcttacagaattctcccgatatacgaccgatgcgccgtcttccatcagcagaaaggcgacgcatccaatcgtgaggtaggggtattcggcaacgctgcgtcacgcacagcgcggcgaatcggtttggtcttgggctaattcgtcagcgacgaaccttccatagattcagcgagattcctgcaagtgcaagcagcatcatcttctatcaaccgcaagcaaacaagacacacgatggcaaggttacgaatctgaacttttgctatgcgttgtatgaacaatgcgcgacgccccgccgtaagatgacggaatgccgcgcattgtcaatacaggctgtatcagacgattgcctgtcagtgaatatcgtcgggaatgtcgatatcggttttctggacttcctcgacgttcacgtccttgaaggtcacgatgcgcacagacttgacgaaacggctggaacggtagacatcccatacccatgcgtcagtcagctgcacatcgaaatacacgtcctgaccagcggaacgcacgttgaaatcgaccttattcgccaagtagaagcgacgctcagtctccaccacataggtgaacagcttgatgacgtcacgatattccctatacagcgcgagttcggcgtcggtttcgtaattgtcgagatcctcggcactcatgcttgtttactcactcactttccgtatcgcgtttgcggccgcggcccagcgtacgccaccatgcttcctttgagggcttgcgttccgcctggccgtacggccagttgctttcctcttcgagactgtggcgcgtgttcttctgcgtatcgtcgtggtgcccggcctgtggctcgactggctgtgcggccgccggcgtctgggcctgggactgcacgtcactcgtcgtgacggcggctgcctcaccacgctgtgccggctcgggttccggcttgttctgctggatggcgatggaatgctcacgcgcggacagcgcttccttgacacccgggttgtcctcaatcaagtgcataccaaaagcgtcaagcgaacgaatcgggtcgtactcgtcgaccaacgtgtccatgacgataaggtcctgatatttgttgttttcgacatcccacaacgcgtcgcgcgaggtgccggacggcacgaatccgagcgactggtagaccgaaatcgaacggctgttcttttccggcacgctcacccagatgcggtgcatgcccaggccggccggttcgggcgcaaagccgtaagtcatcacacgcggcatggcgtcacgggagtagccgcggccacggtattcacggcccaagatgatctggatgcgggcggacttggaccagccgtcgatgtcgatgaggaaaatcatgccgatgacattatcggtgctggccgcatcgagctgaccgtcatcgtcatggtcggcgtcagtcaatacggcccatgcgatggtgcggcgggattccgggtcgcccacgccggattcggcgggtgcctgaccggcttcccaggcttgggagcggcggacccatgtgtgtacgatggcgcgttcggtgaccgcatccttgccggtgatcttggatgcgccatagaaggcatcaagttcatccaaacgagccaggtcctcgacggtggcggggcgcaggtgcaccatttcgccacggattggcggaatgacgatgctctgtggcagatcgcgcttcagttgcgcttcggtagccatgctcagcgtctcgttggttgcggtcatcggtatacatcccccggttcggcttgtttcggctcacggtccagtgccgaacatatcttactcgactgggtgaacgctggaaatgctctgagacgactttcttacagaatcaataaaggctcccgctggcgggagctgtccaacgaatttgaactggaggatttccctacaaataagtgctcccgctggcgggagctgtccgcgaagcggactgagggtggtcatccgtacatggcgaccaccctcagtctcactccgttcgacagctcccgccagcgggagccagtgaatctaatcagcccttgatcttgcccatgacgaccttggtgacggccttggcgtcggcctgaccgcgcgtggccttcatcacggcaccgatgatcacgcccatcggcttcatgttgccgctcttgagcttctcgacgacatccgggttggattcgaacgccgcgtcgacggccgcctcgatggcaccgttgtcttcgacgatcttgtagtcgtgcttcttgacgacttcatccggagtgccttcgcccttaagcacgccttcgacggtctgcttggcgagcttgtcgttgagcttgccggaggcgatgagcttctcgacctcggccacatcggccggggtgatcggcagctcttcgagggacatacccttggcgttggcttcgcgggaaagctcgcccagccaccacttgcgggcaccggcggccttggcaccggccttgacggtttcctcaatcaggtcgagggcgtcggcgttgaggatgtcgcgcatctgcagatcactcaggccccactcagacttgaggcggttgcggcgctcacgcggcatttccggcatctgggccttcatctcctcgatgtgctccttggtgatgtggagcatgacgaggtcggggtccgggaagtagcggtagtcgtcggcatcggacttcagacggccgccggcggtggtctgcgtagcctcatcccagtggcgggtctcctgcagaatctccttgccgtcgtccagacgggcggcctgacggcggatctcgtactggatggtcttctcgatgccgcggaacgagttcacgttcttggtttcggaacgggtgccgtagggggcgtccgggctcggacgcagcgagacgttcacgtcggcgcgcatgttgccctgctccatgcgggcgtgggagatgttcagcgcgcgcacgatgtcgcggatggcgcgcatgtaggcaccggcgatttcgggagcgcggtcgcccgcaccctcgatcggcttggtgacgatctcgatcagcggcacgccggcgcggttgtagtcgaccagcgaatgatcggcgccctcgatacggccgtcggcgccacccacgtgggtgttcttgccggcgtcgtcctcgatgtgggcgcgctcgatcggcacacggaacacggtgccgtcttccagttcgacgtccaggtagccattgccgttggtgggcttgtcgtactgcgagatctggtagtcacgcggcatgtccgggtagaagtagttcttgcgggcgaactggctccactcggcgatttcgcagtgcagggccaggcccagcttgatcgcgtaatcgacggcggtcttgttgatcaccggcagggagcccggcaggccaaggctcaccggggtcagctcggtgttcggctcgccgccgaactcgatgtgggccgggcagaacagcttggtgttcgtggacagctccacatgggtttccagaccgaagaccacatcgtacttcttggtggcatcggcgtacttcatcagtttttcagccatgatgttgtttctttccttccgatgctcacttgcctagaccgtcaagccacggggtcttgaggtcgttccagatcgggccgttccagctgtcttccagcgcggcttcgagggccgcagccggcttgtacatgacttcgtcgcgctgctgcggggcgatgaactggaagccgacgggcaggccgtcatcggacaggccggccgggatggacatggcaggcacgccggcgaggttggccggaatggtggcgatgtcgttcatgtacatggccagcgggtcgtccatcttctcgccgaacttgaaggcggtggacgggctggtgggggccacgagtacgtcggccttctcgaaggcgttgtggaagtcccggatgatcagcgtgcggaccttctgggccgaaccgtaccaggcgtcgtagtagccggcggacagggcgtaggtaccgaggatgatacggcgcttgacctcgtcgccgaagccggcctcacgggtgtaggccatcatgttggcggcggtctgaggcacgccggtcggcggcatcacgcgcaggccgtagcgcatgccatcgtaacgggccaggttggagctgacctcggacggcatgatgatgtagtaggcgcccagcgagtagccgatgtgcggaaccgagacctcaacgacctcggcacccatctccttgagcttgtcgacggcctcgttgaagcgggcctcgacgccgggctggaagccgtcgccgccgagttccttgatgaggccgaccttcatacccttcagatcgcgcttggcgccttcgcgggcggcggcgaccatcggacgcgggccttcggggatggaggtggagtcacgcttgtcgtggccaccgatgatctcctgcagcagtgcggagtcgagcacggtgcgggagaccgggccgatctggtcgagcgaggaggccatggcgatggccccgaaacgggagacgccgccgtaggtgggtttgacgcccacggtgccggtcagggcgccgggctgacggatcgatccaccggtgtcggtgccgagggcgagcggggcttcgaatgcggcgaccgcggaggcggagccaccaccggaaccgccgggcacgcgctcggtatcccacgggttgtgggtggtttggtaggcggagtgctcggtggaggagccttgggcgaattcgtcgaggttggtcttgccgagaatcggcatgccggcggccttgagcttttcgatgacggtggcgtcgtacggcggcacccagccctcgaggatcttggaggcggcggtggtctcaatgcccttggtgacgatcatgtctttgatggcgatcggcacaccagccagctcaggcagggcggccttgtcttcggcggacttggcgtcgaaggcgtcggcctgctcgagagccacatcgccggaaaccttcaggaaggccttgatggacggctcggcggcttcgatcaccttgaggtgggcttcgacgagctcacgagaggtgacgtcgcccttcttgatggcagcggcctgctcggcagcagacagtttgacgagagttgcggtttcgttgctcatcgattactcctcgcttcccaggattcgcggtgccacgaacatgccggcctcggtcttcgggccaccggcgagcgcctcttcctgcgtgagcggggtttcggcgacgtccgggcgcaggtaggcttccagaggaaccgggttggcggtcggcggcacatcgtcggaggcgacttcctggaccttgttgatggagtctgcgatgacgttcagttcgccctgcagacgggtgatttcctcatcggtgagcgcgattcgggccagatcgcccaaatgcacgatttcttcacgtgaaaatgttggcatggccataactatatgagccgtatgtgacacgcagttgtcgggaagcctcattttcccgcctactggagcccttcagcgaatcagaagctcaagccggtcgagcatttgccccgctgctggcttcttcggcggggcaaaaccgttgccggaccgcaagttcaccttactgagacgactcgcagcagagcaaaaccgcgagctgaccgatgaaacgccccgctcagccatcccagcaaaacaaaaccgcggtccaaccaataaaacgccccgctgagacgccccgcagcgaggcaacgccacggcccaaccgcaaatgtgccccactgaagtatctgcatggccaccctaataagctcacaatgagcccaaacacacctacatcgaacatatgaacgacaatcgccctgcgcacctcgccagttatccacattttgcatacccacccaaaagaatccacataatcagtccaatacggtcagatgcctgataatcaggcaaaaacacacatctaggcaccgaagctagaaccacataaccccagacagatagacaccgtgttcaccattggcataccgtcgaatcatgaaacatcacaaagcagtggacatactcatcacgaaggctgaagcaacgcaacagtgcgcttatggaacaaccaaggcacaccgctcggcgctggctcggcgcgtgcaggcgcgcgaactcaaacgtgtattccccaacatgtacgccgcttcggaatactgggattcgctgcaacccgacgaacgtatcagacatattgcacgaactcttcataacagacatccggattgggtgttcgccggggtcacggcagcggccatccacgattttgaacaccaatggcatcttcatgctggcaccatcactctcgccacaacatcacgaggccccaacgccagcagtgcaaaggtcaaacgcatcttcacgtcaagcagcacgccagaatatgccaatggactcccggtgaccagcaaagccagaacggtggtggattgcgggctgtccgtcgacttccgatttgcactgcccattatcgattcggcgctgcgcaacggcgtcgccatcacggacattctgaatgtgtgcagcactatgcgacgtgattgcacgccgatattccgcctactgcattatgccaatccggcgagtgagaatggtggcgagtcacttggacgaggcaccatcatcgcaggcggcctattagccccagaactgcaacaaaacatcaccgacccgcaaaccggtgctctgtatcgcgtggatttcctctggcggctacctgagaatcggcttatcgtgggcgaattcgatggctatgaaaaatatgtgaacccggatatgaatgaccgcaagggtgttcgtggtgcagttcaggcggagaaagaacgggagacggcactgtaccgggccaaagtcgacaccattgtccgattcacctatgaggaggtgatgcaacaacatcctttactcaataagctgcgggcagccggcatacctcatgctggaacagtgatgggagctggttaagcgcagtgaaccacggtggtcaaatccatggggtcagagtcaccagaaccatggtcactgcagaaccgccaaagccatagccatgacaaactgccaggaccatggccgaaccggcagaactgccaaagcagtaacccgcgttatttgatatctgatatccgcttttccggtgatgatgagaccgccgatccatgcggcggcagcccaggcgatgagaatcaggccggactgccaccattcgggaatccagtagtccggtttaacggcttcggccagtgtggactgcgcggagctgctgatgcctgcggcgagcaggatgccgacgatgccggcggcaaatgcgaattaatgccgcggcgatggatttggtggcgtagatcatgcctctaatgtggcccatattgggcagatgcggcaggattgtcggcgcatggctacacgcctgatacggcgtgttgggcaatccatgcgtgcatggccacggccgccgcagcgcctgcattaatggagcgcacggaaccgaattgagagatgtagaccacatcgtcggccaattcgagggccttctcgctcaatccggggccttccgcaccgaagagcagcaggcaccgcttggggaaggtataggtttccatcggcactgcgccgggaatgatatcgagggcgatgacgcgggcggcttgaagctccttgatgcgcgcatcacaagcatcgatttcggccagcagctcatgaaggtgcttgttgtctccatccacagccacatcatgcgcatggatggcggcggcaccggccttggctcgttcataggcgatttcaccggcgatgcgatgatgccagctttccaccagttcggcgatggaggggtggtgttcgacgtgctggtacagttcggtcatcaacgcgcccttgcgattccacttatgtggaccgacaatgtgtacgcgcttggcctggaaggcgttggcggtgcggaccatggaaccgatgttgaaatcgtgggtccagttttccaccgcaacttcgaagtcatgacgccctcgagcgtcaagatcggccttaatggcagcgacggtccagtagcggtaacgatccaatacgttgcggcggtcgccgtcattcaacagcaccgagtcgaaacgaccgtcataattcggagaagtcggatcgtcgggacgaggctcgccgggatgggtctcagaccacggcccaaggccgatttcacggaattccggttcacctgaagctttggcagccaaagaaatctggttgggtgcgtgcaatctttctcctcgataacgctattcaccggttcctcttagtcaacttcgcggctcagcccggctgactttatgcgagggaagtcaaaggtggatttaccgcagttcggattcgtcgaagacctggatgaaggggagcgtttgctcgtcgccggtggaggggttgaccacattgatgtctttggcaccgccaccgaccagcgaggcgatggccacgaccttggcacccagctgctccactatgccaaagtcgaggctcagctcattgccgttgcgcagggtgaccagcgagctggtctgcacgtacgacttttcggacagccaagcatccaacagcaccacacggcggccttcgatggaggggcccttgatggacgggtagacgaagtccatcacgaatccgtctaggtcctcgccacgagaggcggcggcctggatcatggcggacaccatgggcacagatgctgcggtcaaggcaccaacagcatcgaagtcatcaaccgaatagcccgcatcttccaaagcgtcaatcagtacatggcccatgacggtggcggcatggtggtcgaaagtcaccgcggcaagttcggagaacggacggcccaccacatgctccctcagcaaggtggctagctgttcacgcggctccagcatggcaaagtcattgtggctcttcgcgacggcgaggtccggggtaccagtggggcggaatccagattcagtcatgactccagactatcgcctgaggcagtcagatgagtatcaccttcatcggccggcaccacttcaggggcggacagttcgctcacattgcctttgtctgattcgatgatcggtacttcctcgatgatcttggtcggttcgattttttgcagcttgcgagcggtgggcaacacacggcgttccaagctggacgcgaacttgttgtaggcgctgaccgtcttggtgatctgggtgcccaatttgatggcataatcacccaacgtggagaaccgttcgtacagttctcgggacagatcgaacagctgcttggcgtcatcggtgagcgactgctgctgccaggcataggcgacggatttcagcacggcccacagcgtgaccggcgaggtgagcgccactttgcgagagaacgcatcatccatcagtgtggggtcggcttcgagcgcggcctgcaatagtgcctcattggggatgaaggccaccacaaaatcgggtgccacatcaaaggcattccaataggccttttcgccgagagcacgtacatgctcgcgcaacgccttggcatgggctcgcagcaaatcatcgcggcgggcaatatcctcggggctggcggtgtccgggatttcgcaggcacgctggtaatcggcataaggcactttggcatcaatcggaatggtcttgcctcccggcagatgcacgatcatatccgggcgcaacgtacgtccatcggcatccgtgaccaccacctgggtatcgaaatcgacatgttccagcaatccggcggattcgacaatgttcttgagctgggcctcgccccacgcgccacgcaccttgttgttgcgcaaggcggcggacagggaactggtttccttgtccaaacgggcctgctggtcgttgagccccttgagttgggctcccaatgcgcccatttccctcttgcggccctcttcgatctgcgtgaccttgttctgcaaggtatcaagatttttggccactggcgcaagcgcctcgagcaccttgctctgttctttcaaacgtgcttcctgttcagcacgcttggcctcggcgtcccgagcatccgcctgacgcttccgttccgcctccgcagccgcacgctcacgttcctgctgaatgcgaatctgctcagcctgctgcgcctgggcaagttgtgacttggcgaaagccaattgctggttcacgccttcaatctgagcctgtgcggcagcattgcgagcactgagctcagcattctcgaatcgcgcattctccagcgaggtcttggtctcctccagctcctcgcttttgacgcctcgagccatctcctgacccttatggcgccccagcacgaagccggcgaagaggccaagccctgcaccaaccactagcacgacgatgacgataatcacggttcctatttgctcaaacatggtacctagtatgtcatcgatggtgaatgacggtaaatttttaccgaattcgacggtttcaagccgttaaacggatgctcagcagcccacattggacgcttggccttatcacagtcgagcatcaaccgttattatgctgtgtcgtatccgagcgtcagacggcctttcatgatttgccagcgcgcgtcatcatgcggcagaactcgtcacgatttgacgagacgtgcgatggccgcggaagcctccgcaagtttttcatcggccacctcgccgccctggaccgacgcctgccgcacgcaatggttgagatgatcgtccagcagcaataacgccacggatttcagcgccgagttcgacgccgaaatctgtgtcagaatatcgatgcagtatttgtcatcctccaccatctgtgtgatggcgcgcacctgcccttcgatacggcgtaatcgtgcgatgaccttggccttgtcttcgtcataaccatgcatcgcaaccccctgatacttatccgtcagctgaacacaccccatcatataccctctaggggtatagggtatacactgttgttcagtgcattaggaatgggaaggaacagttatggagttcagcatcttctcgaccgccacggcgctgatagtggcggccgcattgacatggctggtcctgcggttcttcttcggaacgcagaaggcaacggccggggccatggatgcttccggcgaacgccaatccgcgacgatcaccgtcaagggcgggtactcccccgccgtggtgagcatgcgtgcgggtacgccgatcacactgaccttcgaccggcaggagaccggcgaatgcacctcgcatgtggtgtttgctgatctgggacttgacgccatgctgccgggcaacgccaccaccgacgtgaaactgccggcgttgccggcgggcgagtatccgtttgcgtgcggcatgaatatggtgcatgggttgttgagggttgagggagaggacggctcggatgagaacacgccccttcctcatcctgatgcttcgtatacggcacctaccgccgtggatgcggcggagggggagcgccgggaggcggctgaacgcgccaatgagatcaaggcgctgacgaagctggtgattgtgggcgcggtactgacgttgccggtattcgccgtcaccatgctgcatatggccaatcccacgctggtgccgcattggatggtgaacccgtggttgcaggccatcctgatcacgccggtgatgttctactgcgggcgtccgatccacacggtcggcttccccgcgttggcgcatcgctcccccgacatgaactcgctggtctcactgggcacttcggccgcctacctgtattcgctggtgacctgcatcgccccgtgggtgttcccggaaggctcgcgcgaaccgtatttcgaatcggttggcgtggtcatcaccttggtgctggtcggccgccttctggaaaccaaggcccgcgaaggcaccggcaaggcggtgcagtcgctcatcaaactgcgcccgcgcaccgcgcacaaactcaacgccacttccgcagacaatgtggacggcatcgaatggcgcaatccggcgtatttcacggacaccgacatcgacgccatcgccaccggcgacctgctggtcatcaagaacggcgagcgcgtgcccacagacggcatcatcgtggccggcgaggcgcatatcgacgaatcgatgatcaccggcgaatccaagccggtttccaaaaccgtcggcgatccggtaaccggggccaccgtgctgctcaagggcgactgcgtgatgcgcgccacccaagtcggcgcggacacggtactctcgcagatcgcggcgatggtggcccgcgcccaggcgaccaaggcgccggtgcagcagctggccgataagatcgcccggtatttcgtgccggcggtgatgatcatcgccatctggacgttcgccatctgggtgtcactgggcccggtgccgcaactggcgcatgcgctggtcaccgcggtcagcgtgctgatcatcgcctgcccgtgcgcgctgggactggccacgccgctgtcggtgacggtctcgctgggcttgggcgccaccaacggcgtgctggtcaccagcgccaaggcgctggaacaggcgcgtcgcatcggcaccgtggtgttcgacaagaccggcaccatcacgcgcggcgtggtggacgcggccgccgactgggacaagccgagctacgagcaggacacagtcaaggaaggctcgcgcgaggccatcgcggcgttgcgcgaacgcggcatccgcacggtgatgctgtcgggcgacaaggccgaggtagccgggcgcatcgcccgcgaagtcggcatcgatacggtgatctgcgaggtcaagccggacggcaaggcctactggatcgccaaactgcagcgcgaacgcgacgaggccgccgccaagtccacggacggcacctcccgcacggccgcgcaatcccgcactctgattgcgatggtgggcgacggcatcaacgacgcccccgcactggcccaggcggatctcggcatcgccatcggcaccggcacggacgtggcgatgcattcggcggacgtgaccttgatgagcggcgacttgcgcggcatcatcaagaccatcaaccggtccaacgccacgatgcgcaacatccgcgagaatctggggtgggcgttcggctacaacgtcatcggcattccggtggccgccggcgtgctctacccgttcaccggctggctgttgagcccgatgatcgcgggtctggcgatggcgttgagctcggtgtgcctggtgctgaacgcgaacaggctgtatgggtcgaacatcaacgcgggcgttgtcgatggcaccgctggctcgggcagcagcacggcggatgtcgaatcaaccggatcggccgaatcagccaacgccgccaacatcaccggctccgccacatccaacgcgcctcacgagccaaccgtcatcatcgacgatcgcaccacgctgaatcacaccaatcacgcatctgaccaatccaataatccaaccaacaaggagaacactatggatatgggaatgcacatgcaccacaccgcccccgcggacggcgaaaccgccaccgacccggtgtgcggcatgaccgtggcggtgaacgccgacgcgatcacgcgcgagtatgagggcaagtcctattacttctgcggcgaacactgtgccacgaacttcatgaaggccccgcaggtgttcctggagcagtagtctctgcgtttacctgattcaacgacaatggcctccgcccaaaacgagcggaggccatttgcatatatgaatcaatcaacgaatcagctggcgaagaagaacacgaacagccaagcgccgatgatggcgccgatgatcggggccacgaccgggatccaggcctcgccccagcgggaggagcccttgtgcgggatcggcagaatggcgtgcagcagacgcggcatgaggtcgcgagccgggttcaggccagggccggtcgggccacccatggaggtcacgaggccccacacaatgaagccgacgacgatggaggcggcggcgtaatcctgcttgccccaagccagggacaggcagcacagggcgccgaagacgagcaccagggtgccgaacatctcgttgaggaagtagttgaccttctggttgtccgcgtcggtggtgcagaaggtgccgagaatggcgtcggcgtcctcggtctccttgtagtgcgggtagtaggtcaggtagacgatgaactggccgagcagggcgccgagcagctgggcgacgatgtacggcagcacgtcgctccacgggaacaggccgttgacggcctgggcgatggtcatggccgggttgatgtgcgcgccggagacgctaccgaacataagcaccgggaacatgacgccgaagccgtagcccatggcgatgttcaaccagccggcgtggtgacccttggtgttcttgagctcgacgttggccacggagccgttgccgaagatcatcagaatggcggtgccgaagaactcggcggccagcttggtaaagagagagtattccactgcttcttcttttctcttcgccgcgcaacaggcatggctgactgttcacggcattctgtgtgattggaaatccgttcgcggagccggcgacgcgatttacgctgggcgcgaaagcaaacgtggcgattgtacactttgccccacgacgaaatgctggcaggatgcgatgtcgaatgtccagccgaatgcaatgcccaaaaaagccaccggaatcagccgaagcgaccttgactctcagtggttgcgaatgacgttgcgcaggggtaggacgctggtgggcgagacggacagttcgtcgattcctaggcacaggaacgtatcggtcaggctcaggtctgcgccaagctcgccgcagatgccgcaccagatgccatgacgatgggcagcctcgatagtcatctggatcatgcgcagcacagctggtgaatgcgggtcggcaaagcgttcgagactcggggtctgacggtcacaggccagcgtgtactgggtcaggtcgttggtgccgatggagaagaaatcgacttcggcggccagctcgtcggccatgatgaccgacgcaggcgtctcgatcatgacgccgatctggatactctcgttgaagtcggtgtgctcgccgcgcagctcgcttttggcttcttcaagaatccgcttggcgtcgcgcacctcctgcaccgaggtgatcatgggcagcataatggcgatattgccgtatgctgaggcgcgcaacaatgcgcgtaactggactttgaaaatctccgggcgggtcaggcagatgcggattgcccggtaaccaagcgcggggttatcctcgtggtccagattgaagtagtcgacctgtttgtccgcgccgatgtcgagtgtgcggatgatgaccggacggtcgcccatctcctgtgcgacttgtctgtatgcatcgaactgaaattcctcggtcggccagtcctcgcgttccagatacaggaactcactgcggaacaagccgatgccctcagcatcgttggccagcacggcggctacgtcagagggacggctgatgttggcgtacaggtggacccgctgaccggacttggtttcggtgggcttgcctttgagcttcggtagtaggctcaggtgttcctcagcttcggccttcctgcgctggcactcggtcagcgtggcctcgtccgggtcgacgaacaccacaccgctggcgccgtcgattacggcaacgtgaccgtcatcagtcgggtcgaaggcgtcgccgataccggtgatggcgggcaggcccatcgtgcgcgccagaatcgcggtgtgcgagttcgctgagcccttggcggtcacgaggcccaaaaccttagcgcggtcgagctgcgcggtctcgctgggagcaagatcttgggcgaagatgatgtggctttcgccgttctgcgcaatcccgttctgcgcaatcccgttctgcacagtaccgttctgcacagcatcgccttgtatactgccatcctgcgccgtgctatcgcgtttgccttgcagcacgttcatcacgcggcgagaaacatcctcgacatcagcggctcgagcctgcatggtcgagctatccatcgcagcgaacatggcggcgaactgttcggcgacgctcttcaccgcaaattcggcgttcaccttgtcttgcgcaatcaaaccttcgacgcatcccgcatagtccgggtcctggagcataagccgatgggcgtcgaacagctcggccttgttttcgccgaactcagcggcgacgttgtcacgcagttgcttgagctgagcgacggccatgtcacgggccgcgcggaatcgatccatctcagcctgcggatcgtcgattacgcggcgttctacagcatgatcggcggcggcgagcacgcggaccgtgccgatagcaatgccagcggatacgccaacgccctgtatcgttctcattacaggtgctccttgaggaatcgctcgaactctgcggcagcgacagcttcatcgttgccctgcacccgaaccgtaacctcgtcaccttgttgaacatcaagtcccataacaccgaagatacgcttggcatccacggatttgccgccgtaggcaacggtgatgttcgactcatattcccgcgctttggcaaccaaccggccagctgggcgggcgtgcatgccttcggggtcggatacggtgaacgcgaatatctgagacatgacgccgctccttacacgtccggccgtcacgcgcgaagacggcctttccgcaccagctacggactgatgctggaaaaaacaaaaaaccggaatctttcgattccggttgtctgtgcccccgcagggattcgaaccctggacacgctgattaagagtcagctgctctaaccaactgagctacaggggcttggttagatgttgaagtgttccttgcaacaggtgataaatatactcagatttgaagcgaatgcaactctcggcgtgtcgcgtctatttccggcgtttttgctaatacaaaaatcccccatgcggcgcgaaccgcacgggggatgatgcttaagctcagactcttggtctgtgtgattccagcactaggccggaatgactcactcggccacgaccttcacgaagaaggaagcggtgatctccgggtggagggccaccttggcggggaaatcgccggtggtcttgatggtctcgacctcgatggccttcgggttcaccgcggccttgtcggacagagcgatggcgatggcctcgttggagataccaccgaacagcttgccggactcggacaccttggcggcgatctcgacggtggtgccctcgatggcggccttggcggcgacggcgtcctcgcgggtggcgacggccttggccagacgagcgcgcttcatagcggtgatctgagcctcagcacccttggtccacgcgaaagcgaggccctgcgggaacaggtagttgcgggcgtagccggccttcacgtcgacaacgtcaccggagtggcccaggttggacacggtcttggtgagaataaccttggtttcagccattgttcaaagcctccctaactcagcgacccgaagtggcgtacggcagcagggccatctcgcgggcgttcttgatcgccttggacagctcacgctgctcctgcacggtcacgccggtgatacgacgggaacggatcttgccgcgatcggaaatgaacttgcgcagcagcgcgacgtccttgtaatcgatctcggtgaccttggcggccttcagcgggttcggcttcttcttgaacggcttgaccggcggttgcggcctcttacgtgacatgatgttctccttataaatcttgatattgattgctgctggcagcggggaggtaagtactgatcagaactccgggtcggaatcgtcgccgccgccgaaatcggaggaagcgccgaacgtggagaagctaccggcatcagatgcaccggcattgctccacgggtcggccgcaggagcggacgggttggcgggagcggcaggctgctgggagtatccagcgccaccaccctgatagccaccgttgtaaccgccctggccaccggcataaccaccttggccaccctggttgccatagccctgattgggttgctgaccaccctggaaaccaccggaacgaccttggaagccgccctgaccggacgactggcgggtcacctgtgcggtggcgtagcgcagggagggcccgatttcatcgagctgcatctccacgacggttcgctgggaaccatcctgtgcctgataggaacgctgctggaggcggccggtggcaatcacgcgcatgcccttcttcagggactgggcgcagtggtcggccaggtcacgccaagcggagcacctcatgaacagcgcctgaccatcctcgaactggttggtctgacgattccaggttcgcggggtggaagcaatcgtgaagctcgccacggtcgcgccgctgccaatagcgcgcagctcggggtccgcagtgaggttgcccacgatggtgatgacggtttcgcctgccataacggtccttcttacttaccttgaataccagctgttcagctgactaaacgcttgattcagcccttacgaaggatcttcgtacggatcacggattcgttgaggttcagaacacggtcgagctcatcgctggtagcgggctcggcggtgtacttcaccacgacgtagttgccttcggtcttaccggcaatctcataggcgagcttgcgacggccccagtaatcgggctcatcgaaagagccgccttccttggtgacgagttccagatactgctcggtcagcttcttcagaccgcgctcatccagctcaggatcggcgatgaacatcagttcgtacttgtgcgcagacatcacccacctccttcggactattcggccacggacgttccgtggcaggagtgtgtatgcgtgtta

SEQ ID NO: 1362 - DNA, 7972 bp, Unknown
  R157_18m  MAG No. k141_34079
gccacacacgacgaaccatgattacacacgcccgtcgctcatgtcctattttcatgaatcatagaatacggaatcaaacgttggaatgatgcgattgcaacctgaaaaaccgagcttaatcgctttgtctaatcacgattagactaattacgattagactatttttatacagatttactattattgccgaaatatatggcgattgacgattgacaaattccgattgacgttttacgcaatcgcatgcctcgaaaaataaaaagaccgcacctgaaagtgcggtcttatctgcaattacgatgttgcggaaagcttattcttcgctgataccttcgctgaaaagttcggacagcatttgcgcacaggagatgccgtcggaaagtacgtggctcatggcggtggcgagcggcgtaggcacgccatactgcttgccgagcgccactaccgcatcggcggtcggcacgccttcggccacgccgttgctcaccttggtggcttcctcaacgctcaggcccttgcctaggttggaaccgaacgtgtagttgcggctcaacggggatccgcaggtggcgatcagatcgcccacgccagccaaaccggcgaacgtcttcggatcggcgcctgccgcctcgcccagggcggtcagctcggccaggccacgggtttcgatcatggcagcggtgttttcgccgtagccggcaccgcgggccatgcctacggccagcgcgaccacgttcttcagcgatccgcacatttccaagccgatcacgtcgcgggttacgaacgcacggaaatagtcggtggtgcaggcagctgcgatcttgcgcgcattgtcgagattttcgcaggcgaccacggttgcggctggctcgcggtcggcgatctgcttgctcaggttcggtccggaaatcgcggcgaagcggtcggccggcaggtcgagagtttccataacgacttcatccatgcgcttgccggtggtgcgttcgatgcctttcatcagcgaggcgacaagtgcggtttcgggaatcagacccttgaattcggcgagcgcgacgcgggcgaactgtgcggcgatggccacgatcacaatgtcggcgttggctacggctttggcacggtcgccggtggcggtcatgttgcttggcagcactttcacgctgggcaggcgaacaccgttgtgatggtggtcgcgaatgccttccacaatctccggttcgatggcccacatggtcacattgttgcccgcgtcggcaagcacctgaccgaaagcggttccccaagctcctgcgcccagtaccgtcacgttcgtcatatttgctccttgcattactccgggcatcattcataacccggagtcttggctcaaaaattgcttttcctatgctaccgccggctacgcacaccgcgatatatgccgcaatacgcgccatacgtatgcgcaatcggctggcagtatttcgattaccgcatttcagcaatcgcgtgttcggacttttccgattcgatcttcttcggttcagtctttcactcggctcatcgtgcgataatcccaatatccgtcgggggcttgttcgccgcggatttcggccatgacttcggtcatgcgcacgcggatgcgtcgggtgagttcgttggcgagatcttccggcacttcctcaccccaggaatcgcaatcggcgagcagatcagcataatcaagcgcctcgtcgtagcacatgaccacgtttttacgcggccacggccaccaatggttgatgcttgccgcgccccacgttaccgcgcaatatagcggaatctggtagccgagtcggcgtgaggcctcaagtgcgatcatgcccacgccgtttttcatgctcatcggccatttctgcgggtcgcgcgttaccgtgccttccggccatacggttaagggtcggccggaggtgaggatttccacggaggtctcctcgatggctttcgccttgcccgcacgtcgttgcacgggctgcatgcctaccagctggaaccatttgccaatcagcggccacgaggccatttcggctttggccatatagcgcggacggcggccttggtggaatagggagatcatgggcacgaacacgtcgaacatggtgacgtgcgtggctgcggtgatgaacggaccggtttccggcacatgttcgatgccccacgccttgagtttggtgcgattgcggaatacgatgtcgcatccggtgagcagacggtgggtcgctttcggattctgagccgcgatttcggcttcattggctttgcgcggcccgcatggaaaatcatgggttggatcaacgagatggtgacgctgtgcgagccttgcgacctgttcgtcgcttaacggtttgaccgcggaacgcggcgagggttttcctttggatgccatgcgttccattctgccaccacccattccgcttggttggaacgattgcactcatgcacgacgcacacacgaaatacaaaaacacggaatatacgaaaaaggcggaactggtgtccgcttcacttcccacctgttccgccgttttctgtctttatgagcttggacgacactgcttcatttgcgtcgccacccttcagcccagccccctaactgcctgtatccgtgaagggaggatgggttctagtgatcattgcaacacttggtcgatttccgggagaatcaagtgggcgacgagacggaaacagtacgtggcatcgctgaacgcaggactgaacttcacacaggccgcccgcgccgtggacgtgtccaaacgcaccggcaaggtatggcgcaacgagcgcacgcgcgccactgggcgcaatgaaaagccgagcgtggactggtaccgttcacccgtgaacaaacccaccaaactacataacgctacctcgaccaggccaaacgcattctgatcgccgacaggctcaaggccggtgactcgatacgagccatcgcactcctactggaccgggagccatccacggtcagccgtaaaatacgcgccaaccataaccgcgtcaccggcgaatacgagccccactgtgcttaacaaacgtcagcggaccgattcaaatgacccaagacacgcaaggcatgaccaggcacgcgactatgagacgagattaaagccggcgtcaaacaacattggagacccgaatagatcagccaccgactggacatggacttccccgataatgaagacatgcacgcatgcacggaaaccatctaccaaacgatctacatccaaggcaagggcgaactgaacaacgcgctgcgatccggccacgcaaaaccctcggatacatgaaacccagcgggaaaatcctcgaactcatcaacacaccaaccaagcggcacacaacagatgttgcaaccacccctagaatccgcccgtcatatcagacgaaagccgcacgattacgggagtcctggatcgttaacggcacgcgctatcatgaatccggagagcccggcaggcaatcaacggcccaaccatccccatgcgccgcgtccgtcgcatctacgcacacttcgacccacaaacccctcgcatccgagactgggaggcggaaatgcacctcactgaagcaaacatgatctcatgccgctcagagtatttcctctactccgccacaccgaagatgcgcaactgcatgtactatccccatcgcgttgggcttggtgattttatgcccgggtacagattgagtcggaccccgatgaacaacttcctcatcgcctacatcagcgaaggatcattccgtatccgtttcgcggacgtcgacgccattgcgcatgaaggccaattccttatcgtcgactgctatgagccacatcgcttctccactgatgaatcctgccgggatatctggctccactatgacgggccggcggcgagaaacatgtacgaatacatcgtggaacgctccggtaacatcatcgacgttgggagaagtggacatggtctccacgagatgcacgccattttcgacatgctcaaagcgggaagaggggcaagggaggccgaactatcgcatcacatcgatggcgtgttggcttcgcttgcgtccgcaggcaagtcgagcggcccgcacggcaacgccctgaacgtcatcgaccggtcgctgccgtatatcacggcacatctgaatgacgacctctcattggattccctcgcgacggtgttctgtatcgacaaatactatttctccaaacgcttcaaggaacgcaccgggaccacgccacatcagtacatactcaatgcgaggctcgaacgaggcaagttcctgctgcacaccacgacgctgccggtgggcgccatcagcgccgactgcggcttccacagccaaagcatgttctgcgccgccttcaaacgagcgaacggcaaatccccatcgcaatatcgtgcagaactatcccagccgttccaatcctgaaaacccagcaaagccaagatttcataaatattgaaaccgggatgccacgaaaacaacaagcgcgagagcataccatatcgtcagcggccaccatggaccgcgagacaaaagcccgacgtcggcgtcgggggaaactggaacagggagaatgatctcatgacctccacacacgaaaccaaaatcaacgacatccacatgccctcctccatggcgcacgtcgtatgtctcggagacagcattacccacggggacaccggactggggtaccacgtgtcgcacccatggccggaaacggtgggggccatgctgaacattgacgttcaagggtttggccatgatggtgcaagcaccgtggactaccgcacatacccggagtgggaaatggcgaagctgtatcttcccgacgcggatttgatcgtggtggggcttggcaccaacgacgtcgacttggagaatgcacgcacggaggaaacggtgaaacctgtggtctctcgtttcgaggacctcatggacgaagcactcggcctatccgagcagcatccggcagtagcggtgctttccgtgctgcaattcgcagttgaggaaccaattttccgcgaacgcttcacgttggaagacattgtggagatcaatcacggcatcgatctgctcaatgaagcataccgccgcatgtgccgggtgaacggctggcatttcatcgattatgctcgcaatatcaatcagaagcgagaactttttggcaattccatccaccccaaccagcagggctacaaccgcatggccgcattgctggccccccgcttcgccgcactgcttggcgcataacgccaatccgattccaccccatccgatcctccgcacctgcaatctgcaacgtcgcaccgcgggtgcaccggttgaatactcctcaccttacgaagggatacctatgtctcattcagcatcctcaacggacatgaagccaaagcacatacttggacagcggatggcctacaccttcagtggttttggccaagctgtcttctacaacatgatgagcacctatttcgtggtatacgtcacttccgcccttttcgccggagtggataaagacatcgcgaccaagctcgttggcattatcaccggagccattgtgatcatccgcatcggagagatcttcatcgacccactgctcggcaaccttatcgataacaccaacacccgaatcggcaggtttcgcccttggcaatttatcggaggccttgtcagcgcgatccttctgttcatggtgttcaccggattgttcggtttcgtcaacgtgaatcagacatggtttatcgttctgttcattgcggtgttcatcatcctcgacgtgttctattccctgcgtgacatctcgttctggggcatgattcccgcactgtccgaagattcgcaggagagggcgctgtacacttccctcggctcgttcggggcctccctcggctttaacggactgacggtcatcgtggtacccgtggtcacctatttcagcatgcagttcaccggcagaaacgaacagaaccagagcggctggaccgcccttgcgctcatcgtcgccatgctcgccatcatttcggccatgtccggagcgttcggcacccgggaacgccagagtgcgctgcgagccaaggcccaggataacggcaaccctcttcaggccttcgcggcgctggcgaagaacgatcaattactatgggtcgccctgtcctacgtgttctatgccgtggcgaacgtcgcgacagcaggcgtgctgttctatctgttcaaattcgtactcgacaagccagcggcattctccattgcaggaatcatccccgtcgtcactggtctgttaatcaccccactgtaccctgtgatcaacaaattcattccgcgccgttacctgttcatcaccggcatgggtctgatgatcgcggcgtatctggtgtttatcctcgcctccacgaatctgaccgccgtcatcatcgcactcgtgctattctacctgccgtcaactctgatacaaaccacggccatcctcactatgactgacactgtggaatatggtcagttgaaaaccggcaagcgcaacgaggcggtaatcctctccgtcaggcccatgcttgacaagatcgcgggcgccctctccaacggtatcgtcggattcgtggcggtgtccgccggcatgctcaacaccgccaccgcggccgacatgaccgcgcatgatattcagactttcaagacgttcgccttctacacacctctcgcgttcattgtcgtcagtctgctcgtgttcctattcaccgtgaagattgatgaaaaggaacatgcgcgaatcgtcaaccttctcgagtgccagctcggaagcaaggacaacgcttgacgatgccgcgggcgttccgcgcttacaagccgcaccccgatcgccggtccgggaaacccggattcgattaatcgcgggtgcggcttttcgtacgcgcaaaatcgcgcacggcagcagcgcggatcggatggtacatcccacatgatgcaggtgccgaactcatgcacgcaccacaacgttgcgcagatcgccgatgccttccatttcgtcgcccggtcccaagtgcccggacgcgttcgacgtgccggtcagaataacgtcgcccggcagcaacgtggcaaacgacgaaatcgcggcgatctgcttcggaatgccgtggatcatgttcgcggttggtgccggatgccatcggcacggcctcaccgttcagcgtgaatgaaatcttggtgcctcgccagttgaggccgtcgtacgttacaatccacgggccgagcgggccggaagtgtcgaagcccttgacgcgcgtccacatgggtcgaggccttgcaggtcacgcaacgtcacatcggtaacgcaggtgcaaccgagcatgtaatacatagcgttttcgacggtgacattcttcgccacgcggctgatgaccacagccgcttccagctcgaagttcatatcgctagagcctgcagggtaggcaatcgggccgtcagaccgatgacggaggtgacggcttagagaagatcaccatgtcttcctcctaaattaagcgcaacaatttattctaattactatgctttttgagaacgagcaacggcaatatgtaagcaaaaggccggtgcccactgttgtgaacaccggccttaccaagccaatcaagctatatcagcggtaaatcaggcaacaaatcagtcgaaatctgcaccgagagcttcgagcttgccacggaaatcggcataaccgcggtcaatcagggaaatgccctgcacattggacgggccctttgccgccaacgcggcaatcagatggctgaagccgccacgcagatccggcacgtcaatatcgcgtccggtcagcggggttggtccgaaaataaccgcggaatgcttgtaattacgctgctggaaacggcatggcagcgatccgaggcattcacgatacagctgaatcgtggcacccatctgcaccaacggcttcgtgaaaccgaaacgattctcatacacc

SEQ ID NO: 1363 - DNA, 36332 bp, Unknown
  R157_18m  MAG No. k141_34133
ggccgactatttcttcaagaaggccaacgtggcgttgacagacggccgtgaatgcggcgaggtcgggcgcggttgcgtgcgtatgaacttcgccatgccctacccgctactggaggaatgcttcgaccgcatggccgccgcacttgaggcggacgggctgttgtaaaaaattgtggctcccctcagagaggggagccgaggaacggccgaattaatcgaagtcggcacccaacgcttcgagtttgccgcggaagtcggcgtagcctcggtcgatcaggctgatgccgtgcacgtccgaggggcctgacgcggccaaggccgcgatcagatggctgaacccaccacgcaggtccggcacgtcgatgtcgcgtccggtcagcggggtcggtccgaagatcacggcggaatgcttgtagttgcgctgccggaaacggcacggcagcgagcccaggcactcgcggtacaactggatggtggcacccatctcgaccagcggcttggtgaagccgaaacggttctcgtacacggtctcgtgcacgatcgacaggccgttggcctgggtcagggccaccacgagcggctgctgccagtcggtcatgaacccgggatgcacgtccgtctcgatcgccacgggcttcaagtccccgcccggatgccagaaacgaatgcccctgtccgtcacctcgaatttgccgcccaccttgcggaacacgttgaggaacgtgatcatctccggctgggtggcacccttgacgaaaatgtcaccgtgcgtggcgagcgcggcggacgcccaggacgccgcctcgatgcgatccgtcagcgacgtgtgcgtgtacccctgcagttccttgacaccctcgatgcggaaggtgcgatcaacgtccacagaaatgattgcgcccatcttctgcagcacgcacaccagatccatgatctccggctcagtggccgcgcccgacagttcggtcttgccctcggccagcacggccgccagtaaagtctgctcggtggcgcccaccgacgggtagggcaggtggatcttcgcgccgtgcaggccgttgggcgcggtgatgtggatgccgtccttgtgttccttgtccaccgtggcgcccagcttgcgcagcgtctccagatggaagtcaatcggacgtccgccaatcgcgcagccgcccaacgcgggaatgaacgcctcgcccagacggtgcacgagcgggccggagaacaggatcgggatgcgcgacgaaccggacagtgtatccacgtcggccacatcggccagctgcacacgcgaggcgtcgatggtcacaatgccgttcgcaccgtccacatccacgtccacgccgtgcagacgtagcaaatcggacaccacatgcacgtcacgaatctccggcacgttcttcagcaccgacttgcccggtgccagcaacgcggcgaccatcgccttgctcacgaagttcttcgcgccacgcaccttgatcgtgccattcaaaggcttgccgccctcgacatgcaacacgtcatccggattctcagccacgccactctcctcaatcaatcaagattcaaaaaatgctaccgtccagtttgccataagccatgtgccgactccgtgaaatgcaccccagccgaactttgatcaccgtgcacaacggatcccatacccccccgtcgaatcaaaccgataacgtgatcttcctcacatttgccgccacggtgttctccatacttctacgctacgattcagggcaatggcatcagacgccatggccacaagcaaaggagcattcatgaccacagtcgccgtcatcggctgcacgcacgccggcacgttcgccaccacctcgattctcgccgagcaccccgattggaccgtccatgttttcgagcgcaacggtacgctgtccttcctctcctgcggcatcgccctgtgggtgggcgaccacgtatccgacccgaagaaaatgttctactcctcccctgccgctctggccgaagccggtgcgaccatgcatatgcgcaccgacgtgacgtccgtggacctcgacgccagaaccctcacctaccgcgcgctggacgaggccggagaccccgccgaacagaccctcgctttcgacaaactggtcgtgaccaccggctcgcgcccggtcatcccgccgatccccggcatcgacagcccgcatgtgctgctgtgcaagaactgggatcacgccatcgccatcaaggaaaaggcgaaaaccgccaagtcggcagtggtgatcgggtcgggctatatcggcgcggaaatcgccgagcagttcagcgtcaccggcgtcaagaccacgctggtcgacggccttgatcgcccgctggccaataatttcgataagaccatcaccgatcaggtggcggccgcgttcgaggagcacggcgtcacgctcgcgctcggccagaaggtggtcgagttccgcgacaatgacgacgacaccgtcactgtggtcaccgaaaagggcgagtacacggccgaaatggcgattctggccgtcggcttcctgccgaacaccgacctgctcaagggcaaggtggacatgctgccgaacggcgcgatcgtggtcgacgactacatgcaggcgtccgcgccgggcgtgtacgccgccggcgactccgccaccgtgttctacaaccccaccggccagcacgattacattccgctggccaccaacgcggtgcgccagggcctgctggtgggccgcaacatcgagacgccgaccgtgaagtacatgggcacgcaggccacgtccgccgtgcagctgtacgatctctcgctcgccgcctccggcctgacccgcgccggtgccgaacgccgcgggctcacggtccgcgagacctcgctcaccgaggattatcgcccggacttcatgctcaccaccaccccagtcacgtcgattctgacctgggacccggaaacccgcaaggtcaagggcggccagttctgttccaaggccgatatctccggcgcggcaaacgtgatttccatggcgattcaggccggcttcaccatcgaccagctcgccaacgtggacttcctgttccagccgaacttcgacaagccggtctactacgtcggagccgtggccatgaaggcggcggccgagtaagacggctgtacccaccgcaaaaagaaaccccggcgtgatgggcgccggggagagaaaggagagaagaagaaagaggttaagttatgcagcttgttcggccgtgattacatataacagcaacagtttcaatgcaacatgggcactgtctgggaatcgtctgggaatcacggcccgtacaggctgttgcttgtttttggagccgatttaccggctggccttgatcttgtgggccagttcggcgtcccacatcgcaccggtggcggacatcaccgagtccgcgccggcgtcacggtacgcctggtagtcggcgggcgagaccacgccgccgacgccgttgatcgcgaaatcgagcccgagcttttcacgaatcgcggccagacgggcgaccatgtcgaggccggcgccacgaatcgcattgccgcacacgcctgagcgatcgcggcccgcgccgggcagggcctgattgccattggcatcgaccagtttggcggaaatcgtattgatggtgctgaagccctgcacggtgccgtggcccacggtggaacgcaccataagctccagagcgtcgtcgctggggatgtaggcgagcttgaccatcagcgggatgtcgccgatctcctgcttcacggcctcggtgatgcggcccacgagcagcggattgtggcatagcaggcggttgtggccctcgttggggcagctggtgttcatcaccatgagcttggcaccggtctccttgaccaggcgggcggtagtggcatggtcggcgatgtattcctcctcgctcatgccctccacacgcgagccttggaagctcgggaccagcacttgaccgggaccggcggcctcgatggcggcgcgcatgtccgactgccagacgtcagggctctgcgagggcacaccgaagctgttggagatggaaatcggctgttcatagttggtgtcggccagcacgccttcgtccagttcggcgctgcccggcgtcagtgaaccgtccgccgacttggggtgtacggcgagcacgttcgggaacgggttgcagccccaggcgcgcgaacgcacggttttgtaggtcgccagatcgaaacccatgtggaaagcggccgtggtgaaacggctgttgagcagcgggcctgcgggaatgccgaaaggcaggttgaccggctggcccaaaaaggtggccaaggcaccctcgctggtggttccggcggcatcggcaccgttgccatccttcagcgcctcggcgaacgcgccgaacggcccttgctcatagttgtcttcgtaactgcggctgacatcgtaaaacggctcaaaatcactcatgcttcaacgataagccaacctgcatgcgcacacgcacactcaacccatcatcgcgccgacaaacgaaataatggcgaaagcggcattggctaccacaaagatgatgaacgtcggagctgcccagccaaagtacgtgtctggaatactacgattcgtacggtgatattggcgcatctctttgccgtatatcacgaatatgataatcgatccgatcacgccgatcacagatagcgacaatgagaatatcaaatatgcgttgtcatcaagatagttgccggcaagggtatcgatggcgccggaaagaatcgcattgttgaagatgtgcagtgcaatcgaccaaaccaacgagtattccatggccacgaatcccagaatcaggccaaagaggaacgcgaatgtgccttgcactacgtcgtcatggaacaggccgaacaccattgccgaggtgacgatggcgaagttcttgcccaacggcttgagctccttcatcagtacgccgcggaacagtacttcctcgcaaatcggagcgaccagcccaacgtacagccacatgcttacggtgacgctggattcggcgatgctgtctgacgtgggagaggcaagatcggtgcccagcatggaaaaagcgacctgcaccaacataacgatgccttgcacgcccatgcccagcacgatgaacatcaacgcccagagaggctgcatgcgcccgccgccatattggctgatgtggccaagctgattgggctccccgtacgagtcgcgatgctggccaccaagccagaattcgcaggtgaagatgtcacggtggcgcatgagcagcagaaatccgaacgcgacgaacaccgatatcaggctgatgatgccatcccactgcacgccggacaaatcgctcgcggttattacgccgacgataatggtggcgaccattgcgcccaagagcatcatgccttcataggcgagagtcagtcccattacacgattgaccaccttgcgacgccacgtgcgccatacacggcgaggatcgatcggcatgaccacgggcattgctgcgggcatcgtggccggcattgcgttgggcattgtgactggcattgccggagccgtttgcacgaatggttgcggcgcagcggaatagggttgtggcgcgtagcccactggttgagcgtagtacggatgagcgaggggctgtggagccgactgttgcgccgggtatggggaataggcggattgcgccggatacgtcggctgcgtgggatacatcggctgggcaggatacgtaggttggacgggatatgtcgggtatacgagctgcgcggcgtattgtgcaggctgcacagcaggtattgcggcttgcggcacaggttgtgaaacaccttgtgaaacaatccgtggaacaccccgtgaaacatcttgtggaggtagcggttgtgcccatgcctccggctgacccgcatattgcggctgcatgctcggcccaggctgaacatactgtggcgtctgtggcatcggcgtctgtgactgtgccgcagactgcggtgccggtcgaggtggcaacggttgcgctgacagcgattgcgccggagccgtatcggaatcgttcgacggattcatgtcattcatggtcatgatgctcaacctaaccgtcattactggatgaatcgtgattatgtccacaaatgtgtacgaattcaggcacagtatttcgaacgctaggacggagttcatgagtgttgaggaaagcgccgccacgccggtgttggtggctgcggtggataacgaccgtatggcgttgttggcactgaagggaatattgccgcaactcctgcccgccgcgcaatggatgtggggcgcgggcaccagtgagacctttgtttgatgcgatgcgagcgacccaataatctcaatcagacacagagccaacggccctgggcctgcaattatggactcgcctttcggcgaggctcaatgctggcctcgctgctgtcgcagctcggcacagggcctgctgaaagcccaccgggctttcagcaggccgatcgcggctaaataatgccgcgatcggccaacggccctgtccagtctgcgtcctcaggctcgcgggcggactcgattctttcttcggcccagtgtttggcggggatggtcttgggcttgaaggggaacttttcggcgcgcatcttttcgtaggcggcgatgtcgtcctcgtgctgcagcgtcagatcgatatcgtcgtagccgttcatcagacgccaacgcacgtaatcgttgacctcgaacggcagggtcacgtcgccgcaagtgacagtgcgggtctccagcgagacagtcatctcacgaccaggctcttcctccagtagcttccacaggagttcgacggactcctgcggcataatcgcggccagcacgccgttcttggcggtgttgccgtagaagatgtcggcgaagctcggcgcgatgaccacgcggaaaccgtaatcgtgcagcgcccacacggcgtgctcgcgggaggagccgatgccgaattcggggccggcgaccagaatctggcccttaccggcgtattccggcttgttgagcacgaagttcgggtctcggcgccatgcgtagaacagggcgtcatcgaagccggacttggtcacgcgcttcaagaacacagcgggaatgatctggtcggtatcgacgttggagcggcgcagcggcacgcccacgccggtcagtgtggtgagtttttccataacaattttcctttcggggatctctcccccagtcagtcttcgactgacagcccctcgtcagagggggctcacgtgtattgactcagagatcggcgggagacgagattgtgccgcggatggcggtggcggcggctacggccggcgacgccagatgcgtgcgcgagcccttgccttggcggccctcgaagttacggttcgaagtggaaatcgagcgctcgttcggcaccagcttgtccgggttcatgcccaggcacatcgagcagccggcgttacgccattcggcgccaaagtccttgaacaccttatcgaggccttccttctccgcctgcaaacgcacgcgggaggaggccggcaccaccagcacgcggtggatgttctcggccttgcggtggcccttcataatcgcggcggcctggcgcaaatcgtcgatacgaccgttggtgcacgaaccaatgaacacggtgtccacggcgatgtccttgatcggcatgcctggcttcaaacccatgtatgtaatcgcacgttcggcggcggcgcgcttggtggcgtcggcgatcttgcccggctccggcacggaggcggtgatcggcagaccttggccggggttggtgccccacgtcacatatggaccgagcttggtggcgtcaatatccaccaccttgtcgaatacggcatcgtcatcggtcttcagcgtcttccagtacgccacggcctgatcccacagctcgccttccggcgcgtgcggacggcccttcaggtactcgaacgtggtctcgtccggcgcgatcatgccggcacgcgcaccggcctcgatggacatgttgcacacggtcatacgttcgtccatggtgaggttgcgaatcgcctcaccacggtattcgatcacgtaaccctggccgccgccggtgccgatcttggcgatgatcgccagaatgatgtccttggccgtcgcgtccgcgggcagcttgccgttgacgttgacggccatggtcttgaacggcttcagagacagcgtctgtgtggccatcacgtgttcgacttcggaagtgccgatgccgaacgccagcgcgccgaacgcgccgtgcgtcgacgtatgcgaatcaccgcacacgatggtcatgcccggctgggtcaggcccagaatcggggcgaacgcgtggacgatgccctgatcggcgtcgcccagcgggtgcaggcgcacgccgaactccttgcagttcttctccaaagtcgtcaactgcaacgcgctcgtctcatccgggttcgggcgatcgatatcaacggtcggcgtgttgtgatcctcggtggcaatgagctgatccacgtgacgcggcttgcggccggccaagcgcaggccctcaaacgcctgcgggctggtgacctcatgcatgagcatcagatcgatgtacagcaaatcaggagctccgtcgctgcccttgcgcaccagatgatcggcccagaccttctcggccagtgtcgttcccatagtgattcctccaaaaaattccgcgcgaggtattgtgttcgcgccttgttcgtggtattagcctatgtgcttgcgatgggcccggccatgagcatgccggatattgagatacggtcaaatgatggcctcaatatgactcggacccgactcgaacatgacctagtcatgactcggttccgctccagacatgtctcttcggcatccacgaacgccctttcaacttcatggccaccctgtgagacacttccccaatttgccatttcactatgtgagatggcataatcgcccttattatgactgattcccgggaagaaccattgaacaacagcttgaccgagtccgagccggttgaagacaccaccgccaaggacgatggggaaatccattccggcgttggcgtccttgataaaaccgtaaagattcttgacgcactggaatccggcccgtctacgctgggccagcttgtggccgccaccggtctcgctcgaccgaccgcacatcgtttggctattgcactggaacgccaccgtttcgtactgcgcgaccagcatggccgattcgtactcggctcccgtttcgccgaacttgccgccgcagcaggcgaggatcgtctgctgaccgccgccggcccgatcctgcagaccctgctcgatcgcactggcgagtctgcgcagatttaccgccgccaaggcgatcagcgcgtgtgcatcgccgctgtggaacgcacctccggcctacgtgattccattccggtgggtgccatgctgtcgatggaagccggttccgccgcccagattcttctggcttgggaggattccgaccgtctgcaccagggattgcgccacgccaagttcaccgccaccaagctggccgccgtacgcaagcgcggctggtccgagtccgtgaacgaacgcgaagagggcgtgtgctcgatttccgccccgatccgcaacgcctccggccaggtcatcgccgccatctcgatttccggcccgaccggccgcatgggtgccgcccccggacgccgctatgcgccgctggtgatggccgccggcaagtacctcaccgaggcactggtcaaagccgttcgctagtcatcacatacattgcccccgctggcgggggcagttttgttatgcgctacctaaacaggccggacagttggctccatagcgacggcttgcgcagcaaatcatcaccctcgccctcgccaggcgcggtttggttcaccgcataggtgtaggcgcgtttggaactgggcttgcccaccagttcgccaaactccagcaattgcgtacgcggctcgtaagggtgacggatatcaaattcgatcaatcgcgtggcacgtttggacggagccggtccgtacgtattgaatccgcaggttggcgtagcgataagcaacagaccctcatgttcgccgacgaaaccgttgcgatgatcatgaccagctacgacgccgaaatacccctcgcgcagcgcctcaaactcgtccgactcatccgggcaggaaatgccttcccccagatacccgccggcttgagtgcgatcctcgtccagcacataataggtatccgcatgcttgcggtagccctgcatggcgaaagccgcattggcggccaccggtttgagtacctggtaatactccggcagcggcatgtgctggaacaccattgatttggctccgatatgttcgggcaaagccttgaggaaggccaatgtctcgggcgaaggcgtgccgaaaccgcctccatgcgcatagtcaccggaattcaccagtaccagtcccagtacgttgcgcgtgcaatccacatccatcaccggcaatgcaaaagtgccgggaatggtggacgcggaaatcggcgcatcggtttcttcaccattggttgccgcaggcgagccgtccttatgacacatatatacggtctgcttggccagcgcatcgctcggcggattgatgcaaccgggaaactcgcggtagattccgtcgagttcggcattgctcaaaccgcactggaaatcgtggttgccgtaggtcaccgcccacggtatgccccgtgacgccaaaggagaggtaaattgaccgatggccttgcgcaccaattcacgcgtatggttcaacgcagattcaggaatcgcctcttcgcaccaacggcgtttgcggaagctcttggcaaaggccggatcgtagccggcgatctggttgccggagaaaatcaccagatcaggccgtgtggcatcaaggctggcctcaatcagggcgatggtgtctttggagactttcggcccatcctgaatgtcggcaatctgcagcacgcggaacttgccggaatagtggaattgcagtcgtccgagacgcgcagagatagagaccgggcggccgtcttcggcatcggccggcttgatacggggtttcgacgacatcccctctggcgtacgctgtgtttccgtcatgccctccactgtacacacaaacgaaaaggcccgccggagcgggccttttctacaagttcaactactggagcagaatctctgcacaacatcatcgtcgtaacggtaagtctttccaatgcccgtccaacgtaacagtcctcgtgaccatacactatttgtgggctctgctctgttcagttgttcttgtacctcataatctattcatcactcccgtttctcgcaacctgcagggagtcgttgtgcgttttttatcacaactgttcaatcgcactttctggctatcggaaaacgagctgaaccgttcacatcgaacccgtctgatgttcggtttcgttcgtttcaccgccgctcacggcgtgtcgcgagcacgctagcacactcagaaccaaccaacaccgaactaacatgaacacccgttgaattctggcgcgttcagccgttttccggccacgccagagcttacgatataaactatggcacagatatttgacgcaccctcgaaggcaattctgcgcagccaaatcgcagagcatattgccgaaaacgacaacaacgaccgccgcgtcgatcaggaaggcgaggcaccgctgcccaaggaccgtttcttcgaccgcgagctcagctggctcaagttcaaccagcgcgtgctcgaatgcgcggagaacgaagacatgcccctgctcgagcgcgccaacttcgccgcgatcttcgcctcgaaccttgacgagttcttcatggtccgcgtcgccggcctgaagcgtcgtatcgactcgggcatcgccgtgccgtctgccgccggcctgagcccgcgtcagcagctgcgcgcgatcagcgagaccgcacaccgtctgcaagacgagcacgcacattacgcgatcgacaccattctgccggaattggagaaggagcgcatcgtcctgctgacgtgggacaagctcacctcctccgagcaggagcgtctctcgcgctactaccgccagcaggtgttcccggtcctgacgccgctcgccgtggatccggcccacccgttcccctacatttccggcggttccatcaacctggccgtgattgtggagaacccggcctccggcaagtcgcacttcgcccgtgtcaagatcccgggcaacctgccgcgcctggtgccggtggacgacatgaccgatgaggagtccaaggacgagcgctacggcttcatcgccatggaaaagctcatcgccgcgcatctggaatccttgttcccgggcatgatcatcaaggaggcccgctccttccgcgtgactcgtaacgaggacatcgacgtggaagaggatgacgccgagaacctgctcaacgccatggagaaggagctgctgcgccgccgcttcggaccgccgatccgcctggagatcacggacaccacgagcccgttcctctcccagctgctcgccgaccagctcggcgtaagccaggacgaggtataccgtctgcccagcccactggacctgaccgtgctctttgagctcggcagcgtggaccgcccggacctgaagaaccgtccgttcgtgccgaccacgaaccgtcagatcgccgaggtcgagtcctcccgcgcacaggatattttcgccgccatccgcgagcgcgacatcctgctgcatcacccctatgactccttctccacttccgtgcaggccttccttgcgcaggccgccgcggacccgaaggtgctggccatcaagcagaccctgtaccgcaccagctccaactcgccgatcatcgacgccctgatcgacgccgctcatgccggcaagcaggtgctggctttggtggaaatcaaggctcgtttcgacgaggacgccaacatcgcgtgggcccgcaagctcgaacgcgccggcgtgcacgtggtgtacggcatcgtgggcttgaagacccactgcaagctcatcgaagtcgtgcgtcaggaagcggacggtctacgccgctactgccacgtaggcaccggtaactacaacccgaagaccgcgcgactgtacaccgatctgggtctgctgacctgcgacccggtggtcggccaggatctgactcgtctgttcaaccagctctccggttacgcgccaaagtccagcttccaccgtctgctggtggccccgcgcaccgtgcgcaccggtctaatccagcgcatccgccgcgaggaggacgccgcccgcgccggcaaggaggcctggatcaagatcaaggtcaactccatcgtggacgagaagaccatcgacgccctgtaccgtgcctctcaggccggcgtgaagatcgacatcgtcgaacgcggcatctgcgctctgaagcccggcgttcccggcctgtccgagaacatccgcgtacgttcgattctcggccgcttcctggagcactcccgcatctacgccttctgcaatgcggacggcccgcagatcggcgagggtccggcttccggcccggaggtctacatcggttcggctgacctcatgcaccgtaaccttgaccgccgtgtggaggctctggtgcgtgtcaccgccccggagcagattgacgggctcatcaagtacgtggacctgcagatggccgactccaccatgagctggcacatgcagcccgacggcacgtatgtgctgcacaccaaggacgacgagggccgcccgctggtcgacagtcaggaatatctgattcgcaagcaccagcgccgccccaattcgcacaactgatttcactcgatgctccctgtcaacgcaagctgactgagggtggttacgatgcccggctcctctttcgagaggatgccgggcatcgtcgttcagcgcgcaaaactacgtagcagcggtccaacgtgacctacaatacaagagatgggtacgaacagtatgagacgaatcgtggaagccgccggcggtattctgtaccggtggaaggatgatgccgagccgacgcaggcatcgtctccatcagcgaaatccaatattgccaccgatggcaccatcatcgcgaataccgcggattctgacggcaaggccgcggcagcacacggcacatcggacgcggctcccaccccggacccggcgcaggccgacagcccggccgcggcggacaacgtactcaaccgcatcgaactgtgcgtcgtgcatcgcccgaaatacgacgactggagctggccgaaaggcaaggtcgacccgaacgaatcgcaccggcatgccgccgtacgcgagatcggcgaggaatcgggcctgtccgtggaacttggcccctatctgggcgacatcgagtacccgctgtccgaagaaggcagcaaacagcgccataccaaggatcggtcggcggataccaagcatatccagttctggatggccacgccgatcagcgccatcgacaacctgcggcgtacccatgcgtttggcccggtgcatcgggcggacatcggcgaaatcgacgaagttttgtggctgacgccggccgaggcccgcaagaagctcagccattccaccgataaggacatcctcgcgctattcgttgatcgggtcgaagaaggtgcactggacgcggtgccggtgattatcgtgcgccacggcaaagcggaagcgcgcaagctgtggaaggggtcggacgcgaaccgtccgatcacgccgcgcggcgcggctgcggcatacgcgctgaaccgcgagctggcgtgtttcaatccgacccgactggccacgtcgccttgggtgcgctgccaggagacgttggagatgttcgcgtggcagaccggacgagacatggttcatctcgatccgctcaccgaagatgcatacgccgctgcgccggacaccgcatgggagtgtctactcagcgaaatcgagttcgcacttgagcgccgtcagcccatagcgatatgcatgcaccggccggtgattggtggtatgttcggacacctgcgcagcatgtgcgttgcgccgtctttgagcaaacgcctgatcgccaagacaccgttcatgccgaccggcacggcggtggcgctgttcgtcactccgacgcctcatggtcccaaaatcatcgatattcagaaggttcaaccgcttgtctactagacccgcatttcctgattcatccaactcctcggccgctgccgccgcggctcatgccgcgcacaatggtgccgccggcagtctgggcccgggcttcggctcgttgcgtgcggccggagcggcattcggacctgctcgcatgggttcttcacgcccctcgcgcccggctcagctcgacccggctgtggccgatggattggccggtggcatggacccgcaggcgttgagcgagatgagtcatctgtctgctgccgcattgctggatcgtgtgcgccatagcgaagacccggcggttgttgagcgggtgctcacgttggtggagacggtcggcgtggatgaaatcgccgaactatggagcgatgccgagccggattcgctgcctggtgtgctgtggcgactgtatatgttgcgtacgtggatgcgatcgaatcgcgactcgatcgcgcatctgtggcgcttgggtgagccggtggccactaccgcctccgccatcgccggcgtggatcaggctcccagtgaagatgacatcgtgcgattggccgattcgattctctccggtgcttttgtgggcgattttgccgtggcgcttgagcgtgcggcggcgtttaccgatgtggtggcgttgggcttgcgcgtggaggcgcggcgcatggtgacccgggccgaggccaacggcgccttctcctcggatgccgatgaaaaggcggtgcgcaccaaagccgcccgccttatgcacaccgccggcagcctcatggccaccgccaaggatttccagcacggtgccaacctctggcgtcgcggacggttggagtagccctgctccaggctccctctgatgagggagctgtcacgggcgatgcccgtgactgagggagagacccaccaaccgcaccccaacaatcagctaccagccaacaccacacctcccccggcgcggcgagccccatcgcaagctatactaagtatccgcgtcggaccgtgcttaagccccgggctccattttttgccgccgcgagcggcccttgcgccgacaggcgctttcgcggttcggcgcttcttttcttttacccgattcacgccccgaacgttgcgatgggcacgaccagtatgccgtcattgcggcgataggccttcccacctcggccggtaaggaacatcatgaactctggttcgcgaacttgggccatggggttgccacagattttgtcgcggaaggatttgagcttatccgcattgtcatcgttcaccttaaggtcactgagttttatttcgatagcaccccacctgccgtcagacaactcgataatgacatcaacttcaagccccttgtcatcgcggtagtaggcgatgcgattgttcgcgcccggcatggccgacagatatacattcaaatcacgaatgcacagcgtttcaaacagatcgccgagcgtctgtgtatcgcgcatcagagtattcggcgcggcacctaaaaccgcagcaggcaacgaaggatccacgaaatatcgcttgggcttggttcgcacacgactctttgcgcggagtggcggctcccaaccctccaaatccgtcagaaggtacaagtccttgagcattcccaaatagctctttactgtctgcgtatccggttcacggcgctcatcgccataggccatatccgcagccagcgtcgcatattttggtgcctgcgatacgttcacggcgagcgcacgcatgagtgcacgcgcggtttcagggttcttgttcatcttgggcacgctgatatcaagcacactcttgatatattcactcggaatttccagagcaaactcgtcatccaaatcaagatttgcgggccacccacctcgacagcaccatctggcaatatcttcaatgttggttgcacattcggcaggctcgaattgtccatcaaacaaaccagacaagctcactacaccggtagattgccctgactcgcacagactcataggccacatacgcaagcgagaaattcgacctgtgccactgtggtgaattgtttctcggtccttcggaatggccgagcccgtaagaatcagctgccccttgcgattcgcattgtcatccacatgacgacgagcggcatcccaaatttgcggcacatcttgccactcatccaccaaatgcggttcattacccatgagtaccaatgccggatcagtctgtgcggccgcaaaggtagcggcatcatccagacgatccatacttcgcgagcgggaaagcgccgtccatgcctttccacaccattttggcccgacgatttccaccgcgccgaatgctttaagtaacttacctaacctgccatcgaccacgcgagcacgataatcaggttgagtcaaggtatcactacgattgttcaaatcgttcattttccggcctttctcagctacccaatcgcctcaatatagattttacacctttctcattcccgattttacactatttccattcccggttttacaccattccgattcccggttttacaccgcaaggtgtctagtttcttcccatgacttaatccaccgagaatcaatccaacgaatcttcgcgcacgactgcgagcgctaggccaaacttgacccattccgatgagacatatttcacaataccgtagctttttcagctggtttccagaaaccgttgacttactgtccggttcggcctagatacgctctttttcgaatctcatgaaatcaacgtcaacaccttggggaaactctcatgaaggcaaccatcaccaaagcgactatcgcagttctcgccggactcgcgatcctcgccgatgcctttctgcttttttcgatgaagatatccaatagacgccacgtgaatgtcattgccatagtgacggatgcacgcgcacgatgcgagcgtcgagccgctccacgatgtcgtggtgatgcgtggagaacagtacagtcttgccggcatcagtgaaggcgcgcaatacctcaaccactacgtcagtattgcgctcgtccaagccgtcggtcggttcgtccagaacaagcaggtccggattcatcgacatgcagcaggcaatcgccacacgctttttttcaccgccagacagacggtatggcgtccgctcccgcatccgatccgagccgaacaacgtcaccatgtcatcgactctgcgctgtacttcggcatccggcaaccccatctgcaacggaccgaacgcaatctcctcttccaccgacgggcagaacagctgggtgtcggagctttggaacacgaatccgatgcgctgatgcagcgctttggcgaacaggctgttcttcgcctcgacttcctcgcgaaccaccggagtaccgccaaaccgatactcgcctgagtccggaaattccagcgcattgatgatgcgcatcagcgtggtcttgccgctgccgttcggcccgagcagcgccacgcgctcaccgcgttcgacggtcagcgaaaaatcacgtagcacggcgtgcgacgaggtttcatcgtcggcgtcgccgtaatctttataggaaaagtcgatgtgattcagttcgaccagcgggtcgccgcggaaccatgagttatctggctgcatggctgcagtttgtttatgattacgctttaatccgaacattattgggctccattcattcgaaccaccctcatcccgaatacaccgccagcgcaatcattgcagcaatgcacacggcatacaccccgttgcgccacgtcagcagacgctcgtggtggatatgatacgtaccgtcaaacccccggcacaccatcgattcagccatttgccgcgcctgcgtattcgcacgcagaaacagcgcgcccatcaactggccggcggacgtcagcttggtccggtcgcggcccacgctgcgcaaccgcagcgcatccagcaactccaccatcgaacgaccgagaatatcgatgaactgaatcgtcacgtcgcagatataaatcaccgaatcagggtagccaactgcgcgcagtccggcaatcaggcgattccacggcaccgtacgcgccagtgcgatcaccagcgacaccgccacgaacgcacgcaccaccagccggaccggcgcactgtactgcccaatcagcaggctcggcaccgccacgaccaggctcaggatgcatacggccagcactgggccgagcaacgccctcatcaggcgcgccggccgggtcgccatcatcagcagcaccaccgccagcatgatgtacgagaacagcatgttgcatgtgatgttgacgcagacaatcgtggccagtatgcccagcagccgcacgcccggattgaccgagcccagcaccttgtcgaccgggctcgactcaatcggcaacgcatgaccaacctgctcgagtacgctgccgaaatgccccaggttgtgttcgatgaaggatgacttgtcagccggaggatcgtaatcctccgactcacgcatccatgcaggtatcgtcaacgcgcggatgtcttgccgttgccgctcaccgcgagcgccagcagacggaacacgatagtgagcacggcgatgccaatcactgcggagagaatgtagccggcgatgtccggcagaccctgcagcgagtagtcaggcaacagcgcatcccacgagaagccatgggcgatgtactgcggcacgtagttgagccccgtggcactcatgaagtcctcggcgccccactcgccccaggcgtcgccggtggcgagcaggccgatcggggaaagcaccgccaccacggccagcgcaatccacgcagacttgcgcagtccggcgtgcgcgacctgtttgccgtcagcaccggcggtctcggcgaagttcacacgggcattgtcttcgataatctccggtgcggtgcggcgcacgaattcgacaaccaccacggtcaccagaccctcgaccacgctggctacggccaggtgcgggatcagcatggcgggaatcgtcacgttaaaggtgaacgggaagtagagcgcctggccgtcagcggctttgaacagcagcggctgcacgccgagttccagcgccacgcagaatgcggcgagcgtgatgccgatatagccggacacgaattcggccacgcgttccgtccagccgtcgggcagcaccttgcgtagcaacacgtacagtccgtaagccacaaacggcagcacgaacgccatgttgaagcagttggcgccgagcgtgatcaggccgccgtcgccgaagagcagcgcctgcagcagcagggccaccgacacggcgaccgtcgcgtactggggaccgagcagcagagcgatcagcgcgccgccgacaccgtgcgcggtggtgccgccgggcgtgggcacgttgaacatcatgatgaggaacgagaacgccgcgccggcgcccaggtaggccatcttctccggcgtgctgttgcggatcacgtagcgtaggcacagcacccacaccggaatcatgatgacgtagaacaacgccccggtggacggcgaaatgaaattatccggaatgtgcatcgccaatgtgacggtgtcaggtacttcgattatatccaacttccctctttttgttgatttcggagctcgaccacaacctcccgctccaggaacgtgatatgtaatatcacaactgtgattcgtctaatgcacaaccatgcaaaatagcttgcaattactagcgacacaccgtgtaccatatatccggtttccgtgttttcggatatttttccgctatattttttgcatatttcgatcattcgttacaaagtgacgcaacaggctctctacactgtggcatgaaggacgtggggattctcacgccacaagcaattttctccaaggagaacggatgatcgccaaagaaatcaccggcaacatcatcagtcagcagtacagcgacggcaaacttaatgtgtcgattgccttcgactggttcgaaaccgataagaagcgcatgcgcaaggtggccgaggacggcaccgagttcggcatcatggttggcaagaccatcaaggatggcgatgtgctcgccgaaaccgaagacaagcgctatttcgcacgcattaaaaccgcacagctgattgagattccggttaactcgatgaaggaaatgggacgcctgtgcttcgaactgggcaaccgccacctgagtctcaaggtcgagaacgaccgcgtgctggtgccgtacgaccatccgaccatggaatacacgaagaagatcggttatgaaccgcatatcatcgagggtgggtttgacggcttcctgatcgtcaaggcccacgccggcaccggcacactgattccgggcaccaacaagaccacgggcgacgtggccgaggaggagcaggaagccgaggccgacaaggaattcccggccgaggaggccgccggccatctggatgtgcatacacacgacgcaggtgagggtgagcccgccgaatatgagatgaacggcgtgctgcaccgcccggacggctcccacagccacgacggcggccgcacctggcacacccactgatagccccatgaacatcaacgaaaccgaatcgcgacgtctggccatgctgcaggtgtgcgacagcgtcttccccgtgggcgcgttcgcgctgtccaacggcatggagaccttcgtacagcgcgacttcttgcgccgtggcgccgatttcgaggagtatatgaagaactacctcgaagtcgcaccgtacaaggaaatcgggcagatggtgctggccggcaagtacgccaccgattcgcgagtctcccgcaaagggctggccgagcgactcatcgaacttgacgagctggcctcggccctgcaatccgcacgtgaaatccgtgaaggcagcgagcgcatgtgtacccgcctggtcaagctggccgagcagatggatgccggccaggcgcagacctcggatgggcatcgtgggttcgccaagccaagtcctgccgacaatgccaccgcatccgctgcggattcgcgcgaaaacagcatcatcgccgtgcacgagcatcacaccgaacgccaccagctgcacgatgccgccgacggcctgtacggctcgccgtcgctcgacctgtatgccgggctgattcgcgagcgccgctgccgtggcctgcattcgatcgcgatgggcctgtacgcggctgaccatgcgaacgacgtgcgcgacgcggccatcatgtatggatattcgctgttgagcgcgcttaccatgtgcgccgcgaaggcgattccgctcagccagtacgctggccaagtcgccctgcatgattcgttcccgcgcctcgtgcgcgcggtgaatatcgcgatgacgttgaagcccgaggatctcggcatctccggagcttacctcgacatcgccgccatgcagcatgaaatcttgtactcgaggctctacatgagctaattatcctggctcccctcaaggaggggagccaggataacctcacccgcaaaccacatacctaactaattcccacataaaggagaaaccccatgtcatacgtacgcatcggcgtcgccggaccggtcggttccggcaaaaccgcgcttatcgaacgcctgacccgcaagatggctgacgaatacagcatctgcgtggtcaccaacgatatctacaccaaggaagacgccgagttccttatcgagcactcacgcctcgcgccggaccgtatcgtcggtgtggagaccggtggctgcccccacaccgccatccgcgaggactgctcgatgaacctcgaggcctgtgaggaaatggcccgcacccacccggacgtgcagatcatgttcgtggagtccggcggcgacaatctgtccgccacgttcagcccggacctggccgacgccacaatctacgtcatcgccaccgatgagggcgacaagatcccccgcaagggcggccccggcgtcacccgctccgacctgctggtgatcaacaaggccgacctggccccgttggttcacgccgatctagacgtgatggcccgcgactccaagaagatgcgcggcgaccgcccgttcatcttcaccgacctgatgggcggtgccggagtggacgacgtcatcgcatggatcaagaagagcgtgctgttcgaggacatgtgatgttttggcccgcccgtatccaaaaacggacgggccgaaacataccgttgcaccaagtgcggcataattgcccatgtcatcgtcaggcaccaatcataagaaggcagcgattcgtccatgggcagtagcacttttcgtctatccactgcattccgccacggacgtaccaaaatcgacgatatttatttcgaggcgccgttcaaactgatgaccccgttcaccaacggacgtcattcggatttcgtcgtgatgctcgcctcccctggcttcctgaggggcgatgaagcccatatcgatatcgacttcggcccaggcaccgattcgaccatcaaaacgcaaagctacgagaaggtgttcgacaccgcggacggctcggccgaacgcaccatcgaactcagggcgcgtggcaatgccaaagccgtgttcctgccgttcccagtgattccgttcaagaacagctcattcatgaacctgaccaccgcgcatatttccgccgagtcagcattcgtgtatgcggatgtggcgacatgtggccgcgttgggatggatgagcattgggccatgaaacgttttacgaatcgtatgcgcgtatatgtggccgaacccgaagccgtgaccaaggccgccgcagccgaattggcgcaacagcacgcacatcgccgaggccggccttccaaggcggaagccgccgctgcccaaccgcgcgaacatctggcctttgctgaccgcatgctgttggaacctgatgcttttgactacaccgaactcggcatgtggcgcgaattcacccactgcggcgttctctacgctcatctgcccgaactcgaccctagcgacgctgtacaagatgccgcaactaaagaagcatcctccgccgccatccgcgagcgcatcgagactgcccgcatcgccgccgaagacgcgctcatcactcgcatccatgaacacgcagacgccatcggcttcaccggcgagctcggcgtgagccgcgtaatcaatggcatctgcttgcgtgtactgaccacccgaggcgacgacgccttcgacctcattcgagatgtggccgatttcgtgaccgatttcgtggccgaaggctaaaaccaagtggctctccccctttgaggagagccaccagttctctcagaacaggaagtaccgctgggtaagcggcaactcgtacgccgggtcagagtggaccggttcgccgtccaccgtcacttggaaggtttcgggattgacctgaatgtcggcgagcacgtcgttgaacttcagatccttcttgcctaccgtgcggcagccatgcactggtaacacctggcgctgcagctccagcttgcccttgatatcgtcatccacggcggcctgcgaaacaaacgtggcgcaggacttgccaagcgcacggccgagcgcgccgaacatatcgcggtagtagacaggttccggggtcgggatagaagcattcgcgtcacccatacgagagtaggcgatggagccacccttgatgaccatttccggcttcgcgccgaacatggacggctgccaaagcacgagatccgccatcttaccgacttcgatggagcccacgtattcggaaatgccgtgggtgatggccgggttgatggtgaacttggagacgtagcgcttgacacggaagttgtcgttgcggttgttgtcgtgttcgtcttcggggagcggaccgcgctgcttcttcattttgtcggcggtctggatggtgcgggtgatgacctcgcccacacggcccatggcctgcgagtcggagctcatcatggagatgatgcccatgtcgtgtagcacgtcttcggcaccgatggtctcggggcggatgcgcgagtcggcgaaagagatgtcttcgggcacattgcggtcgaggtggtggcagaccatcatcatgtcgagatgctcgtcgatggtgttgcgcgtgaacggcatggtcgggttcgtggaactcggcagcacgtttgggaagccagcggcacgaatgatgtccggagcgtggccgcctccagcgccttcggtgtggtaggtgtggatggtgcggcccttgaacgcggcgatggtgtcttccacacaaccgccttcgttcagagtatcggtgtggatagccacctgcgtgtcggtttcgtcggccacgccgagtgcagtgtcgatgacggccggggtggcaccccagtcctcgtggatcttcaggcctgcggcaccggcgcgaatctgctcacgcaacggttcggggctggagtcgttgcccttgccaaggtaggcgatgttgatgggcagcgcttcggcggcctcgatcatgcgggtcaggtggaaggctcccgggttgcaggtggtggcgttggtgccgtcggccggaccggtgccgccgccgaccatcgtggtcacgccaccggcgagggcagtgcgaatctgctgcggggagatgaagtggatgtgggtgtcgagtccgcctgcggtgacgatgaggccttcgccggcgagagcttcagtgccggagcccgcttcgagaccgggggtgataccgctcatggtctgcgggctgccggccttgccgatggcgctgattttgccgtctttgatgccgatgtccgccttgtagatgccggtgtagtccacgatgagggcgttggtgatgatggtatccggcgattcaacgtcgagctgcacggagctttggcccatgccgtcgcggaatgatttgcctccaccgaacttcagttcatcaccgtagtgcgtgtagtccttttccacctcgatgatgaggttcgtgtcaccgagtcgcacgcggtctcccgtggtcggcccgaacattcccgcataatccttgcgcgtaataatcttcatgtcaaaagtccttgctgtttttcagctccccttgtcaggggagctggctcgcgaagcgagactgagaggtagtccgctccccgctggcgggagctgtcagcgaagctgactgagggtggcccttagctcagattcccgagaatccaagctcatgcgccttcttaaacgcggcctcccgcacctcagggtcatccaacttcccctcaaccagtgcgctgaagccgtgaatctcacgcgtgccaccaatatcaatcaaccgcactcgatgcgtttcacccggctcgaacctcacagccgtaccagccgcgatatccaaccgcttgccatacgccgccttacggtcgaacttcaggtacttattaacttcaaagaagtggaagtgcgaaccaatctgaatcggtcgatccgcagtgttcaccacgtccagctcgatgtcttcggaaccttcattgagttccaaatcatcgtcagccagcagatattcccccggcaccaacttctcggtggattcgatggggttatgaatagagacgagcttggtgccgtccgggaacgtggcctcgacctccaccacttccagcatctcggccacgccatccatcacatcttcaggcttgagcagcgtgcgaccgtatgccatgagctccgccacagtgcttccctcacgcgcccgctcaacgcattcggcggaaatcaacgcaatcgcctccacatagttgagcttcacgcctctggctttgcggtctttggcaagctgccccgccaagtacagcatcaacttgtcagtctctcgtggtgtaagtctcataacatcctctgttgttgactggagtttttcaggcacaccaatgtgagccctaacatcgcccaataataagagcgttataagaacgggacgtttctcataacgctctatggccataaacgggggtcgaattaatcacactctcatggattccttggcggcttctacttggtcggggccgccttcgccggtggcgatgaaacggccggaggccaggacgtagtagcggtcggcgcgctcgacggcgaattggaccttctgctcaaccaagaccacaccgatacccttgtcttcggccatcatgcgaatggccttctggatttcggcgacgatattgggctggatgccttcggtcggctcatcgagaatcatgagcttggggcgggtgatcagcgcgcgggcaatcgaaagctgctgacgctggccaccggacagcagaccggcacgtcggccagcaaattccttcaagaccgggaacatttccacggcttcgtcgtaacgggccttggcctctgaaccgtagcggtcggcgaccacgtgcaggttttcgtccacggtcatggtgccaaaggactgctggccctgcggcacgaacgccatgcccttgcggatgcgttggttcggtgcagccttggtaatgtccttgccctcgaaactaatcgaaccggacgaaacgggcagcaagcccagaatcgccttcaacagcgtggtcttaccggcaccgttgttgccgacgatgctcacccattcgccggcggccacgtcgaaactgatgtcgttgacgacggtcactttgccgtaaccggtgttcaaatcctttacttcaagcattgccatgattattcactttctacggcgtcgtgcatattgatgttgaggcgcgttgtatcaccctcaatatgcactgaaaaagcgcattccgggatgcgatggttgttgtcagtgcggtccatattgcgcttcttcctcttacctactcccctcagtcaccttcggtgacagctcgtccgcaattaaggacgggccttgcctgcaacctgctggttcgactatcgtctcgccttcggctacaaacagcccactgggctgtttgcttaacgcctcggcctcagggaggggagacagggagttagttttctccgccgcccaggtagatgcggactacttcttcgttgttttggatgtcttcgaccgaaccctcggcaaggatttcgccctggttgagcaccgtgaccgaatcggcgaactgacgcatgaaatccatgtcgtgttccacgatgatgaccgtgcggttcttgctgcatcgcttgagcagctcaccggtctgcacacgctcggtcggagtcatgccggccaccggctcgtcgagcagcagcaggtgcgcgtcctgcacgagcagcataccgatttccagccactgtttcttgccgtgcggcaggatgcctgcgggcttgtttgcatccacagtcagattgcacacgtccatcatgtattcgatgttctgcgaaacgccgcccatcggctggaacagctcacgacccttcttgcggaagccctcggccagctgcagattctccaacacggacagctcttcaaccaccgatgcggtctggaaggtacgcccgacgcccagcttgacgatgtcgttcggcttgcggcccaacagctgctcgccacggaattccgcggaaccagtggccggcaccagtccggtaatcgcgtcgatgatggtcgttttaccagcaccgttcgggccgatcaggaatcgcaaatcgccgtgctgcacagtcaaatcaagattcttgacggccacgaatccatcgaactcaacgtgcagtccacgaacttccagataatcgctccactggccgccgcgatcatccagcaccgcaagctgatcgtgcagcttcgtacgctcttcaacgatttcggccttcatctgggccgcttcgtcgcgcatacgcttggcttcgtcgcgcatctcaatcatttcggcgcgcaactgctccaaatcggcctgcgatgcaggtgcgggagccgatggattcgagctcatgttcttctcctcactcatgcgttcaccgcctttgcagtagcagtaccggtaccggcaacggcaccagcaccagcaccagccgaagctccaaccgaactctttccgagcccgatcttctccttaatccaaggccatacgcccttgaactgtcccaagcccttcggcacaaaggcaatcaccagaatgaagatcaggccttcgatgtacgtccacgcggacggatacgcctcagacagctgcgtttccgcaaagcgcaccagcagcgtgccgaccaccgggccgagcaaagtggcacgtccgccgatcaccacgccggcgagcatcaggatggacggcgtcacgccgatatcggacggcgaaatgatgccgaccactggcacgaacattgcgccaccaatgccggcgaacattgcagccaccgagaaggcgaacaccttgatggaggcggggttatagcccaagaacttcatgcggttctcttggtcgcgcacgccgataatcaggtcgcccataaacgatttgcgaatccagtagacgataagcaccatggccagcgtcaggaacgcgcagatgtagaagatcatctgcttgttggcgttatcagtcaagtcgtaaccaaagaatcccttgaaatcgttgagaccgttggtgccaccggtggttttcgactggccgataagcagcacggcgaacgcggcaaccagcgcctgcgaaagaattgcgaagtaggcgccacgcacgccacggccgaacacagccagaccgaggattgcggcgataatgcccggtaccgcagccacgccaatcacggcgatgaccggattgcggaagagttcccagaatccaggaaccttggtgatgccgtactgggacatgaagtccggcacttggcccacgccaatgtcctcaagcttcatgtggatagccatcacgtacgcgccgagaccaaagaacaggccttggcccagcgtcagcataccgccttggccccaagccaggccgatgccgaccgcgaccatcgcgtagcacaggtatttggacagcaggccgaggttgtacacgctcagcacagtcggagaaaggaagatcagcgccacggcaatgaccacaccgatcaaagccttatatttcgtggcgtattcgctcaaagtcatcttcattgtcgtttccttacccttctgaagcactcacgcgaggttcctggagcggatggagaccaagccctgcggcctgaactgcaggaacaccaccacaatcaggaacacggcaacctgaccaatcgaggcagaggtcggcagttcgatggacgactggcacaagcccagcacgaacgaggcgataaccgcgcccttgagctggccaacgccgccggccacaacaaccaggaaggcctgcacgatgaaggtcgtaccgaagttgaagctaatcgagttcagcaggctcagcgccacgccagcgataccggcgatgccggagcccaggaagaacgtcacatggtcgaccatcttggtggagatgccggaaacctcagcgaggtcgcggttctcggaagtggcgcgaatctggcgacccagcggcgtgagcttcaggatcgcgtacagcgcagccacgcagataatcgacagaataaagatgaacagtcggcctgcagagaagctgtagccaaagatggtcaccggattggtcagcgcttcaggagccgaagcgtagaccggagtggcaccgaaaatatcgcgtgcgagctgctgcaataccagcgatacaccgaaggtaaccagcagcgtatcaagcggacgattgcgcatacgctccagcagcaacacgtccagcagtaaaccaagcaaaccggctactacgaaaccgaccaccagcgccacggccagggacactgttttattgccgatgaccatgctcatgacgtatgcggtgtatgcgccggccatcatgaattcgccgtgggcgttgttgataacgcccatctggccgaaggtcaacgacaacccgagggctgcgagcagcagaatcgatccgttggacagacctgccacaatttgtggaaataacatacccatgttgttgtgtcctcttctctcagttgctctcgacgctggcgctcaggctcttggcccagctgtaggtcttcaggtacgggtccggcttgatgggaccgtccgacttccagacggtgtggatgagcttgtctgagccgatcttgccgatgtatgaggtcttgtagatgtggtggttttcgccgtccaccttgaccttgccttccggtgcattgaaggtgacaccgtctgctgcagccttgaccttgtccacatcgaacgacttggccttctcgaccatgcccttccacaggtacacagatgtgtacgccgattccatcgggtcggaggtggggcgattggctccgtagcgcgccttgaagttcttcacgaacgtcttgtttcgcgcattgttcagcgtctggtagtagttccaagcagtgagctggtccttgacgttgtcaacgccgatagcggaaacctcttcctcggcgatagacatggaaatcaccggcgtggtggcggctttcaggccggaagccttgtattccttgaagaatgcgacgttggaatcaccgttcagcgtgttcaccaccgcatccgcgccggagaacttgagcttgttgacgatggtggtgaagtcggtggagcccattggggtatattcctcgccgaccacttccatgccattgccctcggcgtacgccttgaccacgcgatttgcggtctgcgggaacacataatcggagccaaccaagaacagcttcttgtagccttgctccttaaggtaatcaagcgcaggcacaatctgctggttcggtgcagcacccgagtagaagatgttcgggctggcttccatgccctcgtattgcagcgggtagaacagcagcgcgttatccgcctcgaacacaggcagcatggccttacgcgaagaggacgtccagccgccgaacaccgcggccacgcattccttttcgatgagggtcttggctttttcggcgaacacagccggctcggacttgccgtcctgctgcactaccttgagctgcttgcccagcacgccgccctttgcgttaatctcatcaacggccatgtgcagcgaatcactcaccgtctgttcggaaatggccatcgtgccagacagcgaattcacgaaaccgattttgatggtgttgcctgaggtgtccacacatgatgaggtgtcgcttgccgcagtcgcgttgttctcttgggcctctttctcggccacggtgcgaccccagccacaaccgctggtggcaagcactgcggcaacaatgcacaccgcagcacccatcttcagtctttgcaatcgagtcatatgactcttcctccccacatacgactacattccgcgaacgttgcccgcccgcggaatgtctacgctgattgccgtaccgtgccctgatgcctgatatcgtgctgaaccacttgccgtatatcgacggctggcttccggccgactgcactatacgatggcagtgcctgcgtgaatttccgttgcctgaatatttcatatgcgtctcatacataacgctcacgttacaaaatcaacggtgttacgcggcccgccgtcgaacgctgtttacattggtgtgcgatacgcgcgcgactgccgcccaagtgacttccccgcgaactacgggtaggctggggagtatggaacttcacgttttgaatcatccgctggtcgagcacaagctcaccgtgctgcgcgacaagaacactccttcctccactttccgcgagctcgtctcggagcttgtgatgctcgaggcctatgaggccacccgcaacctgtccgtagttgccgcaccaatcgaaacaccggtcgctccgatgaccggtaagaagctggccaaaccgcgtccgatcattgtgccggtgctgcgtgcaggtctgggtatgctcgatggcatgacccgtcttatgccgaccgccgaagtcggcttccttggtatgaagcgcgacgaggaacaccccactcagcaggtcacctatgcgaaccgtctaccggaggacctgtccggtcgtcagtgcttcctgatcgacccgatgctcgccaccggtggcacgctggttgctgccacgcactatctggccgagcgcggtgccaaggacgtgaccgcgatcaacattatcgcggcgcctgaaggcatcaagttcgtggaagagcacatcgatccgtccatcgacttcaaggtcgtagtgtgcgcggtcgacgagaagctcaacgacaagtgctacatcgtgccggggttgggcgatgccggcgaccgtctctatggcgtaattgactgattttcctggctcccctcagagaggggagccaatgtgatgggctttttatgcaaatcgacattattgcgccgggacgcgtgaaggaacgatatcttcgcgacgccatcgacgagtattccaagcgactttcgcgctactgcaggctcaacatcattgaagtggcagatgagaaaacgcctgaccacgcctccgaaggcgttgaccgacagatcaaggccaaagaaggcgaacgcatcgccaagcatctgaaggacggcgcgtttgttattgcccttgccatcaatggcaagcagctgtccagcgaagaattggccgccaaaatcaacgaccttggattgcgtggcaccagccatattcagctggtcatcggcggctcaatcggccttgacgacgcgattctgcgtcgtgctgattttctgctgagtttctcgaagatgacgttcccgcatcagctcatgcgcgtgattctgctggagcagatctatcgcgcttataagatcaacgctggcgagccatatcacaagtaaaacgccatacctcatggggcgggaaatcccccatggggcggtaattgccccatggggcggtaaaaccctcatggggcggtatgccaaaatggcttaattccgcggtttcacatattcttcaaaccgccccatgggcaagttaccgcccgatgagcctgtaaccgccccatgagcacatcaataacgccctcaacctcacactgcgtcggggacgaacgcttcgaagatgtggcggtcgaagtagggcgcgcactgggcgagttcatcgctgctgcgcacggtccatgaaaccggcatcgcacccatcgaacgagcgagtttgacctgcggcgaagcgccaccggtccagtcataggccacgaaatcaggacgagacagccagtcgaacgccagtaagccggcggcccattcagccgcaccattcttgcttagcttcgccggccagctcagctgaccgcggcacacctcagggtgatgctccttataccaattcaccgcgcccggatggaaggattcgatcacgtacgggccgtcatacgcctcaagcaaggcgtggcccttttccatgagctcttcgctacgctcatcccaagccttgttgtcgctgaacttgtattccacaatcagcggagcctggccggccaccacgtccagcacatcggagaacagcggcacatgctggtagtaccccttcggcgcggcggacggcgtgaccaccagcggcgggttcgcgtcggcacccggcaacggttcggccttcaagtcaccggacttgccgttcgggaacagcggaatacgggtcagttcgtcgtacgtcagatcttcgatgcggcgcggatcgccggccacgcgcagcaaatcggcgtcatggaccacgaccacttgaccgtcgagcgtaagctgcacgtcgagttcgatgccatagccagcctcgcaggcggcggcgaatgcggccagcgagttttcaggagcgatcggaccggtcatatccgcactgccgtagccggccttgacagccatgcgacgggcaagcgacacataatcatcgttttcggcgatggatcgctcagtggtatcggcttgggcgctgaccgaattatccccaccataatcagcgatatcggtatagccgaccaaaccagaacccgcatcgtgcaagccacgatgggcataccataccttcggaatggagggcacgaaattacgacgcttgtcattgaacgtgcgcggggccacggcccacacggcagcaccggcggcggccacgcctgccagcgccacgtttctccagagcttcgacgacattggaatccttcctgttgggctgtctctagcctaacgcttctgccagccattgtggagtggttggatcgtccggtttcagcgcgcggtccaggtggttggcacgcagcggctcccagctgaaatctgccagcagatcggcgggtttgcaagggattggagtgggttgcagacgcagcaaccaggcgcagtatccgatgatttgctcgggggttacgttgcgggcgcgcaaggctcccatatccagcgaacgttcgcgcttggctaaacgccgaccggccgcattgtcgatgagcggcaggtgcgcatactcggggtgctcggcgagaggcttttccgtgttgccgcattccggctcaaagccgccagccaacagacactggcgaatccacatttgcagcgcggtggagcgcagcagatcacggccgcgcacgatatcatcaacatccatatcgaggtcatccacgaccacgaccagttgatagccgaacagtccatcggctcggcgaatcacggaatcgcctacctcgcgggccaaatcgtagtgctgtggactatagacacggtcgttaaagcatgcgacaccatcaacgattccggcatcgccctgctgttccggcggcacggctcccgacagcgcagcggaatcgtcaggcactgtacgttgcttttctcccgctgccggtttcggcatggcgatacggatggaatgctggtcgccgcgagacagacgggcacggacctcgtcgggatggtcgtgcagcaggcggcggcacgtgccggggtacaccatgaagccgtcgccctcgttgggggccgaggcggcgcgaatgtcggcgcgcgaacagaagcagggatacagcacgccctgcgagcgcaggcattccagcgcatactcgtatcgttcggcgcgctgggactggaacatcggttcgccatcccagtcgagcccgagccaatgcaggtcgtccatcatgagccggtcggcgccggcgaccacgcggggcccgtccacgtcttcgatgcgcatcatcatgcgttcgccacgcgaacgggccgaaagccatgcacccaacatggcgtacacgttgccgatatgcatgcgccccgacggcgtcggcgcgaatcgtccggtcacc

SEQ ID NO: 1364 - DNA, 11128 bp, Unknown
  R157_18m  MAG No. k141_36547
atggcaaactccttcgttcgaatcaaatgggacaagacgaacataacccggaacgttaagccgggaaaccacatgggacacggccagccaccaagaccccgaaccgttccccggcttaacaacaaacccggcttaatcggaatggatgattggtttctctccatccttgagcgtggagcaggcgtcggcgagcatgccgttggccaatgccgagtccgggctggtgcggcgaccggcatgccgtcatggcagtcgatcacgggcggcaggtaggcctttcccgcggggatggagaactccgtgaggtccatggcccacggcatgttcggccgctcggcgtggaagtcgcggttcgccaggttcttcggcgccttggtcagctcgcccttgtacgagctgtaccgcttcgcgctcttgaacaggggcactaggccgtgcctggtcatgagcctcatgattggattggcaacggtgtgttggacagttccttagaggacgagcccttgttcggtgaattccttcgggctccggtatccgggggtggagtggagccgctggttgtcggaccgccacacgtagtcgtcggggtcgcgccccggctgctcgatcgtggcgtagctgttccggtacacgagctccttcttcaacagcctgttcgtcgactcgatcacggcgttgtcataggggttacccttgcgtgacagcgatcttttgatgccgaacacgtcgagcagctcgtcgatcctcgtgttgtcgaactcgcttccacggtccgtgtggaacacctggacgtccgtcagcgggaagtcgagcgtggcgaacgcgcccaataccaggctcgcgtcccgggtccgcccgacggaatggcgggcgatgcccctgttcgccaggccggccagcaggcacacgtacgcccacccgttgccgaccctcacgtaggtaaggtcgctcgccaggtgcgtgtgcggggcgtagccgtcgaactcgcggtccaacaggttcgcgagcctggcctcgtcggcccgcgtcttgtgcggttcggaccgtctgcgcgcgtacgcgctcgtcatgccctgttcgcgcatgatgttgccgatgcgtctcctggacgcggtgacgcccctcctttccagagcggccttgatcttcctggcgccgtagcgttcgaggccgtcgcgccggaccgcgcgcacgtcgccggcgatcggatccgcacgctccgtctcgggatgcccggtcatccagtagtaggtggagcggggaacgccccgcatcccgcatcgcgccgatatcgggcagcgggcggcgttggcccgtatcacgcctgccttcgtgcgaataccggcgccgcttgttctgaaacgcccacccccatctccaaccgccggccacgcctccccggcccggccggctcgtcctgctcgggcgtgcggttgtccgcggcccgggtggagccgctgctgcggatgctctggacccagcgctgcagggtcgatcgcgcgatgtcgtactcggccctgatctcccgggatggcttgccgctcccattacgactgcacgatctgccgtttgaacgcctcatcgtagtggcggggatgcttcgggccggccatcgtcggcctccaacctcatgtcaatcgtccctcatcggaccgtctaatacattatagccaatccacagcgagatcgaatgcggcgcacgcgaccttcccgaactcgagcaacgggccatccaatggatacactcgacaaccaacccaaaacaacacacccaaacgcttgacaatgtataggagcatcaaaacacactggtccgcgtaccacgacagcaacgcgcccttgccgggatggccgagctcgcggatcacgtcggcggcgcagcgttcgtatttgatgtacaggtccacggccctgtcgcgctgctccctgccgtacgtcgccatgagggggttctcctcccggtcagggagtccaagaaaacgtcaccacctcgttgcattgtttttatttgacgtactcacacttcaatgtgtcgggtcgggaattattagctcgataagctgccgccattcctctgcgaagtcgagtgcgcagccgctgctgagccagcgcagttgcaacccgtccatggctcccagcacctgaatcgcagtgcgttccggattggacacatggtctcgtgcagcggcgacggcatattctttcaagacgttcttctcgcgaagctgaaagtactcgtgtgcagggtggtcttcacttaatgcttcaccctgtaatagcacataaagactcactaactgacgacgattggcgttggtttctgctgtagccgtggaaatggttctgagaccataatcgcagtgataagtaatgccgtcattgatatcaccagaaacgccttctacccccaaatatttggcaatggcaatctgattgacgtgatcggcgtactttaacgcttcgaccataagatcttctttattcttgaagtagtacagcaagccagcttcggtaatgccttgggcttgggccacgtcgcgaatagtgaatccccagaagccgaattgggagataaacgtcatcgtggtttcgaggatgctttttcgacgattctctgcgctcatttttttgggggcgtctgttccggtacgacgacgcatgacgttcctttctttggacagcacatagaggcgatattagggtggcgtggataagccgttattcttcgatatgttacgtcctagtaggaacttaacgatatggcaggaacgcgcattcgagcgaaaacatcctctgagattacatgagcgtctgggcgggactccgctcggacgctcatggcctgatttcggaagaggtttgtggatcaggttttgagggggcgtgattacttgccaaagccggcggtcaggcctgcgaccatttgacggcgaccgaagatatatgccgtcagaatgggtagtacgctgatgacgactgcagcaaggatgcccggcacgtcaacggtgaactggccctggaaaagccataggctcagcgggatgacgcggttggatgcgctttgggtaaggatgagcgggaaaaggaatccgttccacacgttcagtgcgtcatagattgccacggtgataatggcaggcttcaccatcgggatggcgagtcgaaccatagtggtgaactcgctggcaccatcgacagccatggcttcaaacagggacagtggcacatcgcgtaggaaattggtcatgatcagtacgctgattggaatagcgaatgccgccgaaggtagaatcagtgcccataaggtgtcatagagcccaatctgaataatgatgtagtacacgggaataatcgtggcctgcatcgggatggccaagccggtgatgatgactttgtatatgccgcgcgaccatgcgtcattgcgacgaacaatcatgtaggagaccatgaacgagacgatcaggataataagcacggtcatgacggtaacgaataccgaatttcccacatacaacaggaaatcgttctcaaacacgcgcttataagcatcaaaagtggggtttgaggggagcgagagcggattctcagtgaaaatatcattctgttgcctgaccgaagtaatcagaatgtaatacaccggtacgatgacggtggcgagccatacccagccaaggaagccgccgagaatgttatattgcttgttcttgatacgaatcatggtcgaatcacacgccttccatctgactttccattttgtctgatcctgagagcttgttcagtagcaacgagatgataatgcccatcgcgaggatgatgacaccgaccacactggctccgcccatgtcgtagcttttgaagcccttcaaatacatgtcgagcggcagaatacgagtggcgttgcctggtcctccctgcgtcatgacgtagaccagatcgaagtaggtcagagaaccaacgatcatcaacgtggaatcagtagcgaatgtgtacttgatttgcggcagcgtaatggaaaagaactggcgcatagggcctgcgccgtcgatcatcgcggcctcatacaggttttgcggaatctggcggactgcgccttgatacagcagagagtgcaacggaataaagcaccaggagaccaccatgataagtacccacagcgcggtatttgggtcgcccaaccagttatgggccagccagtcaacaccgaatgccttgccgatgccgaattgtgggtccaacaagttcttaaaggcaatggccactgctgtggagctgaagagcaggggaatgaagtagaagacggacaagaatgcacgatacttctgtttccccgccataaaaacgccaaggaggatgcagatgggggtttgtacggcccagctgacaatcgtcaggataatcgtcagtcgaagaccgttgaggaccaaggggtcggtaagcattctggtccagttgccgatactgttgaaggtaactgcgccgagaccatcccagttcatgaaggacagtaccaccacaccgatcagcggaataattgcaaatattccgaacagaaccagtgcgggagccgcataccagactgacggtcctttatgcaatacggttggcttattgttagctggtttcgaaaccttggaactcatgacatcctccttatcgtcctatctattgcttcattgcgtgaatcacttgagcgtagagttcatggcatcgacgaattgttccggggtcatggtcttgaggaacacctgctcgaggttgttcagcacggcctgtccttggtcgctcggaagagcaacatcccaagaaagctggtagttcggtgcattcttgacggaatcgtagatccaggtgtaatagccggaaccatcgtcagctgcggcaatcttgtcttcaatgcccttgaccggaggaacttgtccctgttccaacatggcatccaccatggtgtcagagtaattcttttccttgatgaagttgacgaaggtatccttctgcttatctgtcgctttggaagaaagctgccagtagcttgacagatttccggtcagatcgcccatatcgcccttgcctccatcgacggaggggaacggtgcgaaaccaaggtcgtctgcggtgaagctgtcattgatggagatgaggtcggcgtacacccaagagcccatcaattccatacctgcttcgccggtcgcaatcatcgcggtatctttgcggtcgtcagcagtcaacgactggtagttgttgccgaaggcactggcatcgatgagatcttgaatcatggacatcgcctgggttacggctggatcgctccaagcatctttattgccgtcgagtacaccttggaagacttcaggcccaccgatgcggtccacaagatatgcggcccacatcagatacggccacttgctaccaccggctagggcaatcggcgttttgccggcagcctttagcttggccactgcatcgagtaggtcgtcccaagtctggggagcttcgtcgactccagcatccttgagcacttgcttgttgtagaagaaaagcaccggctgcgcctgaccagtgggcactgcatacagtttgccgtctcggtagccttcggcggaaacggaatcgaataccttgctatcaatagtgtccttaagatcgctagttaggtcggtaacggccttggaactgacatagtcggtgagaggagagccaccccagctggggaagaaggtcggtgcattgcctgagccgacggcggtacgaatcttctccttgtaagcatcattggcgaagctttcctcactgatctgagcatcggggttagctttgttccattccttgaatgcatttttgatcggatcccatggggaatcggtcattgcccaagtggtgacattggcgcccgtggcctgagtgttgccggtctggccaggcttattgccgcatgcgggaagcgataccaacatcgaagtggcggccagtgctgcaatggcttttgtcattgacttcataaggatctcctccttgagtccatttcctttttgcttaaggtgcatcttccgtcattggaattgtgtgtctccctttttcggaagatggttatactatatacttagtagttgctaagtgcaagtcgcttggtgacatactatgccgaatatcaatggtgagtgctgaaaggaaccaatatgacggacgccgcaaaaatcaaggaaatccacgtcgattgcaatgccttgcaaggaggagatggcgctcgcgacacgccggtgaataccatccaagcagcagccgatattgcccagccgggagatgtcgtcatcgtgcatgggggtgtatatcgcgagaacgtgaatcccaagcgtggtggatacgatgaatattcacgtatcacttacacggttgctgaaggtgagcatgccatcatcaaagggtcggagatactgggtaattgggatctggtcgacggcaccatatggcatgccagcgtagccaatgacgtttttcatggctgcaatccttatgccttgcctctcgaaggtgattggttggaacgtccgtccgattggaaactcagtttgggcaatgtgtatctcaacggcaaagccctttatgaagctcccagcgtggaagctgtgaaggcggcggagcggcgcgataccggattcggccccgattgggtcaatatcactgaaccggtggcgcgcccggaggagaccatttatcagtggcatgctgaagtaggggattgcactaccgaattctgggttaacttccatgactatgatccgaatgcggaattggtggagattaatgcacgtcgcacatgtttcttccctgatcgaactgggctgaattatattacggtccgtggtttcgaaatggcgcaggccgcttgtccttgggcccctccgactggtgatcagattggtctgattggcccgcactgggcaaaaggctggatcatcgaaaacaacgatatccacgatgctcgatgcagtgccattagcttgggaaaggaagactccactggagataacgaagcaactcgatgggggcgcaagccagggtatcagacccaattggaaactgtgttcagggcgcggcacaacggatgggacatgggaacgattgggtcgcatatagtacgcaacaacactttgcacgattgcgggcaaaatggtgtggtcggtcatttgggatgcgttaattcgattatcgagaacaataccatctacaacatcggtgagcgccatgaattcttcggtcatgaaatcgccggtgtcaaactgcacgctgccattgacacgcagattcgcaacaatcatttccatgactgctcattgggcatttggttggattgggaggctcaaggcacacgcgtgtcttcgaatgtattccattccaatattcgtgatttgatgattgaagtgacctccggcccgtgcctcgtggacaacaatgtgttcgggtctgattacaacttcgacaatgtggcccaaggcaccgctttggtccataacctattctgtggatcgacgcaacgtcgtgccacgctcaatcggtttacgccctatcatctgcctcactccactgaggtcgctggttatgcctgcgtatacagcggtgacgatcgcatctaccagaacatttttgtgggtggcgatgcctatctgccgggtgtcacctctcgcggtactgagacttatgatggtgcacctactagtgaaaacgaatacatgaagcgcgtacatgcgcagggcattggcgatcttgagctgttcgaacaggtgccgcaaccggtgtatgtggacggtaacgtataccttaacggtgcgcaatcttttgatcgcgaagaacatcgattctctgacaatggtgatgcccatattgtcgtgactgaagacgcggatggttctgtgtggctggaaggagagattccttctggagtattcgaggttgatacctcatatatcgatacggcgaaactcggtgttccgcgtattgtctggcaacattatgagaaccatgacggtacgccgattgttatcaatcgcgatgtgaccggtatcgcacgaggtgcgcatcccgtgcctgggccggttgagtctctgaagcccggttcgaatcgcattcgcctcgcctgacgaatgtgctgtgtataggctggttgtctgctgtgatggcagaacggatgaccagcctatggaaaacatgataaggggttcaccatgaccacatggattgccaccactcaagacaataggctcgtcgatcgttcgggcgaggtaactgccactggcgcaaccaccgcacctgatttgcaactcgacggcaacgaataccaggcgctgcgcggtttcggcggctgcttcaacgaactcggctggctgccgttgcagaccgtcaccgaggcggaacgcgaccagatcatcaaggagcttttcgaccccgaagagatgaacttcacgttcaaccgtgctcccgtgggtgccaacgacttcgccgaccactggtacagctatgacgaggtcgacggtgactacgacatggagcacttctccgtggaacgcgacgaggagacgctcatcccgtacatccaccgcgcccaggaatggcagccggacatgaagctgttctccagcccgtggtccccgcccacctggatgaagcgcccgaaggcctacaactacggccggctcgtgcagaccccggaaaacctcaaggcctacgccaagtatctggcccgttacgtgcgggagtacgccaagcacggcatcgaggtcacccagctgcacgtgcagaacgaggtgttcgccgaccagaagttcccgagcgccctgtgggacgccgaagccctgaaagtgttcatccgcgactatctgggccccgaattcgaagccgccgggctcgataccgacatctggctcggcacgctcaacggcccggaagacatggcgtggaccggtggcggctacggcatgaggctcaacaactacaaccgtttcgtggacaacatcctcttcgacgacggtgcccgcaagtacatcaagggcatcgcctaccagtgggcgggccagaactgcatcgcccgcacgcacgaatcctggccggaaatcgaactcatccagtccgaatccgaatgcggcgacggccagaacacgtgggaatacgcggaatacgtgttccacctcatcaaccactacctcaagaacggcgcgaccgcctacacctactggaacatgattctcgacgaccgggattccacgtggggctggtggcagaactcgctgttcaccattaccgccgacacgcatgaggtgcgccgcaaccccgaatactacgtgatgcgccacttctcccagtacgtgcgccccggcgctaaagtgctcggcaccaccggccacttcaactccatggccatcgcgttccgcaacccggacggcacgattgccgtcgtggtccagaacgcgctcgaaaccgcaatgccgttcgagttcgccgacccggctgacgcctcccgcggcatcaaagccaccctcgccccgcgctccttcaacaccttcgtgatcgactagcgcccacgcccgtatcggtgcgcaggcagggcacaacgccctgtctgcgcaccgctttcgtatgttcggccgtgctggagtgtgtgggccggcgtgcgggagggcgggctgcggatagactggcgggtatgtccacacaagccacaacccggcccaagcgaatccgcaagttgccggaagagcgtcggcaggaaatcctcgatgccgccgtacgcctcatctccgaacgcgggtacaacggcacctccatacaggacgtggccgatgcggtgggtgtcaccaagcagggcgtgctgcggtacttccccagcaaggacaatctgctcgccgcggtgtaccacgagaactacaacatgtccggcgacatcgaggacttcatgactaccggtctgcccggctccacacccggcgacctgcggctgcccgcctacctgcggttcctagtgtggcacaattccaaacgccccatgctggtgcagctgttctccatcctgcaggtcgaatcgttcaaccccgaccacccgctgcatgacgaattcgcgggccgtcgggattcgatatggcactactattcgatacacgactggaacctgcctcccgaattcgactcgttcgaggagatccgccccacgttgcgccgcgccctggagatcatggacggggtgcagttgcgctggttgcgggtgccggccatcgatctcaacgacgaatgggctgatctggagcccatgatcttcccctcgccgctctgggacgggtaccgctgagctttcttgcgataggtgggcgttctggtgcttgcaggatatctaacagaaattagattgtcagaaaaccgtgtattcgcagcgtgtttcgtcattaggcatgctaaactaccaatcggtaactaaagaaccgttcgatttcaccgaagaaagcgacaccgcatgaccgacaacaccgcaacctccgcaaacgccgaaaccatgccgtacaagaaccccgccctgcccgccgaggagcgcatcgccgacctggtcggccgcatgaccctcgaagagaaggtcggccagatgatgcagctcgacgcacgcagcggcgacctcgaagacctcatcgtcaacaagcacgtcggctccatcctgcacaccagcccggccgacctgccgcgcgcggtgaagatggtcaacgagcagacccgcctgaacatcccgctggtcatcggcgacgactgcatccacggctattccttctggcccggcgccacgatcttcccctcccagttcggcatggccgtcagctgggacgccgccaaagtagaagccgctggccgcgccaccgccgaagaggtctcctgcaccggcgtgcactggacgttctccccggtgctgtgcatcgcccgcgacacccgttggggccgcgtggacgagacctttggcgaggacccgatgctgatcggcgaactcgcctccgccatggtcaagggctatcaaggcggcgccaaggccggcgaggccctgccgaagaacgcgatcctggcctgcgccaagcatttcgccggttactccgagacccagggcggc

SEQ ID NO: 1365 - DNA, 8498 bp, Unknown
  R157_18m  MAG No. k141_37359
ccacgtgctcggccaggccatccgcatccgctccccatacgtggacgcactgtccgtcactcaggtgctggcgctcaagtcgctgcgcaagaaggtggacaaggaagagctctcgcaaagccagcaggcaggattcatctacctcatcctgtgcactgtctccggcgtcgccgcgggcctgcagaacacaggctgatctacacaccagcgcatatggggaagccccgctcacatcgagcagagcttccccgtttcgtgtacatctttcaccatcttgcaataattcttacatgtaaacagagagttcttacatgaaagaattattgaaaggtgatgaaagaacttactttcacgcgcgccaatcatcccaacacatatcgggatgacggcccattcccctcgcggcgcaacttgcccgcatcctctagcttcttcaacaaccggtatgcactgatatagctcaggccaaacaaatccatgacatccgccgtagtgacgacaccatcatttttttcggcgaactccagaacaaggccactgcgccgggtggcatcgatgtcacgctggcgcacgtaagacgccagcccctctgaacgtttgtacactcgggcactcagcatatacgaacgagagctcccgctaccgaccccctctaccaaaccagcttccaccagattctcaacagcggacacgatgcgtcgatgctccaaatgagaaaaatcgcacaattggaccacggtaagcctacgatgctcacgcagcagcgagagcacaatcagtgaccagaccggcaatggagccccacgtcgacgttcctcgtcgccaatcatggttacgaatgcctcgtcaggtaccacgcggcgcaagaacaagataacttcctcagcactggactgtgaataatccgggaaagaaccacccgccgcaatcgacccggcatagatggtatccacgcctcgtccggtgcgttcaacatatccggcagctttcagaatcagggcaagctgcggattgcgggaacgcggttgtgcagtaagcaggttatcttcggaaacaccctctatgaatcctccgggattagctatggtcaacccatcatcatcaaccaggaatctcaccgaacccattcgtgcataatcgcgatggcaaaaagcgttaatcattgcctcacggaatgcccctcgatcgaagtctggcagatcgacacgaatcaagccgctcatgacttcgtggctgggattccacggctccatcagctcgcctacacgatcaaacatatccaccaagggcaacacgaacggatccatattgacctttggagacatgcctttcatcacttgaaaaacagccgatgcggctggaaccgatcgatgaatagcatcaaccgaaccaatggtgagcagaccagcaacagatggctgcaatccatacgggccatcaacaaccagctcaagtgcccgatcgaaatcctcatcagtaaaagacaacaacgagttttgcgcattggcactgcgaatatggcttctcaacttgttccgtgagtctggattcaaatcgtccaaccgagcctctggtgcaggttgcgcgctgaaatcgtagaaccgttgttgagataaacggctaatgaattgggaaacaaacagcggaacgacctcaggcgagccgtctgctttcagccggcgctgcaatgtcttcccctgactggtagatacgatttgctgactgttatccacctcaatactgactattggcacctcgttctcatacaagagcgtcacgcgagcaggaagctgcggaacagtcttattgaaaattagtaccgcaagtccattgatattgcgatgctcgtcacatacgccggtcacagtgccatcgtcttcaataccgagatacagtgtgccgccttcggtattggctagagccactacggtgtcaacaatttcatcatgcgattgaggacgcttctgctcgctcttgaactcaaccgtcaaactttctttagtcggcaacatgagcatcccctttcaccatcttgcaataattcttacatgttaacagagagttcttacatgtaagaattattgcaagatggtgaaaggggtaaagagcaatccatcctgtcatctccagcaacttaaatccgatcatcgctgctttcggcatatctgatatcagccgctggtgccagtccaatcacccaattgaagctcaacacggccaaagactctacgccgcagtggattcgcgctcgatgagcttatagcccacattcacggtctgcgggaagaactcgtcgtccaggttctcgatacgccgcataagcaaggtcagcgcggtatccgccatgcccttgaaatcggtggccacggtggtcaaagtcggcacgctgtacatgctctggctcaggccgtcgaagccgataacgcgcacatcgcccggcacacttacgccatcgtccgccagaccacgcagaataccgagcgcaataccgtcgttcaggcagtacagaccgtcgtacttgcacttgcctttcttggccaagccgcgcccggcctcgataccgccgtcaatcgaccacgaggatttgatgaaatcacggcgctcgtcaaacggcagtccggccgcgagaatcgtctccttggcggcccgcatacgaatatcacgcgagccgggaatgatgttgggattgttgggatcgtgattgtcgccgacgatgccgatgcgcgcacagccacgcgcgataaggtgttcgattgccgcccgtgagccggcgtcgctcggcgcgttcacggtgtcgatgggcaggctggtgtcgtagttttccagcatgacggccgggtgccgcttcaggatatcgaccgcacgtggcgcatcgatggcgatgatgccgtccgaaaacgtgtacgacagatcgttgtcgtcggtaagataccgggacagttcgatgagcatgtgcgagtcgcgcttgtgcacttcctcagccacacacatggccagatgggagaaatagtcgccctcgaggcccgaggtaaggaaggtgatggtatcggaccgcccagaacgcagggaccggccagacaggttgattttgtagccgagtttgcgggcggcgtcacacacgcgttgcgtggtttcgggcttgacgtaatccttgcctcgcagggccgcggaggcggtggtggcggtcactccggccagttcgccgacatcctttaaggtcaccatcgttaccatctccgcatatcacgaaccttatcgataagaatccatagtaccgcccacatctcagccgaggatgagaccctcggtcgaggccctgcccggcgactcgaacgccgcggtcaccgtggtgagcaccgacgctgcaaacgaaaacatgtcaaaccaagaaatggacatgacggagtcattgttttccgagagggatatgccgcgtccacgggcagacgtcacgtatcaatcacgccgataccgtcatataactgttttcgatgtgagaaagctcatagcttccgaccacagaaatcagccatggcaaccccgtaacagcgttatagttctgtttgtcggcgtcgacaagagccagcagcgccgatgaaatgcacaccaaggatgtttagcgaattgttcgcagttcgcacgattcgatttgattcgattcgtgcagcccggatggttcacgggggcatgccgtcgtgatgtgcgtggatatgggcgatgcgactctcgttcgggtcggcaggtcatcgtacaccagttacgaaaggatccgtccatatatggcaaggtttaccgagaatcgttggaccagcgcgattattcccgcactgctgattcatatcccaatcggtaccgtctattgctggagcgtgttcaagcagcttatcgctgaccgtctccacgccagccccgcctccgtggaatggggcttctcactcgccatcttcttcctcggcatgtccgccgcgtttgccgggccaatggtggagaaaaacatcaagaaatccgcactcgtctccatggtctgcttcgtggtcggcttcgccggcacgggcgtgagcatcgccctgaacttcctgccgggcgtgttcatctgttatggcgcgatcatgggcatcggcctgggcgtcggttatctgactccggtcaagaacctgatgctttggttcgccgacaacaagggcctcgccaccggcatcgccgtcgccggcttcggcctggccaaggccattgccagcccactgatggaatatctcatcggcacggttggcctggtcagcatgttcttcatcctcgccgcggtctacgcggtgatgatgttcgtcggcttcctgctcatcaagcgtccggccggctgggtgtacgatcccgcgacctcacacgtcagccgcaagacaatcctcaagaagcccgtgttctggggcatctggatagccttctatatcaacatcacctgcggcctggccctcatcagccaagagaaggatatcctgcacgatgtgctcagggccttcccgcagtatgccaacctgagccccgccaagtttgccgccgccatctccggcatcatcggactggtgctcgccgtggactccgtgttcaacacggctggccgcgtgggcttctccacactctccgaccacctgaagcgccgcgagaccgtctatcaggtaatcttcatcatgtcgattgccgtgtgcttgctgcagatcttcaccaacagcatcgacaacgctctgctgtgggccgtgctggccatgctgttcctcgtcaacgcgggctatggtggcggtttctcgacgctgcccgtgctgcttgatcagcacttcggcaccaaaaccgtctccaccacgcacggtctgacgctgagcgcctgggcgttcgccggtctgtccggcaaccagttggcctcgttcgtagttgcccacgcgcctgatcaggcccaccgctacgccgcactcatcccggtaatcaccggcctgttcgttgtggccctgatcagcatcagcctggtcaagtacctcggcgacagaaacgccacgaaggccgtcgaagaccgaggctgagctgccgcaaaacaacgattctgccggagtcgggcgcatcgatcgcatcaatcgatgtacgtcacgattttggcagaatcgttgttgttgctgttgagtacctgaggtcgtgcggcttacgcgccgaccagttcgagcatttgggggatgctctttttgccgaattcgacttgctgggtgccgtcggcgtgggtgatgacgatgcagggcacgctcatcgcgccgtactggtccttgagttcggggaagtgcgagacgtcgtaggcttcggcgcgcacggccgggctcagggaggcaatgcgctgggaagcaagcacggtttccgggcacatcgtgcaggtgagcgagacgaggatcatgatgttcagcgggtccgtgatggacttcgcgcgttcgaccaggtcatcgcccagcggctggccgggaccggccgcgttgtacaggccaagcacgaacgagttgaactcgtggccggaaggtacgccgtggaaggccagaccggtgaagaccagtgaaccattgccgtccttgccggccttgccgtcgccctcagccggcacgcagatgcgcacagttgggcgggcgagcggcaggacgccggcgacgtcgaacgtggcacggccggaatcgtccaacgaaccataagtgggcagttcggtgccgtccggcaaggtgacggccaatggctcgccaaccaccaaagaagtaggcacagaagcaccatccaccgccgtgatcagccctgcggcatcaacggcaaccgagttcagcttgccattcgacaacgcgaccatctcgccgatgaagccctgcaattccgccgaaagcggagtgccgtccagctcgagagcgagcgtgaccggtcgggtcatgcgtccgaagaccacgccaagctgctgcttgacggcggcggagaacagttcgccgggcttcttggcggcgctggctgcggctgcggcatcggcgctgcgtttggcgggagccggggcgggcgtcgtgccagcggccgaggcggcggaggcggccttggcctcggactcctcataagcggaagcagtgggacgcggcggcaccaagccggttttctcgctcatctgcttggcgtaacgctccagttccacggcggcaatcgcaccgtcggcggtggcggtgaccacttggcgcaggttcttgacgcgcagatcgccggccgcgtacacgcccggcaccgaggttctgaggtagtcgtgcgtgaccacgtaaccgtggtcgtcgagctccaccacgccgcgcaccaaatcggtggcgggcacatagccggcgaacacgaagacgccgaaggtgccggcgtcggcgggcttccacgtttcggtctggccggtggcaaggttcaggatcgaggcttctcgcaggcctccttggccggcggtgacgcccttcagctcgacctgataacgcacgtcgatcttcgggttgttcttggcttcggcggccactgcggcatcgcaggtgaagtccggttcgcgcacgagcacggtgactttggaggcgtatttggtcaggaacacggattcctcggctgcggcgaatccgccgccgaccaccagtacttccttgccggtgaagaactcgccgtcgcaggtggcgcagtaggccacgccgcggccggcgtactcggcctcgccctcgaagcccagcttgcgcgggctggcgccggtggcgatgaggatgccgaacgtcttgaggtcgccgcgtgaggtgtgcacggttttgatgtcaccatccacgtcgagaccggtggcttcggcggagaggaattcggcaccgaagtcctgagcctgctgacgcatggtctgggtgagcgcgcggcccgtggtgcggcccacgcccggatagttgacgacttcgttggtgatggtgatctggccgccgaaatcgtccttttcgagaatcagcacgcggtagcgagcgcgggccaggtacaggccggccgtcaggccagccggcccgccaccaatgacgacgacgtcatagagattgttggtctgagtcatgaaaactcccttacatacactggctcccctctctgaggggagctgtcgtagtgagactgagggaagcatatcggatcaggctagctctcgcgagcactccccccagtcgcgttcagcgacagctcccctcagagaggggagccaaggttaccgcctattcagtgtcgatcacagctggccgacgaggtcgaggctgggctcgatggtttcctcgccaggggtccagttggcggggcagacctggtcgccgtgctcgtggacgaactgggaggcctgcacgcggcgcagcagctcctcggcgttgcggcccacgttggaggagatgacctcgtaggccacgaccttgccctcggggctcacgatgaagtcgccgcgctcggccacgccatcggcctcgttgtaggtgtcgagatccttggccagcagggcggtcgggtcggcaagcatcgggtactcgatcttggcgatcttctcgttggcgtcgtgccaagccttgtgcacgaagtgggtgtcgcaggagacggagtagatctcgcagccgatttccttgaacttggcgtagttcttggccaggtcttcaagctcggtggggcacacgaaggtgaagtcggccgggtagaagaagaacagggaccagtggccgagcacatcgtccttggtcacttcgtggaactcgttgttctggaatgcgttcaccttgaaatcggtcagttcatgctgcagaagagtcatcatcggtcctttcgggaattgttaatcttcaagcgtttaccaccacctatcgtaatgtggtgagccacggctcgcgcggacagaacatatgagccttatcacaccagccacagcccttgtgctgactatcatcacggcccacccttaaacaggattgagatcgtgagcgttctcattatgctttgggcaaagccagattatgcacgcagtcgcgaatccgcacttccaatcgctactatgggtaccagcagtccgctgataatggaggtttcatggctcagtcagactttgaacaggaatcgaccgcgaacgcaacgtggagccgcatgctgcaaggcaaccggcgctttgccgagggcaagcccgaccatccatggcaggatcaggagacccgccagacgctgcttgatggccagaacccggatgccgcggtgctctcctgctcggactcgcgcgtacctccggaaatcatttttgatcagggcctgggcgacctgttcaccgtgcgcaccgccgggcaactcatcgatagcgcggttatcgcctcgctggagtacgcggtcaagaaactgcacgtcagcctgatctgtgtgctcggtcacgagcactgcggcgcaatcgaggccgccgagcaggagctggacgacctgatgcacaccatcacttc

SEQ ID NO: 1366 - DNA, 2575 bp, Unknown
  R157_18m  MAG No. k141_38506
aggaaccttgaaataccgcccaagctagggtgtttgcgacggtgcaaccctatgctatagtggcatccagaattgaagttgaatcatgcaccacttccggagaggaggtagggcgcatgagcggtgatgttgttgccccctctctgggggtacttcattgaagacctcggtcatagcgaccgaggtcttttcgtattcgcgggacaaggcctgaaagcattcggcccgcttccctgaaggaaacgggccgaatgcttggactcgggtttcaacccggaaggcttcagtccagcgatttcaccacaacgacctcggtgggcacgttgcccgcggtggccttggagtaggggcacagctcctgcgtacgctcgacgagcttggcggcagcctcatcgtcaagatcgggcagaactacctcaatcttgcccttcaggccgaaggactcgccttcaggaccgagcgagatgctggcgcgcacctgactcttggccagcttggtggccgccacgcgctgctccttggcggcaagcgccaacgctccttggaagcaggcgccccagccgatggcgaacagctgctcggggttcgtgccctgacccttgccgcccatggcgaccggcgtgtccaggtcgaactccagttccggctcatggctcacggcgtggccgttgcggccgcccgtaacctgcgccgtagcggtgtagacgatttgcgatggttcgttaccttgatatgtgctcatgctttcatctcagcacgtgttcacgcccgccacaaggactgtcccaccgtagacgatgtgacatcatccacactgtgacttcgcgcacagagtcccgacaccgtcctcacctcgtttatcggcaccatgcgtgtataaccacatatggcattatcggcgaatatcggccggcagaccagttgcacaaggagaacatcatccacatggcagacaccgccaacaccaacgcctggttgccggcgctcaaagcggcgtttccgctgaccataccgatttgcctgggattcctgtttctcggcgcctcatacggcattctcatgggcaccaagggcttctcgtttgtatggccgatgtgcatgagcgcgttcatcttcgccggttcgatggaattcgtcacggtgaatctgctgctctccgcgttcaacccactcgccggctttctgctggccctgatggtcaacgcccgtcacctgttttatggactatccatgctcggcaaattcaaggggctcggctggaagcgtccgtacctgattttcggcatgtgcgacgagacctttgccatcaactccaccgcgaaaatccccgccggtatcgaccgaagctggttctacttctgggtcacgctgtgcaaccagctgtattgggtgaccggcgccacactgggcgggctgattggcgcgcatctgccgttcaataccgacggtcttgatttcgtactgaccgcgctgtttctggtgatcttcctcgatcagtggctcgccggcaagcatcgcgagcgactgtccgccgtcatcggtgtgctgacgtcgctggcctgcctgctgatattcggggccaatgatttcatgattccctcaatgatcgccatgctgatactgttcgtcgcgttgcgcccgcatctggatgtgttgcggccggccgccgacgccccggaagccacggcagaccgtgccatgagccacgcagcggaccagcagaaggaaggacagacgcgatgacgatgaccatctggcaaggcgcgctcaccatcgtgacggtggtgctggggacgatgtgcacccgttttctgccgttcctggtatttcccgaatccaagcagccgccgcgcgtcatcgaatatttcggccgagtcctgccctatgcgatgaccggtctgctggtggtatacgcactgcgcaacaccccgattctgaccggttcacacggccttccggaactcatcgcctgcaccgtcatcgtgctgctgcacgtctggaaacgcagtatgctgctttcaatcgccggcggcatgatcgtatacatgctactggtgcagctggtgttctgaggttgggctcggcttctccttcgttgatctctccctccggtcgccttcggcgaccacctccctctgtgagggaggtgctgaacgcagcgaagcggaggtagagacccgcggtcgtaagactgcgaaacacacagcatcggccacaggccgattcctacagctgcttcgccacccaatcgacgatgtacggagcgacttcctcaatctggtcgatggcgacctcgaactcgtgcttgccaccgtaccacggatccaccaaatcaatctgatcctcgcggccgggcttcggcttgggcagattcgggtcgaagctgcggtacatgtgcacttcggcgcgcttgccggccggcagcatgcgcagcagggcgcgcatgtgggaggcggtcatcggcaggaacaggtcggtacggtcgatttcctcacgtgagatgcggtgtgcgaagtggtcacgcggaatctcatcaccatagccacgttcgcgtaacacgcgcacggcacgcggg

SEQ ID NO: 1367 - DNA, 53632 bp, Unknown
  R157_18m  MAG No. k141_39009
ccgaaagctgcgcggggaagttgttgatacggtcctgaagccccacgtcgataagcgcttgggtcggttcctgcgcgtctttcatgatttcggaggcgagctccacgttctccttggccgtgaggttggccaccagattgtaggactggaacacgaagccgaggcgttgcgctatgtcaagcgtgagtatgcgttcttcgacgcactgtcccgttcgggcaacgatatgcagatgtatgaccgggtcaaggatgtgttgaagcagatgctgcttgggcaggcggcccgtgtgggtgccgagctgagctacagcggcattccgcacgactatgcgctggaaattctggtctccgccgtctcatcgattatctggctatgggtccggcgcggctgcaaggaggcgcccgagcaaatctgcgccatcatcgagaaaaacaaaaccaccgcgcccgtagacatcatacggtaagcgcggtggttcgtgtcggaatctggctcccctccctgagaggagtcaatccgcaggagaaatcggaaacctaaaactcagacagccagctcggccttgagttccttgaggtcggccaggatctcatcgtggcacttctcgttggtgtcgaaggcaaggtggcagaaggcgcactcgtggccttcgcggttctcgtggcaagcgtgcaggcaagccttgcccccgcactcttcggtgtggttgtgctcgcagccggtgtcgtcgcagcagtcgccggtgaagcagcagccgcagcggccacaggcggccacgccgtgctcgtgcttggtggcgtcgaacttggccagcgtgtccttgcagacggcgaaggtgccctcttcggtaacgatctcgtaagcatgctcatcgatggtcttgatagtcattgttgttcctttcagcgtttgttcgtctgcgactgtagggcggcagacggcagcggcgaaagttggtgaaagtgattatcaggcccattgctgctattaagagcaatgagacctcatgcagttttgtgtcggtaacgggccgattgttggccgagtgtcgacgcctggtataggtggtggcggtaccaatccaaatattggtggaacgacgacgatgagcgtgtctggcgtcggtgctgcgccaagcgttggcaatctaacgatgcgagtggagcttatatcgtcgctattgcgccaaggattggaagggcaccgatgctgaaggccagtagcgtcgggactgcgccattatttgttcgagcgccgacggccagtatcgtctggcgtcgtcagtggtccatcctttggtgaggtgccgacgctgagaggcggttcgatggcatgcttcgccgcacacttggggcacaggtcgaaaatctccagttcgtgggcgatggtctggtacttcaactgcttggtggctttgtcgatccactgctcaagtccgggaatctcgatttcgatggtccgcccgcattcgtggcatacgatgtgatggtggtgatgctggtccgagcactcgcggtagagggcctcgccgttgacgtggattacgtcgagctcgccttgggaggccatcatctgcacattgcgctaggcggtggccgtgccgatgcgcgtgccgcgctcgcgcaggatgtcggtgatttcctgggccgtggcgaatcgggatagtttcgccaggacctgggtgatgaggagtcggggtcgcgtcacgcgtcgagtggtcgcggtttgctcgatgctcatgacgttctgcccctttctgttaacaaatgatattcattatcgttattaaagcaaatcagatgcccggcatgttgtcacatgatttgaatcaactggcagaaatcccgcgtttcaacgaggcctgcgcgggatttctgccagttttgagccctataaaggcagagcccccgcgtacctttcgttgtaacgcgggatttctgccgatatggggcgagtcatggcgcagcgcagtgctttccatttcgggagacgcgtcatttactgccagtagaagtagccggtcggggcggctgcggctttgctgaccgaccggacctgcagtatcaggccttggcgctcgtggccggcggagccgtagacgccctgcttgatgacggcgtcgacggtgacccagtcgtgattgtgcggggtgccggccttgccggagctggctatgaacccgaatggggtcatgtcgagaatgcagcaggacatgaactggcgggacagctcgaactcgtccgcgtcgaacgtacgcgacttgctcacaaacccggtgacctgcacatggtaaccgacgtaacgctgcggattatggtcgatctgctcgaaccatgagccgaattcgtcgtcgctgatggtcagggtcttgttcgtcgtgtcgagtccgtgcagctgcgaggagccatcaggcttgtgcgagctgcggggaatgacgatagcgcggccgccggcgtactcgtcgaagccgccgctgccgctgctgggctggaacggcacggcgatcagcagcgccggaataatcaaggcgatcaggaaccgtaaaaccgaacgctccgtggcgtggaacagtccgagccatgctgcggtcgccagcacgaacagcagtaccgcaccgatgatgagatacggcagcgaacgcggcgtggtcagcgtggtgtatgatccgcccaccgctgcataggcgatagccgcgcccagcgccgcgaaacacagcgcctccacgcggtcggggagtgtgactttgcgcttcatggctacgctcccatcaccagatgggtggcaatcgcggcgaggaagcaggccgccgccacggtcgcgatgaaccggatgatgaaccgtggccggcattccgtggccagcatcagcgtgttcttgaggtcgagcatcgggccgaagaccaggaaggcaagcatggcggagaccggcagcgcgccaatcatgctggcggcgatcaccgcatcggaagtagagcacagcgaacacaggaacgccagtcccatcgccgccagaatcagtacgatggcaccagcgtcatcgagcgtgcttgaaccgttggtcaacgacgacaatgcggtgcgcatgatggaggcaatgatcgtgccgaacagcagaatcggcatcatccgcataaagtcgtcatgcatatgccgaatgaaatgcgtgagccgctccaatccgcgccccgtgcccccgccggcgggggctgtcggcaaagccgactgggggtggctctcaggcgaatcacccgtcgcccctgcacaatcctcgcaaaccaacgaccgcccaatcgtcagcggcctctcacgcaccgcaggggagcggagcggccacaccgcgaacgacacccccgcgactatcgccactaccatgcccaaccccatgcgggccgccaccatccatggtttgtcggtgaatgcgaaccatgtggaccatatcgccatcgggttcatcaccggcaccgcgcacagaaacgtcaccgcacacggcagcggcaggcgtttgcgcatcagattcgcgaacgtgggcaccaccatgcaatcgcacaccggtaggcacagaccggccaccaatgccgcggccagtccgccggccaacgatttcggtatgtggcgggccagaaaatcggcgctgacgaacgtgctgaccgcggccgacatcatcgcgcccagcagcatgaacggaatcgcctgcaggataagccccgcggcaccggtgccgatacgcaccagcggaaccggaaacccacgcgactcgagcatcgcggaagccgcaatcaggaacgccaccagcggcgtgccgataatcagaaacagatagttcgccgaatggtcctgttgcgcggtgttcacctgttccgtgcgctgcgtgcgaggttctttcatgcgaatatcacctgccatatcgccgtcatattagcaccgtacgcatgatagtggtcgagataatatgcgagttccccgcataccgatggtacacatcgatatgcggggaactttgcacatggttgcctgggccgatggcgaatcggtgggccagcatctcggtggccacttcctccttgctcatggatgccgggtaatacgtgggccagttgtccatttccttgagggtttcttcctgtcgttgaagtgacgttgcacggtggcggcggtggcagaaccggccccggccttgtccgcgtagacggcgttgatggcttcggcggccttcagcacggcttccgggctgaaccacaggtgcgggttcgtagcaccatggtggtgatggcggccttcttcgccctcggcgtggtcgtgggaatgctcgtgctcgtcggtggcggtgacgcccatgaggccgcccgcgttcacgatggtctggcgtttcttgtcaagctgcgccttttccgcccagccgtcgtagccggcgccgttgagcaccacgatgtctgccttggcgagcttggccagatcggatgcggtggcctcataaaacggcggttcgccccggcaggtgacggcatacggaaggaaatgggagaaagaacgtacgccgccggcctgtggagcgggccgtcgagttgttgttacgagacttgatggattgcggaatccacgatgttggttatggcttcatatacccctttcgtacggctgcggccagattctgcggaacctgaaccacttcgccttcaggcgttctgaccgtggccagctgaggcaccttggccttccagttggctcggcgcgaatgcgtgtttgctcgggacgccttgtacttgggcagtgccatcagccttgcctcgccttccagtgggggttcttcttgttgattacatacagatggccgcgccggcggacgacataggagccatccttgcgggccaatgagcggaccgatgccttgaccttcatgtccgttcctttcttcttgtcttacggtctttgcggaatgtgcggcgaatcacttgcgcccgtaacgagcgttgaacttctgcacctgaccggcggcgtcgatcaccacattcttgccggtgtagaacgggtggctgtagctggacacctccacattgacgagcgggtaggtgttgccgtcctcccagtcgatggtcggcaggtttacggccttggccaccagtgtggacttggtgaggaagtacttgtcggcggagcggtcatagaagaccacggggccgtattcggggtggatgccctcttgcatggttatggacctttggttgtgtggtgttgtgtggtgatatggatgagaatggcgtcggacgcacgggtggaatccggtgaattgagatggcctgagacggcctgacggccggttgtgccggcccgatcaccagctggatttcaccacgccgggcagtttgcccttgtgtgccttctcacgcagattgatacgtgacaggccgaacttgcggttgtaggcgcgcgggcggccgtcgatggaatcgcggttgcgcagacgggtggggctggcgtcgcgggggagggcctgcagcttgcgcatcgcctcggcgcgttcttcggcggtcagatgagggttgacgctgtcgcgcttgtattcggcgcggcgttcggcatacttggcgaccatgcgttcgcgctgcaattgtcggttgatcttactggttttggccatgtccggctccttgataaggctccggggcgcgggaatcgcgccggccggagctgggacgagtgcattcgttcattgggcgcatgccgcaaggttcggaagatgagttcatgaaatggtgatagaggaaaccgccggaatgccaacaaggaaacgatttcggcgggtgcttaagcctcttcctcgcctcgcgactggtgtccaatgaacgaacagatggattagcgggtctctcggaagagcacccgtttgcggactaccggatcgaacttggtgagctcaagacggtccggcgtattacgacgattcttggtggtggtgtaggtgaatccggtgccggccgtggacttcagggtgatgaccgggcggattgcggaggatttgcttgccatgagtggtgctttctatgtgtgggtgtcacgctgttatgtcacgtatgtcgcgtacgtcgcggtgccatgtgggtgatgcagctcgttagcgcggtttgttgcgcggttacgcgccggcacagtggcgggcctactgactgcccgagcatgggggtgatgccgtggccggttcagttgacgttctgatcgcggcggatgcgggcgatcgccgcctcgatgccgatgcggtcgatggtcttgatgcccttggcgctcacggtaagcgtgacgtgccgctgcaaggacggcacccagtaccgcttggactgcaggttcggggcgaaggttcggcgtgttttcctgtgcgagtgggagacgcggttgccgaccccggcgcgtgttcccagaatttgacatgttttggacatgcctgcaactatatcataatgataaccattatcaaataagaaaggctgtcatgattcatccggcattgcaatcacagggaaacgcggaggggcgcacgcccgtggtgctgctcaccggcgccgaccgcctgagcctggactccgtggcgttctcgttggtcgattccttcccgtccgtatgctcgattgcttatgacgtgcgcccgaacgaagccgtggaatccggtctcgatatcgtgcgcaacgtcgcgaagccccaggcaagcggggtggtgttcggcgagtccgattcgttcgggctcgaggggtgctgcatgagctgcacggtcaaacatgaccttgaacggacgctcggatcgctgcaagggcgggccggcgcgtttctggtctcgctgcctgtgggccttgaggccacgccggtcgcgcagtatctggccgattccttccgtctcaacgagtggggtgagtcgatgttcgtgggtgcggtggccaatgccgtaggccttgacgaattcgaagagcgattctttgacgacgaccgtttgtgcctgtacggcatgggcgaggagaacggcgtctatgacgagcgttcgaccggcgtagtggtctcccgcctgatccgtgaggcctcgtgcgtgctcgaattgccggtcattggtgccggttgcctggcacgccatttggatacagacggggagtgcgcctgccgcgacatcatccgtgcaatcgccttgcgtgatgcgctggtctgtgaggatgcccgcaccgtggggctcgtcgacctggtgcaggcgtcggtctgtgccgcgatgccgttgtgacatgtgcggcaaacggcagaacccccgcgtccgaacgaaggtggcgcgggatttctgtcgtttccgaggccttaaatggcagaacccccgcgcgggtatcgttcggacgcggggatactgccgtttcgtctgccgaaaacggcgggatcccgcgttgtcatcgtcggggcgcgggatttccgccggcagcgcgggtgtgcgcgtgcaacacaccgacgtaaatgcaaatgataataattctcaatacatgttattctgtcgtgttgggggccggacgatgatgcagcaacagcagcatcgcccggccaaacagccgaattagagaggaaaatccaatcatgtccatcatgtccaacgccaagcgcgcgctcgccatcgcggccgccgcggcgaccctgttctcgatggccgcctgcggttccagcaatgccgccggcaacaagtccgattccagcagcgccgcgtcttccggcaagatcgaggtcgtcgcctccatcaaccagtggggttccgtggccgaagacctcggcggcagcaacgtcgaagtcaccaacatcatgaccaagaccaacgttgaggcgcacgattacgagcccaccagccaggatgttgccaagttcggcactgccaaggtggccgtggtcaacggcgccgattacgacccgtgggccaccaaggccgcccagtcgaccaaggccacgctggtcaccgccgccgaaaccgccggcatcaaggaaggcgacaacccgcacgtctggttctccgccaaggtgcgttccagcgctgccgacgccatcaccgccgcctaccagaaggccgacccgagtcacaaggacgactacgccaagctcaacaaagaatggcacgccaaggaagaccagcttgagtccaagatcaaggagacttccgccaagaccgagaacctgccgtacgccgccaccgaatccgtggcctggcacttggccgacgacctcaagatgaccgacgccaccccgaagggctacgcccaggcttccgccaacgagagcgagccgaccccggccgacatcaaggacttccaggacaccctgaagggcggctccatcaagatgctcgtcttcaacagccaggaagccaactccaccaccgaccagatcaccggtgccgccaaggacgtcaacgtgccgatcgtggagctcaccgagcagatgccgaagcagtacaccaacctgctcgactggatgagcgcactggtcgaccagttcgccgccgccgtgaagtaatgcggcggtagccggcaatccgcaacagcaataaggggaataatcaagtcagatagcgaggcgttgcctaggggagaacagaacgcttcgctatcagggaaggctccttatatatcagggtgcttcggggatgtcccgaggcaccctttgcgttagggtgaatagttaggaaacggtaagaaaaatagtggaactatggattttccaaggttcagcggcaacaatatgcccttgaaaagtcacatacggaaacaggcgaatgagcgagaacactagtagtatcaccacagtgaaaccccatttcaagctttgggtcaaaaaggccgaagccaatgaagtcacgccccagcacccccacaagcccttccccggctgggcgtacggcgtgctcttcgttatcttcgacattattgttgtgacggcgctcgaagtgggcgtttcgtccagctccacccgtgtgcaactgtccagtccgaccgtcggattcggcttcgtgagcaagatgtggaccgacggcaatttcgtattcgtactcaacgtgatacttgtcgcgttgctgtacctcatgttgctgatgctgttcaacagattctggacggcaagcatcgtgattcttgcggtcggaatcatcgtggccgccatcgaacatttcaaggtcgagatccgttacgaggccattctgcccgccgacctcggcttccttggctcgaacaccggcaatatgctcaccttcattccggccggcgcgcacgtgaccatcctcgtggcacttggcgcgttcgccgcgctgctcgccctgattctggtgctgcgccacttcgacgggcgcaaaggtcgcatgatccgtacggacaacctgagcctgaacctcacctcccgtctgattctgctgctgctgccgattctggtgttcgcgttgtactgcattcatgtgagcaccaccgattcgctggccaacaagttctcccgcgccttgggggacacgccatccatgtgggattccgtgtatgacgcgcagcgcaacggtccgctcgtggcctttacccgtcagctcaacccgaagatcatggacaagccgagcaactactccgaggagaccatgaagaaggtcgccgctcgctaccagaaggaagcggagacaatcaacgtctcccgcaccaacaacctcactgattcgacagtggtgtacgtgctgtccgaatccttctccgacccgagccgcgtgccgggactgaagaccaataaggattcgatgcccaacatccgcaagatcaaggcgggcaccacctccggcctgatgctctcctccggctacggcggcggtacggccaacctcgaatacatgggactttccggtctgagcatggccaatttcgattcctccctgtccagcccgtaccagcagctggtcccgagccagcattggacccccaccatcaaccagatgtggggtgcgcccgccaactcgctcggctaccatccgtacgagtccagcatgtactcgcgcgctacgaactacaagaagttcgggttctcgcacttctacacgctgaccggtccggacgtgatcaagtatcaggacaagattgacgagtcgccgtacgtctctgataagtcttcctatgattctgcgctggaaggcatcaggtccggcaagacgaacaagttcattcagatcatcaccatgcagaaccacatgccctaccacgagtggtatgagaacaacgactacaccgctgaatccaccacgggtacgccgctgggtgatgatgaacagcagtcgattgagacctatcaaaagggtgtggagattaccgatcaggccactcaggagttcctgaacgaactggatgcgctggataagcccgtcaccgtagtgttctacggcgatcacttgccgggcatctactcgtccgccagcgaggatggcaacaactccttggccctgcacctgaccgattacttcatctggtcgaataaggcttccagctcccaaggcaataaggcaagcgatgcagcctactcttcgccgaacttcttcgtggcacaggccgccgatcacatgaacgccaaggtcagcccgtatctggcgttcctgaccgaaatgcattccaagattgccgctatggaaccgcctgtggtcaacaaggtccaaggctgggatcgtattcccgaaggccagaacatctatctcgaccaaaacggcaacccgatgtccaccgatgacttcgacaaggaaaccaagcagttgcttgccgactacaagctcatccaatacgacatcaccgccggcaaaaactacctcaaagacacagattttatgacgttgccgtaaagcagacagcccggccgaaccgtaaagcggatagctcagtgggctatccgtaggtgaggggagcggctgtgccgcgacggaaaatccggaggattttcggtctgtaggcaacgtgcgagccgacaggcgagccagcaaaacgcgggcgaagcccgtccaaaattgctgtaccgttgccatagtgctgtgagctccctctgatgagggagctgtcgaacgaagtgagactgagggagagatcccacagaccaatcactcccgccttacaataaagccatgaagcgcatcgatgtgaatcatggctggcggttccgttcaattggcaaggaccgcgatacggcagcgcggcagccagtcacgctcccgcacgatgcgatgattcacgagtcgcgcgaccctcgcgggccgcacctcgcgattcatcgaacgaggacatgacggcgtggccagctggtcatgggcgggctatgagggccgcgacgccatcgtgcatgtcaccgatgaccgccgcattgtggttgatgcaggcgggcatatcgccgtcggaccttctgccgaagctgtggatgtggaggtacaagtggactctgtggccgcacaacacgacctgcctgccaatgccgaactgctcggcgtggccagcgccaatcccatcaccgtcgatgaactcgccgacaatacctgcaccacctacttcggccgagcccaagctacttggcgaataccagccgaaacgtctggtattgcctgcagcacaaacgccctcatgccatcgtcatgacggtacgataggtacagtcgatgcccggaaaaccgacccgggcatcctgcgggaaggatgtgccatggtcaatgcggatttcgctcagttgcgtcacgcctacgaatccgggtgtacgcggccattggcttggcgacgggcgcaattggatgcgctatgccgtctggtagcggacaatcgtgatgctttcgtggctgcggccatggccgatttgggcaaacccgcggcggaaaccatactgatggagctgaatctggtggccggcgaggcgcagttcgtccgcaaccggctcggactgtgggccgcgcgccatcccaaggcgatgcattggatgctgcaacccgccgccggctggacgatcgccgagcccaagggcgtggtactcatcatctcgccatggaattacccggtgctgttggctctggagccaatggccgacgcgctcgccgcaggcaacgccatctgcctgaagccctccgagctttcgcccaacacctcgcgcctcatcgccgaactcgtgccgcaatatcttgaccccgagtccgtgtgcgtggtcggaggcgggcccaaggaaaccggcgaactgctgaaatgtccgttcaaccatatcttctacaccggcggcgggcacgtcggcaaaatcgtcatgcgtgcggcggccgagcacctgacaccggtcacgttggaactcggcggcaaatcaccgtgcttcgtggaccgtacggtggatatcaatgtggccgcacgacgtatcgcatggggcaagttcaccaatgccggacagacctgcgtggcacccgattatgtgctcgccacgccggatgtggccgaggctctggccgagcgcatcgccgtagccatcaccgaattctatggcgaagatccgaaggcctcgcctgattttggtcgtattatcaacgatcgtcattttgaacgactgtgcaagctattgccggtcggcaccgtgccgtctgaggagccgagctcgccgctggtacaggtggcatcggcggtaggcgcggccatggatatggtcgggcggcgcttcaatgtcgtggctgccggacgcggaagcgcgggggagacagccggtggtggcaccggtagcgcgaacaatgcggcgaagccggcggccggttcgaatacggcagccgctgatagtgatgcgactgcctcggccgctgttgagccgagcgagattcacaaggtgcccggcgtattcgatccggccgggcgaatcgtttgcggaggcaaggtcgatcgcgccgcccgatatatcgcgcctaccgtgctatacggcacgtcaccggatgcgccggtaatgaaggaggagatcttcggcccgattctgccgatcctggtggttgaggatgccgagtccgcaatccgattcatcaacaagcggtcccggccgttggctgcatatgtgttctcgcgcgatcacgaggttcggctgactttcgaacgtcagaccagctccggagctttgggatattcgttgccgttgggtcacctgctgtccagccgactgccgttcggtggcgtgggcgcgtccggcatcgacgcctaccacggtaaagcaggcttcctcaccttcagccacgtcaaaaccgtggttaccaagccgcagttccccgacactctgcgcctcgtgtacccgcccttcaatgaagccaaggccaaactgttcaacatcatcgccaaattcagctagcgtgatatcgctcgctgatattgggtgatggcgttgtcatagtgacgttcgctgtcccggcagccacgtcaatcgattgattcgtgtaccgggccagatttttctgtcctgtatttgatttcgagtcattttctgcttaccgggacaaaactgacgccgaaagtatcgtccgcgtattacgaaaatggcggaatagtgcggttttgcatggaatggaattccaaatattcctatattcgaggtgttcaactgtcctggtttgcgaaaaagagccgaaatcagctaccgagacagaaaaatctggcccggtagccacgtcaatcgattgacatggccaccgggccaaaaatatgcggcagatgcgccgcttctgttacttcagggctttgaagccgatgtcgtggcggtagaacagtccgcgcagctcgagcttgtcgatgatcgcgtagaccttgtcctgagcggacttgatgtccggggcggaggtttcgacgagcaggacacggccggagttggcaatcagaccacccttgtcgtcggaggcgacgccggcatagtagacatgcgaatcctcgtcgacctcgatctcgggcacacgggcacccttgatgacgttctccgggtagccgttggaggcgatgaccacgccgagggtggcgttggactcatcccagatgaattcgggggtttcgccgtcgagaatggcggagatgccggcaccgaggtcggaggtgagcttcgggagcacgacttcggtttccgggtcgccgaaacgagcgttgaattcgatgaccttcggtccgtcggcggtggcgatcaggccggcgtacaggatgccggtgaacggcgtgccttcctcggccatgccttcgacggtggggcgcacgattttctcgatggcctcgtcgaccacggactgcggaatctgcggcaccgggctgtaggcacccatgccaccggtgttcgggccttcgtcgccatcgtgggcgcgcttgtgatcctgggagatcggcatcggccagaaatcagtgccgttgacgaagctcatcagggagaattcctggccgtcaaggaagtcctcgataacgaccttggcaccggcggagccgaagcgatgatcgatgaagatgtcttcaagcgcacgctgggcggtgtgctcgtccatggccacggtcacgcccttgccggcggccagaccatcggccttgatgacgatcggcgcgccatgctcgtgcacgtaagcctgagccatgtccaggtcgccgaacgtctgatatttggcggtcggaatgttgtgacggtccatgagctgcttggcgaaatccttggaaccctcgatctgggcggcggccttggacgggccgaacgccttgatgccggcggcggcgaaatcgtccacgatgccttcgatcagcgggacttccgggcccacgaacacccagtcatagccattgttcttcacgaattcgataagtgcggcgtggttcgactggctcagctgcgtggtgtggatgccgtccttgagcatgcccgggttgccgggagccacggtgacttcgtcaatgctcggtgccttgagcagcgtgtaggcaatggtatgctcacgcgcaccggagccgatgaccaatactttctgacccatgtttttccttcctaaagtctttggctcccctctttgaggggagccggtatctggagctacttcagtacgatttgcgtgtcggtggtgtcggtggtgatctggccgagcacgtaggcgggttcgttgttgtcggcgagcagcttcagcgcctcgtccttgcgggcggggtcgatggccagcaccatgccgatacccatgttgaagatgttgtacatctccttgtgatcgatgttgccggccttctcaagcacgtcgaagatcgggagcacaggccaggtgccaagctcgatctcggcggccagaccgtccggaatcatgcgcgggatgttctcgatgaagccaccaccggtgatgtgggccacgcccttgaccacgcccgccttgaacagcggggagagggccttgacgtagatcttggtgggggtgagcagcacgtcgccgagctttgcgccgcccagctcggcgagctcagtgtccacggtatagccagcctgctcgaacagggccttgcgcaccagggagaagccgttggagtgcacgccggtggaaggcagaccgataagcacgtcgccctcagtgatggtggaaccgtccacaatggcggacttttcggcaacgccgaccgagaaaccggccagatcgtactcgtcctcgtcgtacatgcccggcatttcagcggtctcaccgccgaccagtgcggaaccggcctgcacgcagccgtcggccacaccggccacgacctgctcaagcagggccgggtcgttcttgccgcaagcgatgtagtcaaggaagaacagcggctcggcaccctgggcggcgatgtcgttgacgcacatggccacgcagtcgatgccgatggtgtcgtgcttgttggccagcttggcgaccatgagcttggtgcctacgccgtcggtgccggagatgaggaccggctccttgtagcccagggaggctaggtcgaacaggccgccgaagccaccgatgccgccgaccacgccgggacggttcgtgcgggccacgtgcgacttgatgcgcttgacgacttcgtacccggcttcgacgctcacgccggcgttctcatatgcttttggcatttggtggggcctttctgttctattttcaagctcccttgccggggagccacctgcaaaaagcggattttcgtttgtactaagctccccttgtcaggggagctgtcagcgaagctgactgaggggtagtcgtaaagaccaatgactgaggtgtagtcgaaggaccggccgaacctactgcacgtccggctgcacggtgttgtactcgttgccgatgtacttgctcttgtacagcgcgaattcaggcagacgcacacggtcctcgggcgtgagggacttcaggaagtcggcctcgtagtcgtcgagcgcagtggggtagtcgccgttgaagtaggcgacgcacaggccaccgtatggggcgtcggcgttcagtccgatggattcgaccagaccgtcgagcgaaaggtaggccaaggaatccgcgccgatgtattcgcggatttcctccacgctcatcttggctgcgatgagttccttggtggtggagatatcaatgccatagaagcaagggtacttcagcggcggggagctgatgcgcatatgcacttcagcggcgccggcttccttgagcagctgcacgatgcgcttggacgtggtgccgcgcacgatggaatcatcgataacgataacgcgcttgcctttaaccacgctgcgcacagcagagagcttcatacgcacaccctgctcgcgcagttcctgcgtgggctgaatgaaggtgcgggccacatactggtttttgattaggcccatttcgttgggcaggcctgctgcttccgcatagccggatgcggcggacaatgaggagttcggcacgccgataaccatatcggcctccaccggggattcggcggcgagacgtgcgcccatgcgcttgcgggcggagtgcacgttgacgccatagatatcggaatccgggcgtgcgaagtagatgtattccatcgagcagatggccagctgcgtgttgttggtgtactgcacgatcttgtagccgtgatcgttgaccaccacgatttcgcccgggcgaatgttgcgcaccagctcggcgccgacgacatccagtgcgcaggtttcggaggcgagcacgtaggcgccgttcttcatcttgccgagggagagcgggcggaagccgttcgggtcgagtgcgccgatcatggcgtcttcggtcatcagcaggtaggcgaaaccgccatgcaccgtgttgagcgcttccttgagcttgtccataaaggtgcgctgcatcgaacggcgaatcaagtgcatcagcacttcggtgtcggagttcgaatggaagatggcgccttcgtcttcaagcttgcggcgcagtgacgggcagttcgtcaggttgccgttatggcacagagccacgtcgccgtcatggaagcggaagatgaacggctggatgttgtccgtggtgcccgagccggccgttgcgtaacgcacgtggccgatggcgcaattgcccttcagtcgttcgatttcgcgctcatcgccgaacacctgggtgagcaggccgagtccgcgatgaccgatgagatgaccgttatcgttggagacgatgccggcaccttcctgaccgcgatgctgcagcgcgtgcaggccaaaataggtgagtcgtgaggcgtcggggtggccccatacgccgaagatgccacattcctcatgaatgtcttcgagttcagccgacaagccaaagctcctttttcaaacaggggattaactatctgccaaccctaccaatcggcggctacatcgcgtgttgtggggtggtgggggcatggggctgcccatggtcttgtccctggccgcatgagcagagccgtcaggtcggaccctgttcgccgatggcgccggaatatggactgttgcttaaatcctgttgtcttatagtccgatgttttgtattctcaactgaaatgaaggatagttttttacccggctgggggcactgttgattactgaggaagtcggcaagagaatcagagaattacggaataagacgggcctgagccaggaaaagttcgctgcaaaaatcggtatggatcgcacatatttcgccagtatcgaactaggcaagcgtaatgtagccttgaaaaacattgaaaagatagcgaatgggttggatgtgcccctttccgatctgttcaaagggatctaagactagtgcgtcgagtaaaaaggtgatgggggataagcgagaatgggattcaagggtaaattgtataaaacaacgttgattaacaatcgcagatacctgggcaacaaatacaagctcctgccttttatcaccaaggtggtcgatgaggagtgcacggggatcgatgtcgtcgccgatatctttgccggcactggcgcggtttcttccgctttccccgggaagacggtaatcacgaacgacataatgtacagcaattacgtgtgcaattacgcctggttcggtgcggagacttatgatccgcaaaagatcgtgaattatgtagtcgaatataatgccatctcgcaatatgacgacaactacatgaccgataatttcgcggatacctacttcagctataacgattgttccaaaatcggtttcatcaggcaggatatcgaggacaactatcaagctggcgacctcaacgacagggaacatgcgatacttatcgcctccctgctctatgcgatggacaaaatcgcaaagacctgcgggcattacgatgcctatcgtaaaggagccaagttcgataaaccgcttgagcttcgtgttccgcttgccgaggtgcataacaatgccgggaaccaatgtttcaatgaggatgccaatgaactggtcaaggacattcatgcggatctgatatatatagacccgccgtataactcccgccaatattccgatgcctatcatctgctcgaaaacgtcgcccactgggagaagcccgaagtattcggagtcgccaggaagatggagcgaaaggccatcaaaagcaagtattgcactcgcagtgcgacggagacgttcgaggatctgatcggcaacatcaacgcgaggtatatcctgttgtcctacaacaatatggccactaaaggagacggccgttcgaacgccaagatagctgatgaggatatcgtaagaatattgcggaataaaggcgagttgaagattttctcggaagactacaagccattttccgcgggcaagtcaagtattaccggcaatgccgaaagactgttcctatgcacctgcaatgagggataagaaaaccatgattcaatcccctctgaattacactggtggcaagtttaaactactcccacagatattgcctctcttccccgggaagattgatcagttcgttgatttgttttgtggtggctgcaatgttggcctcaatgtcacagcaaataaggtgatctataacgatttagatgagaatgtaattaatctgtacaagaccttattgcgtttagggcatgacatgacgttcgagtacattcatcagataatcgatgattatgagctgtctcttgcaagccagaaggggtatgcatattacggctgcgatagcagcaaaggactaagtaggtataataaaccccattttttgcaacttcgtagcgatttcaatgcaaggcagaagaaagatagctacaactacataatgctctatgtactcatagtctatgccttcaataatcaaatacgattcaacagcaaaggtgaatacaatcttcctgccgggaaaagggatttcaatgagagcatgtcccacaagttatctgcctttatagagaaaatccaatcccagaattgccttttcacttgcagtgatttcaaggattttgatattgctcaacttacgagtggagatttcgtttatgccgatcctccatatcttattacttgtgcaacctataatgagcaaggcggatggaacgaagacgacgaatgtgccttactgtcttttctagaccgtctggatgaaagtgatatacgattcgccctctccaatgttctacgaagtaaaggcagagaaaatcaagtcctcattcaatggttgaaggaacgaaaagacaaatatcaagttattccattgaataaaagctattcaaactcaaattaccaagttaaagacagagtttccaatagtgaagaagtactgatagtaaactattaatgaaaagtggcaattccagctgcggagagttttgcgactgcatatcgctgattggaagggaggatcctcatgaaagtatccaaggggcatattttcaacctttttgacaccaatggtcgtagaaatgatgtgattgctgccatgcgggggtatctcagtatcctaaacaccattcgtgccaatcaggatttgccgtggagagcaatgccaaacagtccggcacaggtcttgttctatcgtcatgcgattggcatgtttccggatgttttcaaggaccaccccaaatatgatgagctcatatccacgatacacgaatatcctgcattggaagcagcaattgatagagccgatatggaatggctcgaatctcacggtgacgagtatgcgaatgtggatatcaactttgacgaaggcgtggaggatcgcgcacgtcactataccagtaatcttgtcaaactagggtttgcggatgggcggcggaacatctcgccggttggcaatattttgctcgatcgtattcctctacatgaagacggtttggaacgattgctatcgttgaataaggagaatatcctctatctgcggcagttgctcaagttgcgaatttttgataaggccggggaacgatactatgccccattcgttatgggcgtctacgcgttgctgcgcaagtctcgcctatcagaagatgattttttcggcatggtgcaaggaagcagtccgtacagcaacattgacgacgtcgatcggtatattgataatttttcggtagaggggcagctccacaaccatgctgtctccactcccgatgaaatcaatattgatcagcagttaacgtatgacgtgtttaaacaatattttctgaaccggaaatcagcaagaacggtaaatatctattatgggttttatcagtgtatattcgaatttaccgttgaccggactcctgaaaaattagaccttctacttacgtattatgagtcaaatcgttctgtgctgaacaaggcattcggattcgggcgaaatgtatttgatactcgaaccggtgatcgtccagatgtccaggatttccttgatgagaacgaggacatgttttcctccgatatcaacgactatttataccgacaatttgcgatttcaaaattctgggatacgttgcgcgaatattcagataccacgaagcgtattttcaaagcctcgggtctcatcagctttgaaaacggatacgtcgaactggcttatcacgaactgtgcgcatgtattttcaacgcagccgatttgaagcccaaaatcttcggtagcatggatgacgaggttgttccgtactacgaaagttatgatgaatacgaagagggagtgagtagttacttttgtagtaatttcagtctttgcgacattcttggtctgcaggagtcgcttgacgagattaaagagcacatcagtgaagcatttggcggagctgcgcctgaggacatccctgatattacccgtcgtagacggtgggaggaattcgaagttttcgttgcgaaccaatatcctgtcgaaagagtgaaagagctgcttgccctatttggcgacagaaataatgacaagcgcatcaagcaggaggtctgtgaagatgcaactgtcccgaccatttacgagttcatcgttgggctggcttggtattacttctcaggcaaacgtttcaatctcctttccagctataatctcacgttatcggctgacttcgagccgctcaaccatgcgggaggcggacagggcgatatcgtgattgaaagtaagcatgatgtcaccatgcttgaagctacgctaatgaatgtaaacagccaaaagcgaggcgagtgggaaccggtattacggcattccgtgaacctgaaggtggatgaggaggctcgtaagacggaccggcgggtcacgacattcttcatcgccgatgtatttgatgccaataccattaacatctggaaggccgttgcctcggtgccgctgcaatcgaccactgctggcgcggcatatacagacaacgtggtgatcatgcccattagcagtctggaactctgtggcttgatggatagaagttcgcaatatgacacggtaatgcagcgtgtccacgatctgttcgaggtcgacaaaagcaatttcgaccttcaatggagggacaagttcattgatgaaatagtgtgaacccgctattgcgcctttcgcgcatgaaacgagagggcatcggtctcgccggctatcgctatggccggtgagaccgactttgagcgagtcatccgggtttagcgctgccgagccttgtgtcggagatctgagacgggatgtctgagcttcgctgaagtttatatcgaacaaatgttcgactgttctggtatgctggtcgggctggtttcgatagggaggtgatggcgatggctggcgagagggcatcggcgcaacgtgaacatacctatatcgccattgacctcaagtccttctatgcctcggtggagtgcgcggcgcgtgggcttgacccgctgaccacgcatctggtggtggccgatgaaacccgcaccgataagacaatctgtctggcggtctcaccttcgctgaagagctatggcattcctggccgtgcgcggctcttcgaggtgaagcagcgcctgaatggagtcaatgccgagcgcgcggtccatgctcccggcggccgattaatcggggagtcctgcgatgcgcgcgacctggaacactcgccgagactcaaagcctcgatggtcatcgccaagccgcgcatggcgcactatctggaaatcagcgggcggatctacggcatctatctcaggtatgccgctcccgaacacattcatgtgtattcgattgatgaggtgttcatcgacgtcacgccatatctgcgctcgttgggtatggggccgcatgccatggcgcgaaccatcgtgcgcgaaattctcgatgaaaccggcatcaccgccactgccggcattggctccaacatgtatctggccaaagtcgccatggatatcgtcgccaagcacatgcccgccgacaaggacggcgtgcgcgtggccgaactgaatgaaatgtcatatcgtcggctgctttgggatcatcgtccgctcaccgatttttggcgggttgggcgcggctatgccaagaagctcgagcatgccggactgatgaccatgggcgatatcgcccgatgctcggtgggtcgtgcttcggattactacaacgaagacctgctgtatcgcatgttcggcgtgaatgccgaactgctcatcgaccatgcgtggggctgggagccgtgcgagatcgcggacatccaatcctatgagccggatgcgcacagcatcagcagcggtcaggtactcaccggtcccgccgactatgccacggcccgcctgattaccaaggagatggctgatgcactggccctcgatttggttgataaaggcgtgctgacgaatcgactcacgcttgccgtcggctatgacatcggcagtttggacgcgtcgaagctcgattcatgcgccgattatgcgatgaaacgtgccgctgagcgtgcggcgaaaagttatcaggggccggtggccgtcgaccggtttgggcgtaaagtgcccaagagcgcggtcgggtcgattggtttgggtgatttcacgtcatcttcggcgcgtatccgtgaggccatgacgatgctgtacgagcgcattgtggattcacgcctgctcgtgagacgcctgaccgtcatcgccgatgatgtggctacgccggaggagcttgccgccggcaaacgctatgagcagctcgacctgttcggtgatgacgaggctcaatcgtatgggtccgagcccgctgatgacagagatggtgagcatgatatccagcgtgcgttgctggatgtgaaacgtaaattcggccgcaacgccgtcatcaaagccatggatatggaagacggtgccaccggtcagggccgcaaccgtcagattggaggtcatcgcgcatgactctacaagaaacccatgcatacgacgacatcatcaacctgccccatcaccagtcgcgcaagcatccgcacatgtctcgccaccagcgggctgcccaattcatgccgttcgcggctctgaccggttacggccaagtcatcgagcagacagcaaaaaacgccgaaaccgctattgctcaggccgaggcccaaggcgataccgatttcggcgcttaacaatcgctccggttggaggaagccgcagatccgtcagcccacgtgacgctcaaagtggtggaagccagtgatcttgtcgatttcggccatcgcgtcagccggaatcacaaagcccgcggccttcatgttgttctccagctggctgggcttggaggcgccggcgatcacacagctgatctccgggtgctgcaggatccacgccatggaaagcaccggcaggttcgtgccgagctcgttggccacaacgcgcagcgtctcggtcagatcggtggtctcgtcgaatcggtggcagaagtacatgtccagatagtcggtctgcatgttcttcagtgtctgatcaatgctctcgaagatatgcttgcgggacaggccgcggtcgttcacgccttcgccggtggtgacttcgcgggcgcaacgaatgaaatcatcaatgacgctccagcggtatggtgtggccgaaacgtcgaatcggatggcgtattcggtctccggcccgcaatccagcacatgcaaggtgcgcagccgttcgccgtcaagcagcgctggcaggaaccgctccgggcataagcaggcacccatgccgtaatggcatagttccagcagcgtcaatatgttgtccgaacgggcggcgactttcggctcgaatccggcacgacggaacagaatctcgccgatgcggccatcgatgtcctgcggattgcccagcaaaaacgggcagtgcgccaacgaagatagatcgcctggagcaatggcgcgttcatctggaatcgtgttggggatggtggaatcgttggcaatattagtttggctgttcgcggttccggtggtgactaaatccagtcataatgattgcgcaataaccagtaccatacgttcgtcgtagaatctggggttatcttgagtcatggctcgtgcgaatagcattgatgtttgcaactgcgggtcatgagatgaaatctgagatgaggtcgtagccggaagaggagaggatcacatgctggaagcgggcgcgatgttgctgttctgtgcggtgctgtttgccagcgtcgccctcggctggtcgattattcccgcgctgttcgttggtgtgctgctgttcatggggtatgggctgattcgccggtgctcgctgcgcgcgatggcgagccgtgcggccggcagcgtacggtccgcggggaccgtggtggtgaccttcgtgctcatcggcgtactgacctcgctgtggcgggccagcgggaccatcgccttcatcgtggcccattcgactgcggtaattcacgccgccacggtgattccgctgtcgtttctactgtgctcggcgatgtcggtgctggtcgggtcgtcgttcgccagtgcggcgactatgggtaccatctgcatgtcgctgggattgtcgatgcaggcgaacccggtgatgctcggtggcgcgattcttgcgggcgtctatgtgggcgatcgttgttcgccggtttccaccagtgccttgctggtcaaacagcttacgcatacgaacctgttcagtactattgcctgcatgctgcgcactggtgcggtgccgtttgtgctgagttgtgtggtatacgttgcggctgcggtggcggagtggctgtgtgcaagcggtggttccggattcggtgcggctagagcggctgtttcaaccaacacaagcagcataaccgatatcggcggattgttctcatcggcctttgatttgcattggcttaccctagttccagcattactggtcatcgtgttggcgttgctgcgtgtggacgttcgcctgcttatgctcgccagcattgccgcctcggtcgcgatatgcgtgggcgtgcagcacatggaatgggcggaactgttgcggctgcttattttcggttaccatgcgcaaaatccgcaggtggccgcactcctggacggcggcggcatcctctccatgctcactgtgatggccactgtctgcatctcctccgcctacgctggcatttttgccgagacgcggatgcttgctcggctgcagcaggtcatcgagatgctcggtcatcgcatcggcgcatgtggcgccaccatgattaccgcgacttgcgcggcggcgctcgcctgcaaccaaaccctcaccatcatgctcactcaccagttgtgcggcgggctatacggcgacgacgaatccgaacgcgccgcgcaagctatcgatttggaagacagtgccgtggtgatcgctccgttgattccttggtcgatcgccggtgcagtgccgctcgccaccatcaacgccccacgttgagcttggccgccgcaaccttcctctacctgctgccgctgtgccgaatggcggtttcagctgtgcgtcaccgccgtgcaataactactaatatatgagtgattttgggcgtatacaggcgaaattactcatatattagtagtttggcgaacaactatattgtattctcgaaaagcttcgcgataggcggtgataaggtccggcaaacgcattgaggcgttggccgggctggtggagggcagttgggtcataccgatggcgatgccggcttcggtcaggcgcggctcgataagtttgcggtaaagttgcgctgatttcgcgccggttgcgaagatgtgggcgattggagcgccgcgcaagattggtgtcaagtcgttgggcacggcattgcggatgctggcatcgctggctccggtgatatcgcaagaagcaatgacatcccataacgcaatgtggtggcgcagagcaaacgcacgacgggactcaggtaaatcgccgacagcgtcagtaggatcagcggagttggcaaacagcgcctgcatcaccggccaaaaccggttctgtggatgcatatagtaaaacgccgccgctcgggatttcggactcggcatcgatcccaaaatcaaagcccgggactcaccatcccacaccggcccaaacccatgctccacatgttcgctcataagccccatattatgccgtttggtcttgaaaatagttcgggggcggacagttaatgtcatattccctcaaagagaagaaggatttacaatgaaaaaaggtggaagaaattgccagtgaaggcacaagccattcttattggtgttttagtcgtcgtttgcgcaattgctgcggtatttggatataggtcagttgacaatatgctgcatcctcaggcgactctgaccaattcggttgtggccaggcagttggaaaagattcaggatcttactacggccaaggaaaccgattttggttttgaagagtataaggaaggcaacattgctccacgccagatcgtcctcgaagccatccggcaacggaaccagcggattcttccacatccggaaatccgcaaccagccgcttcaactcctcgacataccgtcgctcatccaaccgaatggacatccccactcaccctcctttgcactaccatcccagcacacaaccagacgtcacgtcatgggcagcgccgtacacacgccaatgacgaacaacgcctcggcggtgagccagaacgcggccggccactcgccacacgactcacgacgattatccccacaaaaacaggcagccgccaaatccaacgggaaccacaggaacccaacgaacaacgcaaccagcggggccgccaccaacgcgaaaccgctcacatgacgggtcaacgcgatgccgatggccgcgaccagaccaaccacgccgccaccatacgatatatagcgaggaagaatgttcgacccacgatgccgatcctcccggtacaggaacagggaacccgacaccagcagtacaccggccaccaagccggtcacccaccaaccacccgacgcgggttgtgccaaaggcgcaggcagacgatcagacgaccagtccacgaaatcccccggcttcaacaagcccgtcgccacataccggtcccacaaccacctacgaccaacctcctggcccacaaacgaaccaaccgcaagcatcgccaaggaggcgaacatcacgaaaggcacggtcagacgaggccacaaactgccaatcgcgtaaacgatgaacggagacaacgctatcgacgcaaacacaatgacgaacaccccaacattggggacggccgccaacggccaccaatcacccgccccattcgcctttgccgcatccatgaacactacctgcaccaccacggacaccacaaaaacagacaggaaccacaaagacttcaacaccacgccacgcattccgaacgcacgatgccccggacgcggaccatgcagatgaggaaccgtcaacgccaacaagccatgactctcatactccagagtcggaccaccattcgccgcagaccgttcatacctgtctctatcaatggtctttaacatatccctgaccgcaggatcgttctggtctcccttagcaagcagaaactgacggaactcctcatcagactcatcctccgaaggagactccgataaacgtgcatattgctccggttgccgaccatcatttctagaatgcttactcatcgtcaatcatccatcctttatagatcactgataccaactcgaatggcattagatgcctcagccgccccatcggacaactttcccggtgcctgatatatggtcttgaaattccataactgatctggatccggaacgagcgtcttgaaataatcctgtggcgaatgcttccactgcagaccaccatccgcagtcggattcacgaaaggcttcaccactttcgccgtatgccaacgtgtcatacgtcgcgttggcatacgacacaacatgctgaccaaaattcatggtgtcccacaccgtccgacgggcgtcgacagccgcgatattcttcatgtcgtggataccccgaaaatcggtatacccggttcgggcattcataattgtgtcgccgatggaccacccatggcctttgctccaatctccgaatctcttgaactgaccatcccagaaatccctcatcaccgtgttgtttgggttagaatgagcggcattcgcggcctgtttcgcatcctgccattcggagacgaaacgattccatgccctgccactgttcttcaacgaatgctggataccgactacggtgttatgcattccctcacctagagcattccatccctgccttatcatccccttggcaaagactttcgcgccgtcatgattcaaagtatccaacacatgctcccgcgtttgcattgtccactcgcttccgtcacttagtagcttatggaatccgcgattttcagaagcttcttaccccacttagtcggctgccacagtcttgcgcgtaaagctttttgtaaattgcgttaatcaccaccatgtctctcctcaataaaaaaatcatttgtgatgttctatacgtttgaggcccgtgccggcgtcgatctgagtaaggctgagattgatgtcaataagcataatcgaaccatcgacatcacgctgccagcacctactatctagtcagtttcggtggacccggattcattgagattctttgatgaagaatcttcactatttaacggcaatgaagtttcagatacagcagatgccttgaaagacgccaaaacgcagtcggaaaagaaactgaataagggggatttgttgaagaatgctaatgagcaggcaaaaacggtgattgaaaagatgtattcatctattgcagaaatggactcgtatacggtgaatatccacacaacagagccgaaaaaaaatagtctacattgttgccaagcgctgttactcatgctatgaggcatgagtaacagcgcttttttatggtatagcaaggtcaattatttatcgtcaaaaatcagttgggaactgatttattcttggaggttatgcagtcgcgtcataggaaaaacgaggaattgagaggactcttatgatttcctatgtacgaaacgtgggtaagacggtacttgcagcggtcgttagtttggtgttcatcgttggcgctgcaggctgcggtaacactcaaaaggatgacggtccagactatgcggatgatgaggcgatgtccataatcgcaaaagcgtatcagaagcgttcggatgttctcgaccagtacgagcagaagaaagataccgattccgtcaagcatgtcaaagatgctgttcaggctgaaatcgataacgatgagcctttgaaagagcggcagttcaaggattcgaagttgcaggagaaagtcattacttatatcaacctgcttgaggattcacaaaaagtgaacgaggattattcctatctcagctcggattacagcaccgaatggactaaggtatacgataagcgttcggcattgctcaaggattttgtcgataattacaagctcacggtagacagtaaatatcaagatccattgaatgatattgttgccaacggttcgtccgtcaagaaaaagacggaaacggaagacgcgctgaataatctgattgcctctgcgacttttgagaaaactgatgacggatatggctactacgcatactcagccgtcatcgaaaacatcagcggaatcgatttcggtaccgtcaacttgatattggctctatacgatgccgatggcgtgaaggctgccgaagtatacgccagtactaatgcttggcctgcaggagaaaaggtaaaattcgaaaccggtagcgatgccgatgcggcgcaggtgaaggcatctgtcgaccactatgaagtagacgattaagcgtatccatacacaacagatagtgatggcccacagggaatcttcctgtgggccatcactattaaacgtcaatatcagtcaacttacgccgagaactgtttgccgaattccgagaagagctgacggcgggcgaagacgagcaggccgagcagcaccagcagggagaccagcccgctgaccatcaccagcacatcccacggagcccagccgagcggaatgaacgtcagaggcagcagaccggcgacgatgtcgaacgccagatacttggcgtactggtcaatggccttggcccgcagcacgataagcagcaccacgtcaaagaccagcgaaaccagacacgtgatcggtatgacgaacatggtgacgacatgattcatcgtcgccacaaaccagaccagcgcaatcgccagcatgatatagaaatatcgaaacatgaggcgaagcggccgcggcgcgtgcagaatcgcactgttgatgaacagcacgctgatgatcagcgcggctgccgatgcactggcaatcggtatcggccacgaaaacagatagctgaagaagccatgcagcagcagaatcgcgccggttacaaacgtgatgatctccaccgccaaacgcctcggacgcagatagatctgctgcgcggggaatgcggcgggagaggcctcgccgtgcaattcgttctgacagagtgggcaacgggccatatcgccggtgaaatcgacgttgcaggcatcgcaatgcttcatgccgacgctcctttctccacatgcgcgccggcgatgttcatacggccgctgatgccctgcgcggcgagaatccgacacaggttcttgatgacgttcagatcatggtagacggtggagatgccgatgctcaggtcgtcgccaaacgagcagaccgtgaaattcaggctggccggtgtggtgaggaagctcaccgaacgcacatggctcgcgagtcgttcgtccaaggtgactcggccaaggttcgagacggtggtcgtggtctcgcggtcggcgatgaaccgggccagctccagcacccagtccttggcaggggagggcgcgagacgcagcgccggattcttttccagcgcaatcatgcggttcatatgcgattcgactcgctcgcgactggtggcatggtcgagctgctcctgcacatggcgggcgatgtcggccaacggctcatcggtcagcaatccacccataccgttgccgtgcgcggtgcgggcgacggactgctggccgtcgccggtcgcgtctgggcccgttgcggaagttttcgcggagtcctcatcggcttcgatatcggccggcgtgtacgccacgtaagtcatgccgtagaagttgcgcacggtctccgacctgaagaaggcgcgcaagtcgaccggaatatccacgcgaatcgcgcgattgcgggcgcgcgagggcatgacgtcgcgaatcgcgcacagtatcgcggcgatgaggtaggaggtgaggctcactccgcactgatgcgctgcaccaagcaccttgctggcgctgacgtgatattccatgaacgtgggcgcgtcccggtcgatggggccggccagccggtagatcttcgtgccgggcgcggcaccggccttgtctttctcgtagtatttgtcgaagctgttttcggctttgtcgctgtccgagccgtcgtaatccgaaggcacgcccggcacgtcgtaccgctcggcgatgtaggcgtgcaacagtgacttgaacaggttgatggcgccgcgaccgtccgaaatgatgtgcgagacctcgagattgacacgattgcggaaataactcacgcggaacagcatgcttttgggcccgtaatgcagtcgcgagcatatcggcagatgttccggctccaccagcggccggccgtccgactgttcgaggtaatgccagaacatgccgttgagcaggtgcacgttgaagctcgggaactgggcgatggcatggtcgagcgcgtgctgcaggatgtccggggcgatgtcgtccgccagctcggccgaatagcggaacacggtctgcgaggagcggccagcctgggaggagtagaacttgccgatgttgtctagtcggtaccaagtacgtcttgccatgcgtcgcctccctccggtgcgttggcggtggtgccggtgccgggagccggcaccagcggtgtgtcgtcgaggaaatgctcgatgatccggtaagtggtggacaccagccctacggccgacgtgttgagcagataaccgtggatgccgtcgtgaatccggtaacaggagacgttgtcgttcaccaattgcagacgacgggcgtacgcttcgtcctcgtctctgagcgggcagtattcggcggacaacaccagcgtgcgcggctgattgctcaggtcatgcgcggtgagcggcgcgaaatacggattggtcaggtcggccacggacgaacggtacatgtcgatgtagtcggccatgtcctgtgcggtgaggatgtagtcggtgccgttggtccgcaccgattcgaacgggctggtctcgggattgtagtcgttgccgaccaccgggtaaagcagcatctgcgtgcgcggcatgaactcgccgcggtcgcgggccatgagcgagacggcggccgcaagattgccgcccgcgctgtcgccaaacagcacgatgctgtcgggatccggtgctgggattgtcgcagatatatcgcccccgccggtgggggctgtcggcgcagccgactgggggtggtcaacatcaacagaaccacccaccccagaaatcggcaattccccagcaaacagctgccgggctacctcatagcaattctcaacagcagtagggaagcggtattcaggagccagccggtactcgaccgagatcacacggcgttgcagacgtacggccatatgcgcgcaagcctgcgtgtacaggttgatgccgcctgtggtccaaccgccaccgtggaaaaacaggatcgtgccacgcggcgtgactgagggaagttccgtgttggcattgccggaaataccgtcggtgttgccgctcgacgtgctttccttgatgggtattttgggtaggactttgggtaatacggcgggcagaatcgcggatattgccgaggccactggcgtgccattggcggaagattcctccagggcttcgggcaggggcgctccataggcgaccagcggcgtgaacactcgcaatggtacggcatatccatccgccataggcgcgaaggcgtcctcgacacggcatttcggattggcgggtgcctgcttggcgataagctcttccgccacgcgctgcaatttgtacgacttgcccgcgttgggcttgatgtagctggcggccttcatcgcggcgaacaatgcctcgttgatcggcatgacgacaggtcctttcagcggcggattcggtagtgcgaacaccccaaccttagcccatgaccggcatgaacaaaaaagggaaggaacccgagagttccttccctgtgtgccgtatcagacgcgatacgcgccgattatcaggcggcgaagtattccacgccggcctcgaagatcggctggtacttgttgccgggcacgttgacgtacaggccgttgccggaacgctccgagtgacccatcttgccaaacacgcggccgtccgggctggtgatgccctcgatggcgagcagcgagccgttcgggttcacatctaggtccatgccgggggtgccggtctcgtccacgtactgcgtggcgatctggccgttggccctgagctgggcgagtacctcgtcggaggccacgaagcggccctcgccgtgggagatggccacggtgtggatgtcgccgaccgaagtcttggacagccacggggagagatcggaggccacgcgcgtgcggaccagtcggctctggtggcggccgatggtgttgaaggtcagcgtcgggcaggcgtcggtcatcggcacgatgtcgccgtacggcaccagacccagcttgacgagcgcctggaagccgttgcagatgccgagcatcaggccgtcgcggttcttcaacaggtcacgcacggcctcggtgacggccggcgcgcggaagaacgcggtgatgaacttggcggaaccgtccggctcgtcgccgccggagaagccgcccgggatcatcacgatctggctcttgttgatctcatcgaccaacgcctgcgtggattcggcgaccgcggccggtgtcaggttgttgatgatcagcgtggtcacgtcggcgccggcgcgctcgaaggcggcggcggaatcatactcgcagttgttgcccgggaacaccgggatcaccacatgcggcttggccacggaagagccgacgtacacggtcttcttcggcgcgtggaagtcgatggtctcgacggtcgcgcccttgtcctcgcccttggaacggtacgggaacacggattcgatgccggactcccaagcttcctgcacagcgtccaggtccagcgtctcgccggcggccttgaacacgtactcggaggtggtggtgccgatttcgccgatctcgaccaaattggagacggccggaagcttggcatcgtctgccagctcgacgatgaacgaaccatatgccggggtgaacaggtcgtccacggcgatgctgtcgttcagagtcacgccgatgcggttgccgagcgtcatcttgaacagggcttcggcggtggcgccatagcccggcgtggagacggccagggcatcgtggaagtcggtgagctcctcgatcacggagaacacctcaagcagcgcatccttgtccggggtcagaccgtcggccaggtagcgcggcgcgatgcgcacgatacggtgatcggcgtccttgagttcaggggaggtggcgcgcttcatgttgcccacggccacggcgaaggagatcagcgtcggcggcacgtcgagatcctcgaacgaaccggacatggagtccttgccgccgatggcgccggcgcccaggtccacctgggccatcagtgcgccgagcacggcggccgccggcttgccccagcgttccggctcgtcgcgcagcttctcgaagtactcctggaagctcaggtaggccttctcatgcttgaagccggccgcgaccagcttggccagcgactcgaccacggacaggtaggcgccggtgaactggttcttggacatgatgtacgggttgaagccccacgccatcgccgaagcggtggtggtctcgccgaacaccggcagcttggcgaccatggccatgttcggggtgagctgacgcttgccgccgaacggcatgagcacggtgcccgcgccgatggtggagtcgaagcgctccgaaaggcccttgttggaggccacgttgatgtcggtgaccagcttgttcatacgctcggccagcgtgccctcgccccacggggtctcgtaggactgctgtgcctcgacatgcacggtctggtgcttggaagcgccgttggaggccaggaactcacgggacagattcacgatcttgtcgccgttccaagtcatcaccatgcgcgggtcctcggtcacggtggcgatcaccgtggcttcgaggttctcttcgcgggcgtaggccaggaactcgtccacgtcctcggcggccacgtccacggccatgcgctcctgggattcggagatggccagctcggtgccgtccaggccctcgtatttcttgggcacggtgttgaggtccacgaacaggccgtcggccaactcgccgaccgccacggacacgccacccgcgccgaagtcgttgcagcgcttgatcagacggcaggcatcgccgcggcggaacagacgctgcagcttgcgctccaccggagcgttgcccttctgcacttcggcgccgtcgagttcgagcgattccacgttatgcgccttggacgaaccggtggcgccaccgatgccgtcacggccagtgcggccgcccagcaggatgatcttgtcgccgggggccggggtttcgcggcgcacatggtcggccggagtggcggccacgaccgcacccacctccatgcgtttggccacgtagccggggtggtagatctcgtcgacctgaccggtggccagaccgatctggttgccgtaggagctgtagccggcggcggcggtggtcacgagcttgcgctgggggagcttgccttccagcgtctcggagaccggcacggtcgggtccgcggcgccagtgacgcgcatcgcctgatacacgtaggaacggccggacagaggatcgcggatgcagccgccgatgcaggtggccgcgccaccaaacggttcgatttcggtggggtggttgtgggtctcgttcttgaacaggaacagccagtcctcgtcgtggccgttcacgtcaaccttgaccttgacggtgcaggcgttgatttcctcggactcgtcgaggccggtcaggacgccgttcttcttgagccacttggcgccgatggtgcccatgtccatgaggcagacgggcttggcgtcgcggccgagctcgtggcgcatcgccagataacgctcgaaggcggccttgacggtggcgtcatcgatggtcacttcgtccagctcggtgccgaacgtggtgtgacggcagtggtcggaccagtaggtgtcgatcaccttgatttcggtgatggtgggctcgcggccctcctcgctgaagtacttctgacagaattcgaggtcggccagatccatggccagaccgcgctcgtcgatgaacttctggccggcttcggcgtccatctcgttgaaaccggcgatggtctcgaccttgccgggcaccggcacctgggtcttcagggtttccttggtctccaggctggcctcgcgggcctcgaccgggttgatcacgtaatgcttgatggcgtccacgtcggcgtcggtcagttcgccttccaacgcgtacagcttggcggaacggaccgtcgggcgctcgccctgggagatgagctggatgcattcggcggcggagtcggcgcgctggtcgaactggccgggcaggaactcggtggcgaagaccttggcgccggcgaagtcgggcaggtcgtaggccacattgtccacctgaggctcgctgaacacggtgggcacggtctggtcgaacagctcctgggagatgccttcgacgtcatagcggttcacgatgcgcagggccttgaggccgttcagtccgaggatcgtgcgcagttcgcccgcaagctgctgggcttcgacatcaaagccgggcttcttttccacgtacacgcgaaaaaccatggaaatcctttcttgaaattattgaaaaattgaagaagcgcggtaaaagaacttggctcccctctctgaggggagctgtcagcggagctgactgaggggagttgtcatggcggtgaacgtcttgacctcccctcagtcgtctatcggcgacagctcccctcggagagaggagccagctgtatgttctgctacctgcacctaaacgacttattcggcgacttcgatgccttcggacttggcgagttcggcgaggcgctcctcgatctcttcgtaggccgggatgatgctgccgagaccacggcggaacaggtccttgtcaaggtgctcgaccttgccggagtggtccttctggtcccacagacggcaggaatccggggtgatctcgtcggccaacagcagcgtgccgtcggtggcgcggcccatttcgattttgaagtcgaccagcttgacgtcgatcttggcgaagatctcgatcagggcctcgttgatcttgcgggccagcggggcgatctcggcgagatcctcgcgagtgcatacgtcgagggccaccaggtcatcgtcgttgacgaacggatcgtgcagatcgtcgttcttcaggaagtactcaagcaccggctccttgagcggcaggccttcctccacgcccagacgggagcagaagtggccggcggccacgttgcgcagcacgatctccaacgggaacatgttcaccttgcgtaccagctggccggtgtcgttcactcgcttgatgagatggctgtcgatgccgcgcttcttgagcaggtcgaagatgatggtggtgatgaggttgttcaggcggcccttgccggtgaagtcttccttcttttcaccatcgccagcggtggcggtgttcttgtattcgacccacagaacctcgggatcgtcggttgcgtacagttgcttggccttgccctcgtagagcttttccagcttctccatgactcacctttcaggagtggaatttctgggtgaactaacggtaaaagggtaccaatcgagggctacaacaacactcggcatgacgctacgatgcggccagcgcatcatacgtcgctgcatcgaacggccatacgctgttgggatggcggaggcggacggtattggtccgacaatcgactcattgccggtcgcatagtcgttcggagtaacagtatctacgcaagcacgcggacactcagatgttcgtcaatagacaaaacgtgagtgtacggccgcgcacgcacgataatgggagtgacgaaatggtgcaaggaggttcgtcatgatcgatcatattggtttgtttgtttccgacgccgcacagtacgcggatttctacgagaagctgctggccccgctgggttacgtcaagaaagtggcgtacccgaccgccgtgtgctttgccaatgacgaggatggcgacagcgtttggctggagtctccgaaggacggcaacccggtggtgccgtctcatgtggcgttccgcgccaaggatgaggacgccgtcaaggcgttccatgaggccggtctcacctctggcggtaccgacaacggcgctccgggcccgcgcccgaactatggccccacgtattacgccgcgttcatccacgacccggacggcaacaatattgaggccatgctgagctgatcaggccgtggactactccacggtaatcgtcaacgcatcggcaacacggccggccttggcacgggcgtcggcttcggactcgccgacggccagtgccacggccatacgacggtggccatgcacttcgggcttggcaaaaatgcgcaggtccgtgccgggttcggccagagcagcggccacatcggtgaactcggcctcaccgtcgccggccaccacaatcgcatggcttgccgccaccgagccggccggaatcgtgagcgccacatgctcgggggtgatcggcaggccgagaatcgcgcgggcgtgcagcgcgaactcgctcagacgctgggaggtcatcgtcaccataccggtatcgtgcggacggggggagacctcgttgaacagaatcgagccgtcggtgagcacgaacagctccacgccgaatacgccccaaccggtttcgccggtcgcctgagccttggccaccaagccttcaacggcggtacgtgcgatgtcgcgcgcccgctcggcctcgccatcgggctcggtagccggctgccaggactcgcggtaatcgccggactcctgacgttggccgatcggcgcgcacgtcacaatgccggcggacgaagaaacggtcagtaccgtcagctcacgctccagcggggcaagcgcctcaacgatcacgcgcgacacatcgccctcatcggcggcgcggcggccctcctgcgcttcggtccaagcggcatcgatggcgtcggcggaacgcaccaccgactggccgtgaccagacgagctcatcaccggcttgaccacgcacggatagccgacttccgaagctccggcgcgcagctcttccagcgagccggcaaaacgatacggtgtagtcggcaagcccaattcttcgtgggccagtacgcgcaggcgctcgcggtccatgcagatcgcggcgatttcggcgctcggcaccacctgggcgcccgcggccgcagcaccggccagcacatcggtggcgatggcctctacctcgggcacgatgatgtccggcttgatttcatcgaacaatgcctgcaattcggcggcattcgccatatccaacgcgcggtattcatgcgccacctgctgggccggagcgccggcataggagtcagcagcacacacccatgcgcccagtcgcatgagttcaagtgtgacctccttgcccagctcgccagcgcccaaaaacagcacacgggtggggtgcttgcccagcggtgtgcccagcgggtggttggctgcgcgagttgcgggggagacggcggaagtctcagcggaggttgcgggggaagaggcggaagtcacggcagtattcacggcgttctcagtcatacccacattctgccatgacgcgatgatttcggtatgtcgcgtgagcggagtgcctcgcgcggcaaaattacgggcggaatatccggcttcatggggcggtaaattccccatggggcggtaatgagtccatggggcggtttgttggttttgtgaaaccgcggaattaagccgttttgccttaccgccccatgggaatttcaccgccccatggggtaaataccgccccatgggcaggttaccgccccatgaagattcagatgcccgtaacccgccataaatactgcgtatagacacgccattgcgtgtgtaacagagccgtcgtaccttagcaattaccggccgatgaagtatggggcggtcgggccaacatttttggatgcgacatatagcgaatagcggcgtgccggttccggcgtttcaggctacaaaccggcacgctggcaatagtcgaagtacttaacgatttcgcctatgcgaggctcgaattcggcgacgtgcgctcgctgagcctgctggagactccgggcgcgctggacgtggcgctggaacttggctcgctgtccaaaatgtatatggtggccggctggtgcggtggcatggcgattccgccgcattcgtggattggctgctcaacacggccggcgtggcgctgatgccgggggtctgcttcggtcaggcgggcgaaggctgggtgcgcatcagtctgctcaagcacaccgccgagttgttccaggccgtggcccgcgccgatcgtgcgctgcgaagcgcgtgattcaatattgggcaaaatgcggcagcccataccatttcacacgcgttcaggcagcgcggccgacgctattgccgcgcggtggtttaggatgaggcaatgcgcgaaaacgggattgaagagagcattgatcgtccgctgactatcgctcttgtggtcgatacggtgggcaatcagggcaacggcacctccaattcggccttgcaatgggctgcggaattggagcggcaaggccatcatgtgaggcttgtcggtataggggcgcccgaatatccggcgcgtgtgaataaggtgccactcgtctcgtgggtggccgccaagcagctcatgcaattcgccgaacccagcgacacgttgttccgcaccgccttccaaggcgtggatgtggtgcatatctatatgccgttcaaattcggccgtcgtgccgctaaagtcgcccaccaactgggcattcccgtgactgctggattccacctgcagccggagaacgtgctgtattcggccggcccgctacgtcgcattcccggtatttccagcttcctgtactggctgttcaagcactggctgtacaagcacattgaccacatccatgtgcccaccgaaatgaccgcgagcctgttgcgcgcgcacgggtataaagccaagttgcacgtgatttccaatggttattcaccggtgtattcgccgaagaagccggccgatccggatgcctcggctcccgtgccgttccgcgtcatcgcttccggccgactggccagcgagaaagatcagattacgctgatcaaggcggtgtcgatgtcccggcacgccggcgatattcagctggtgatcgccggtactgggccgctcaagcagtatctcaagttccgcgccgggcgtttgctggcgcgcaaggccgatatcggattccacaagcacgccgatatgcccgatttgttgcgttcgggcgatttgttcgtgcattgttcgattgccgacatcgaatcggtgagcgtgatcgaggcgatggcgtgcggattggtgccggtgatcgccgcgtccgaattgtcggcggccggccagttcgcgctgatcgacgagtcgttgttccccgtgcgggacgcggccctgctggcccgacgcatcgattggtggatcgcacatcaggccgagcgcgccgaatggggcgagaaatacgccgaatacaccaaggcgcattattccgtggaagcctcggtccacaagttcgtggatatggaacgcaaggcgataggggagtaggagccttctcgtttgcggagaggtctttccctcagtccgcctgcggcggccagctccctcatcggcgggagctacgaaaaaacctccctctggtgagggaggtggcatcgcgaagcgatgacggagagagagattagcgaagggttttacaacacctcaataagctgatcgatctcttcatgcgtggtggcccagctggtgcagatgcgcatcacggtatgcgtgtcgtcggccttctcggtaaagccgagcttgacctcgcgctccagacggtcgatggtcggctgatccatcgtcacgaaaatctggttggtgggcgcttcgaaagtgagcatgtagcccttggcgcgcagggcctcgcgaatacgatcggccgcctcattggcgttgcgggcgatcttgaagtacagattgtcggtgaataaggcgtcaaactgcgcgcccagcacgaagcccttggccagcaaggcgccgtgctgcttgatgcgggtcaggaagtgcttcggcgtgttgtgcttggtaaacaccacggcctcgccgaacagcgcacccaccttggtaccgccgatgtagaacacgtcggcgatggtcgccagatccgtgagcgtcatgtcggaaccagtggcggtcagcgcgtagccgagtcgcgcgccatccacgaacagcggcatatcgtacttatgcgccacatcggcgatggcctgcagttcggctttggagtagatggtgccatattcggtgctttgcgagacgtacacggatccagggaacaccatgtgctcatagttgccgtccgcatagaaggtcttgcagaactcgtccagttcggttggatccattttgccgttgtgttggggaatcgtaagcaccttgtggccggagaactcgatggcgccggcctcgtgcacgttcggatggccggaggcgaccgcgaccacgcctgcatacgccggggtgatggtgtcgatgacgacctggttggtctgcgtgccgccgacgaggaaccacacatccgcgtccggctggccgcaggcctcgcggatcttggccttggcctgatcgctcagttcgtcggacccgtagcccgaatacagatggttgttggcttcagccacggcttcaagcactgcgggatgggcggcgcgggagtaatcgttctcaaaagacagcatgacggaccttttgtccttgtgttagatgaattggatatgcccgagtgtacaacgtggcggttcccggcaggagcggggaattcatggagaaaaacaaaacccttccgcgaacggaagggttttactggggtggccaacgcggctcgaacgcgcgaccttctgaaccacaatcagatgctctaccaactgagctatggccaccatggtgtcgtattcagcaagctgaattcgcacaacaggtgaatactatacacaactttgcggatgtgtgctcatcggtgtgtcgcgatggaatcaagcggttggtttcattcttggggccaggctgtgggctgtctcaaatggtgggatgtggacgagtgggtcttgtgtggcgattgatgaaaagtcagggcacacaacggcgtgatggtgcggctggggattgcagagatgattacgtgagcgttcacaatgtgagcattatgtttcatatcaaccgcgacccgcctagtttcatgcgatgttacctacaccgaacaagggaagagaaacaccatggaaaaggttaaagcctttgcggattggctgaccaagtggtttacggtcatcgtcatcgtctgggccgtcttcaactacttcgtgccggccgccagcctgtggggcaaggcgtacaccggctacatgctgggcatcgtgctgttcggcatggggctgaccctgacgctggacgatttcaagcgcatcctcacccagccgatgatggtcatcgtcggcacggtggcccacttcgtcatcatgccgctcgtcgccgtggccctgtgcgcgatcttccacctgtccggcccgctggccgtgggcgtgattctcgtcggctgctgcccgtccggcacctcctccaacgtgatgagctacctgtcccgtggtgacgtggccctcgatgtctccatcggcatcctctccaccctgtgcgccccgttcatgattccgctgctgatgcagctgctggcctcccagtatgtgagcgtgccggtcgaatccctgttccttaacgccgtcaaggtggtgctcttcccgattgccctcggtgtgatctgccacatgatcttcggcaagaagatcgagaaggtcacggtggccctgccgatcgtgtctcaggtggccatcctgctgatcatcggcgtggtcgtcgccgccaatggcccgaagctgttcgtggccagctctctgatggccatcccggtggtcatcctgcataatctgtgcggctactcgctgggcttcggcttctcgaagctgatgtacaggatctacccgaagggcttccgctacgcgcagcagaaggccatcacgttcgaggtcggcatgcaggactccgccctgggcgccacgctggccctgacctccttcgcgtccaacccgctcgccgccgtgccgtccacgttcttctccgtgtggcacaacatctccggctccatcctgtccagctggtggcgcaaccatgacgaccggcacgagattcattgggattctgacaacggcgagaagggctccgccaagagcaccgtttccgtggcccacccgttcgacgccgacaaggccgccaaggtcgctgcctgaaatcctgagatggtgagaaaggtcgggtaaggtacgactccagtcagtcggtcactcacctttcctacctcgcataacatagccgctcccgcttactcccgattaatgtatcgggcgtttcgcgagggcggttttgctataattagtaatgcagaaagcggcaaggtgatacggcaaagaggccgggtcgctagaggttcccatcggatatggaagagcacgaggatgtgctggaaacagataacacagaagcggcatgtggtgaaaagaaacataatgtaacctccttggcggtgcccccgtgtgacatagtctccgcgggggcacctgctgtgtggcgttcgcttttttgcgacgcattcccgggaatattgcgttgggagggcgtgtgtgcgtgtgttgtgcgacgcattcccgggattgttgcgttgggaggaggggagaagtacagggcgcaggaggtccccaaaccagtgagtcgaggcccggcgcgtcgttgtccggcggaatcgtagtatagatattcgtgtgtgccagcagcgcgccttatgtaacaggcgagcatgctgggatatccttcaaaccgctgatcgcacgtagtaatgcgccgacgggaggggcgaaggccatcgggccggtggactgggctatcttttccgattcgtcgggtgtcgccaacaggcagatgccaagcgagtgtgctgaaaagtgtgggcgcagtgcggcggtcacacaaaagcaagagaaaccactgaatcggagaattcaagttgcctactattgaacagctcgtccgtaagggacgtcaggcaaagccgaagaagtccaagactttggccctgaagggcagcccgctgcgtcgcggcgtgtgcacccgtgtctacaccaccaccccgaagaagccgaactcggctctgcgtaaggtcgctcgtgtgcgcctgtcctcgggcatcgaagtcaccgcctacattccgggcgagggccacaacctgcaggagcactccatcgtgctcgtgcgcggcggccgtgtgaaggatctcccgggtgtgcgttaccacatcgtgcgtggcgcgctcgatacccagggtgtcaaggaccgtaagcagggtcgttccctgtatggagcaaagaaggcgaagtaagagatatgtcacgtaagggaccttccaagaagcacgtcgtgctgcccgatccgatctacggttccaccgtggtggcgcagctcatcaacaagattctgcttgacggcaagaagtcgatcgccgaggacatcgtctactccgcgctcgatatggtcaaggagaagtccgaccaggaaccggtggctgtgctcaagcgcgccctggacaacatccgtccgtccctcgaggttcgctcccgccgtgtcggtggcgccacctaccaggtgccggtcgaggtcaagccgaaccgcgccaacaccctgtcgctgcgctggctgaccgacttctcccgcgcccgtcgtgagaagaccatggctgagcgtctcgccaacgagatcctggatgcctccaacggcctcggtgcttctgtcaagcgccgcgaggatactcataagatggcagaggctaacaaggccttcgctcattaccgctggtaatcactcgccctgagtaaaactaaggaaaaagatggctgaagagatttcggacctccacgacgtccgcaatatcggcatcatggcccacatcgatgccggcaagaccaccactaccgagcgtattctgttctacaccggtaagaactacaagatcggcgagacccacgacggcgcctccaccatggacttcatggcgcaggagcaggaacgtggtatcaccatccagtccgctgctaccacctgcttctggagccgtcagtcccacgacaccaaggacaagttccagatcaacatcatcgatacccctggccacgtggacttcacggccgaggtggagcgctccctgcgtgtgctcgatggtgccgttgccgtgttcgacggcaaggaaggcgtggagccgcagtccgagaccgtgtggcgtcaggctgacaagtacggcgttccgcgtatctgcttcatcaacaagatggacaagctcggcgcgaacttctactactccgtcgacaccatcaaggagaagctgggcgctactccgatcgtgatgcagctgccgatcggttccgagaacgacttcaccggcgtcgtcgacctggtcgagatgcaggcctacgtgtggaacggcaccgaggagctcggcgccaagtacgacaccactgagatcccggacgacctcaaggacaaggctcaggagtaccacgagaagctcgtggaagccgccgccgaagccgacgacgacctcatgaacaagttcttcgaggacggcgacctgtccaaggaagacatccgcgccggcgtgcgcaagctcaccatcgccaaggaagccttccctgtcttctgcggctccgccttcaaggacaagggcgttcagccgatgctggacggcgtcgtcgactacctgccgtcccccgaggacgtgccggccatcaagggctacaagcccggcgacgagtccgtcgagatcgaccgccacccggtcaagaccgatccgttcgcggctctggtcttcaagatctccacccacccgttctacggcaagctcgtgttcgtgcgcgtctactccggctccgtcgtgccgggcgactccgtgctcgactccacccgcgagaagaaggaacgcatcggcaagatcttccagatgcacgccgataaggaaaacccgatggaccgcgccgacgccggtaacatctacaccttcgtgggcctcaagaacgtcaccaccggcgacaccctgtgctccatcaacgacccgatcaccctcgactccatgaccttcccggatccggtgattcaggtggccgtcgagccgaagaccaaggccgaccaggagaagatgggcatcgccctgtccaagctggccgaagaggatccgaccttccaggtcacgaccgacgaagagtccggccagaccctgatcgccggcatgggcgagctccagctcgacatcatcgtcgaccgtatgcgccgcgagttcaaggttgagtgcaaccagggcaagccgcaggtcgcctaccgcgagaccatccgcaaggccgtcatggaccagggctacacccacaagaagcagaccggtggttccggccagttcgcaaaggtcctgatgaacttcgagccgctcgacaccaccgagggcaagaccttcgagttcgagaacaaggtcaccggcggccacatctccgccgaattcatcggccccatcgaggccggtgtcaaggaggccatggagtccggtgttctcgccggcttcccggtcgtgggcgtcaaggccaccgtcaccgacggccagatgcacccggtcgattcctccgaaatggccttcaagctcgcaggttccatgtgcttcaaggaagccgccccgaaggccaagccggtcattctcgaaccgatcatgaaggtcgaagtccgtacgccggaagagtacatgggcgaagtcatcggcgatctgaaccagcgccgtggcaacatccagtccatgaccgacggtgtcggcgtcaaggtcatcgacgccaaggtcccgctgtccgagatgttcggctacatcggcgacctgcgttccaagacccagggccgcgccatgttcaccatggagatggactcctacgacgaggtgccgaagagcgtctccgaggagatcatcaaggcccagcgcggcgagtgacacgcgccacatcatgaagtggccggtgtctccagtcagcggtagtatcgtataccgctgactgggttctggctcttcaaagtggcacataacccagaaacccagtagaataagcgagtccctgtgcgaaagggcgcaggaaactcacgagacgtccaggaggacaaaagtaatggcaaaggaaaagtacgagcgtactaagccgcacgttaacatcggtaccatcggccacgtcgaccacggtaagactaccctgactgccgccatctccaaggtgctgcacgaggagttcccggatgtcaacccggagtacgacttcaaccagatcgactccgctccggaagaggccgcccgcggtatcaccatcaacatcgcccacatcgagtaccagaccgagaagcgtcactacgctcacgtcgactgcccgggccacgccgacttcgtgaagaacatgatcaccggtgccgcccagatggatggcgccatcctcgttgtggccgccaccgacggcccgatggcccagactcgcgagcacgtgctgctcgcccgtcaggtcggcgtcccgaagatcctcgtcgccctcaacaagtgcgacatggtcgacgatgaagagctcatcgagctcgtcgaagaagaggtccgtgacctcctcgacgagaacggcttcgatcgcgactgcccggtcatccacacctccgcctacggcgccctgcacgacgacgctccggaccacgagaagtgggtccagtccgtcaaggacctcatggccgccgtcgatgactacatcccgaccccggttcacgacctggacaagccgttcctgatgccgatcgaggacgtcttcaccatctccggccgtggtaccgtcgtcaccggtcgtgtcgagcgtggccagctggccgtcaacaccccggtcgagatcgttggtatccgtccgacccagcagaccaccgtcacctccatcgagaccttccacaagaccatggacgcctgcgaggctggcgacaacaccggtctgctgctgcgtggcctcggccgtgaggatgtcgagcgtggccaggtcgtggccaagccgggctccgtcaccccgcacaccaagttcgagggcgaagtctacgtgctgaccaaggacgaaggcggccgtcactcgccgttcttctccaactaccgtccgcagttctacttccgcaccaccgacgtcaccggcgtcatcgagctgccggaaggcgtcgagatggttcagcccggcgaccacgccaccttcaccgttgagctgattcagcccatcgccatggaggagggcctgaccttcgctgtgcgtgaaggcggccacaccgttggctccggtcgtgtgaccaagatcctcgcctgattatcatcagacaagaatcttcgcttgaactagcgacttaagaaatccccttcgaggaaactcggaggggatttcctataaccgcagcaggatatggatatgtaccacgacttccggcctggatgcgctagtgttgctttccaatagataaacggactgctgcactgcgagggtatgacactgatggcaggccgggaaagaaggtcgatgatgactggttcgcaagccgcacactgtggttccgtatccgcgctttcactgggactgcccgtctccacggcgattcccgaagccaaaggcacactgccgaaagccttgttcgtgggcaaggcaccgatttcaggcaaactcaagcagcgattggtgaacgaaatcgaatccattaccatgctggcgttggtccggtcgattaacactgggcttgcggacggcaaactggttccggaagtgctggtcatcggactgaagcttacggccaaagccactggcataccgaacgaggtcatcgatttgattgccgggcagcgtaaatcgggcatcgtgttcgtgtgcgtacgcgacgtgccgttcgagggcagcacacgtgaggaatgtgcgttcgccgtgcgtcgggcgataccggggcgtgccggccacacgccgatctatcgggtatatgccggcgattggcagccggcgggggaggcccggctggagctggccggctctactattgatgagctgtgggcctcgctgtgctcacagaccattctgggcacgccggagatcgaaaatctggatgcgcgcatcattcgccatactgaaattgctcggctcgaatccgaagtggacaagctcacccgcgaccatcagcgcgtcaagaatcctgttcagcgcaatgaaatctatgccaagctccacaaggccaaaacacagctcgcaaaactgcgcgaagcatagtgatatgaaaaccattggggtcccgctggcgggagctggctcgcaaagcgagactgagggtggtccaggtccgtggcctagggctacgcccaagctaattgaaatattcgtgcatcatacagcgtacagttaaaccatgttccctctgctcgaaaccctggtcgccgtatacgaggtgggccagttcacgctggctgccgacgaactgaaggtgtcgcagtcgacggtgtcgtcgcgtatcgcccaattggagcagatggtcggcgcgccgctgttcgtgcgcaatgcgaaaagcgacgtgacgcccacacaggccgggcggatgctgtaccagaccgccatcggcatcgacggattatggcgggatacgcgtgagcagatcgcccgcgtgcaggaggcgcgtgagccgctggccgtttcgttctcgcacacgaccgcggcgattctgctgccgaaggcgttgccggtgatggctcggaacatggacagtttcgacttcgccgtacacgtgatgaactcggatgcgattctcgaacgggtcagcatgaaggccgtgcagctcggcgtggtggaaaagccgatcgtgaacgattcggtggaccgcgtcaccctgtgcgaggaccggctggtgttggcgggggagcccgacggcgtgtggatggtgcgcgagcacggttccggcgtgcggtattacacggatttgtatttcaagaccgctcaggttgtgcctgcacgcacgatggaagtgtccagtaatgcggcgattgtggcggcgctgtccgccgggttcgggcagtcgttgatttcggaagccgccgtgccggcgggcgtgccggtgcagcgggagcttggcgatgagtttgtgcggcggttctatgcgctggtgccgagatccggtctgacgcacgatcagcgggagttggcggagatgattattgctgcgctgcgcgggtagtcagatagtcgactgaggggaggtcgcgaacgttgtttctctctctccgtccgcctgcggcggccacctccctcatcagagggagatcaattaggtatcgacaaaatcgatgatatgtattggttgcaatgatttgaccgatgtaaatgcttgagcttcaatagacaccgtgagagagttctgtacaaaatggtggaagcgcattaccaccgttgacatgttgttcattggcgttctgactctgctggcctcgctgttcgcctcctggctcaagcagttccccggattcagcctgttcggcgcgcttatcatcgcgctgctcatcggtatgatcatccagttcccgatccgcagtgcctacgtcggttccaatgatggccgcaaggcaggc

SEQ ID NO: 1368 - DNA, 12012 bp, Unknown
  R157_18m  MAG No. k141_41634
cggtcctttctggcggagatacaagcaccatccagttaagaccattccgtggtcggcatgctctgcctaaacccgaaaaatcatcgtgactaaacccgcaacaactaattgaacacaaacagccgtcctcctcgtcacggaactccacgcccgacaccctccacgggtcaggcagttgcagggcggcggtgaacaacgacgtggtatccatacccccaaactacccgaccagcaccaccaccccccgacccactcacccacaccaaacagcgaaaggcctaaattaataccattttaatcctcctcgtcgagaaatactcatttcccgttatctatttgtaagtgcaacatccttgttctcggctggttctagcagttcgtcggcgaatgcctcggcgggggtgcggtggccgagcactcgcatgggcctgttgtcggtctcgtcgacgatctcctgcagttcgcgtgccatggagggggcgatgggcgtgcgtttgggcgggtggcggcggatcatgccgttcctcttccgacaggtgcgaatacacctggcccaaggcgcaacaccccttcgtttggctatctggacaatctccaatctaacgggtgctgcactttcaattagacaacgggcgtatgcgcactctttatcggcatgatagagagtagcgaattgtgattctcgcaatctaaagggaattgatgttgttttttcctcgattctttattgtgcagacagcccatatgaacagtggaattgcatagaatgcatatgattcaaactgaatatataggtatgcgagaagaatgaaccagcatatgttccgtcggctccatccatgatggaccgctacgtgtgctaataccaagagcaagaaggccaaaaagcaaaatagaccaaattcggtaatgaagctggcatagatgctcattgtgaaagtatccgctgggggatttgctaaaacgtcgatttcggtattgggcgcaccgccatgggcgtcataccattggcgggcaccggcgtaaccagtacgcactgcattagagatattgcctgcgccccatccaaacatgaagtgagatagatcatgtttccatgaccacatgggagcgagcatatggaagattcttgcactcatcgatccgtcaccagcaagtaatccattggtggctaaagagtttagacgcggattgatgataattgcgctcaatccacctgctccaagaagtcctaaagcaccgacgaacccagctgttaccttacgtgagtggaagttgattgtcgctatcagccagataaatgtagctaccactgtatccagtatgattcgggtgccggagcccatcgcaattgctccagcggcaaatatcggtatcaatatgccaatcttgcggtcgcgggtcagccagaaaactggcaggagtacgccgaacagatgcatgccgatatagctaggttctgcgaacatgaattgaggacgaacgctcgcatagtttctatacagagcaccccaaaaatatgctcgtactggctgccagttcagatgtcgttctaaagcgatatattgcagtatcccaatgaggaatgccactacatatgcggtgaatagcgtagttaacaatgttcgtacaggtacacgtttaatgcggatcgcgatgtcgagcgaagccaagcacgccagccctaacaatatggagatgaatgactttgtggttgcgctggcgtgtattccatatgactgccagccgtatacggatgtgagcactagtagcaggggaaagaggaagaacggcaggaagcggcgtgcggtatcgcgcaagtatcgccagttgatgattgtgtacagggtgaacaaccaggggggagattggcgtccaataggggagtggaatgccaatttttgtgccatcaaatggcagcatggccactgcggcaaacatcaacatgtctgatggggtgatggtgatacgagtcagcgtctcggtcattgccccacgctgtagcgcggggcaatgaccggagtttctgcgtttttcttgaactgacttgttgccgagctgcgtattgttcggtgtgggcatacttggttccctcccatatcctccgtgagaactgtaccagttgcatgtgtgggtgaggtgatgggggttcggtcaaccgttcactttcatgaagtacttttaaactcccaccaagtaattggcagtcgcttacaaaaactgaataatctatgggccaatcagccgtttagatcctctccgtggggctggtgcatgtattgttcaacccaagccatgctggttttttggaaattaaaagcctgaattatcattaattcgaaatccaggcttttatggtattcgtataatcgcgaattaagcagaaatcactcagccttcttgcggccgcggcgcttcatggtgccggcagtggcgtttgcgacatcaaaaatcacggtcttgtcttccgggtaagcagtgccgttgacagagacgaaagagacctcgccttctggagcttcgacaagcgtgaagtacttggaaattgcttcaacaagcacagcattcttgatacttacagacgtagtctgcttgccttcacccttgctgaatttcacggcattatccgccttggcggtagtcggcgtgacggcaatttgtctggttttatcgttaataaggatcttaacttgtgctggaaaattcagcacttctgcggtggccttattaaaacgtacaacggaatcggtaacggtcattaccgttttgccaacgggcttaactagctgaacttcttcgaatccttgaagcaaggatgccataatatactccttcacactgcataaatattattgacaattttgattgtaatgaatgataatttgaattacaattctatatatcacattctcaatttcaattcataatatggaatagggaaatagtgctgtcgcaaaatattgagtgagaatacattgtgattgcgattgtgtacagttattctgcagtcgtatcaagggttttggtcattgttcacaaggatacaaaagctcgagaagttcccggtaggtgctaaattatagaccatctgtgaaaatttcccgaagaggtaaggaagaacattgaccctcgctgatttgctgcagattgttcgcaagcatctcgcgtctgcgattatctcgtttgtggtggtgtttgctgcggttgcagctgtcacgttcatcatgccgccgaagtacacggctacggctgaagtgttcgccacgtatgccggtcagtccggcgagacgcagaccaccaacgatatgagctctggtgccaattatttgaatacccagatcacgacgtatccggaactggtgaagaccgaagccgtgctccagcccgtcattaaggacctcggtctggatatgaccacgaccgatcttgccgatgtggtgaccgctacgaaccccacgaacacgttcatggtggatatctcggcggaagtcggcgatccgcatcaagcggccgacatcgccaacagcgtggcgaagaacctctccgatcagatttcttccgacctgtacaacaactcctcttccagcggctctcccatcaagctcacggtagtgcagaaggctcagactcctaccgggcagagctccccgaacattccgctgtacctggccgtgggcctgattctcggcatcatcgtgggcgtcggcgttgccctgctgagggacatcctcaacaccaaggtggactccaccgatgacgtgcacgaactgacccacgcctcttcgctgggtaccgtgccgcaggccgcgattcttgacgacagccgtccggtcgtagtcgctcagccggccggtagcgaggctgaggaattccgccgcatccgcacgaacctttcgttcctcaccaccaccgctacgcagggtcatggccgactgctggtcatcacctctaccgatccgtccgaaggtaagaccacggtttccgccaatgttgccgtggctctcgccgaggaaggcaagagtgtgctgcttatcgacgccgatctgcgccacccgtccgtggctcacaagctcggcattgaaggccacgtgggcctgtctcacgtgctgtctcgccaggcgtccccggccgatgtcattcagaagtattggaagccgaacctgcacatcatgcctgccggcaagcgcccggctaacgccagcatcttgctgaactccgatctcatgaaggaaatggtcgagcaggccctcacccagtacgattacgtgattatcgatactgctccgctgtccgtggccaacgacgccaccgtgttcggacgtatggctggcggtctggtgctcgtgaccggtaagggcgtagtggagaagaaggagctgagaagcaccgctacggctctgcagaccgccgaagtgccgattctcggcttcattttcaacttcgctgatccgaagaagatacactcgaagaactattactactactattacgaggacggcaacaagcgcagctctcataagggtgccaagagcaagggcgagaagaaagcccgcaagtaatagtttggcgtttgccgatcgtcttgcaatataaaccgtgcggtacttctgtgccgcacggtttactgttataagactgagttgttggatttatggtgctggctgtatatcgaatagtaaagaattgtgacattcttgaataccagctggcacgctcggcatagggctggataaactgacagtttggaatgacttcaatgacgcaaaggaatgagaagagcatgggaacagatgaacgccctgaaccgaacgcggaatctggttcctctacgtcgccggctcgcggcgatatcgtcgataccttctgggacataccgcctatctcatttgacgggaacgcaggcagcgctgcgccgagtgacggcaacagtactggtgctgttgcggatggctctcaatctgcattccccagctttgacgaagtattggaatggcctactgcgagtgcggcgaatactgctggcgatgcctcttccccttccgatgcggcggctactaccccgatgacttttgcggcacctgatactgcggaaagcgctcagtcgcctcagcgggatgacaatgcgacgctgccgctttttgcgccggttcctgaagccaagccgcaacgtgatagtgccatagacgatttgaacatcgacttcagtgccattgaacagaaccccgagccggtggaggagccggaagaagaccgtgtggcagagactcctcgcggcggtaagggcggcaagaagaggaccaagggcattatcatttcggtgattgttgcgctggtggtgattgcagcgatcattggtggtgtatggtactggcgtttcagcgagcagcgtcaggaaagccatcagctgcatcaggatgcgttgacagcatgtactgaggccgtggaccagaattccaccgctcagaaggcgctgaccaaggcgttggttgataccaagagtgctcaaagcattacagctgatcaagtggctgacggtgcgaccgtggatgcgctgaagaaggcaatcgccgcggtaaagaacgtggaagcggtggagtgcaagacttcagcttccacgtcggacctcaaggaatatgccaagacggccactagccagaccaagaccgccaagaagaacgccactgcgattactgccgcggcaaaggccgtgacggacagcaagaacgctaaggatcaggctaacgctcagcaggcgttgcagggcaagatagccgaggctcagactttactggacaacagcctgtatgcagtcgacgataattcaacgcgcgtgacactggaaagcgacatcgccaacgccaataccgtgttgtcccagcagggcactgacgtaaaggccatgcaggatgccgtcaacacgctgactgcgtccatggatgcagtcaacacgtccatggccaactacagcgcagctgttgaggctcagcaagaagcagcgcggcagaaagctctgaatgattattatgcacgattaaggcagcagcagttgttgcagcagcgacagcaaacacagccagacggtacagacgatccggggacaggtggccaggcggctgatcaggggacgaaaccgaaagatgatccggaaccgaaagatgatccggaaccgaaagatgagtcgaagtagtaagttatcgtgctctagcctaaattgtcaaaggaaccgcgaataacagtagtgcgcatttccaccatttgctgttgcaaaccagctcaatatacgcgtgctttgtgccgctatgccgtcacggattcgcataatcagttgtggagggcacttcgtatgacacggtaaaagtgatctctagggcgttgcataatgcaaggattcggctgataaggcgcagaaatgctgatgccggtccccgatgattgggaaccggcatcatgcgtatgagttcgctcggcgtttgggccgggtttcactcagccttcttacggccgcggcgcttcatggtgcctgcagtggcgttggcggcgtcgaagatcacggtcttgctgtctgggtaggcggtgccgttcacggactgataggagacttcgccttcgggggattccgccaaggtgaagtctccttgcggcgcggaacttgttgtgtacgtgttgatttggctggcttagtagctcttgtgcgcctgccaatacgcgtacgcgccggaaatcgagccataatggccgttgcaataattcacaaaccacttgaactgggtctggtagttggtctgccagtctgcacctgcggaagccatcttgctgcccggcagcgcctgcggcaggccataagcacctgaagacgggttcgtggcggtggggctccagccggattcgtggctgatgatgaagttggcggcggtgaagtcggcctcggagtagccgttggaaatcaggtagtcatgcgcccaggactgaatctcgccggccggcgtggtggtgccgaggctggcggcgctgggcgaagacacggtggcggtgcccaccagaatcaccttatcgaccggagccttcttgacccaggaggtgaacacattggaggaaacgacctgatctccggagcgggttaccagagacgtggtctccagcacgcccttctcgccttcggtctcgaccttctcctggcccttgggcaggctcgaggtctccttgcgcacttcattgaaggcgatttcggtgtcggtggtctccaccgtggtgttggcgcggttgatggaaatgactgtggactcgctgaccttggcatccaggctcggagtcacgctgtcttccggatcgaggacgatatcgccggtttccagcacatccttgacggtggtcatgttggctttttcgccgagaaccacgcgagacttgccattgaccttgactgtcacgtaggtggtgctcttgagcgcgccgcgggatgccgaacgggaagccgcaccatcagtggcggagaatgaggttggggtgatggaaggtgtagcggtgctcgactgatagaagtcgcgggatataacgcctgcagtggcaatgagacccactgcggccacggccgccgcgatcttcgcccactggccccgagacagggttttgacgaatgaggtccgctcagcgtgcttcgacattgcgctccttggttgggtacacactgctttccatcataggacgttgagtggatgaataaaaaaaccgtggtgggtgttcgacccgccacggatggcatatgtagtagttagcagtgcaaggaagcgctatatatgggcttttccgcgcttccgttgccgcagtgtgataaggcttactgctgctcctgcgctgcctgctgtgctttggcggcggccagatccagcgccttggcctgggcgatgaggtcgtccagatcggaggcctgcagcgcgccggcctgctggaagatgacctcgccctgcttggcaatcatcagcgtaggcacagcttgaatgccggcggcctgggccagatcctggttggcgtcgatatccaccttgacgaaggcgatgttcgcgttctccggctcgttggaggccgcctcgaaaatcgggccgaacgcgcggcacgggccgcaccaggtggcccagaagtcaacgaacacgatttcgttgtcggtaatggtcttctcaaactcagctgaagtgatggcggtggtggccattgaagttccttcctcaaacacagtgcttgatgctgtgtaccagtttcccagcaacacccaacatttcggcaaaagtttgtgccccaagctgaatggattgcgggcgcatggaggcgatgaggcgctttgctgagaattcacagacaatttttcggtgaattgtgcccatgttcatcaatgcgcgcgataatgagaccatgccagtcatgaatgatgaagtgcccgacgagggcgattatgatgccggccgtggccgcggcgaattcgacaacatcacgcccgaggacttcatccacgggggcggttccggccacggcaacccgccgggctggctgggaccggccgacatcaaccgggcgcgtcatcagatgcccatcgcgtacgtggagatcgtgcccgtgcgcaccgatgagatgggccgcattgcccaggtcggctcgttgctgcgcgtcgccgaagacgggtcgatcgagcgtacgctgatcaccggtcgtgtgctgtatcacgaaacgttgcgcgaggccatcgcccgcaatgtggccaaagatttgggcgatatcgccttgccgctgctgccggtcgggctccagccgttcaccgtggctgaattcttccctacgccgggactaagcgaatactacgatccgcgtcagcacgccatcgcactgtgctacgtggtacctatcgctggcgactgcaagccgcaggacgagacgctggatgtggaatgggtggatcccaagagcgacgtaatgaacacgttcgtggcgcagatggtcaacggtcatggtcgcatcgtgcggcaggcgttggcctgggccggaatctgacagttgttctgcttcccgctggtggggatggcgcgtggcgacggagggcggtccgcgttgaaaccgctcccagccgactgagccgacagctccgccagtgggatgtgaatgtgaaggagtaacgacaatggcaatcgaattggccaatcatatctatcgcgatggcgaaggcgtgccggtggtgctgatgaacgcctacccggtggaccaccgcatgtgggacgtgtgcgcgaaggcgctcgccgacttcgccgacctgaacgatgtgccggacttcccgatttgggcgccggatatggccggctccggcgcatccccggttcccagcgaggccgattccggcccgcgtatggccaacggcgcgtacagcgaggcgctggatcgcctggccggagcctacgtggacctgatcaaggccgccggctatgagcaggcgatctgggtcgggctgtcgatgggcggctacgtggcgatggacatccagcgcctgtaccccgaaacggtggccggactggccttgtgcgacacgatggccgcgtccgacggtgtgggcggagagaaccgactgaagatggcggacgccgccgaacagacgaactcggtcgaaccggtcatgcacttcgcgcaaccggccgatggcgattccaccgtcaagaagactcctgaattcatcgcgaccatgaccggctggatcaacgaacagaacccggctggtctggcttggcgtcagcgcatgacctatggccggcccgaattgggggcggtgccggaaacgatcagcgcgccgagcctggtggtatccggcgaactggacccctccagcaacccgagcgtgatgcgtccgctcgccgaacgaatcaccggcgctgaattcatcgacattccggactgcggccatttcagcgccgtcgaacatccggataccgtggcgcgggcgctgctctcgctcgtcaggcgcgtgcagagcgcgcagaagaacgcataggagacctcgatgaccgctgacattcatttctcacctctggcactgacccatgcgctgccattcctgccgctcgcgcaaggtgacatcgactatcaggtggaccggcgaagtgaacctggcctgatcgacgagctgctgaccgagccgaccaccaaagtcgtgcttacgcgcggcggacttgtcgccgtaccgcgcggccaaggcgagctcgtggactatgagaacgtgaaaatgcggctcgccacgttgccgggcgcctatgtgtccgccgaactggcacgctaccccgaagcggtcgccatgttcctcggctcctatgccggggcgcgcggcgaatccgtggtcgccgtggatatcacgcgcgtgccggaagccggtgttcccggtgttgacgggattgctgatgtttccggtgctgccggcggcgtgctcggcacccaggattccggcaccgtggacggcgcgctgggcaagaacggcatcagcggaggtgctgccgccggaatacggcagccgggaaacaccaagggcaatggcggcgtagccgcagccaaaatcgccgggccgctcggtgtaccggattcggccggacaaggtgcggacgatgccttcgatgattcggtcggcgcgcccgtacaacccttggtcccgaagcccacgctgttgcaacaggccgtgacccggttcgactgggtggatctgcgcggattcgcccctcacgccaacgcgcgcgaggctgggcaagccaccagtgccatcaccttaagcatctggcacagccgccagcggttctgccccacctgtggcgcggcggtccggccggcgctcgccggatgggcgcagcgatgcaccaacgaggcggacggcaaccgtgtgctgttcccgcgcgtggagccggcggtcatcaccgccatcgtggacgggcacgaccgtctgctgctgcaacacaacgcggcatggaatgattcgaggctgtattcggtgtccgccggatttgtggaggcgggggagaaccttgaacacgcctgccgccgcgaggccatggaagagaccggcatcaagctcggcgaggtgcggtacctgggctcgcagccgtggccgttcccggcttcgctgatgatggcgttcaaggcacatgcaatcaccaccgacgtgcatgtggacggcgaggagaccatgaccgcgcgatgggtcacacgcgacgaatacacggccgagctcatcgccggccgtatggcggcgccgggccgcgccaccatcgcccgctacatgattgaggaatggctcggtcgcgagctgtgacggaccgcgaagataggttaggcttatgactatgagtgatgacaacgaaaacgaacagccgctgaacctcgacattcccgaccatctcgaatactccgaggagcatgcgtgggtggaccgttcggtcgaccccgcaatcatcggcatcaccgaatacgccgccgaccagcttggcgaacttgtgttcgtggatctgcctgagcctggcgcccgtgtggaggccggcgacgagatcgtggagcttgaatcctccaaggccgtccagccgttgatcagccccgtggcgggtacggtcaagtatgtgaaccgtgacgtggcggacgacccgtccgtggtcaacggcgatccgtacggcgaaggctggctgctgaaggtcgagcttgacgacgatgagccggagctgctgagcgccgacgaatacgcgaatgtcgtgcggtagttctacccatggctccccctgaggggagctggctatgaagcggactgaggggagtttccatatgttggggactcccctcagtcgcccatggcgacagctcccctcagagaggggagccaagaaaatgaggtgtatggcctatattggtgtctatgagaagcccacgcgaggattttgaggcggcaggcaagcgactgccttgggatgctgctgctcgcaatgcagcgctgtccgccaccgcgccagtctc

SEQ ID NO: 1369 - DNA, 26509 bp, Unknown
  R157_18m  MAG No. k141_46255
cgtgagccatacgggaggagcgcatccggtgagtcccgcggcgatggcgacgagcgccgccaatgccgcggcgcatgccgccagccgtcgtctacccgcccaactcattgatcttccccgcctcttcggcatccgactgttagaaccgttgcgacgattctacagcaagacgcatcgaacgatcccgggaattggcggcacccgctgacctgatgtaggctgttcccactgggtaatcgcattcggggaagaggcgtcaatggctgtactgacagatgctgaagctcgtcgtatgctggaactgctgaaggaagctttgtctccgaagtccatcaccctgaataaaggcgagaagcaattccaattgcatcagataagtttgtagtcaaatgaatcgtagtatttacgacgagaagaaagtatgacgagttctgattttgactcattaattcgtagttacggaaaatggctgtctgataacacgacttatacgcaactggatgagtggtatgaagttaatgttccgcttctggatgaagacaacgattatacgcagttctacgtgaagcccgggaagaacagcgtaacgttctctgatgactgtgccacattacgccgtttggagtcgcatgggatgactgtgacggaatcgcgtttggcagtgctcaaagatattctgaatcagtttggtattgaacgtaacggcgacgagcttactctgacgagcgatactgctgattttgctgatgccaagaatcggttcctgcaagctatcatcaaagttggtgatatgtctatgctggccaatcccatgtgcagacgtattttgcagatgacattcgtatgttccttaatgcgaacaacatacggtatgtggaagacgttcaattccgtggcaagtctggtttgctgtgcccgtatgactttgtgttgccgttcacgagtaaacagccggaacgattctgcacatctattacgcggccttcccagcgactcatttccggtaccttgttttcatgggaggatacgcaggcggcacgaaagacaccaagtgaactggttgttttcctcaatgattcggatcggcgcattgacaatcagctaataaccgctttggaaaagtacaatgcgtatcccattaagtggagtgagcgggaatttaaggagaacttgtacaagcttgcttcgtgagtggtgcttgtggctttggtcgggagcgaggtttctgctgtttgccgtgtcgacctcccctcagtcgcctacggcgacagctcccctcggggaggggagttgaggaagcgcttaacgagcatagggcttcagccgctcccaatacgcccgaatcgcgccgaacgaatacaccgcgatcgcgacccaaatcaccatcaacgccgcatagccctgcgcgcgcatcggctcgtgcagcaggagcacggccacacagaactggatcagcgggttgagatattggatgaaactcacggtcaggtaatggctgtgctgcacgccgtaggagaacatggccagcggaatcgcggtgggcaggccggagaaagccaccaacagcgcgaccatggccgccaacgtggcgaccaaacgatacgcgagcacgctgatggcattcatactggacagtgcgcgccagtacagcggcagcacgccccagccgatattggacacgagcggcgcggctatccccattcgcgtctgctcgacggtacgaaccgaagtcacgtctcaccaccatagcgactgatcacatgagtgtcccgcacctggtcacatggcatattggacttgctgatgatgaacagtaccggttattgttagagtcttttccacaggacacggagattgaacagatgattcggccttttctgagggcgcgaatcagattcgtaacgcagtggtttgccctggactctgttacggtgataataacttcatcgttgataagggagtcttcatggcaggcaatggcaacacggcatttcgtttccgagtcactttgcgccttgacgggcgtgaatgctggcgggagattctggtgccggcatcattgacgttcttcgatttgcatgcggtattgcaggaatgctttatgtggtacggcgagcatctgttctgcttctgcgccacattcccggatgggaagcaggtgcaagtggaagaattgtggggagaagagccctcataccatgaggcgagatacgaacaatatatgccggtggagccgttgccggaagttcgcattgcttcggaaaccgagctgggcgacgtgtttcccaaggcgcgtgccgctcgctattactacgattatggtgacgattggatccatgacatcaagctgctccgtacctaccgcagcgtgcacgttgcggatcctcagctttgggatggggcgggggatgcgcctccggaggatgtcggcggggtgtatgggttcgagcggttccttgataccttgggcaatcccgaagatgaagaacatgatggcatggttgagtgggccgaggaccagatgtgggatcgtttcacgctgaaccgccatcgtgagcgtctgttccgttggcacaagcaccgtgacatgatgttgcagtagatggcgtggctacaatatgagcagctgtcagcggaatagccgtttgtggcttgcgggctaggggctgaaaatgctataaatatattgctttactcggaaacgagaaaggctccaagtcgccggggggctcccccggcattttttgtcaacggggacgggggatgcgatgccgtctgtattgagcatcttcgctgatgagagcggtaccgccagtcgttggctgactatggacttcctgatgtccctttccatgctgggccgctgcttaccgggcatgatgcttacgaagggatgagcctatcggagcgtaagaggcttctgggtttattcgttatcatgactcggcggctgccgattacatatcggacgtttgtgcatcgtaaaagtgattttgacgataaccgccaacgttttgaagcgcaactcaaacgcgatattgttaatctacttttggcgcatctttcggatttccattcttatggcactgtcaaggtgtattacgacggtggccaacagatagttactgatgccctgcgaggcgggattgagtatgcactctccatagatgccattgtctatcgtgacgcttctccacgcgactaccggcttgaacaagttgcggattttctatgcacccttgaattgacctgtgagaaattccggaatggggaacaaactgaaacggacaacaagttttttggtgattggaaatccttcagagtcaattatcttaagccgatccgcaggaaaagattggaatcataaatttggcagtgcccatatatattcgggacacaattgaataacacgaaatagtaaacaaaatccccggacctacacaatcatcgccacgacaatctcagaaaacaccgttacggcaatcagtggtgcggtgccgtcgatgaaggcgggcatgggtggcagatggcagtaggcgaggtagcaggccatgtcggcgataagcaaaatcagcaggatgatggccaaaacgatggcggcggttgccccgagagctccggaactgtgcaacatagtcagcgcacatagttccagcgtgatccacatgacgatgaacaacagttccgtggtagtcggccgttgcaacagtcgtgaagtaagcacggccagaatggtataggcggcaacgccaccgaccgcgaaccgctgaatctgctgatttcgccggccctttaagtccctcaactccatcaatcgccgtctgacccatcacatcacgcttcatacacattgccgattgacagtcctagaacacagtctagaactgtcatggcatgttcacgcagacaggggctccaacaaaattggctaaaagagaactcggcaacctataacaaggacgcgcccgtgtgcccttacgttcagctccgctcacgaatgaaatcgaagatcacgtcgaagacctgctggctccagaaatcgtactcatgttcggcgccgtcgactagcaccagctgcgcgtccacgccgtgcttgaccagccggtcgcgcatcttgacggattgatggtaggggaccacggtgtcggcggtaccgtgcaacaggagcatcggcggatactgttggtcatcccgcacctgcaggtaggggctcatgtcagccgcgcgctgacggacctcggcattgatgccggtctcatgggtcgcgcccaccacggccgcgaacgggccgaaataatacagccggaatggattggtctcatcgtcgaatgcgtcgactgcttcaagcatgtcggtgggcgggaagcagctgaccacgtacttcaccgcatcgctctcatcggcattggtgccgtcctcataccgcggatcgtcggcggtcaaccccaccagcagcgacgtgttgccgccggacgacgtgccccagataccgagacggtcggggtccacgtgccattggcgcgcgtttgccctgagatagcggatggctgctttgacgtcctcgagatatgcggggaacatgtcatggggatcgctcgaggcatcgcgatgattcaccgtggccaccacaaagccttcgcgggccaaagccgagagctgcgggatctcgtagtcgcgatgcggcgtggtccaggcgctgccttgcacgaatatcacggtggggtagcggcggtcatcgtcatcgccggtggattgtggtgagatgatatccatcaccaggttatcggccccggtcttgtacgccacgttgcgggtcagcgtggccaatccggcaagcgtgggattgtgcgggatatggatggcattgtttgcgccggcattggcatcggtgactttggctgaatcggtagtgttcatggaatccccctagctctgttgctatagaggtcatcatacaagaaataggcatgattacggcacaacgatgtctcggtcacagcgaagacatgaaggcgcgaagacgcgcccggcagcgcgcgctgcctgcctgcgagttgccttcaagtgcacttcaagcgataaggtgacataagccgcggcaatggagattgctgcccggcaacgaggcggacagtgcccgttcgccgattcgcgataacagaaatgagacactatgaagactcaggaaatcggacaatccggcatgattgcgtcacgagtggcgctgggcgtgatgcgcatggacgcgttggatgccgccgatgcggcacgtaccgtggccgtggcccatgattccggcatcgactatttcgacacggcggaatgcatacacagatgctcgacgctgaaatccaattcaatatggcgagcgatcccgcagccgattgcaccggtggcatcctgccttattcacggctgaagcatatgaccattcaggcatggtgcccattccaatccggcacggaatacggtccgttcgtcggcaacgagcatttccccgagctgaacgccgaattgacccgtcttgccggcaatccgttggtgtgagcgagagatgacgagaccaatgccgttgaggcgcgtgttcagcgtgcatacatctcaacggcggtcaatgctgtgtcaatgccaacattcagtgcctccgggcgtgcaccatctggcgaaagctgatgtgtatgtccatacagcagcctgcggccgttaaacggcaacgccttgccgctgaacttcgccacatcatcgggccaactgtatgtcagatcctcccgatacgggtaatgcgaaagattgaccgtaccgagtccctcaatctcaaccgtatcgtgcggctccaaactttcgaacaggttgagtgcggggcggtcttcccgccaccagtcatcatggttgccgatcacaccatgcagatgcttgcaattgagcgctcgcaggcagttcttcagatgggtcagcgatgtgcggaaaccgatatcacccagaatccacagctcgtcatccgggccgaccacagcgttgatatgatccacaatcgccttgtcatgcgcatccgtatcggcgacctgacgaaacgtcagacccgcgccgaacgtctcctccttggcccaatcctcggcggtcttgcgatcatgcgcgtcgcacctcctcatagcgcgagcgcgtcggatcgaacgtcgtgaaccctcgcaacaccgtgaccagtggatgcccgaaatgcgtgtcggtcgtgaaatacctcatgacagtcgccttcccttttcggcgtgtagcaatgatttcccatcctaggcgcagccggcacctgtcggttcgtgttgccataatgaggcgcattgcaggggaacccgtgaacgcaagctgccggccatcgtggcggcgaacgggttgagaaaggcgctgtgcctgacccttggaacctgttggccaacaccatcgaagggagcaacgatgacttttgacgccgtcgcattcggcccgatcactctgaaccacctgccgccattcgcccagcgcctacgacatgcagtacacgtggaaacccgaatgggatgtgtgaggagttcgatggatgagcggtgggcgcgtgctttgcgcgccaaaggcattgatattgacgaggctgaaggtgctgatgagaaacgggcacacgacggcaaacggcataccaacatcacgggtactggtcgacgctccgagtcccagccggctgccgggctccgcggtcgatccaataccagtacgaatctgccggggccgaaggtgacggcacgcgccacgccattcaaggccaccggtcataagggcggcatcagccggcaggggaattgagctgatcgcagaaccatcgcgcgatgaatgggcgtggccaacgccattccgccattgttgagccgcttctacttggaccggtacctctttgaacggagatattccatattgaagctattccggcatcatatggcacgtaggaaatcccggatatcggcgatttcctcatcacagatggcatgggccatgccggaatactcgcgataggtcagatgcccggcccgttcaaggacctgatgggccgtttgctggtcgggcatcggaatcgtgcggtcctgcgcgccatacgccaggaagaatcgggtaggggagtcaagcgccgcctgttcctcgcccatgaacgaagggctaagcaggatcgcggcatcgaacaacgtcggatgcaccttgaccagacgatacgacagataaccgccttgggagaaaccgatcaatatcttcctgcgatgggcgaatgccgaggcatccagcagtgaagccaccgcatccccgaccgccgcgcattcgcgttggcgctcgtccacgccgcagccgtcgggataccagtaattgccgcccatatagggcctcgcgtaggtggcacggaacgagatatagctgggtacggcggcaattgcggacggggccgcatcggctcgcgtcggcgcatatacggcgtcgagaatccgcaccatctcgctttcgtcgttgccgtaaccgtggaacatcaggaaaatggggtcattgccgccggcatcgatctggcttgtcatctgcattcgcatcgtcatcacctcaccaacgagcttacatgcattagacttgtagcgattgacccaccgagcacacaaggagcaagttatggagccgaggcgcgggcctctcaccgcaggcgagaaggtgcagttcaccgaccgcaagggcaagaagatcaccgatcagcttgtggccgacggctccacgcagaccgagcatggcctgattctgcatgacgatgtgatcggcaagaccgaaggcaccgtgatcctcaccgtgcatgccaagcgcgaggcgcaggtcaatcaggtctaccccgggaaagacaagaacaagccgtggaaatcgtcgcgcgccatcggcggctgggagtatgcggtgatgcgcccgcgactggccgattatgtgctttcgatgccgcgcggcgcgcagatcatgtatccgaaggacatcgcccaggtcattcagctcggcgacatccgctccggcatgcgcgtgcttgagtccggtgccggctcgggcgcgatgagcgtgaatctgctggacgccgtgggcgagcgcggccatctgaccacgatcgagctgcgccccgaattcgccaaagtggctcaggccaacgccacgctgtattatggtgaagcccccagctggtgggatctcaaaaccggcgacttcgactccgtggccgccgaactgcccgaacactggttcgaccgtatcatgctcgacatgctcgacccgtggaacagactcgagcaggcataccgcgtgattgcccccggcggcgtgttggtcagttacgtaactaccaccacgcagatgagtcgactggccgaagccctgcgcgcggccggttgctggaccgagccgcagatccaggaatcgttcgaacgcacatggaaggcccaaggcctcgccgtacgccccgaccaccagatgatcggccataccggtttccttgttatctcgcgcgccatggcctccggattcgaggcgctcagaaagcgcgatcgcgtgaccaaggacacgcagaccgacatcgactcgctcaccgacgaacagcgtgaggcgcagatcgaggaactggaactgcgcgacatctccgaccacaaactacgtaaggtgttgcgcgacctcgaccgtcaggtgggagaactcggcaacacgcatgaataaccgcccgacgatgagtttgtgaacgctcacacacctctatactggaagcaacaccacaccgccacaccgggcagacggttcgtgaagggagccacggatgggcatcaagctgagcaaagtcgccaaagcagcgaaaaaatacgaccatatcctcatcatcatgaggcatgccaaggccgagccgttcggcgacaagggtgactcggagcgcgagctcaccgacaaaggtctgaaacaggcgaaggccgtgggcaagggcatcgagtcgctgggactggtgcccgaccagatctcctgctcgtccgccacccgcacgcgccagacactggaccgcatgctcaagacctttggcgacaagccgatcgtcgactaccgcatcagcctgcatgacgggggagtgcaggcggtgttcgacgagctcgcccacgtcaaggccaagaaccgcgtgttcatgatagtgggccacgagccgactgtgtcgatcagcgcccaatggctcgcctccgccgactccgacggcgaacgactcgacctgctcaacttgggactttcgcccgcatccatcgtgatcatgggatcgaacaaaccgttcgacgaatggcaggtgcacagcggcgaactgctcgcggtcatcaatgtgaaagacttcgactaaagcggatataaattccatctataacgacactctgcggccatttataaggggtggaatccggatgttttgctaccctaagtcgggttacgaacgcatacattggaggattcatgtccactctgacttccgtctccggcttcccccgcatcgggcagaaccgcgaactgaagaagatcatcgaaggctactggaagggtgccaacgacctcgccgccgttaaggccaccgccgccgaactgcgcgccaagcactggaagctgcagcaggccgccggcatcggcctcatccccagcaacgacttcagctactacgatcagatgctggacaccgccatcctcctcaacgtgattccgaagcgttacgagcgtctcgccttcgataaccaggaggacacgctcttcgccatggcccgcggctaccagggcgacaagggcgacgtgaccgccctgccgatgaagaagtggttcaccaccaactaccactatctggtgcccgaagtcgagtcggccgcggagatcaagctcaactccaccaagccgttcgacgagttcaacgaggccaaggcgctgggcatcgacaccaagcccgtgttcatcggcccgtacacgttcctgaagctcgcccgcaccccggaagccaccgaactcgagctcgacaagggcctggtcaacgccgtggccgccgtctacgccgaagtgctcgacaagttcaacgaactcggcgccgcatgggtccagctcgatgagccgtacctcgtgctcgacaaggagccgggcgatgtggagctcttcaagaccctgtacaccaagatcctgtccgccaagggcaacgtcaaggtgctgctcaacacctacttcggccacatcgccgacgtgtacgagaccgtcaacctgctcggcttcgacggcatcggactggacctcaacgaaggccgtgaagagaacctcgaagccgtcgccaagtatggcgtggcctccaacaccgccatcttcgccggcgtgatcaacggccgcaacatctggcgcaacaactacgccacctccctcggcctggtcgacgccctgaagcaggtcaccgccaacgtggccgtctccaccgcatcctccctgctgcacgtgccgttcagcactgaaggcgagaccggcatctcgtccgaagacctcaagcacttcgcgttcgccgtggaaaagctgaccgagctcaaggaagtcgccgctctggccgacgccaccgaggacgagaagaaggcatccgccgccctcgccgccaaccaggccctgttcgacggcacccgcgtggccgccgacccggccgtcgccgagcgcatcggcaagctgtccgacgccgactacgtgcgccagcctgcccgcgaggagcgtcaggccctgcagcgcgaggccctcggcctgccgctgctgccgaccaccaccatcggctccttcccccagaccaaggagattcgcgccgagcgcgccaagctgcgcaagggcgaggtcaccaaggaagcctacgacgagttcatcaaggcccagatcgacgccgtcatcaagaagcaggaggagatcggcctcgacgtgctggtccacggcgagttcgagcgtaacgacatggtcgaatacttcggccagaacctcaacggcttcctgttcaccaagaacgcttgggttcagtcctacggcacccgttgcgtcaagcctccgatcgtctggggtgacgtgtcccgcgccaacccgatcaccgtggaatggtctgcgtacgcccagtccaagaccgaccacgtgatgaagggcatgctcaccggcccggtgaccatcctcaactggtcctggccgcgcgaggacatcacccacgaggagcagaccaagcagctcgccctcgccatccgcgacgaagtgctcgatctcgaggccgtcggcatcaaggtcatccagatcgatgaggccgccctgcgtgagaagctgccgctgcgcaagtccgactggcacgtcaagtacctcgactgggccgttccggccttccgtctggtgcactccgccgtcaagccgaccacccagatccacacccacatgtgctactccgagttcaacgacatcatccgcgacatcgacgcgatggatgctgacgtgatctccttcgaagcctcccgtggcgatctggtggtgctcgacgccattcatgacgcgcacttcgagaccgaggccggcccgggcgtctacgacatccactccccgcgtattccttccgagaaggaaatcgaggatcgtatctacgagatccttgacaagatggacgtcaagaaggtgtggatcaaccccgactgcggtctgaagacccgtggtaacgccgagacctggccgagcctggagaacctggtcgccgccgccaaggccgtgcgcgccaagctcgacaagtagcggaaatcaccgaactccctctgtatgagggagctcgggtttatgtaaggaaatcagcatgcattccccgatgttcacccttgaggtctttcccccgaagcgcaacgctcccgtggacaccatctatgacaccctcgacggcctggaggggctgaaccccgacttcatttccgtgacctacggccacggcacccattcggatcgcaccgccaccgcgcgcattgctcatacgatcagcaaggagtacggcattcccgcagtcgcgcatctgaccgcgttgtattccgacaaggcgaaaatcgacgaggccctcgacatgttcgagcaggccggcgtgagcgccgtactcgcattgcgcggcgactacatcgacggcgagcagctggtaggcgagttcaaccacgccagcgacctcgtgtcatacatccgctccgtgaagccgggcctcaaagtgttcggcgcctgctacccggaaggccactaccaggctgactcgctggaccaggacatcgaaaaccttaagatcaaggtcgatgccggcgtcactcacctgatctcccaactgttctacgacaacgaggacttctatcgcttcctcgacaaggcgcgcgccgccggcatcaccgtgccgatcgaggcgggcatcatgccggtgcgtggtgccaagtccgtgcgtcgcatggccgaacgcaacgcctcgcgtatcccggacaagctcaacaccctgctgaacaagtgggaggacgacatccagtccctgcgtgccgccggcatcctctacgcttccgagcagatcgccgacctcgtggcccacggcgtggacggcgtccacctgtattcgatgaaccaccccgccaccacgcgccgtatctggcgcaatgcggaaccgttgttcctcggtacgcaaggttgacgcatatcgcagcgcggcgcatctcaatgcgtcgcgccgcacgttaatctgctggcgaaacccagagttcccccagcggccgatggatatcatgaacgtacaagccaaccaaagcgatggaaggaagtccgttatgtgcactggtgtccgtttctccgatgatgagggcaacacctatttcggccgtaatctcgactggagtttctcatatggggagaccatcctggtcactccgcgcggctaccactatgacacggtgttcggtgcgggcggcaaggcgaagccgaacgcggtgatcggcgtgggcgtggtcatggccgataggccgatgtatttcgactgcgccaatgaacatggtctggccatcgccggcttgaatttccccggctacgcctcgttcgtccacgaaccggtcgaaggcacggaaaacgtcgccacgttcgaatttccgctgtgggtggcgcgtaatttcgactccgtcgacgaggtcgagaaggcgctcaggaacgtgacgctcgtctcccagatcgtgccgggacagcaggagtctctgctgcactggttcatcggcgacggcaagcgcagcatcgtcgtcgagcagatggccgatggcatgcacgtgcatcatgatgacgttgatgtgctgaccaatcagccgacgttcgacttccatatggaaaatctgcgcaactacatgtgcgtcagcaacgagatggccgaaccgacttcatggggcaaggcctccttgaccgcctggggtgcgggtgtgagcatgcatggcatcccgggcgacgtgagttccccgtcgcgcttcgttcgtgtggcctacaccaacgcgcattacccgcagcagaacgatgaagccgccaatgtgtctcgcctgttccacaccctcggctccgtgcagatggtggacggcatggcgaagatgggcgacggccagttcgaacgcacgctgttcaccagcggatattcgtccaagaccaacacctattacatgaacacctatgatgaccccgccatccgttcctacgccatggccgattacgatatggattcctcggagctcatcagcgtcgcccgatgactccttcccgactcatgccccattcggagggcatgagcgtatatagtggaatcttatggaatcgtcgatgttcaaacccagctccatggatctcatcagggcaggtctgcaagacctcgacaaggcccgcaccttgttcgaccagctcaagacggacgacattcccgatgagcgatgcgccgaactgctgagcatgctggcccacgcctgcgaccccgatatggcattgagcaatttcgtggatatcgtcaacgcgatgcaatccagccagcgcgatctgaaacacgtcatccccgacaacgacgccctgaagcgtctggtcacggtgctcggcgtctccgacgcgatgggcaagttcatgcgcttcaagccgcagcttgtggaggccgcagcagtcgacaactgcaacagccatctgttcaatcacgcgcaacgccgtgcacgtctgctcaaggcggtcggcgcggacccggacgaaccggccatgcccgtcgcctccaaggatctggccgaagcggccacggccttgcgttccagctaccggaaccaactggccgccatcatcgcccaggatgccgtggcggacgacccggcctccatccaaccgaccatcagccgcgaactgtccgacctcgcggacgcggcgctcgaaggcgcgctggccatcgcccgccacgaaaccgagggcagcgagcacgtgcgcttcaccatcatcggcatgggcaaactcggcgcacaggaactgaactacgtctccgacgtggacctcatctacgtggtcgaaccggccgacaaggacgtggaccatcagacgctgatccgcgtgggcaccaagatgggcaccatgctgcagcgtgtctgccagtccgccatcatgggcgtggccgagcagccgctgtggcagatcgacggcggcctgcgcccggaaggcaaggacggcgcgctggtgcgcgtgctctcctcgcacaagaactactacgagcagtgggccgagaactgggagttccaggcgttgctcaaggcccgcccggtggctggcgaccccgacctcggccgggcctacatggatatgactcggccgttcgtgtggagcgcgtccaagcgtaagaacttcgtctacgactgccagaaaatgcgcaagcgcgtggaagatctgattcccgcacctctgaaggatcgcgaaatcaagctcggccgcggtggtctgcgcgatgtggaattcaccgtgcagatgcttcagcttgtgcacggccgtaccgatgaatcgctgcgcaccagcaacacgctcgactcgctgcagcgcctgtccgaaggcggctacgtctcgcgcaaacaggccgtgcgcatgtcccaggactaccgcttcgagcgcgtgatggagcatcgccagcagatctggtccctgaagcgcacgcacctgttcccggacctcggccgggcctcggtcggaggcctcgaaaagaagcgcgacatcgacgtggatgagctcaaccagaaccaggagctgcgtcgcctcgcccgcgcattcggcctgcacccggaagaactcgtcgacaaatacgacgacacccgtcgcgaagtacgccacctgcacctcgacatctactatcgcccgatgctgccggtcaacgcccagatggagaacgaccagatcgtgctgagcgtcgaggccgcacaggaacgattcgaatccatcggcttcggcgacccggacgccgccatccgccacgtgcaggcgctcactgccggcgtggggcgcgcggccaaaatcaaccgcatcatcctgcccgccgtcttgcagtggctgggcgagggccagaacccggacatgggcctgctcaactggcgcaagctggaggagaacttcggcaccgaatccggctacctcggcttcctgcgcgactccacctccgctgcccagcgtctgtgccacatcctgtccaactcgcgattcctgggcgacgcgctcaacaagtcggtcgaatcgatcagttggctcggtgatgacggcaatctgcaggcccgcacgcgcgaggcattggatgtgcagaccggctcggcgctggaacgtttcggctcgaacatcaacgagttcgccacctccatgcgcgccatgcgccgccacgaaatcgaacgcatcggcctgtcttggatgagcggtgtgatcagcgactccgacagtctcaaggccatgaccgacgtgtatgacgcgatcatcgacgcctcactgacctgggccgtgcgccaccagatcgccgcgttcggcgtcgaaaccgcgccggccggcatcaccgtcatcgccatgggccgttacggcgggcgcgaagtgaacttcagctccgatgcggatgccattctcatctaccgtccggccgacgatgccgacgacggccaagccaacgccttcgccaagaaggtcgtggaagacctgcgcaacatcctgcaaggcccgacgacgctggaacccaagatcgaactcgacctggacctgcgcccggaaggcaagaacggcccgctcgtgcgctcctacgcctcctgcgaggaatactacgaatcctgggcctcgacctgggagcgccaggcgctgctgcgcgcccggtacgcggccggcgacgccgaactggcacgggacttcctgatcaacatcgccgacccgttgcgctacccgaccacggagctgaccgaggccgaattgcagaacatccgcaagctcaaggcccgtatggaggccgagcgtctgccgcgcggcgtgcgtcgagaacgtcatctgaagctcggcaagggcggtctgtctgacgtggaatggaccgtgcaactcatgcagctccagcacgccggcgatatcaaagatctgcgcgtcaacggcacattggaggcattggacgtgctggaggccaagaagctcatcagcgctatcgatgcgattcagctgcgcaaggcatggacgttgtgcaccgcggcccgcaacggcaactatctgtggagcgggcgcgccaaccaggccgatattctgcctgatgacatctattcgctgggcggcatcgccgtctacctcggctacggcgcccaccgcggccagcatttcgagaacgacctgctggccgtgatgcgcaaatgccgtgacgtatgccagcgcctgttctacgggcaggccgaagacgaggcgactgcggcaaccaccgccacggcctccgccgcaacgcagcagccgcaaaccgcgcttcgcccgcgtatgcacgtgatcgcaccgcgactggagcggaaccgacgccgcgcgcagcgatagacctttcttgtattgcgttcactacgttcattaggtcgattcatcgttcattaggtcggtccgccgccgcataccttgttggaatggcggcattccaacaacagatacgagggtgcagtgacctaatgaacgtcaaatcgacctaatgaatgagctctggcgttccaaagcagatatcagctatacagacacagcatattcgttggattttcaggtgaacactcggtgaatgcggctgtccgaaaaatggcgtaagttatattaggtcacacaagggtggccacctgaaaaccacgagcgaaaaggtgagccttgtctgaagaaacgccaatggtcggcaaaagcgtcgtaacgctggacggcctgtctacaaaccagattctcgacctgctgcataaggccgaatacatcgattcccaccgcaaagaggttgcccatacctgcgatgggcgagtgctggccacgctgttctacgagccctccacccgtacgcgcctgagctttgagacggcaatgctgcgtctcggcggcaaggtcatcggattcgccggagcgcagctggcctccgtgaccaagggcgaatccatcgccgacacgttgaagaccgtgtccaactacgtggacgtggtcgccatccgtcacccgaaggagggtgccgcgctggtggcctcccgcgccgcatccgtgccggtgatcaacgccggcgacggcggccacatgcatcccacgcagacgctggccgacctggccacgctgcagtcgcgcttcggccgcatcaccgacctgaccgtgggactgtgcggcgatttgaccttcggccgcaccgtgcactccctgatcgagaccctgtgccgcttcggcaacgtgcgcttcgtgcttatcagcccggacgagctcaagaccccgcagtacgtgatcgaccgcatcaacgccaccgacaactgctcctacgtggaagtgcgcgacctggcctccgtgatcggcgacctcgacgtgctgtacatgacccgcgtgcagaaggaacgcttcttcaacgaagacgactacctgcgcctgcgcgacacctacattctcgacgaagaaaagctgcagctcgccaagccgtccatggccgtacttcacccgctaccgcgcgtcaacgaaatctccgtggacgtggacgacgacccgcgtgccgcctacttcgaacaggtcaagaacggcatgctcgtgcgcatggccctcgaaagcaccgtggtgggcgacgaactacccggatacgaaccgctcaaccccaaggaggttcaggcctgatggaagtcaccagcattcagaacggcatcatcatcgaccatgtgccggccggaacctcgctgaaggttctcgaatacctgaaaatcgacccggccaaaaccaagcttgcgctcatcatgaacgccaactccaagcgttacggctccaaggacatcatcaaaatcgaggatgacaaggacatcgacctcgatgtgctcggcttcgtggcccgccaggccaccgtagacgtggtgcgcggcggcaagatcgtcgaaaagaagcagccgaacctgcccgagcacatcgtcggcgtgatctcctgcgtgaacccgcgctgcgtgaccaccaccgagcccggcatcaagcagatgttccacctcgtgcactccgaacggctcgaataccgctgcgactactgcgacgaggaagccaaactgtgagcatcaccctacgcaacatcaaggtctggaacaccggcgaagtcatcgacctcgtggtgcccgggaccgctgccgcctacttcgccgacacctccgccgtggctgacggtgccgatatcgacgccaccggactgaccgtggcccccggtttcgaagacccgcacgtccacttccgcgatcccggccagacctacaaggaatctatggtctccggctgccgcgcgtccacatccggcggatacacgaacgtgctcatcatgccgaacacgttgccggcactggatgggcagaccgtgtctgacctggaagcggccggtgcgaaagaggttctggatgccggcttcgacaacgtcatcgacttcctgcagcagtacgatactgtgcacgatgttcaattgccggttcgttacgatctgtgcgtgtgcgcgtccaaggatcgcgccggtcatgaggcaagcgacgttgccgactggctcaggtacgtgcccggattcgaggacgacgccaagacgccggccatgctcacgcaccccatcaccgcaattagcgacgacggttccgctgtgacgccggagatcctggaccaggtgctggagaacgtcaaggcctccgacctgtacctaatcgagcattgcgagcatcacgatacaggtgccgtgaacgaaggcccggtctcgcgcgaacttggcgtgcccggcattccggaagacaccgagctcaagatcgtggcccgcgatatagaagcggcccgccgcactggtgtccacgtacacttccagcatgtgagcactgccatctcgttcgaggcgattcgcaaggccaaggccgaaggattgccaatcacctgcgagaccgcgccgcactatctggcgttgagcgacgaggcgctgctcaagtacggcacgctcgccaagatgaatccgccgctgcgctccgaagcagaccgcaaagccaccatcgcggccatcgccgacggcaccgtggatctgctggccaccgaccatgcgccgcacacgttggcagagaaggaactcggcttccttgaggcgcccaacggcatcatcggactggaatgcgcgtacggcgtgtgccacaaggtgctcgtcgacggcggcttcatttccgatgagcgtctgatcgagctcatgtccgtgggacccgccgaactcatggggcatgtgccaaccgacgtggccgcgctggtcgaggactacgccgaacccgcgcccactggggatgatccggatggcgtgattgcgggggagagcgacgctcagccgcagcgtgaaggcgtcaaccgactgctcgacctgagccgcgtggatgacgccgacaatgtcgacctcgtggtgctcaacaccgctgaggaatggaccgtggaccctgaacagttccactccagggctcgtaacaccccgttcggcggctggcaggtcaccggacgccccctcgccacgatcatcggctcccagctgatgttcagccgtctgtagataacataaggagcagcatggatcgcctgatcgaagcgattgacaacactcagaaccccagcgtcgtgggcctcgaccccaccgaggcgttggtaccgccgcaggtcgaggcgagctttgccgacgaggtgcgtgactcggtcgaatccccggaggaaatcgaatccgcgcagctggccgtcgcctacttcgaatacaaccgcacgatcatcgacgccatcgccgacatcgtgcccgccgtcaaaccgcagatcgccatgtacgaggcgctcggccccgccggcgtggacatctacacgatgacctgcgaatacgcggcccagcagggcctctacgtgctcggcgacatcaaacgcggcgacatcggctccactgcagccgcctacgcccaccacctgaacggcgtgggcgacttcgacccgtggcatgaggatgcggtgaccgtcaacccgtatctcggcaccgacggcatcaccccgttcgtcgaggccgccgccgaagccgacaaggacatcttcgtgctcgtgcgcacctccaacccgtcctccagcgaactgcagatgctcgacctggccgacggcacgaaggtctacgagcatgtggccgatctcgtggaaggctggggcgccgagaccatcggcagccacggctactcccgcgtgggcgcggtggtcggtgccacccaccccgaggaaggcaaggcgttgcgtgaacgtatgccgcacacgttcttcctcgtgccgggctacggtgcgcagggcggcacggccgcggacgtggcaggcatgttcgacaagcagggcagcggcgccatcgtcaactcgtcgcgcggcatcatcggcgcatggaagaagagcggcaagtactccgaatccatgaccgccgacgaggcgctggaccttgtggcgagcagcgcgcgccaggcggcgctcgacatgcgcgataatctgcgggttgccgtatataggtaggtagattgtccggctgtgggctatacgtgagtgtgggctggaaaccggagccgagtgtgtttaactacccctcagtcaacctgcggttgacagctcccctgataggggggagcttgatgtgctgaataggaatgaaatgacaactttcacccccacccatgatgtggttgcggaggcgactgcggccggattcttcccgccgcgccacaacgtcgaaatcacgcaggttacggaactgaccgaccgcgtgatgcgactgacattccgcgacccgttcatcgcctcccacgccaagcccgcccagttcgtcaacctgttcacgcacgacgacttcatgctcatgccgcgtccgttcggcgtcagcgaagtcgacggcgacgaagtcagcgtgatcttcgccgtcgtgggccacggcaccgaacagttggcagggctgcaggccggcgacaccgtcgacgtgctcggcccgctcggccgcggcttcaacctcaaggaagacgccaactacattctcgtcggcggcggactcggcgtgcccccgctaatctacgccgcgcaaaagctcgccgaacacgacgcctcctttgccaccgccgtgttcggctaccgcaacgaccacttcgctgaggaatacgtctcccggtacgcggactggtcgtggagcatcgacgacgccgaaggcaacgtggtcgacctgctcaacaaactcgaacaaggcgacgacctgaaggcctacgatcgcaagccgatcatcttgtcctgcggaccgctgcctatgatgaaggccgtggccgtttgggccgccgaacgcggcatccccgcgcagctgagcatggaacagcgcatgggctgcggctacggcacctgcgtgctgtgcaccatcgacaccgtggacggccggctcaaggtctgctccgacggacccgtgttcactcgcgaacagctcggatggggggagtgacgatgagcgcaaacaaccagtccgcgcagggcagcgacaaccacatcaacctgtacgagccccacgtgtggaagcaccacaccaaggtggccggtctggaatggaagaacccggtcggcaccgcctccggcaccttccagtacgccgccgtccgctggttctacgacgtcagccagctcggcgccgtatgcaccaagggcgcctcgcccgtgccgtgggagggcaacccctcgccgcgcaccgccgaatcgccggccgcgaacatcaacgctgtgggcctgcagaaccccggcatcgaccattacttggccgaagacctgcccaagctcaaggccgcgggcgcgttcgtcatctccaatgtcgccggacattgcgatgacgattacgcggcggtcgtggaaaagctcgccggctccgacgcggacatgctggaaatcaacgtcagctgcccgaacgtttccgccggcggcatgagcgtgggcaccgacccggtggccctcgccaatcttatggaccggctgcgcccgatgaccgacaagccgatgatcgtcaaactcacgccgaacgtcaccgacatcaccgtgccggcgcgcgcggccgtggaacacggcgccgacgcgttgagcatgatcaacacgctcaaaggcatgcgcatcaacattcgcaccggccagccgatcatcgccaacgtcaccggcggcgtatccggcccggccgtgctgccggtcggcctggcagccgtctatcgggtgcgcaccgcactgccggagattccgatcatcggactcggcggcatcgacagtggtgagaaggcgctcgaatacctgtacgccggcgcgaacgccgtcgaagtgggtgcggccgcgctcttcgacccggtggccccgctgcgcgtcgcccgcgaacttgacgacctgctggacagccgtcccgaactcgctgctaaactggccgcaggacagacttggaggtaaggaacatcatggcagaaacactcgcacatcgcttcactgaattcctgttggaatccaacgcgctgaagttcggcgacttcacgctgaagtccggccgcaagagcccgtacttcatcaacgccggcgccttcgacgacggcaagaagatcgccgcgctcggcacgttctacgccgaaaagattagccaggccatcgtgcacaacacgattccccgcaacatcgacaccgtgttcggccccgcctacaagggcattccgctggccgtgtccaccgcgatcgcgctgaacgccggccacaacatgaccgttggatacaccttcgaccgcaaggagaagaaggaccacggcgacggcggctggatggtcggcaccccgctgaccgacggcatgaaggtgctgctcgtggacgacgtgatgaccgccggcaccgccgtgcgcgaagtcatccccaagctcaaggccgaggcgaacgtcgaggtcgtgggtctcgtgctctccgtggaccgcatggagaagaccaaggactccgacctgtccgccgtgaaggccgtggaagccgaattcggcttcccggtgctctccatcgccaacgtgcgcgagatcttcgacgccgccgccaagatgaagaactccgacggcaccccgttgctcagccacgatatccagcagcgcgccgccgcctaccttgaggaatacggcgcctgatcgtcttcaacctaaaaccaaaagcgggcttgcgagcccgctttttttattacgatccatgaacagcagtaccatattaaggcagaagctttggcaaggagcgtgctatgaactggttagttggtatagggctatttgcgctcgtgggggtatgcagttacttcggcatcgagcatcatctggacagtaaagcgaacaagttgtcgcaaggtaatgaagaagaccgccgagatgctgccgaattacgtgatatcgccgccaaaatcgatcacggtaagtattacccgatgctgtaacgggcaatctgggcctaaatggatgctatctccgcttcaaggggctgatgtcgtggtttccagagatctacttccgtttcgaggggctgatgcccaagtagaagcagcatgaaaatggcggaatgacgttggggtgatgccgctcatactcgggatatgacggatgaacagccccttgaaacggagatagatgtctccagaaggccaaatcagccccttgaaggcgagatagggttttaaactctgggaccgactcgcctgtgatgaaaacccgctcggcgtagaattaccgtaggttcgttacattcgaacaaggaaggccgccatggggaacatcaccgacgatatccggcaacatttcgacaccttcgccgcactgccgttcaccgaggcggacagtctcgccctgtcccagctggcctacgcgcgcatgccggataacgtgccgcgctatcacgaggattcggcggacgtcagcggcatgattcccacggtctccatccgcgacctgctacgcgccgaatgctatgacgccatgttcggcaaggtgtggtcgccgcagatgaacgtcgatctgctgcgtgcgatgggggagagcccgcgctggcgcgacctgcgcgtcggcgaatacgtggatgaattcgacgccgaaaccaccaaacagttctcggcctgcgtcttcgaactgggcgacggcacgctgtacgtggctttccgtggcaccgacagttcgatcgtcgggtggaaggaggatttcacgatggccttccgccgtccggtcgcctcgcaggaggccgctgtgcggtatgtgactgatattgccggccgctgggccgggccgattatggtcggcggccattccaaaggcggcaatctggcggtatacgcggcggccaatgtgcccggcgaaattcagggacgtatcacggccgtgtattcgcacgatggtccaggcttcgatgaggcgttcttcgatgaggatgggtacgcgcgcattgcgccgaaaatccataaatcggtaccgggatcgtcgatcatcggcatgctgtttgagactcgtgagcatgtggaagacggctatacggtggtcagcagcgacggtgccagcatcatgcagcatttcgcattgcactggcaagtcgatcatggccaattcgtacaggctgatggactgacaagtagcgcgcgatacctggcacgcacgatcaacggatggatggcaaaatacgacgacgagcatcgccgcaagttcatcgaaaacctgtttgccatcttcgaggctggcgggtacgtcacgttcggcgaactcacgtcgcacgtgacgcagtcgttgccggtaatgctcgccgcggcccgcagcattgatgttgaagaccgtgacgtgatgattgaggtgcttaagggatttgccgcgacagccgccacgtcggtaatctcggccaagtagccggaggccatcaaactggttttgccagtcagtctcaatagcgcaagagccggcccctgagatactcaggggccggctcttacttccatttccccagcggggttggcttaatcgcagtatatctcactgctgaccatgactgttttacttactcctaatcaatgagcttgtagccgtgatcggcgactacggacttgagcttggtgaggtaggtttcggcggccttggatagcttggaacgctcgttcgtgacccagccgaccagcatcgtttcgtcggtgtcgagcggcacggtgacgatcttctcattgttgaggtcgccgttgtcgatgccggtgcacaccgtgtagccgttgaggccgatgatgaagttcagaatcgtggcgcggtcggtcacgttgatctgcttgggggagtattccggccagactgcctcctcatagaagtagaacgagccttcctcgccctgttcgtactggatgaacggatagggcttcagatcctccatggtgatgatctttttggcggccaatgggttgtcccgtgagatgaacacgtgcaggggggcgcggaagagcggatggaattcaaggtgtttctcgcgcaggagtttaccgatcacgtccttattgaagtcggacaggtagatgatgccgatctcggactgcatgttcgccacctggttgatgatgtcacgtgtacgggtctcacggatcgtgaactcgtattcgtcggacttgatggagttgatcatctccacgaacgcctcgacggcgaacatgtagtgctgggtggagacctggcacagctgcttgcgcggcttggcatgcttgtaacgctcttcgagcaggtcggcc

SEQ ID NO: 1370 - DNA, 9723 bp, Unknown
  R157_18m  MAG No. k141_46630
cgggcgtcgtcaaaaccatacttgcgcatgccggtcagatcggcgtggcccgggcgcgggcggctcagcggcgcattgcggccttcgcgcggcaggtcatggtcgagtgcatcggcgctcatgacctcggtccacttcggccattcggtgttggcgatttcgatggccaccggcgagccgagggtcaggccgtggcgtacaccggtcagcagacggaccttgtcttgctcgaacttcatgcgggcaccgcgaccatatccaagtcgacggcgtgccagtgcggaaacgatatcgtccgtgctaatacgcacgccggccggcaacccttcaatcatggccaccaatgcttctccgtgcgactcccctgccgtctgccaacgcagcataacttccctcgtttcatgtgtgtacgtctatgagtacgtctaactaggggttaatgttaagctatgccatacctgttcacgctacccggtctgctatgtgggcttacactgtccattgaggatgttcgtcatcggcgggtgccgatcgcatgggtggccgtgggcgcgttaatccagttggccgccgatttcgcgtatggagtggtggcgaacgacctgttcgtgctgttgcaggcactgttgttcaccgtgctatgttgcctgatccagttcgcgttggcattgctggtgccgcggtcattgggattcggcgatgtgaccgccttgatacctatgggattgtctgtcggactgtttggcctgttgcctgtggtggtctggtggctggcgatgggcgttgccggcatcacatggattgccttgtggacgcgattcgacccacaacgcacatcaccggcacatgcgggcaaggtgccgtatgtgccggtgatattggcgggcgcgattgtggcggtggtggttggggtgttgtcctaaatttctcctccatccgctttgcgggagccccgggcttaagtcgagcgttacattccccgcagtgctcccctcagtccgctttgcggacagctcccctcggcgagggagccaatgaagagactaatatccgatcagcttccccaagcgaaggaagctaacgggatgactactggttttcggcttgccacttgcgtagttcggccacgttctggtcatgttcatcggcggttgcggcgaacttggtttcgccggtgtccagattgaccgtgcagaagtacagccaattgccgctttcggggtgcagtgccgcttgaatggcgctatcgccgggattgctgatcggcgtaggcggcaggccggagatcttgtacgtgttgtacgggttggactcgtcctgggtcatctcggtggtcacctgcgcgggcttgacgttattgccataggccacggtggaatccatgcccaacgacatgccctgctccaaacggttctcgatgactcgcgtcactttgccgtagtaatcggctttgttgacctcggcctcggcgatagaggcgatgatcatcacccgttcgcggtcactgccggtcggcacgcccaattcatccaacttggcgatacgcttatcgaccatggccttgaggatttccgaagcgctcttcatgctcttgacgttgtaggttcccggctccagccatccctcaaagctaccgcccgcttcattgggcagaatatccttacccttgttcttgataatcgtgtcgaattcgctttgggcaacgccggaaagcttcgcggcgtcggcgaacacatcggtagcacgttcaccgggatgaacctcaaggaagcccgccgcctggttggtgtcggagagaacggcgatcacatcggatgcggccatatgcttcttcaatgtgaacgttccaggatagagtgtcgagctattggcgttgaccacgctggtgaacgcggcagtggacttgatgacttcggccttgagcagattatcggcgatctccgcagcgccttggccctcgctcacggtgaattcgacctcgccatagcccggtcccggatagtccgcgatggccgtcgactggttgctccggctgtcgcgccatgcgatgagcttggttacgccgaaatagccgccgccgataagcagggcgacgatggcgatagcgatgataatgccactgatacgcttgcgcttgcgatgtgcacgtcgcttgcgcatctccttgcgggatttcggcggttctggcggcttggccccgcgcattggttctgacccctgttcgacccaatgcgtgttgtcatcaaagaactcgttaaaatcatcggtcataaccgatacctcactactcccgggtacggtcgagtgccgtctgcaaaatcaccactgccgactgctggtcaaccaccggcctgtgcttgttcgaagctttatgggcctcgaacagttgacgatgcgcactgactgttgttaatctctcatctatcaatgacacctgcggaatctgatactccgtagaatcactgtcttcactctctgcttgcagcctcttctccagattggccgcccacctgcgcgcttttttggcgcttttgccttctgtaccgtccatctgcaggggcaatccgacgattacatggtccacatgttcgtcttcgatgacgttcaggacctcgtcaatagcaaagaaatagtcgccggcaacatgaatgttgccagcagggtgtgcaaaggtaagctccgggtcggacagtgccagtccgacccgggcattacccaaatcaacgcctaaccacaccactggcggaatcaggctttctgcgcctcgtgcttgagcgcttcgagggcctcgccgatcttggaggcatcgacaccgccaccctgggcgaagtccggcttgccgccgccaccgccgccgaggaccttggctgcgccacgcaccagatcaccggccttgatgccggccttgcgggcggcctcgttggtggccacggcgaccatcggcttgtcatcctcgttcacgccggcgagggccaccaccacgggggcgtcttcaccgagttgtgcgcgcacgtcgagcacggtcttgcgcagggcgtcgaccgcgccgaagtggcccacgttcttgacagccaccttgaccggggccgcggagttcttggtgtcagcaaccagcgccggaaccgaggcggccagctgggattcgtacatggaggccaagcgacggtcggattccttgagcttggcgagcagggtgttcacacgctcggcgagctcgtccggacgggcgttgagcttgtcggatagctgggagaccagcgcatgttcgcgcgcatggaagtcgtacgcgccctggcccacgacggcgtcgactcgacgcacgccggaaccgatggaggcttcggacaggatgttgaccatgccgatcttgccgacgtggtccacgtgggtaccaccacacagctcgcggctccagccgtcttcgccgatggagaccacgcgtacgatgtcgccgtacttctcgccgaacaggtgcatggcaccgagggcgatggcgtcgtcgaacttcatttccttggtggtcacggcgaggttgtcgcgcagcttgtcgttgacgcgctcctcgactgcggagatcacggacttggccggggccttggaccactggaagtcgaagcgcagacggttcggggcgtcctcggagccgcgctgggtggcctgcgggccgagctcctcacgcagcgccttgtgcaccatgtgcgtggcggtgtgcgagcgggcgatggcgccacggcgggccaggtcgatgttggcgttgacttcggcgccgacgaccagcgtgccttcggtcagacggcactggtggacgatgaggtccttgatgggcttctgcacgtcgtcgacttcgagcactgcaccgtcgtcggacaggatctcgccctgatcggcaagctggccgccggcctccgcatagaacggggtacggtcgagaatgacttcgacgttggccgggccggtgacggcgggcacggagcccttgccttcctgcatgatgccgatgaccttggcacgggcggacatgtccgtgtagccgaggaagtcgatcggcttggcgagcgtcttcttgaagtcgtcatagaccgacaggtccacgttgtgacgcttcttgagggcgtcggcgcgggcgcgggacttctgctcggccataagctcgcggaacttggcctcgtccaccttcacgccctgatcggcggccatttcgagggtcagctcaatcgggaagccgtaagtgtcgtgcagagtgaacgcatcagagccggagaccaccgggtcggcggtcttcttggccttcttgacagccacgtcgagaatctcgatgccgttctccagcgtacgacggaacgcatcttcctcgccgtaggccgcttcggagacatcgtggaaggtgtcgttaagctccgggtagctggcgaccatggcctccttggagacaggcagcagctcgggaatcaccggatcggtcacaccgagtacacgcatggcctgcacggtgcgacgcagcaggcgacgcagcacgtagccgcggccgacgttggacgggcgcacgccatcggacataatcatcagcgcggaacgcacgtgatcggccacgacacggaacttgacatccgcggcctcgtcctcgccgtacttgcggccggacaagcgctcggcagcctcgatgaccgggaagacctcatcggtctcgtagatgttctgcttgccctgcatcaggtaggccaagcgttccagaccggcaccggtatcgatgttcttctgggcaagctcgccgacgatgtgcaggtcggtcttggacttgacgttgtcgacctcgtagttctcgaacacgaggtcccagatctcgatgaagcgcgtctcatcggccgcgggaccgccatcacgaccgtattcggggccgcggtccacgtagatctcggagcaggggccaccagggccagggccaccggtggtccagaagttgtcttccatgccgaaaatctgcatgtgctcgggatcgaagccctcgttcttccagatggaacgggcctcttcatcgtcggtaaaggtggtgacccacagcttttccgggtcaaagccgtaaccgccctcgctctgcggggtggtcagcagctcccaggcgtagtggatggcctcttccttgaagtagtcgccgatggagaagttgccaagcatctggaagaaggtgccatggcgggtggtcttgccgacctcatcgatatccagcgtacgcacgcacttctggttcgatgtcatgcggcgcttcggcggggtctgctcaccaagaaggtagggaatgaacggcaccatgccggcgatggtgaacagcgtggtggggttcggggaaatcagggatgccgaaggcatgacgagatgatcatgtttggcaaagtaatcgaggtatcgctttgcgatgtccgcagtgcgcatgagcggatgaactccttgtttgggtaatgggcgcagttgcgcctggtattggtggaaaaagactggattatgaggactagtttgttctagctggttcagtgactagatggcaaggcggcatgcgcgtgtcagttggcgcgctcgatgtactgacggttgagctcagcctcgcgggctcgacgggcggcattgaactcgttgaccaacccttcgagtgttttcatcggcacattgtcctgatcggggccaagcaggaactggcgtgccgcatcaggtgtattggccttgacataggcctgtgccttggtgacggcaacgattccgatggccacgccgacgccgacccagaagatgcgtttgaacatcactcccccttctcggcggtgtcgttgacggtggttttcgcggcgttcttcgcaaggaaggactgacccgtggttttcagcgcgtagaaggtggaagcgatcttgatgatgggcttaccgaggaaagagccatacagatcagtcaacgcaccaacgttgttggcggtggtggaagccgcggcggaaatcttgttcacgtcttcaagcgacttgttgacctgcttgacggtggtcacgccttcgtccagcgcggggatggcgtgttcgccggactcccggaccgtctgcgatatctgatcaaacatcttgcccagcctgatcagcggatagatcatgaaaccggccaatactgcgaatgcgatggccgcgatcaggccagcgatctctccgacttccattgttgcctccttgaggtcacacttactcggataagggtagcactcctcccctatttacccgtgcaactgacgatgaaatacgctatttgccgtatgagacgatggtcacggcctgcgaaaacggtttggtcgtgtcgaagtcgagtacggttaccgagccgttggccggtcgttcgctaaggtcaagatcggggcctccgaaacggtggccgaggctgagcagcgtgttaccgtgcgaaatctgaagcacatcatcgccatccttgagattggggttgctggcgatgagctggaatgctccttcgacgcgcgtccagtattcttcatcggattccgcgtcatggaaggggtcggcctctttcaggaaatcacgggaggcggccagaccaaatttggctacgatgtcgttgtagtccttcgcgccgtgaggtccacccgcagcggtccaagccagcgacatgtcctgaccctcgaagtatccgtagcattgttcgcggaaatgcatatcggccgtgagttctggccgtgcatgtccggcagcctcattgatatcgagaattcgcttcgctgtgatttcggcgcgagaagtatcggaacaatatgccgccgcaaaatcatagccctcaagtttgtgcccggccctgtcggcatcggcaagtccggatgcggtgagcggcgcattgcaccatccctgaagacggttgtatttattgaacgtggtttgcccatgacgaaccagatgcaaatgcagaatcatggttcccatgctaccgcagtccgctaaaacgcacgcccatcgccccctccatggcacgcgaaccgcaggagaccgtcgacgaaaccgacaacaggcccatgcgagtgctcggctagctcacccccgccgaggcattcgccgacgaaccgccagaatcagccgagaacaaggatgttgcacttacaaatagacaatggggccccagctgacatgactgatttgaggtatgatatacgtatgtcacaccactgttataaggagtaatgatggctatcaaggagaagaccacgatcagtctggatgcgcagaccaagcgtgacggcatcgccatacttgacgccatggggttgaacctgagcacgtttgccgaaatgtctctcagacaattggtacgcgacgggcgtctgccattcacgccaagcgtccgcccttcattcgaaaaagacaacgagggatatcccctgttcaaagcgaacatggatgatccccgcatcgtgacgccccagatacgtgatggtgccgtgatcctgccggagggttgggacgatgatgaagactgatccgcgccagttcgagatatggtgggtgccgttcgcttttcccgacaagccaggcaaagcgaagaaccgtcccagcgtgatcctccaatgggacgacggcacccgcatcgccttggtgaccaaggtcaccggcaacacctggcgcgacgaaccgggctatgtggtgctgcgtgactggcaggacgcgggactgagcaagcccagcgccgtgcgatgctcgcaactgctgcggctgccaagcaatcttttcctcgacgacggcccgacaggaagactttcggcatatgatgccggccgcgtcgcctgggcgatcaacgaactctatccgggcctactagcctgagagcaaccgataccgtcaccatccctgtcgaggtgcttgccgcagcacgggtcaccgacgtcactcttgtcaagtttggcgtgatgggctgttgtcgcgggcgaatcgttccccgctaaccgctaatgcagcccgaaccagccgctgcctcctgcctcccgataaaaatgaattcgtcaaattctttcgggcagcgaatgcagatacatgtatagagcatctgtactattttcaagaatgctcattgtctgcggcaacggttcggcatacacagttttataatccacctcatcgtactctttccgaatggggaaagccaaacgttcatcgtcaacagaaaagtctgcttgtacaccctctttattccctcttgcatctacacgaatccatcggtcaatggatctcagataagtggcattcaaggcatggatgcagtacccgctttcaggcgtactgcctaacgtaagcctttgatagcatattccggcaggaatgccatttgctcttaatagggcggccaataaattagattttgcccaacaaataccgacgccctcccttaatgcgtctgaggctgttgccgtgactcttttgtcttggacatcccatgaatgcttgatttcatctctaacaaaatagtaggcggcttttgccagttcgatttcgccttcagtggagtcttttagttccttggcttttctttgcacactcggttcattccaatcgatatagtgcgaaaaggcaaggtagctactgatatcatcttgaatatccaacatataacacctccgagaatcccgattcgtcgctctcttactttttaccccgttgcgaagttggttgtttcagtaagtccgacatagcggcttctcaccaagctatctcattttcgtgcagaccgatctgccacaacaacgacgaccagattggccagcaccatgacaacaagcgtggccaccaacgcaatcaatgcctccgatgccatgttattgaagctcttctccatggccccgccaatgatgatttcaagggcgatgaggaacagggcacatgcatcaacgaggaatatcggagcgtactgcttgtgaatccgattccatgtgtcttcggatgacatcgttgccggcgttttgatgcctaccgaattctgcaaaggcaacgttccgttctttgcatcacgataggccccgaccaaaaacacgccgacgaccacggccacaactacttcgacgataagcatgcgtcaaggatatcccccctagactagtaatggtttgaatcccgcctgcccaccgatggcaggtcgattacgcgaggtgaccatatggctccagtggagcgtcatatcgaggaagcgctgtatcgcagtgccgtggaactgatcgagcgaaggtatccgacaggatggggaggcgcggcggcgatgcgactcgccggcaaagacaacggtaaacatgacggaagcaacggctcggaggcacttatcgtcacgagcgtggcgattgagacacccaatgccgccgcttcgctatgcatcgaggtcggagcgatgtgcgaggcgatgaagcttgatcgccgtgtcacccacaccatctgcgtcgtacgcgatgacgaacacgccccgttcaccgtgttgtctccatgcggcatctgtcaggaacggctgcgctattggggcgacgacgtgatgtgcgccgtttcagacaacaatcagggagagcatccgttgttcgtgccgctgcgcgacctgcagccgcaccattggactcaggtgtatccactcgccgaattggaacactacgagcgataagccgccctcgattgaaatccctacctccctaagctatgcagtaggctccgcccgcaagtcaca

SEQ ID NO: 1371 - DNA, 31028 bp, Unknown
  R157_18m  MAG No. k141_46869
ctgcccgcatgccccgagccaaggggcttgggagagtaatccccgtggttggcgtacctggccacggtcgtgcgcgatacgccgagtttccgtgatatctccttgtggctcaggccttggcggtcgagctgcctgatacgctgtcggacacacaccggtgtcgtcatttcctttcttcccgagaaccatcagtttggttgacaggcactcgggaatccatcaaggaaccggacgatgccggtgttctcattccaccggcgccatcaccgccgacaccgtccaaattgaacgctcagggtgttcaggaacaagtgccgacagtgaacacctttattcgatcacacacacgtgtcgccctcccccacccaagaagcatccctcatcggcgcggcatcggtgtcgggacaacaaaaaaactccttccttgtgcaaggaaggagccaatgggggaaacggctatctgcgtctcaacatggcgaaactgttggactcgacgatgaatgccttgcggtcgttcttggccatgacgtcaaggacgacacccgtcacgaacagcagcagcccggcgatgacaagcatgaccgctccgatcagcgtggggaatcgggccaccatgccggtgttccagaagtccaccgtcaccgtgccgcacagcacgacgccaaggacgccgaggacgcagccgatgccgccgaagaacgggagcggcttgtattcgcggatcatgcggaaaatggtgcccatcaccttgatgccgtcacccacggtgtcgagcttgctgaccgaaccctcggggcggtcccgatactgaatcggcatctcataaaggcggaggttgttgttcaacgagtggatggtcatctcggtttcgacctcgaagccgcgcgacaacacaggataggtcttgacgaaggtgaacgagaaagcccggtaaccggtcataatgtcggtgacattggcgtggaacaagccgttgatagaaccacgaaccagacggttgccgaagttgtggaagggcctcttgttctcctggaagtacgtggaactcagtcggtcgccgatcaccatatcgtagccttcgaggaccttgtccaccatggccggcgcggcgtcggcggggtacgtatcatcaccgtcggccatgacgtacacgtcggcatcgatgtcctcgaacatggcgcggattacgttgcccttgccctggcgcggctccttgcggacgatcgcgccttcgcccgccgctatctcggcggtgcggtcggtggagttgttgtcatacacgtaaatgtcggcgctcggcaatgctgtcttgaaatcacgcactaccttgccgatggtgacttcctcgttgtaacaaggtaagaggacggcgacggaagcgttcagattcttagacatgttatttactatatattctgtattggtctttttcattgattatgatatgaactgtttttttgtttcgcgtttcccttggctcgatgggagatgatgggaccatggcgaagggcgcgggatgcgcgccggagttcagggcgtaggccgtcgggctgttgacggagtcgcgcggctcgtgttcgtcggagaccggggcggtcgaacaggccaccagggatccgtgggccgcgccggagacactgcgccgttggcgcgacaggacaggtgccatggtcgcggcggagaccaggcagtcggccggggacgcgatggcggagttgaggggttcgcgggccggggtcgcgcgattggggcgcgcgaacgggatattgacggcggcgtcggcttcttttcgcggccaggctcggcccggcacggcgttggtggtcgcttgcgtcgacgggttcagggaccgttctaggggcgggccggcctgcggggcgccggcccgtggcgtcctcgaggtccatgccggtttcttcatggccgtgtacgggtgccgcaagacgcgcgcccggtcgtcggcgcagggccgggacccggccgggaccggccgcggccgggtgatggacgtcgtgcgggaaccgggagtcggcggcgtgtgccgcggtgggacgcccgtcaccaccagaccggcgaggggcgcgggcggcgggcccggcctcgccggtctggtggttcgaggcggggcgcccggaccggccgcacgtggccggcatcgcctgcgtgcgcatggccaacggacgcttcggctgcacggcgagcccgccgacgtgctcgcccgcgggctcgccggccggtcgtgcgccaccgccatggacaccggggggcgccgcgggcgccggaacaggcggtatcatggggccgcctcgcatggcggcgcggacggtctcgtgcgccgttccggccatggcgcgcggtgcatcggcctcgtgtacgccaccggggtcggggaatccggcatgcctcccccggccggcacggccggcgacccgtaccgccatggccgggagcgccgacggcgcgtacaggaccctcgtctggcggcacgagcccttccgggatccgagggacccggaatcggcgacgttccggtgggtctcgtggcggggacccgaagcgtccgcaccggcccccggactgcaggacaccggaacggaccgaaaccgggtattgcgcgaaccaagcggtgcaagccgccccactataagagcggaacaaaaatcaggccatatcattatgattaaggttcgcgagaagatctgaatcccattcctgttgtcgaatagaggctttacatggcggaaaataaggtgaaaagaaagcatttagtctatgttgacgtactgaatattatgtcatgcttcgctgtggtcatgctgcatgtttctttgaatgttttcaacccttccgacacttactggacgcaggcggttttatttcaggcgattgccattttcgctgttccaatttttttcatgattagtggtatgaaccttattggttatgctgataaatacgatacgaaaacattttttaaaaagagactgtggcgtgtaggtcgtgcgctcattctggcaagtgtcttctgctatatcttattctgcatatttccgttctctttttatggcgccgaacagtatgcgagcggaattggggtcagggattttgtatcgcgttttttaacgaattcaataaacgacatttattggtttttgtacacaataatttatctatatatgttaacgccgttgttgactcagatacgaaataataagaaaattctgcaatatttgattgtgctgcagtttgctattagcattctaattccgttaattgaacgatttggcgtacctaaaaaatatttcggaacccttttcaattggccgctgttctcttcaagcgcattgctttattttttgttgggattctatatcgccaattacctgtggaagcttcctcccctttggcttgcaggaatcatttgtgtaatttcggctggggcgatgtttttcggtggtttgtacactaacggatacttcgcagtacgcgatgttgaataccatagctacgtgattagtgcttcctctccattgtgtgttattgaggcggttgcattgttcctatgtgccatgcaagtggaacagcgtttgcgggagatatctcctacggttttgcattgtatccgcgaggtttccggtgcatcccttggcgtatatcttttccatattttagtgattaattggatgggaaagcgcaattggggcaatgtatctcaattctggggagagcatatgggagtacgagccatggttgtatatttggttacgttgattgtcgttgtcatatgtagacatattctgatgcagattaagaaaatatttactaagcggaggcctgattgtgttgcctgaaatagtattgcacggagatgagaagaaacgatttgctggatggggattcccagtggtactgggtttcgtcttcgcttgtggaacgaatgcttcgactgatgcgatagttccatttgatcgtccgtatttttatgcgcagtggctgctctttgcagttctcttcctcgcggtttttcagattggtttcaaaatcgttcagatgggagcatctgacggtttaacgaagcaggcttcgaagacgaatgctttttcgaataagtttttgttgcttcgatttgagtatggccaatcaaaaaagtccaagttcaaagattctttgagaatcttggctgcttggctgccgtatattgttttgctctatccaggtgttttgtattgggataccggagatcaagtcgcgcagttcttcggaatctctgctttcgggcagaagccgggcaagatctgggatcaccatcctttcttcgatacctatctatacggaggattcatttggctcggtcatgcaattaccggtagctacaatgtggggattttcctatatgccattgcacaatgtgtttttgttgccgtcgcacttgcgtgttggttgagttatttgaaggaacgtggcgtcggacgagttccgttgaaaatatgcgccatgttcttctgcttcttcccgatcttccctatagcgtttatgagtctgtcgaaagacatcacgcatgccgcgttctttatcgcatggcttctgatgttcatgcgcttggttgacacgaaacttgaaaaaatcaagcagccttctttcttctttggtttcgtgattctcggactgtgctcttccctgagcaagaaaatgggaatgtatatcattctattctgtttgattatcctcgtctttggaaaattcaggatacgattcaaggcagtggttgcggggattgctgcatttctttttgcaatcgtcagtatcgttctgcctaattactactatccgaaggcgaatattgttcctggaggtggacaggctgcattcgcgatgccgattgaactcttaggacgttcggctcacgcgtatcctcaggatgttactgattcggaaaagaaagtcattgaatcgtatctggtatattcttgggatcagattagcacgcaatacaatccgtatattgccgaccctgttacgggatataagttgcgcaaaggggcttctacgccggatttcctcaaggtatggttaaagattggtttgaggcatccaatgacatatctcaatggttttgtctgtcttgaatctggatggatctccttttccggaaatgataaatcttctgtttcctataaggatgtaaagaaatcggtacaatatccagtgcagttgcaaatggatgccagcgtatacactgtcgcgaatgaagacactctcggcaagctaattcccaataaagacaagaattgggcacaggaaatagtcgacagcattacttctatgctgaaatcgattcctgtggtgaatgttcttacctatgtggctttctgggcatcggtatttcctacgtttatcgcttacctgctatggcgtaagcgtaaagaatatgtaacagctaaaacgatgttccaattgctgccttacttcgtatcggcagcttcgctcttcgtctatcctgtgtcccgtgtaacgggaggtaaacatggcggagatgctacgagatatatgttccatgcattgttgcttgcgcctatcgtgatagggcttttgctttcgctaaagaaaaagccccaaaaagaaaaataaatagacggagtctctaccaaggacaatcgggataaggtaagggcgagatgattcgcccttaccttatcccgattgtcttaccgcctgccgcgtgctacgcgcgcgatggccttcaacgcatcacgacgcctcgaaccaatcggcatcaatgggtcgatgaacttgcggatcggattgtcctctccgaccgcacgctcatgtttcggcaggaaggcatcctccgggatttgcggctcgttcgccagcgccacgcgcttgatcagacgttcgtagaacggtgtttcgcgggcatagcgccagtagatcgaggcgcaatcgcaatccgggtccgcccacggcttctggtagccggcatagtggatgatctgtgggttgctgcgcgactgcatgtaggcgtcgtagatatcgttcggtgactgggtgaacaggttgtccacacgtccgccacaatcgtgcaccacgttccattcccatggcagatacagcacgttaccttcgcagtgcgcgttgagcacatcctggtcgttgtagatgaaatcgtcattcgatgcgtaagcgagccattgctcgatggtgtaatgctcacgcatcgccttggtattgagcaccagcacgccagcctggaagtaatcgtaggggttctgcatcttcagcacggtcttcgcgtaattcatacgcttaccatgctttacgttcaaattgccaaggaaatcgatatcgcgcactgcgccaagtagcttgccctgcaaatcgatgttgtagagctttgcgatatcaccattgatgatgatatcggaatcaaggtacagcaccttgtcatagaacggcaggagcttttgaatcaggaaacgatagtatgtttccacgctgatatgggcgttgttggtggaaagctcatatccggcaagttcgcggtccacgttggtgaatcgcagattcatgttcgggaactgtttgaagaacccgcgcatacgttcctgcttgtcccaagagatgttgcgctgcagtacggtgacatcgtagaagtagctcggatcagcgttcttcatggctgagtacacggtagtggtcagctgcggcacgtaattgtcatccgctgcgaacaccactggaatgatcggcttatcagtgacgtcaagcggcttgagctgctcggctggttctggattggtgaagtgcacgcactgcagttccttgaatttccaattggatccgatgcgcttgtgatgcatgagatagatattcagcaggcgttcggaaagatggcctggcgtacgcagtgcttccttgctgtacgtgctgtaatcggtgttcttgtcgaattcctcaaggatcgggaacatccactcgcagtagtcaaagaagatttccttcttcatgatgaacatgttgcagaagcatgccttgttgccgttgaagaaaccctgcgcatcctccttataatcaggatacatggcgcacagaatctgataacagcgcttcaaatcgtcatcgtgcagcaggggagcggcctcccacagagcgcgtgggcttccatacttgttgatgattatatccagattgccgaacggtgtggtgatgacgtcatactgtttgaccacgcgggcgatgttctcatcatccagaccgtactccttctcagccttggcgtcgatataatcatccataatttcaccaaaggcattttcctcatgcgctgtttcggagaaatcaaaataacggcggtaatggcagaagccgtagtagtcggcattgatgtttttccatgcccagtactgcgtggtcagttcgcaatagcgtggattgagattggcgatgttctcgccttcgtcatcatggaacgcccaagggaagcgttcgttcttcgggccaacctgtactggttgcatgatggcactgccaaaacggtcgacgtttttatgcgcggtgacgaaaatgcggatatcctgcttgtcgtagttttggaacgcttcggtattgcgggttttctcgatgagattggtcatatgggaagtggcgattcgcttcatctcatggaatcttatggtgtctgcagatacttgatcggtaggcatactgatggcgttggctatgctgaaccagctgttcagatcagcgtcatgcggaaggagctggttatcggaaagcagcgcataagcatcatcgcgtacgaaacggtacaattcgcgccccgtgatggccgggccgaacacagcttccatttgcttggcggcctcaaccttttccgcttccggaaccctgaccttccaatcattggcaaggatttcggtcgccttgcgctggaaaccttgtgcgcaagcgtgaagcatatcggaatgctgctcatcggcgaattcgtaggctgcatcgaaatccgccttgaaatggccgcaatagcgggcatacttcgcagcatcgatcatatttgtgccgcttatgccgcgaccgtagtaatacacatatccgcggcattccttgaaggaatggtagctgttggcgaatgccgaaactacgaagcactcgtagccgtcctgagatcggccaagacgatcgcgggtcatggcgttgaatgcttccttaagtacggaagtcttgtataaacgctgggttacgcgccaatcgaccttgtagcctcgcgtttcatcgaaaatgtcgcggacgatatcttctccagtggaatcgggcgtgggagtgttgttgaaggtttcgaaggcttggcgttcgttttccaaaaggtcattggctgcgacaacggtaagaccgaaatgcagtacgtccacgggatgcttgtcgatctccgcggcgagctgttcgcacatatcaggcttgagggcatcatcgccatcaaggaagaacgtgtattcgccggaagcgttttctacgcccgccatgcgagtgcggtgtgtgcccatattcgggttgttggtgactactcggatgcgtgcgtcctgtgcagccgcctgtactgcgacctctccgacattatctgggctcgcatcgtttatgacaatcgcttctatatcggagaaggtctgattccgtactgagtcaagacattcctgcaaataatcgccgacattgtatgcgggaatgacgattgagattttgggcattgctcttccttatttggccgcattgatgtattacttgctgagcaacagtgtactgttcgacttcgaaaagcacactttggactactatatacccagtgctcattgagaaataaggagggcatgtgctgtttgcagattggttgcgcgtgaagaaaaataagttgcgtcgtgcgggcacgcatgttctgcgtgcgatgaagaggcgtcatcctcagattatcgtttccatgacttcatatcctgcacgcatcaataccgtgcacctggcgattcgttcgttgcttgcgcaaaaagtgttgccggacaaaatcgtgttgtggctctgcaaatcggattttccgaatcgtgaaaccgatttgccccaaacgttgcgcgacgtgttgtggcatgatgtggaaatccgttgggtggatgaggacctgaagccccacaaaaaatatttctgggctttgcaggaatttcctgatgattacgtcatcaccaccgatgatgatttgctgtaccgcaatacgatgattggcgatttgctcgcagcacacgaagcccatcctcatgcgattgccgctgtacgtacgcatttgattatgttcaacgaggacggatcccgtaccaattatgaggattggatctacgaggcacctcattaccatcccgcgcttgtaggtgtgccgtccatgcggatcttctccacgaatggggcaggcacgctgtatccgccgcatacgatgcctccagagacgtttaatgccgaggaaatcaaggaaacttgcctgaccgctgatgatttgtggctgaaggtaatgcaagtgaaagccggtatccccgtggttgcggcaacagacgatcagttgctgaattatgtgcctggcacgcagggggaggaagcgctatgccaccagaacaccgaaagcggtgtaaacaatattgtgctggaggcgattctggaagagctgcaagccaaaggtgtgttgactgacgatttcgacaagcgcgttgccgatcctagcttggatgctttgattcactaagtgcataggcagaaactgccgcgatatttgctgtgacttgtttgacatgaataattgcgaggtgacctcaaacagccacggcttggtctgcgcattttccggttttattaagccactgtgattgattcttcctgtgcgttttgcagtcgccgtgagcataatatggttttgttgttactgcaacacgttaaggagaaaagatgagaaggaatcatggattttctcgtgtgttaggggtgatcgtcgcaagttgccttctagtctctggattcatagcgtcaccggcaaatgctgcggaggacattgaaaagtcagtgcaatcgcggaaaattatggatgaacggccggcagtgcttgacgaaaacactccatcaacgttttccgaacgttcgaatgagccggtttcatcggtgacgggcgtcactttgggagatggatacaaggcacgtaccgattacataagcattgaccaacgtaataccaaacgggatgcattgaatgccgttatcaagtggcgcaaagatgcactcaatgatgcgcgtattaaattcaaatacgacggttcttggaaaacggtgccggaatatttgaaagcggttggtatcagccaacaggaatacctttctccaaagtggtcgaatgctttggagcgtatcgctattcagcgtgcgcttgaggcatatacatgggctgatgggcacacgcgtcctgatgatgattggtgttttggggctagttacaaaggtttgacatccaatgctgaagtacttgcttggggtacatggaacatatcggatgcagttgatttatgggcgagcgagaaatccgattacattaatgaggtgaatggtcatggctccggtgtgactggtcactatacgacgttgacagatcccgattacggttcatatggctttgctggcggattcagcgatagcagtgcatattctggcgaagcagtttccagagggtatgcgtcggaatattcggatgaaacgccaaccaatttaaatggctacggacgatttgagatttcagtcagccaaaggcatatcaacgagggcatgacgtggaagggattgcactggaacagctcatccgctctcgagcccggcaaaagcgatgaagcagtggtgcggctttcctatggtgctaatcggtacaacctgcttggtggtacatggtcatcgtcgaacacggccgtggcaacggtgaccgaaggaaatattaaaacgctcaagcgtggcaataccgtcattaaagtaaatgctggcgggcggctggcgcaaggtaatgtacgtgtggctccggcaatgcaaaggattttcggtgccacacggtacgacactatgtctcaagttgtgcaaaaagaaggacttaagcaggggcagacggtaatagttgcttctggcacgaactaccctgatgccttggcctcatctagtctggctggtgctttggatgcgacaattgtgctgactgatccgcagtcgttgtcagctcaggcctcggaacggatcgccgccattaaaccgagtcgaatcatcattgctggaggccctgccgctgtttcgcagaatgtcgagcaacagctgaagcaatatagctccaatgtgaggcgatattacggtgagacccgttatgacacttcgctggcgttgtacaaagcaggcgaacggctgggagcgaagtggggtgcgattgctctgctgatgacaggtgataattatgctgacgctttgtcgatatcgtcgtatgcgtatatgtcgcatatgcctattttcttgtgtagctcgacgaagggattcaccgatggtgagattaaggaaatcaaaaagataaaaaagatgtgggtcattggcggcgaacaggccgttccacaacgttttatcgaacggcaaattgctggaggcatggagcgcatagctggctcgacacggtatgagaccagcatcaatgtggcagatcgatttgccggagattatgatggtttccttcgcatgaataatgtggtattcaccacgggaatgaatttcccggatgcgcttgcggctggtccttttgccgggcgcaataaggcggttttgctacttgcggatccgaacgggagcactgccaattttgtgaagcagcatggcaatgttgacaatgcctatattgttggcggtgagaatgccgtctctcgcaatactgcgaacggtcttgctgacgctttggatatgctgcggccataaggcggaaattgtagcaacattaagaggggctgaccatggttcacatggtcagcccctcttaacacgttttatgtcgtcattgcgcgtgtctgaggctgaggttgtcggcgatggcgttcgcggtgccttggtccacggcgttcacgccgtcgactacgagcactcttgagaatgattttaatgcggtcttttggtcagaccgttggcggaatcgcacaagaatacttcgactcgtacgagcggttcaagcacgagctggacgcgtacatcgtgcactggaacaccagacggcgccagatacgactcgagggacgcaccccggaggagttccggagcatgtccctcgcggtctagggctgtatcctaattaacaacgtccaacaaacggggcgcaattcaagtccacttcgtccccttttgaatgtttcgtattggaaatcagaatcagtcgcaggcactcataccaatttcatcaatgcgcatggccgaatcgttgagcaaaccggcaaaattcaccgttcctggattgcgcactgagaagtagcatgaattctcatcgctggtgaacgcgagttgctcgaaattcttcagattgctggtatcaggaataatgcgcatggtggcgatgattttgaagtcaccgtcattgaagagatgcaaaggcaatgcgaaatgcaccttgttatggcctgtcttgttgaccttgaatgagacgccacaatcatacggaacgccgccgcgcttgacatccaataccgacatggggatgtagaactcgatgtccttgctgtcgcgcagatcatattcgacgtcgaattcgaatgtatccttgcaagtgagcatctgttcggaaaccggcagaatgcggaatgtgggaacgcgctcgctgagaccaagcgggtattcgccttccttttccttgtctttctccttttcctcgttcttgcgctctaccttgaggttttcgagagtgtagcgatccgcgacatcgttcttgtcgccacttgcgatgatctcgccatccttgatgaggatggccttgttgcagtatttcttcaccgcgtccatggaatgggtgacaaggatgacggtcttggtcggatctttcttgatttccgcgaagaaattgtcgcatttacgctggaacgcctcgtctccgacggcaagcacctcatcgagcaccagaatgtctccctgggccttgatggctacggagaaagcaagacgaacctgcataccggaggaatagttcttgagcttctggtccatgaagtcctcaagctcagcgaactccacgatgtcatcgtacatcgcgtcaatctgcgtacgagtgaatccaagcagagcgccgttcaagtacacattctcacggccggtcagttccgggttgaagccaacgccaagttcgatgaatggcaccagtttgcctttgacggtgaccgagccttgctccggggtatagatctgggagatgattttcagtaatgtggacttgccggaaccgttacggccaacaataccgaaaaaatcgccttggcgtacttcgaaattgatgtcacggagcacatgctgcttggtgtagcctttgatgcctttcgtccagtttaagaacgccatcttcaggccggtcgcctgctcggtgggcagacggaacatcttggctacatggtcgaccttgagcaccaccgggcgctcgtccttggcttcttcctgtgtcttttcagtcaatgcaatttcagccatgatcagagcacctccgcgaacttggagctgtatttacggaatacatgaatgcccagccatagaatgaacgcggacagcacgtacggcagcaggcatagcagtttgttatcgaccatgctccacgcggtcggcacatattctggggaaagcaggttatggcgaatatccatgattacctgagtggaaggattcagcataagcaatttagccgcccaagagaaatctgggttgttagccaccatcgaaatcggatagatgataggtgtggcatagaacatggcttgcagcactacctcccaaatatgtgccacatcacggaagtacacaaacagcgaggcgagcagcaatgccacgcccagccctagacagtacaactggattatgctgaacggcacgagcagcacgcgccaagtgtagtgtgcatgggcgaagaaaccgaacaaaatcaccacgcataagttaatacctaatgaaatcatggaacccatcgtggtggaggccacgatgatgtaatttgggaaatgcactttgcgtagcaaatcaccgcgtcccacgatggattgcatacccatgctggtggactcggagaagaagctccacaaacaggtgccgcacagcagcgaaatcgggaaggtcggggtgccgtcggagaacttcaggaatttcacgaacaccacatacatcaccgcgaacagcatcaacggcttcaatacggaccataccatacctaggaacgaaccttggtagcgcagctggaaatcggtcttcaccagttccttgaacaccaccatcgcgtagtggtacctcttcttgaggctctcaaaaaaatctttcacaaacattccatcctactagtgcgaagcgtttggacgcaaaatcatgtggcaatgcggttggtgcgctctccttcgacagtactctcatatattctagtgaggaaaggacgtttgtcttagtaaggcggaatatctcacatggttctcacagcggaacagcatcatccgaacatcaaggttttcgtgtcggcgcataagcgggccacgttccccaaaggggagagcattctcccggtgcaggtaggcgccgctcacgccacgacccgtttcccgaacaccttgcatgacgatgaaggcgaaaacatctctgccgaaaacccacgatattgcgagctgaccgcgcaatactgggcttggaagaacgaagatgccgattattacggtttctgccactatcgtaggtatttcgatttcacggataccccacataaggaaaacgattacggcgaaatcattgactcatatattgatagtcgcacgattgccgaatatggcatcaatgacaaggcgattgcacatgcagtggacggatgggacatcatcaccacgcctttgaacgatgttcgtcgtatcggcggattttcaaaccttaaacagcattgggacgccgacgaacatctgcggctgaatgacttacgccatatgtacgacattctgtgcgagcggcatcccgattacaagatggatgccgatgccgtactcaacggccgcaccgcagcattctgcaatatgttcatcatgaggaaagaaatcttcttcgaatacaacgagtggctattcccattgcttgacgaattcgcaatgaccaccgacttcagcaagatggacatgcagaccacgcgcaccgtcggccatctctccgaacggcttttgaacatctttatcgcacacaagcagcgcaccggcgcagactggaaaatcaaacgactgcaatgcgtgcattttctgcatccagagccgaacgcgatactggaaccggtagggcaggagcgtggacgtgtggtgccggtggtgttcgccgcggacaacaattacgtcccgatgctcaccaccaccatctattcaatgctgaagaacgcttccacgaatcgtatgtatgacgtgatcgtactagaacgaaacatcaccgacgagaacaagcgctacatgcggcagttctttgcaaggttctcgaatgccctgattcgtttcttcgacgtgaaccgctatctcgccggattcaatctcactaccagcaatgcgcacatcagcattgaaacatattatcgtttcatcattcaagaagcgttgccattctactcgaagctgctgtatctggattgtgacctggtggtcaatggcgatatcaccgaactattcgataccgaactcggaagcaacgctatcgctgcagtaccagatattgattttattggaaatctcaacatgaagaacggtgagcgtgctgaatacgttcataagcagttgcacatgcgtgacgcatatggctacttccaagccggtgtattggtaatgaatctcgaccgcatgcgcaagattcacacagtgcacgaatggttagaaatcgcttccagaccgggatacatatacaatgatcaagacattcttaacgtagagtgtgaaggtcttgtcacatatttggattattcgtggaacgtgatgcacaattgtgcaggccgcattgctggagtgttcgatttcgcacctgcctccatgtacaaggcgtatatgcaatcacgtaatacaccaaaaattgtgcactacgcgggctttgataaaccatgggaaaatccatggtgcgatttcgcaccgctgtactggagctatgcgtgtgaaacgccattcgcggcacaaatggttgccacaatgagcggcgtggaacgccccgccccaccagaacaccacgaacgcgcaattgccgaagacagccctatgcgcaagtatgtggacgtgctagctccggtcggctccaaacaacgagaactgctgaaagtgatagcgcgcaaggcgcagggcaaacggtgagacaggcagacaagtcaccggttgttgacgggggcttcgtgtcctcgtcaacaaccgaccatggtttcacagggaagaattagtccctgcgaaacagatcgcgggtgtagaccttgtcgctcacgtccagcaaatcgtcattccaacggttggctacgatggcagacgagcgggtcttgaaatcagcgagatcatgggtaacctcactgccatggaaattggattcgcgcaatgtgggctcgtagatgagtacagggatgccgttcgctttgaactgcttcataacgtcttggatggcggactgacggaaattatcggaatcggacttcatggtcaatcggtagataccgatgatagggttctgaacattcctgacaagttccatcacctcagaggctacgaattccttgcgggtacgatttgcgtccacgatggcctcgatgaggttctgcggaacctgactgtaattggctaacagctgtttggtatccttcggtaggcaatatccaccatagccgaagctggggttattatagccgtcaccgatgcggggatcgaggcaaacaccatcgatgattgcacgcgtgttgagtccacggctttccgcataagtatccagttcattgaaatacgccacacgtaacgctagatatgtgttggcaaatagtttgatggcctcagcctcggtgacgcccaccaccaatgtgggaattccggtgctgccatcatgattaacgcgagacgtctcagcgggatcagcgccttcaacgagcagggacgcgaatcgacgtgccgcttcgacagaatcagtatcattctgcggggcgccgacgacgatgcggcttggatgcagattgtcgtacaacgcgtgtccttcacgtaaaaattcgggggaaaagagaatacgatcatcctgaaggttcttacgtaactgttgcgtatatccaaccggtatggtggatttgatgacaatccaagcattcggcgcatatcgtctgaccgatgtaatcgccgcttcgacactggacgtatcgaagtaatttttcttttcgtcatagtttgtcggcgtggcgatcaccgcgaaatcagcatctctatatgcctcctgcggatctagcgtggcatgaaagtcaagtattctttcgccaagagtgcttctttccaagaaatcagtaattgcagaatcgacaataggacttttcccattgtttaactgctcgactttctcgggaatgatgtcgagtgcatgaacttcattgtgctgagcgagcagcaaagcgacagacaatccaacgtagccagtccctgcaaccgcaatcttcataatgtcagcctttccttacgcaatcctaagatattgtagacgcaggtcactgcaacgaatcaacgtagctagcatcttccaaatcgcacatgccgacgttcatcctgtatgggcgaaccggtaaccaatgcacatttcttgatgggtcttgcagaacgacgagcgaatacggctaaggagcatcccgaaaacgtaattatcgcgtcattcatgaaaatcaaaacacgtcagcttccaaggacagaagaggcacgaaaagctcgcatggcgcaagatggcgtccgcatccgggctcttgcgccccagccgttggcatgcgacggtatgctggaatggtgaacagcatggcgtgcggcggcgtattcgagccgcgtaatattctggtgaccggcggatgcggcttcattggcgcgaacttcgtgcgatacgtggcgcggagccatccgcacgtgcacatcaccgtgctcgacaagctgacgtacgccggcaatccggagaacatcgccggcctgccgccgtcgcaggtcgatcttgtcgtcggggacatctgcgacgtcgcgctgttggagcgtatcgtgcccggtcacgacgccatcgtccacttcgccgcggaatcgcacaacgataattccatcgccaatccggaaccgttcatccgcacgaatgtggaaggcacgatgcggctgctggaggccgcccggaaacacgacgtgcgcttccaccacatcagcaccggcgagaacgtgcacgacaggcccgggcacgacagacggtacgcgatcgacgcatccaaactgcgcgccgaactgggctggtcgccgatgcacaccgacttcgccagcggattgcgtaacgtcatcgactggtatgcggaacaccgcgactggtgggtgccggccaaggaagccaccgaggcccgctaccgcgcgcaggggcagtgaagcgagcctgctactacaggcggcctttccgtggcaggccaacgttgcgcagcagacgctgcacgggcttgagtaccacggtgtcggcgaccaccgcgaacgccaacgccgcgagcaacgtggctgcgaacatcagcacgctgatgcccgcgtacgaccatccgtccgtgggcgcgggaatccgcgggccgatcagcaccttggacagcggcgaatgcaccagatagatcgtgtaggagtaccccgccagccaggtgatcgccctgcgcagccgcgccgacgccggatgcacgtcgtaccggaagaacaggaacaccgcggccaccaccatcgcgaacgcaaccgtgaccgtgcggccgacctgcatctgctggccggcgaacagatatggcgtggcaacggtccaggtcagggcgaacggcgccaacgcatacaagccgcgccgcgcccgcgtggacggcggatagtattccaacacgaatcccaacagatagtagaccagcagtccccgccaggggaacgactgcaggaacgtcaacgggtatccggcaagattgcagatctgctcggcggcggccacggcggcggccagaccgatcagcagccaggcacccgaccggcctatcgcgcgcatcatcgcggccagaaacggcgtcgccagcacgaaaccagcgagcatgaacacgaaccaatagacggaatcgtcatacccggaaaacagatcgaacaacgttccagacacagcgccgccaaccgaacgatgatcgatcaccaggtaggcgacgaatcccatgccgcccgcgtacagcagatacggcacaatcagcgagataaaacgtttgtagtagtagcgcacgtacggcgcgaggctgctgggatcggcttggccggcaccgccgactgcccgggcatcagagccagagcccggcagacggcccgctgagtgggtgctcaccggccggtcggcatcgaatgtcaggttgaaccggcccgacaccataatgaacagcggattgcagaccatgaacaacgcgaacagcacggatcgcaccgtttccgcgctgccggcgagggtcatcttgacgggcatgtagttgttgatcacgtggacgccgatgaccaggcacatcgccaccacgcgcagcagatcgtagttcacgtcgcgcggcctgccggcgacgccggaaacggtggcgtcggaaacggcgacgccggaaacggaatcgggcatggtcatcacatggatcccgtcagggacttcagatcgaccgggcagctgatctggctcttcagcttgtccaaggtgtccaggccggccgagggatcggaggacgcgcccttatgcgcgtcgttcttgccgccgttcgcaccatcggcgccgttcgcaccatcggcgccgttcgtatcggccgggcactcatccgtcaccttaccgttggagcccgtctcgacgccatccgcattcaccaccggcgtggttaccacgttcagtggatgtgtggcatcgctgctgacccgaacggtataggcaatcgtcaattcttttccgggctcgatccactgctggttgaacataatgtactgacggtcatacaggctcgcggtgttggtaccccatgaatctatatcagcctgcacagcggtgatttcgccaccgtacggggcggtaagcaccacgcggtacagcatgccaccgagcactggattctccgagccgccattaacgaaatcaggcaacgattcggccttagccttagtcagcgtgttcttcatggtgaaggtgaccgtgtattcgtcaccgagctgatcttccgtaaactgacccagctgcgtgttacgcacggctgtcgtgatgcgcttatccagcacgccagaatacagggcattctggctggccgaggcgtcgccgcaggtttttgtgaccgtggtggaggtcttcagataccaatcctgcttgccttgctgcagctccgaaagatagatgccggtttcaggtacctgactgtcagcagacaactcgccactggccttatcgtcgataagtccggtggcaatcagcgcctcctgctcatccggatcagccatccatagcttgaaatgaccgctagcgctggtatctctgattgccttcaacagcggggatgcggtggaagcattcgcgttgccaagcacatggttcataattgcttgagccgcttcggaaacgaagttgttctgctgctcgaagtccgggtaatccgtgtacaggtctgaagcgaagaacggcaccgtggtggtgccatccagcactcggccgtccgaaagcttgaccttgcctgtggctcccagcaatgcctggaggaatacgggatcgaatgacaatacacccgctacgttctcgtcttcgttgcctttctgatacagccacatgtatttgttcatctgtgccacacgctggaattcggggtcgatggtcgtggtggccgggtactggtcaaaagtgtcgccaaatacctggcgctccttcagcaccgtagcatccattggcttctcaggaatgtcccaaccagaagtggtggcgaaatcaccgatggtaatcgtgcccttatctgccgtgattgcggcgatggtgcccaccatgccgcccgccgaacgcagctcggccgggttctgcaccatcaccagatacgtgcgcttgccgtcctcgccaagcagttgcggtagcaagttaatgaggccatcgtattcgctgagcatcgaatccacggtcttgagcgcagccttttcggattcgagcacggtggccaccttggcgacgctcggagtcggcaccttgttgagcttggtgagctgctgcgagatatccttatgcgcctgcttgacgatatccggcatatccatcagggcgctgacgtccaccgagccattcttcagggagaagccctgcaatcgtttggacaggttcagcagatcagtgaacggaccgttgaccagcgtatccacggaagccagcatttcgcgggcagcggtgatgtcgctgccaaatcgcgaatggtcgcggaagaagtcccactgcgggccgttcagctcctcgttgagatcattggtggcattgaccaactcttgggagatgtccgacagactcttatcgctgccgcagccaagtgccgaattggccagactttcggcggatgtcagcacacgctgcgcatccgtggccattctcgagacggatgccgcgtagagcgtgcccacacaggtgacgctggccagcaacgtcagcagcagtacaaccaccgctcgcgcccatatcggtgtacggctgatcagcgaacggccgtcgccacccacgtgctggggagtcttcaggtttacgggacccgtctgctgatttgcagcgctattcgtagatgcggagcgattggatttcccgttaccggcatggcggcttctcctacgccccacagccttatggctcgaatgccctgaagtgaatcgcatacttatcctacccgaaaatctgctcagctcatactcttatccaacggcgcaaggccacgcttccggatgccggactccgggcgaatccggaatcgcagacatgccggagcacacgtgacgccacgcatatctcatgccagtgtaccgatgccaccgaaatagaccgagggtttatcccataccgggtgcaaatcccctcatgaccaccacatcgctgtcagaatgttctcagacttcattgaggggtataacagtattgcgcaagaaaacggtcactaaacgcaacaatagttaaagccgtattgatctgttcggcttaggagaacgggagaggtaattacatgttcgtcctcagcaacgcctggcgggccctgacacgttctaaaggacgtacggccctgaccgcgttcatcaccttggcggtcaccttcggcacagtcgccggactggccatcattcaagaagataccaacgcacacaccaccgcatacgatcagcagaaggccacgttggccattcgcccgactgcggctacgtggaagaaggtctccgctacggactcggcttccaccaagcattacatgacgtggacctcatataccgaatacgccacgctcgtccagtcggccaccaactcgttgaactttacggttaccgaaaccgtgccggcccgcgtgagcggtgatttgaaggccctggacggcggatcgctgggctcgacctccgatgatgagaccggcggccagctcatttggcgagccttctggaccgaggatgccgccaaggccagcgacctcggtaccttcgaaatcgtggacggcaaggacctgagctacgacaacaagtcctccaacccgaacaccaccggcgcactggtctctgaagcgtttgcctccgccaacaacctgaaggtgggcgatacgctcaaggtggcggccgcctcggacgcccagaccacggccgagctcaaggtgcgcggcatctacaagtacacatccgaatccgccgtcgccaatccggtgacggccgcccgcaaccgcgagaacgcgatcttcaccaactatcagaccttcgccaaggccggactcgacccacagtccaacgacaagaccgcctccggctgggcggtgccggatctggacgtggtgttcgacaccggtgatcccgctacatacaagtccttggtatccaccctcaagaagtccaagctgcccgccaagggatacgaggtgtcttccccttcgctggaatcctacaacgcttctctggagccgctggatacgctatcctcgcgcgcgaagaccggcaccattgcgttggttgccgtgggcggcgtgctgttgctcatcctcgtgctgtcaggcgtgtgggcgcccaagcgtgacgacgagatcggcatggcactggtgtccggcgtcactcgcgggcgtttgggatggcaattcatgctggaagtgttcatcgtcaccctgcccttctacgtgattggtctggtcggaggcgcgttcgccgccaagccgatcggacctgctctggcatccggccataccatcccggtgacatcggacctgatttggaccatggtctggtatggcctgggttcaatcctgatcctggcgattcttgccgccctgcgccttgcgttcttcagcgcgaacaagctgttcgccgccgatggcgactggggcaccgtgagcgagactgaggcgattgaaacggccgaaaccactggcgctgctgagaccgatgaagctgctgaggccaccgctcatgatgccggcgaggccaataagacgaccaccacaaccgacgatgcggaggcacaggcatgagcgacaagaacaacgatcaggaactcgagaagaccactgacgcaacggctgacgaagtgacttctgagactgagacgaacgacgccatcgaatccgttccagctgactccgtgcagttcagcgtgaccttcgatgacgttgatgacgaaggcactgttgacgatggtatttacagcgcactggcatctgccgaaaccggagcaaccgacgagaccagcgaggccgaagcagacgccatcgcttcggccaacgcatccgccgaagtgaccgagcgcaatgccgcccgcgtcaacgaaacactccgactggccaaaaccgatcacaaagacgcattggccgagcatgcggagcctcagggcaaagcggccgaacccaccatgacgctggcctcgcgtatcgatcgcgtgttggtgggcggcggttccgacgacattctgctcaagacctacccgacctttgccctgaacaaggtgacggtcgccggtcccaagggcaaggtcaacatcctcgatggcgcgaatttcttctgctactccggacacgcatacgcgctgctgatcagcgacgaccccgattcgggcatcaccgccgacgccaaacgtcgcgcgctgatgggcgtgatgagcggtttggccacgccggtgtctggcacggtgatgaacaagagcgccaacattgttgagctcgagcccgtggaactgcgcggccaccgtctgggcatcgtaccgcagctgcacgccgtgcagccgaatctcgacgccgaacaaaacgtgctgtacgccatggatgcgtccaaccgcaacttcctgaagcccaagccggtgatcacccgcgaactgctggccaaggtcggcttctccgaggccaccagcggcgtggccgtcggcacgttgcctttggtgcagcagcgtttggtggccatcgcccgtgcaatcagcaccgaggccgaagtgctgatcctcgacgagccgacacgagggctgaacgcggatgacgaggtgaccgtgttcgccgcgctggccaagctggcgcacaccggtgacccgaagcattgcgttatcgtgctcactgcgtcgcgcgagctcgctgaagcagccgacacactcttcaagatctgatctgtccgacagcaatacacaccagacacaccagcacaggctcttgaagctcacgatgttcggatacataccaaacatcgtgagctttttcgatttcgaggggctgatttgcgtgttccgggaggtctacttccgtttcaaggggctggtcatccgccaaaccccgagtataaacggcttcatgccaacgtcattccgccgtttttacgccgcgtatacttgggcactagccccttgaaacggaagtagacctcaggaggatgccgaatcagccccttgaaacggagataggcatgtcgagatgtccgaatcagctcctgacaatcctgatgcggctcattgccgcgctaatctgaggataaatctgaccgtacgaggcgaaacctgataatcatgaccggatatattcccacactggagcagatcgacgagttgcaccgcaaaatcgcgccgtccaaggcggcgtacgagctggtgcacacgcattgcgtgattgtggcgaccatcggctgccagatcgtgcgccggcagaacgcgctgttcacgcgccgctgcacattaccgaaggacgcggaggtaccgcccaccgcaggcgtcaccggcggccatgtgccgccgcgtctgctcgacgagcatttagtactcatcggcggactgctgcatgacatcggcacctaccgcgtgttcaagcatgacggctctgacgacgaaccgctcaaattcagcaagaaacgctacattctgcacggtcttaagggctacgagtatctgctcgacgagggcgtggacgagtccatcgcccagttctgccgcaaccataccggcgtgggacttacgcgcgaggatgtggtgcgccaggagctgccattgccaccagccgactatgtgccgatgaatctcgagcaggaagtggtgatgtacgccgacaagttccatagcaagtcagtgccgccgaagttcctgcaggtcgaggcgtatacggcccgagccgagcgatttggcggagagaacaaacaacgatggctggatctggtggccaagtatggcgtgccggatattccggcgttggcggagaagtatgggatgcggatgatttgaggctctaggggcctcctcgtcagagggagcttatgaagctatttcagatggaacggagacggtaggtgccgttgcggttggaggcgatgatcatctggtcgttctccagcacgttccagccttcctgctcatagccggaagaggagaccaccacaccggcggagtcgccgttgtcgtcgcgcagctcacggtagcgcatcacacggtagtcggcggcctgctcgccacggccgtactcatcgtagatttccacgatgcgcgggctggtcttctcacgaccggcggcgcacagggcgatgagctggtcctcggactgaatcatgcagttgtagctggacttcgggtaggtttggcgcagttcgcgcacggcctgggccacagcctcgtcgagcgggaagccgaagccgatgtattccagaatcaccgcgaagaagatagcggagtcggaacggccgccggtggagaggagcacgctgtggttcaccgggtatgaacggttggtgacgatgttgcggccattggcgtccgagatatcgccgttgtggatgaagctcaggccgttcgcatagaacgggtgctggttctccatgatgagcggcagattggagcttgccaagcgcaggtgccagatggcaccgcgagacggttcgtcggccagcgcctcaaacgtgctgtcatgacgggccgcgatggtcgacttgtagattcgggtgccggtttccggagtgggtgcgccgccgtcgcgcacgtgcggtgcttcggcgggatcggaaagctgggctacaccccagccatcattgtggatttcagacagttcacggaaatcctcgacattgtcttgccccaacacggcgttgagactcaggttgaagcctgccgtcgcgtatcccagtaatctgcacatggtatttcaacttaccgaaaccatgtggcgacgtgcggcgactgttataggcattctttatagagcgcatcagcgccgctgcaaactggtatgttatcgcttctgtttggcggagcgctgaggcttggcggcgggtttgccgttcttggccttgcccttatcgccctgctcagcggcggcagcggtctcagcgatcttccgctcctcggccgatacggcggcatcgagctcctgtaccaatcgcccgagcccggacgtggtgtccatcgggtcggggacggcggccgggtcggccactgcacgagtcggcgtgggcgtcgtgatggtcttggccgtatcggtgcgcttcagacgcggtgggcggcgggtggagacgaacagcggctgcacctcgaccagcgggttgtaaggtgccagaccgaaccacttaaccggcgagccggccatgcggcggattgcgtacttggcttgcaacgacagggcaccgcgtgcggaaaccttggattccggcatcagggccttgtgaatcagcacgtaacggatggtgccgatgtccggatcggcgtcgaccttggggtaaatcgacttctgcttaggcagttcgccggttttggacaggtcgtgcatgatctggtggatgtacgccgggatggactgcgaaaccttgaagcccaaacggaagcgcacgcggtagatgtagttcgtgccgaagtcctccaccgagtattcacgggtgaacggctcgtcggtggtttccacgctgactgcccaccaagcacgggcacgcttggggtggtcggcgaagatggagaagaagatgtccgtgtcgagtcgcttggtttccgagtcggaggtcaggtacacgatgttgtccgcaaaatacgggatgcggaaatcaccgtgcagcttgtcgagcgcgggtaggaagtcgttgggccgcatgtgacggcgttgcgcacgttcgagcttggtgccctcattccacgtgtacatgacgaacagaatcgcggcggtcagcaacatggtgaaccaaccaccgtgcaggaatttggccatagacgcgatgaagaacatagcctgaatcgccaagaacagcacggtgaacacgatggcaccgacccgcttgccggaatgccataagtagacgccgagcaacacggtggtggtgatcatcgtaatggtcaacgccaggccgtacgcggcggagatgtgttcggaatccttgaagatggcgagcacggcgagcgtggccacgcacaacacgccgttgaccaccggaatgtacagctggccgcgcgtacgggccgggtaacgcacctgcagatggggcatccagttgaggcgggtggcctcggaaaccatggtgaacgcgcccgtgatcagggcctgggaggcgatcacgccggccgaaacagacagaatcacggccaggtaccgcacgttcggggtcatcatctggaagaacgggttgagcgacttcatcgcggtgtattgcgggttatcgctattggccaacatccacgcgccttggccgaagtagttgagcaccagcgcaaccttgatgaatggccaggtgaagtagatgttgccgcgccccacgtggcccatgtcggagtacagcgcctcggcaccggtggtcgagaggaacacggtgcccatcagggcgatgccggcagcattgtccgggctgaacaggaatttgatgccgtacaccgggttcagggccgcgaacacagaccagtcgttagagagattcgtgacgcctacgatggcgaggaagctgaaccagaccagcaccatcgagccgaatactttgccgatgctttcggtgccgcgcgactgcacggagaagagaatcacgatgatcacgacggtaatcatcagggtcaggcttgggttttcgtcgaacaacccttccaatggcggcagggtctgcaagccttcgactgcggaactgatggaaaccgccggggtaagtaccgaatccgcaaggaatgccgcgccgccgagcatggcgggaatcgcgagccatgcgccgtacttgcgaatcaacgagtacagtgcgaagatgccgccttcgccattgttgtcgatgcgcatggcgatgagcacatatttgacggtggtgatcagcgtaatcgaccagaagaccagcgacagcatgccgagcacggcctctcggtttacgctgccaagccctccctgaccggcaaggaaggtctgcgcggtgtagaggggcgaggtgccgatgtcgccgtacaccacgccgagcgccacgatcgccatgccccaggtaaccttgtctgggctggattgcaagcgggcccaccatcggccgaggccgcctttcgaccatgcgctggcgattttctcggcttccttggtttcggcttccctctgcttggcgagtgcctcgcgctcctccttggtgagagtgcggcgggacaccttgggagcattggtaaaggtgtcggccctcagcagtgcttcttcttcctgtcgggccttggctttggcggcgccagcctgggctgtctgggcctttgaggctttttgggcgcgtgcggtcctttggttcgactcagccatacgttcagtcctccattgaggtggagatcatccccctcgcttatgtcaggtacatcatggtagacctcgttcacaattctgacaaattttacaagtcaacacatcgccgcgacggccgcacacccggccctcacagtccgtatacggcgcgggcggtatcgcgggtgccgcgcgccacatccgcgatggacaggtcgagcgtatcggccatggcccgcaaggtgtaggggatcatgtacggcgcgttggtgcggccacggtacggcatgggcgtcagatacggcgcgtcggtttcgaccatcgcatggcccagacccacaatccgtagcgattcgcggataccgtcattgcctttgtagctcacggtgccggagaagctcagataccagccatgttcgcgcgcaatctcggccatctcacggtcgccggaatacgagtggaatacggtgcgttcgggcgcgccgtcggccagcagggtttcgatgacctcgcgatgggagtcgcggtcgtgaatctgcatgggcaggcccagttccttggccagggcaatatgcgcgcggaaagcctcgcgttgcagttccttggcaccttcgccggtgcggaagaggtccatgccggtctcgccgatagccaccacttgctcggggtatgtggtggcgaggcgatgtacttcggcgagcgcgtcctcgaaagacgtgtcatggtaaggcttgtatttgaggggcagaccatccggccccggcacaccgcgatgcccgtggagcacggactcattggggtgtattgcgagcgccgcgtgcacgttacctggatgatcgagggccatctggacggcggtcatcaggtgcggcagctcgcaaccgcagtcgatgatacccccaatgccgacagattgcgcctgcgccagcaattggtcgacgtcgtacaccgggacttcgggctgccccttctcctgcgcctcatggctcatagcgcgcgcgaaagggattacggaggccacgtgagtgtggttgtcgatggtctgggcgtcgtccggcaatgcttcaggtgccggggcccagctacggtcgcgatggtggtgcttgctcatggtttctcagtgtaggctgtttctcagtgtaggctaccgtcagca

SEQ ID NO: 1372 - DNA, 20995 bp, Unknown
  R157_18m  MAG No. k141_48876
ccggacgggatgaaaattgaatattcctgcgtagctcagttggcagagcatccgactgttaatcggacggtcactggttcaagcccagtcgcaggagccatcgaaagcctcggttctccgaggcttttttattttcatcgcattggtgaccagacacgacaccccatcatcaaccgggaaatccatggcgaagacctcaccactactcacatcaggcagacaggtcactgtcaattcaccgatgagaggcacagtattcccagtatcagtttgggaataccgtgcaaatcttacatcgagaccttggtcaggggcatggcggagtcgatcgggaagtcgggggcgctgggggccacgccggcttcgaccaggttcacgccgagcatggcgaccatggcaccgttgtcggtgcagagcttgatttgcgggatacggacgtcgacgccgtagttctcgccgaattcgagcagtttggcgcgcagctgcgagttggcggagaagccgccgcccacgatcagcgtgttggaatcgtactgccggcagccgcgcatggacttacgggctagcacggtggccacggagtcggccagggatgcgcacacgtcgtccaccggaatctcatggccggcggcctgctcgctttccacccaacgggccacggcggtcttgacaccggagaaactgaaatcatacgggtgcgcggcaccggccttgccttgggtcagacccatcggcaccttgatggcgtgcgggtcgccgttctgtccgtggcggtcgatgtgcgggccgcccggatacgggaagccgagcagacgggcgactttgtcgaagcactcccccgccgcgtcatccagcgtggtgcccaccacatcgatcttgcgcggcatgtcctccacatgcagcagcgaggtgtggccgccggagacaatcagagccagcgtgtccttggggaacgggccgaactgcagctgagtgacggcgatgtgcccgatcacatggttgatgccgtaaatcggcttgttcgcagcccaggccagcgccttggcgccggacacgcccacggccaggcaaccggccagtccgggaccggcggacacggcgatggcgtccacatccgccaacgtcatgttcgcgtcggcgagcgccttggacacgcatggcacgaaggcctcagcgtgcgcacgggaggcgatttcggggatcacgccgccgtatcgcgcgtgttcctccatggatgaggccacgacgttggagagcagttcgcggccgcgtacgatggcagccgcggtttcgtcgcaggtggattcaatgcccagtacaaccggttcgctcatcgtgcttctccgttcttctccgtttgcttgccagtgatgtcttcagtgtccgccgatgccgtctgcggggcggcaaagcccacgaccctaggtttcaggtccaagctcatggtgtatgcgtcgatgccttcaggctggtagtagcgtttgcgcaatcccatgcgttcgaatccgaaccggtgatacagggccagcgcagggtcgttatccacacgcacttcgagcagcatgcgcgaggcgccctgacgcttcgcctcgtcgaccagtgcctgaagcaacgcaacggcgatgccttgccgctggtatgccttgcccacgccgatggtcatgagctcggcgtcctcgccgtcataccagaagccggcgtagccgcggacaaccgcctgttccacctctcccagcacatccagcagatacgtgcgggccggtgcgtccagttcctctcgcaccatgttcgcattccatgcgccgcggccgaacagttcgccttccaactgtgcgatggagcgaaccgcaagatcacgacttacggcagtgatgtcaacaatcatcgaatcaacccgtctcacgccttatcggcgccggcatggccgagcacgtgcttcagcgggttcggcacttcggcgtccggccggcgcaggtacaacggttcgaccggcgtatcgggattacggttggcaaccagttccgcatcagtggcaaagatagcgagaccttgctccccttggtccaatacggattcatcggtgatgtcgccaagctgctcgattgcacccagcgcatccgcatatttgcgggccccatgacccacaacatccacgaccacatccacattgctgtcttctggcctaagtccgtcgcggtacgtatgaacggcatcattcacgcgctgcgcgatggatgcagggtaatcgatatccatgtcaatcagagccgtcgccacggtttcgccatcgggatcgccaacgagcgggtccgagtacaacgcaaaatagagttgcttgcggcgtgcgtcgtttacggcaagagtgagcacatggcatttatgagtatcgccgagagtgccggctttgccacggcgaatgagattccattgcacctgaggctcaagaacattatggccgataagcgtcgctcccgttgcgaaagccagtgccttggccgtaacgataccggcacgcagaccagtaaagggggctggaccggtacccacaatgactgttgcaatgtcagatgctgggaacccggcctcctcgaccgcgcgcgcgatattgacctgcagtttctccacatgggtgcgcgaatcggtctctacaatgggatcgcgccccgcaatgccgaccgtcgagccgaatgaggtgtcaatcaccaacgtgcaacccatgaatcctcctagtcgtaaagcctctagagagtgtacatcgaggagtctataggcgcatggcttactgcagatcgaacgcggcccatcgcttgccgactgggacgaatgcgacggtacgagtgccgttgctggtgagttcgccgtctgatccagcggatgcggcatcggaggaatcgagaggtcgatcgatatggatttcaagtcgttctggcgccaaggcggtggccatttgttcgccccactccataagcaccaccgtgttctcgccggggtcttcaagttcttcgtccaatcccagcgattccagctcgtccaacaaacgcccgatggcgtcctgccccggcgcataggctgagccgcccagacggtaggcatccacatgcaccagatgagacggagtgccgtcggcgaaatgcccgtcaagttcgcgggcaatggtgaatgtaggagacacgatgggttcggcaatgcccagccccgccccgaagccctgggcgaatgtggttttaccggcaccaagagggcctgagagcagcaatacatcgccgccgtgtaccattccggccacacgacggccgagctcctgcatggcctcgctggtgggagccgcaatagtgtgttcgctcataaatacccctttatcgacttttaccgacctttatgactgatgtcttcaatgcagcgttccagcgcatataccgggtcgccaccgtttgttttgctttgctcatccgcccaggcgagcatacggatgcaatgcgcgagtcctgccgaagtccagccgccaagttggcgcatcgcattcttcagcacccacggattggttttcgcttcggcctgggaaatcgtgccggcccgtaccgccgaggctttggcaatggtacggagcttcatggccaacgcgccgatcagcgcgatgggatcggtcccttgttccacagctgcacgcatcatgacgatggcttctgcggttttgccttccacggccttgtctgccacggcaaaaccggtgacctgcggattggcggtcaaatactggttgacacggtcgaggcccatcggattatcgtcaaagtcgaaacacagttgctcgcacatggcggcaagttcgccggttttgccgccgagtacggataccagctgctgtgcggccatcggttcgactctacgaccacgtttctcgaattctccgagcacgaaattgagctgtgcatccggtttcttcaaatccggcacgtcctctttgcgagcgccggctttcaccagttggtcgatgattttgcgccctttgacgccgccctcgtgctggcagatcaccacgctggagccgttcggatccttggcggcctgcttggtgtacgccaccagagcttcggcgagcttgtcgtcggcattctgcaggttgacgagtttgaccacggcaacgtcggaaagcaacgatgggctgacggcttcatcgaaggcatactggtcggccgatgtggcgtcgagttcgatgaggtcggcgtcgggccgcgccttcaacgcctgcgcgcacagtgccttggtgcgcgcgtcgttcaaatacgagtcgcctccgggcaccacggttaccggtgcattcgctgctgttttcgccatgccaccatctcgccacacaggttggacaatgacctgccggcatcacgattttgccgctgccgtcaagatagtggtattcggctgggattgcgatggttgctgcaccgaataccgcattggctattcggcttgccgccgcgtaaagaggcgtctcgtctcctcacaccagagactgaggcggacgcgccaagcggaaccgaagcgcacgccagacattccggcctcataacgacggacatgctggaggcaacggctgacgaacaccagtagcatgccgataccgatttccgccgccacaatcagcacggcgcccgtaacgccgtctttccatgggatgacggccatcgtgctgccgcccagccacaacgccacccgttccatcaccagcgtgccccatgacgatatccacgcgaatacgccggccagccatggcgtgcaccatgcgcaggccagtgccatcaatcccgccatcgtggccaatcccacgaacggtgacaccagcaggttcgccggcacggacagcaacggcaattccggttccatcaacacctgaatcggcagggtgaacaattgcgcggccacggtcatcgccatcatttcggcgatgctgtgcggcatcgctcgctcaaaggcaccggccagccgccccgcaaacagcacgatacccagtacggcggccgaagacaaggcgaatccgtagctggccgacatatccgggttcaccgccaatacaccgattatcgtccagcatagggcgctcaacgcttgcgtacgccgtcccatcgcatacgccaacgcacctatcaatcccatgatgaacgcgcgggtgaccgaatcactggggaacatcgccaatgccagcagcgcatatactccagagaccagcaacgccgtcagccgccgatcaagcagcatccacatgcataaccgacgcaccagtcctgccaccagtacgaagtggccgccggatacggccatgaggtgcatgatgccggaccggcggaactgattttccaacgtttgcgcatacgtgctgttgaccggcatcggaccggcatcgccgccgatataatcctggccaagcacacccatcgtcaatcccggcaccaacacacgcccctgatcggacaattgtccggtcacggtgaaaaacgcctcctgcatatgtgcgatcgcggcgagatgccacggcggagcccgcacctgcgctaccggctgttttccttccaagagcagccatagcggtatgcgtccatatcgcgcttgctgcaatacgcccgtcaacagatagaccgcgcctcgacgcaactgcccacaatacgattcatcggcgtatacgcgcacggcgaccgtggaacgtacgtccgcgccatccacagtgatgccgctcagccgtatgtccgtctgacaatcgtatgtgcgttggtccgaagcgatcacgggcgtcgtcaccgtggccatgacttcgtggtatgaactggattggcgagcttgtgcggaggcaggatcatgccaggcaatggtgtccgacgcgattgccgccatactgccgatgcacgccaccgcgacgcatacggtcaatgttcccgtccacctgatccgcaggcggaaagacaccacgatcatcgccgccacagcggcacatgacgccactgttataggtaatattcgtgtgacaggccattccatgccgattatggtggcgtcaatgccagctccggcatcggcctttgcctgaccggtgccgagtccatcagacatcctccatgcgaataatgcgtgcgctcccagactcgccgcccacatcactatggcgatcggcagcatcctccaatcgcggctcccctgctcgcgcagtatccgatccctgctcatccgaccgtcacctgccctcgcatggtctccagcgtcttggagccgatgcctttgacatccagcagctgatcgactgatgcatacccgccaatcgccgtgcgatgatcgatgatccgctgagcggtaaccggcccaatacctttgatggattgcaattcctcagcggtggccgtgttgaggttgatgagaccatgcgtggaagcgccggcatcgctgccgtccgtctgcatgtgcggagattgcgtggtatccgattcggggttcgctgtggcatcggaatgctccgactgctgcggatccgtgcgtttctcgtccgtggtgttctgcgatggcatcgtctgatctccagcggagccgcccgtggtctgcatggcggtcggttgagacagcatggccatattcatcgactgctggaccagcaatgccaagctgatgccaagggcgacgatcagcagcaatatcacggccaaggcatgcccaatggtgaacgacaatcgcggctgatcccgggtgagtctggctgattctccgacggcatcggcggaacgtacgccaatcagatccgataacgcacgtttgtcacgggtcgcctgccgcaggccgctctgcgccctttgggacgggtggccggccggacgaatccgtgcatggccgggaggcggcggaggcgtcgtgggccgttccactcgcggttggggcatggcttcgctctgcctgctgaatgcgcgcaaacggttggcggcatggtctgcgcgatggttatgagaaacgcccatgcatccacgctgatggattcatgggcgtttgtccagctgaaacggggtatgtggttctagcttatgaagttatccacaattgaggtggggcgatatcgcacattggctgcccctcagtcagctacgctgacagctcccctgacaaggggagcttagatggaatcactccgcgggaacgatggagacgatcttgggggccttgacgatcaccttgcgcggctccttgccgccaagacggtcggcgacggcggccagcgcctgcttctcgaggtctgccggatcgatgtcgaccggcacttcgagcttggcgcgcaccttgcccttgatctgcaccacggcggtcacggtatcgtggcccacgtaacgctcgtcggccaccggccacggctcggcggacagggactcggggtggcccagcttgctccacatctcctcgcagatgtgcggggcgatcggcgcgagcatcaggatcagcggctccacggcggcgcgcggcacggccttcagaccggtcaggtggttgttgagcacgatgagcttggcgatggcggtgttcgggcgcatgccttccatttccgcggtcacttcggcgatcgtgttgttgagcagtttcagggtcttctcatcgggcgcgtcctcggtcacgtgggcctcgccggtggtctcgtccaccacgttgcgccacaggcgctgcaggaagcgcatgccgccgaccacgttgcgggtgttccacgggcgggattcgtccagcggccccatgctcatctcatacaggcggaaggtgtcggcgccatagttttcgtacatgtagtccggggtcacgatgttcttgagggacttgcccatcttgccgaactcgcgattggcatgttcgccgttccaggtgaacgtcggctcgccggaggcgtcggccgggccttccacgacctcgtcggccggcacgtactggccgcggtcgtcggtgtaggcgtaagcctggatcatgccctggttgaacagcttgtggaacggctcggccgaatccacatagccgaggtcgaagagcaccttgtgccagaaacgggagtacagcaggtggagcacggcgtgttcgacgccgccgatgtacaggtccacaccgccttcatcacccgagtacttgttgtggttcgggcccatccagtagtcgaactcgtccttctccaccatgtgcttggtgtcggtcgggtcgatgtaacgcatgtagtaccagcaggagccggcccagttcggcatggtgttggtgtcgcggtagtaggtcttcttgccgtcgcccaagtcgagctcgaccttgacccagtcctcgttgcggctcaacggtgcctcgggattggactcggcgtccatcggatcgaaggtgcgcggctcgtagtcgggcacgtcgggcaggttgattggcaatgcggaatccggcagcaggtgcggggtgccgtcttcgccgtacacgatcgggaagggctcgccccagtagcgctggcgggagaacagccagtcgcgcagacggtagcttacggtgcccttgcccacgccggcggattcgagccaggcgttgaccttggcgatggcgtcgtccacgcgcaagccgtcgagcgacagcgcgtcgcccttagcgtacgtggattcgacgtgggagttgatcacgatgccgtcatgggagacgaacggcgccttgccctcgtagttggccaagtcatcgccggattccggcagcggttcaacggtgtagatgaccggcagaccgaacttcacggcaaagtcgtaatcgcgctggtcgccaccaggcacggccatgatggcgccggtgccgtagtccatcagcacgtagtcggcggtgaacagcgggagcttcgcgccggtgatcgggttggtggcgtacaggccggtgaacagacctgtcttctcaccgccctcgtccacgcggtccttggcggtcttggcttcggcggcgagcctgtaggccttcaccgcctcgaccgggttggcatagccgcccttccagtcttcgggtacatcggccggccattcggcgggcacgttctccagcaggtgatgttccggggaaacaacggcgaacgtggtgccgaacagcgtgtcgggacgggtggtgtagatttccatgtccttgtcaccgtcggcagtggccacggtgaagtgcacggaggcaccatgggattcaccgatccagttgcgctgcatgagcttgaccttctcaggccagttgatgccgtcaaggtcggcgatgaggcggtggccgtacttggtgatgcgcatggaccactggcgtagctcacgctggaagaccgggaagttgccacgctcggacttgccttcggcggtgacctcctcgttggccagcacggtgcccagacccgggcaccagttgaccggggacttggagatgtaggccaggcggaagtcgttcaagatatcctgctgctcggcggcagtgaggtcggaccactgcttgccgtcggactcgtggccaggaatggccttttcgccggattcgaatttggcgacgagctcggcgatcgggcgtgcggatcccttggagccggacgggttggtggcgtcctcgtcgtaccaggaatcgtagatgcgcgagaagatccattgggtccagcgcacgtagccggggtcgatggtggcgaacgtgcggcggttgtcgaagctcaggcccatgcggtgcagctggcggctcatgttggcgatgttcgcctcggtggtcacgcgaggatgctggccggtctggactgcgtactgttccgcgggcaggccgaaggcgtcatagcccatggcgtgcaggacgttctcgcccttcatgcggtggtagcggctcgtcacgtcggaggccaggtagcccagcgggtggccgacgtgcaggcccttgccggaggggtacgggaacatgtccatggcgaagtaggcggtgcgcccctcggcgttgcggcccttgccgtccttcaaatcgccgttgacgttggcggcccagaaggtgccttgctcatcccagatcttctgccacttgttttcgatgtcctgcgccagtgcggcgttgtagcggaagttgggctcttcggtttgcgtgctcttctcgttgtcactcataaatcagcaaggtagcctcgcaactggacacgtcgtcaatcgttattcagcatccgagacgatggctttggggtcaccgttcagcgaaaccgtgagctttgtttggcttgtgaacgtatccttggcggccgtccagctgccatcctcaaccatgtcttccaatgcttccgcgattttctgcgccaattggctggtgccttgactcacggcgatgccataactgacctcgcccttgtccgcaatcacgtccatatactggggcccgttggccgcttgaagaccggaaagcaccgccatatcggaggctatggcatccgccgaccctacttgcacggccgtgacgcactgcgcataactgctacgctcctgaatccgagcctgcgggtggttgccgcggaagatgccgactgtctcgtcacctttcactgcgcacaccgtgccgtcgcctacgtcgcccaccgaacctgcgtcattggtgaatcggccacgctcatccgacctgaccagcaaaccgacgctggtcgtgaggtatggtccggcaaaatcaacgatcgcgctggacccatcggtgataggccaagaggcgacgaccatgtcgacctgtccattgtccagcatggagcgccggttttcggggcgaacctgcttgaagacgatctgcttgttcgcatagccgagtttggcggccacgtatttggcgatggtgatgtcgaagccctggtatgtgccgtcatgccatgctcccaccgatggttcgtcggttgcgaccccaatggcgatggtgggtccctccggcgctccggagacggtggtgacttgaatttggccgcaaccggccagaccggacaatggcaatatcacgccaaaggccgcggcgaatcctgccatcagtcgggagcgaaatccgcgccgcatcgggcggcgggcgcggagcatgctacggctggcgaacgatgaccaatggtgcataaccgtcaaacgccttacttgaacatgcgcgaacgtgtgaggaaccaggcaaccacaccggaaagcaccatggagatcacgatgatgagcaggaagccccaaggcttgtcggtgaacggcatgcccatcatgccgccgtcgaagttcatgccgtacatcgagaagatcagcgtcgggatggacagggtgatggagatgatggtgaagatgcgcatcacgttgttcaggttgttggacacgatcgaggcgaaggcgtcggtcatgttcgcaagaacgccgctgtagatgttggccatctcgatggcctgcttgttttcggtgatgacgtcgtcgagcagatcctcatcgtccggatactgcttgatgcgttgcagggtggtgagtttctccatcacgatttcgttcgatttcagcgatgtggtgaaatacaccaaagtcttgctcagctccatgagcatcacgatctcgcggttctgcatggagtggcgcagcttcagttcgagcttgtcgctttcgcggtcgatgatgcgcaggtaacgcaggtacatcgtggcgttgcggtacaggatctgcaggatgaagcgcgaacgcatgaaggtgttgaagcctcggatcgtgccttccatgaatgggtggagcacgggcgtgtcctgcatgcagacggtgatgatgaggttttcggtgacgatgatcgacagcgggatggtctcgtaccagtcgcgtccgccacgctcctccacggtggggatgtcgacgatgatcatcgtgtaatcgtcttcgacgtccacacgtgaacgttcctcgtcatccaaaggggcgcgcaggtcggccaggtcgatgccggtctgtgatgcgacggtggcgagctccacatcagtgggttcgctcaaacataaccaggagccgttttccggtttctcgatctgctccacttggccattgattgagctgaagattctcagcatgtcgcctcacccgccttccgcgctttcctactgttctatcgctgtacggttccaaaccgagattagtttagacccaccgttcgaatttgcgagcggggtttcgcatagcgaccgtcaccagacgattggctgccaactcggcatgtgcggtcctcgcagatcggtcggcccgttctcccagtcggcgctgtcggcgatggcgggagccttgttgtattcctccaactcccacaggggctgttcggtgggggtgccgttgacgctgtggcgcactttgagccggcaccagcaggcgttgcgcatgccgccgagtgcgttcatgccgtccgggtcgagttcgagcaggttggagatggtggcggtaatccatgagccatgggtgacgagcatcagcgtggtgggcatgctgtctgaataggcggagtcggtgaccagtgcgcgcacggcatcggcacctcgctggcccacggcggcacggctttccacaccatgcttggtttcgcccccggtgtgctgtttccaagaggcgtagtcgtcggctgccacggctttgatttcggcgcgggtcatgccttcccactcgccgaagctgcgttcacgcagtcgttggtcacaggtgaccggcaatcccaaaatatcggcgaaggcgtgtgcggtctgttgggcacggaacaggtcggaggtcatcaccaccatgcgccggccggcggcgggggcctcctcgaactgtcgcgtatcagtgcgttcggcggcgtcaggaccgggctgggcgatggcttcgggatgctcggcaagccggttcaccttggcccagtagtaccgtgaagcgagcgcgaatccggtctggtcgacctgccattggcctacgatgtcgagcggcacatcgatctggccttgcaagcgatgttcgagattgtattgcgtacggccatggcgcagcatcatcacttcatcgatcatcggttttcgccacctcgttctcttgcggttttttcatactcatctcagcacaacccctagaatggcggcatggagatttctgagtcgacttgggcgttcatcgccaaacaccgccgtgaagatgtgcgtgatgtggccttgcacgccaaacatgatggcgacgtggatgtgccgttcgcgctggagcagattgccggctggcagcgcgcttcgctcaagctacctgactgggcgtcccatgatgggctgattttcccgccgcaagtcccaatggaacaatgttccagccagttcacggctcaatacaaagcccggttagcacagcgattgttggacggggaagcagtcgacgacgccgacgattccccgacatccctagtcgatctgaccggcggtttcggcgtcgacttttcttacatgtctcgagtgtttgaccatgccatatatgtggaacaacaatccattttatgtggtatcgctcgccataatttcccgatactcggccttggccacgccgaaatcatcaatgatgattcaacagcagtgcttgatacgcttggccgagtctccatgatcttcctcgatccggcccgccgtgacgatcatggctcgcgtacctacgcgattgccgattgcacgccggatgtgctgaccctgaaggatacgctgctggccaaggcaccgacggtcatggtcaagctctcccccatgctcgactggcataagaccattacggatttcgccggcgcggtgcacgaggtgcatatcgtctccaccggtaatgaatgcaaggaattgttgctggtgttggggcgcagccgttgcgcctcaccgctcgtggtatgcgtcaatgacgggcaggtgttgtcgtacaaggccggcgataacagcgacaatcacacccctatcagcgattctgccttggttgcacgcaatacctgtaataccgaggatttcccggctgaggaaagcgcgaacggcttcgattcctcgcattggaagtacctttacgaacccaacgcctcaatcatgaaggccgggtgctttgatgttctcgaacagcgcttcgtcgtgcatcacatcagcccgaatagccacctgttcgtggcggccgaacctattgccgatttcccaggcagatcattcgtcatcgaatccatcgtcaccatgaacaagaaagaactgaagcagctattggccggtctcacgcacgccaacatctccgtacgcaatttccccctaaccgtggcccagctacgcaaaaaactcaaactcaaggacggcggcaacacctacctcttcgccaccaccgacctcaaaggccatcacctagtactgcgcactgaaaagcgaaaaagtggctccctctgacgaggaagccaccaatacgtcagctaatcagtccttggcgatggtcttgccggcggtcggaccggaggcaaggttctggatctcggtgacttcgagaaccggaatcacggccggcttcttggtgcccttttcctcggcgatcttgacctgctcgttgtagatgtcgtcgtcaacgtgcagcaccacgttgccgcggaagcggtagccctgcttcttctcgaggttggcgaaggcgatgaccagcggagagccgttcttgaggttctcgtagtgctggccggcggtgcgctcgtggtaggcgatgtgcgtgtcgtccagcacgaacagggacatcttcgggccgaggtccagttcgccgtccttggagacggtggtgatccaaccgaggttgttcttgatgaattccttgatttccggagtaatgactgccatgtcgaatcctttcatgattgctatggacaacgtatttttactctttccagagtaccggtttcgagcgcgactagcccggatgttcgctgtgagtaacctcaccttcgcacagctttcatccggttcttacctgtttggcgatgccgcgccccggccgcgcaccagccacacacctgtcacacacccgacgcccatcgaccggtcgattttggccggtagttcccgtaatctgtgagccgagagagccacaagttttcctaactgtcctgaggtgcaccatgggtttggtcgaacgtttcagcaagctgcgcagccgctggtcccgcagctttcccccgaatctcgcccgactcatgttgctgggctgcgccgcattatggggtggcagttatctgctcgccaaattcgccatggaggcgattccgccccaatggctgatgggtctgcgcatgataggcgcctgcctgtgcatgctggccttgttccataagcacatcgtgccgtatctgacgccgaagatcattgtgccggcgctcgtggtgggtctgacctactggggcacgatggtcacccagaccgtcgggttgcagaccattgaaccgggccgcagcgcgttcctgacggccgcctactgcgtactcaccccgttcgccacgtggatcatttcgaaaacccgcccgaaggccatcaatctggtcgccggcgttatctgtctgatcggcgtcggcttcgtctcgttgaagccgggcggttcgttgtcgctgggcgccggcgactggctgaccatcgcaaccgccgtcatcttctcgttcaatctgacctgccttggtgtctacaccaaacgcttcgaccctatcgccgtcacttttgtgcagttcggcgttgccggcgtattgttcatcatcggcgcgttgttcaccgaacccatgccgaacgccagctggctggcaccctcagtagtggccagcgtgctctatctgttcctcggcgccacgatgagtgcccagatcatgcagaacatcggtctggctcacgtgcctgcctcgcaggcgtcaatcatcatgtgtacggaaagtctgttcgccgtcacgttctccgcgttgttctggggcgagacaatcatgtggacttcgctggtgggtttcgctttgattttcgccgccgtactgatgtcggtgatcagaccgaccgggcagtcgctgcatcgtaattgacgatgtcccgcggcctgcggcgacgcgaaacgcacgtgtgtgcgccgcagggcgtgtccgacctgtacgaaggccgattttgaaggtctcgtgtaggcctcgccccgcttccatcgagtctcaggcaacctgtcagcccgacaccctacggtcgtgcattgtgaagaagttttttgaaggaatctccctctcatccatcgtggcgggcacccttgccgccgtcacctcgttcctgctcgcatcgaagatcggcatcggcggttcggtgatcggagcggcggccagttacgtcgtctccgccgtggccaccaagatctaccagaacgtgctcaccgcctccggcgaaaaactccaatcggcctcgtcctccggcaacgggatcacgaaggacgccgagaacggcgatgccgatggcggcaccccccgaacggccggcagccggaccgacgttcgggacgagcccgatacggcgacgggcgtgaccgccgatgatgcttcctccacacgcagaccgcgtgaaatcgtgttcagccgggcgaacggcaggacgtactcggtcgatgagctgcgcaagtcccgcttccgcgcttcgaagcacaccgccatgatcgtcaccttggtgtccggcctgctcgccgtggcggtgacggccggcgtcgtgatgctggccacgcagggacgcggcacggacaatctcgtatcccccaccacgaccacgcccgcgcgcaacgacaccggcacgcgaacgggcacccccgatcagaacaacgctctgccccagacgggcaccggcgatgattcgaagggaaccagcaaggattcgaaaaccgacgccccctccaccgacctcgacgccaacggcacctcgggttcgaccggcgccggcgcctcggattcgaaaaccgacggcaccgccaacggttcgaacggcaccggcacctcaaagaatccgaccaccgaagacccgaccagccaaggcgtcggcggcagccagaccggttcgaacggcaccggcaccggctcgacgcaaaaagatccatcgggatcgacttcaaccagtaccggcaccagcggcaccagcggatcgccggccaccggcccagacgtgggcctgtctcgttaagtgtgtaactggcgttttcattgttgtgttccctcgcttggccagcggtcggcgaaggtgatggcaaaggcgttgagcgcgggcttccggcgcgcgctccatcgtatccgtcccttgccggtggggtccagcgagcggacggtcaggtacatgcacttgagcgcggcctgctcgtcggggaagtggccgcgggcgcggatggagcgcttgaatctcgcgttgagcgattcgatggcgttggtcgtgcagatcacgcgccggatctccacgtcatagtccaggaacggtatgaaccgttcccacgcgtccatccacagcctgcggatcgcgggatatctcgcctcccacttgtccagcatcgcgtcgcggaccgccgccgcggcggcgggcgacgtccagatgcccagcacgtcgcggtcgccctccagatccacgccaacggccacgtagaacgcgcggttggcgacctgcccgtcgcgcaccttgacgacggtcgcgtcgatgaacacggccgcgtacacacgatccaggggacgcgagcaccattcgtccttctcggccacgacccgctcggtgatgcgactgacggtccccctggacacgtccgccccgtagatctcctggaagtgggcgctgatctcgccggtggtcaggcccctggcatacagggacagcaccacctcgcccaccccgggcagccgccgctgccgtttcctgacgacgaccggctcgaacgagccatcgcggtctcgcggcacctcgatcccgaccggacctaccgaatcggtgaccacggtcttggcggtggtgccgttgcgcgtgttcgcggccctgccgtccttggatttcttgtgcttggcgcggcccaggtgctcggtcatctcctcgtccagggccgtctccagcacgcttttggtgaactgtttgagcagtccgtcgggccctgtcaggtccagtcctttttccttggccatgcgcacgaatgtgagcgccgcctcccgctcggcgttgcgtttttccgcgtccggcttcttcgtcggtgtcatgtttcccattgtcccagcacacatcgtccaccagcctttccgaccggccacacgaccggccagttaaggccagttacacacttcgagagacagtcccacgtataccggttctttgtttatgtaagggaatgattgatggttcggtttgcctgtttgtataatgcgcttatttatcttggtgccggatgtttctcggtctactatatggtggcctatcatgatgtgggcctgtcggtgctgctgatctccatcgtcaatgtggtgttcgacgtcagcgaatcggccagcgagctgcccacgtccgtgctgttcgaccggtggtcccgggaacggacgctgatcatcggcgtgttgtgccgcgtcgcgggattcatattgatgctgttctggtccgcgaacttcgccgtgctgtgcctggccaacgtgctggccggcatcggggccgcggtcgaaagcggcgcggcgtcctcgctgtacatcgaatacgcccgcaagcacgatccctcgctgggtatgaagaccttggtgtcaagactgtcggcgatgatcgctgtgtgcacgatatgcggcggtgcggtcggtgccgtgctgttcctgcttgactcccagctgatctggctgggcgcgacggtgttctacgtattggcgatcatcccgcttctcggtctgatgagggccgggtcgcgcaccaaggccgcagcgacggatgggagcgggacgacggaacggcaggccgaggcgtccgtcgaatccgatggatccgccgagccgggcgagtccgggacctcgctgacggtgttggatcatgtcaggcagaccgtggcggccgcggccgtgctgctgcggaagccggagatatggaatatggtggtgttcaatctgggtacgttgtcggtgctgacgttctggcagctgctgctgatgggccaccagaccggggtctggtggcagttcgccggcctagtgttcactaatatcgcgcagatcgtcggcagtcgtctgggtatgctacggctgcatccacgttccggcgacattgcgatcctcgtgctcatcgtgtcggcggtggtgcttgcggccacgccgatgccggcggtgaggatcctggcgttcttcgtgttctcctgcgcgcagatgtacgtggcgaacatgatctccagcagcttgcacgagagcattgacgattcgatccgcgcgaccgcgttctccgtgggatcgctcgtattgatggccttcaccgcggtcgtcaccccgctgtgcggctacatcgccgacacgttctcgatttcctggggtacactgacgacgatccccctgctggtggccctcctcatcgccggacttgcgcgaaagcctgaatccgacaaacgggtaaaagtcgatatttcgttggattgagacgtcaagggcttgcggacacgatgtccgcaagcccttgacgtctatatgtcattcattcatggttggaatgcgctcctcctacgcgtgcggttgaatggttagtccatcgctatcgtcggagggtgtcagggccgaagatgaaaccgtctgttccgggtgcgtgatccaggtggaatggattggcaacggtgtacgacttgtcgccgggtttcacgtcgtccgtgtcgaattcgttggaatccttgtcgagcagtgggctgtccagcgaggcgggacagtacacggtgacgtgccagttgccgtcgtccatggggatgagcacggtgcagtgccttggagaccgtctgctgcggcatcccttatggatgattccttgataaaggagtttcggggggcgggtaacaaaaacccggaaccgaagttccgggtttttgtctggctcctgcggctgggcttgaaccagcgaccgtccgattaacagtcggatgctctgccaatagacaacgggcaattcgactgccatgtcaggtatggtaatctcgaaccagccagaagatcgataagccaaattacctgcgactgaagtgaggacggaatcatgcgtagcgagttccctggtctgttgtattgcgcgggtgcattaatcgcagtgacctcttgggctcttttcatgttctcgaaagaagtccatcggaaaggccgaacagtatccatcctgagattgcccgtcatttggatactgttcctcgtgagttcggcgccggctctcgcatcatatccggtttttgaaatatactcaggatctatggatccagatgtcctcgatttctacagtcagccgttcatacggctactgccggcggcgacctgcatagtgaatctgtgcgtatcggcatgctgctccatggctcttgtcagtaagcgcagaaaaaccgaacatcgaaaaatctgaaccacagcattcgagatgagatgccatggaaaaaccgctgtttccgctggccttggtgccgctggccgtcggattggtcctgatatacgtcgtgattggatccaaaaaccgggaagagaacgcaaaaggactcttctgcgtgtcttctcggcgctcatggtcgttgccggcgcgttggccatcgcgagacaactcgtatgacgcttcacgctgcggctcggcttcccggctatcggccgcggccagtccacggctctccgcgccattcccgcaatcgcaccatcgccggtctcaagcccatgagacacttggagccatggctaccattatcatgcgcacctcgcatgataatcctagccaactgtttttggctttgttccaaggttttcgatttttgggaaacctgccggttacgctcgttttccacgaggcacctacaggcaccca

SEQ ID NO: 1373 - DNA, 32468 bp, Unknown
  R157_18m  MAG No. k141_48879
cttggcatattcgcgcacgtaggccatgccgtcagcgacccctcgcgctgcgaacacgtatctggccggcgagtccgatgggacgaactcgccctccaacaccagcgacgtgtcctccagggtcagcgtggatccctcaatggcgttcgagttgtaggtgtaacgcaccagccagtcgcggtcgtaatccgccaacgccatgtcctcgacaccgtccaacggctccagcgagcgggcccggtccttcagcgcgtcgaccctccgcaggtgttcggaaatctcccgtcccccttcaagggcgttcagctcgtcgggaagggcctggatgtgccgtgacagctcgggattggccatcatgctcctcttttcgtgttccggttgcaaagtccattattccagtagtgattcgttgcgctagcggttcagatgacggctcaacgcatccggtccggttccgacgcttctggcatccccgtcccgttgtccaaggttcttccgcaacgtctcgccgaatctgtccatcaaatccgttttattgcgaatcgggtcagaaacacgaaggacctcaccttcgctgattctgcggagcatcccgatacgctttaccaactgtacccggatggcgtcgaggcgttcgggcgcgaacatgcgcatgcgcgacaactcgtacgccacctcgtcgggccagtccgacagagcatccaggtcgaaccggctccaatcctccaccagtctgagctgccgcaaagccgagggcttgccggtcgcggtgtagaacggcttggcgaaccagtcgcggccgtccacatcgagctcgccgctccacaggctcgcgccagtgtcgtagatcggggccggacggaccgcaagggtctcgatgttccggatcagaccgaagttgctgtaatgcctatctgtattgcgcatgaggtagtcgaccacgagccaatcgtccgtggcgtcacgaaccgcccgttcgtctgcgccgaagccgacggcggcgcggatccactggtcatgcgagttgaggccgttgacggccttgacggattggagcacctgccaggcggagaccagctcctcatgattggagagcatgtccgcgcatgtggacaccagacggttgccgttgcgtgccagggaataccggacggccggaacgcccaatcgcatgcagagcctcgaggcgatgacctcgttcatcggctcctggccagtacggcccgacttgacgagcagtctcctgccggtggccctgtcgatcgtccagcgtttgggaagatcgccgctagtggacacgtcggggacgttgaggctgatgtcatgggacgacgagtacgaggtgagcaggatctcgcccagcgcctcgtcgaaggaattgtcgaagaagttgacgtccttccattcggccgggtcgtcctcgcgtctgacccagtactggtccgacaggctcagcccgtaggtcctgtcgagcagttcatcggtcgatgccgcgccaagcgattcgagcacgcggcggatgccgtcgcgggtggaggggatggcgcgggacctccaccattcgtcgatcctcttggcatacagcgcgctcttgccgtgcgtggtgaactccaggggcagacgatcatggtcaaggacctcgccagaggagcacgcgcgaccggactcgggatcgtattcgaacgcaaggaccggatggtccccgcacatgatcagcttgcgtggcatgattccgctccctccaaacttggtctttaaagattctacaggcacgaattacgcgcgagacggcgtcccgtttcatgacgcgatgcatggatatgggccacttccgcaaatcgcaagcctcggcgatgacgccgacaactgatacggtagtcatattggtttcccaaaggtaaagaggcatgaccatgggattgttcgacttcgctaagaactctttgggtgacgtgccgtccggcttcggcggtcggggcgatatcgccaaccatcttttcaacgaccgatgaaaaggctccggttgaaggctatggtatgatgacacgagcgtgggaatttatgaccgaaggatactcacataaagcggcacacatcgttgagcatatcattctcgcaatcgcgctgatctgggctggaggctgcactctcatatggatgcaaacggatatgtcgcatcgcatcgtgaacgcgaaatccgctgacggcacctgcgaagtgaccatcagcgaactcggctcgcccatattcttcggtccaagcagcatcacggtcaaagtctcttgggacaccgatcccggtgttatcggttccgagaacgtcacggaaatcaaaacggatctgcacaacgacggcaaatcattaggctcgggcaacttcaccgtcacctggcacggcaacatcccgaccgtcaccacccatggtgaggaacagccggaccaaagctacacattcaactggaaataaccgctccgaacatcatgtctctcccgagagtagtcctcacaaccgggcaggtcccacaaggagcatagctcatgcacccaccgaccggtctcaagcacatgagacacttggagccatgactaccatcatcatgcgcacctccgagggcgacatcaccatcaacctgttcgacgacaaggccccgaacaccgtggccaacttcctgggcctcgccaccggcgagaaggaatgggcggacccgtacaccggccagccttcccatggcaagttctacaacggcctgaccttccaccgtatcatcaagcagttcatgattcagggcggttgcccgctgggcaccggtaccggcggccctggctacgagttcgacgatgagatcgacccgagcctgaagttcgacaagccatacctgctggctatggccaacgccggtctgcgtcgcggcatggacggcaaggtccatggcaccaacggctcccagttcttcatcaccaccgtgccgaccccgtggctggacggtcaccacaccatcttcggcgaggtcgccgatgacgactccaagaaggtcgtcgataagctcgaagcactggacaccgatccgatggatcgcccgctcgagccggccgtaattctgtccgtgaacgtggccgagtaagaccgacacatatacagcaaaggtcctgattggtattccagtcaggaccttttcgtattcttggctccctctctgaggggagctggcgccgcagacgtctgaggggagttccgcaagcccgcgctgctcccctcagtcagcttcgctgacagcccctcccggaggggagccaagcaacggcctacttcatcttgcgcagtcgaggttcggcggattccttggcaccggtgatgcggtacacgtcgaacacgccatcaatcttgcgcacggctgccagcaacgagttgagatgctgcggatcggccatttcgaagctgaactggctggtggccacgcgatcggaaccggtggcgatcgtaccggaaatgatgttcacgccatggtcggaaagcacacgtgtcacgtccgaaagcaggtttcgtcgatccagcgcctcgacctgaatcttgaccatgaacaggcccttggtgctggtccattcgacttcgaccacacgctcaggctgcttgtttttcagatcgatcatgttctggcagtcggtgcggtgcacggatacgccctgattacgggtgatgaagccgatgatattgtcaccgggcaccggcatgcagcaacgggccagcttgatccacacatcgcccacgcccttgacggataccccggtggagctgctggaagtcttgcgctccacgggcttgagcggcagagcctcctgctcgacctcctcatcgacctcgtcggccccggcatccttgaccagatgcgagatgacgttctgcgtggagatctgcccatcaccgatggcggcgaacacagcgtcggcgttcgggaaattgaggtcgtcggccacaccgatcaatgcctcggtggtcagcagcgcattgaccggcaagttacgtttgcgcatagcgcgggtcagttcgtcgcggccttcctcaatagcctcggtacgacgttccttcgagaaccactggcggatcttgtttcgtgccttcgggctcttgacgaagctcagccagtcgcgcgaaggaccggcggtatcggacttggaagtcaggatctccacggtgtcgccgttgtcgagcgtggtgtcgagcggcaccaaacgcccgttgacgcgcgcgcccatcgtacggtggcccacttcggtatgcacggcataggcgaaatcgaccggtgtggcatgggccggcaaagagacgatcttgcccttcggcgtgaagacatagacttcggacgagccgaggtcttccttcagggaaccgaggaattcgttggaatctggggtttcgctggtccaatcggcaagctgctgaatccatttgagattgtcggcttcggaaagctcctggttcttctcgtcacgcctgcggtcggacttgtccggcgagctcagggcgcggccggcctggccgttttccttgtatttccagtgcgcggcgatgccgaactcggcgcggcggtgcatgtcccaggtgcgaatctggatttccaccggcttgccaccggggcccaccaccgtggtgtgcagcgactggtacatgttgagcttcggcatggcgatgtagtccttgaaccggccgggaaccgggttccaccgcgcatgcacggcaccaagcgccgcatagcaatcctgaatggtgtcgacgatgatgcgcacaccgaccaaatcgtagatgttcgcgaaatcatggccgcgcacgatcatcttctgataaatcgagaagtagtccttcgggcgtccggtgacgtatgccttgatgttctgctcgtcgagatcctcgttgatctccgccagaatctgcttcaggtacacatcgcgctggccggctcggcgagccaccagcaccacgatctcgttgtagatcttcgggtagagcaccttgaagctcagttcctcgagctccgtcttgatggcgttcataccgagtcggttggccaaaggcgcgtacacgtcgagggtttcacgcgccttcttctgggcggacgtggtcttcacatagcgccaggtgcgggcgttgtgtacacggtcggcgagcttgaccaccaaggtgcgcacgtcgcggctcatggccaccacaagtttgcgaatggtttcggcttgggcggagtcgcccacttcaagctggctgagcttggtgacgccatcgaccagaccggccacggtgtcgccgaactcggcacggcattgatccaacgtatagtcggtgtcctccaccgtgtcatgcaacaggccggccgccaccacgatcgggcccatgcccaaatccgcgagaatctgggaaacggccagcgggtggatgatgtacggctcaccagacttgcgccgttgcgtgcaatgctggatgacggcgcgccggtacgcgcggtcgaggatggacaaatcctcaccgggatggtgggacttgcacactttcttgattggatccagcggattgagcggatcggcactgatctcacaacccaacttacgggcggcgtactgctcgccatcaatctctgccatgccagtcacctccctcgtcatgaagttcattgtaaccgcgaaccggagccttgtgcatgcacctgttcgccatcattggttccgcaaccgtcgttgccatcatcaccttggtcattcaaccggcccaatccggtcaggacgccactcccgtcgaaccgaacccacgttcggcgcgatcggatccgggcagggtttcggccgggatgaaccgggcctcaacataccgctgaatcaccaattgagcgatgcgatcgcccggatggaagacggcggtgcgttccggatcgaggttgatcagcggcaccttgatctcgccacggtagccggcatcaacggtgccaggcgcgttgagcacggtgacgccctgcttggcggccagcccggaacgcggatgcaccaacgccacgtagcccgcaggtagggcgatggccacgccggtgggcaccagtacccgttcaaaaggcttcagcgtcacatcgacggtggtgatgaggtcggcaccggcatcgcccgcgtgggcatagtgcagctgggccggatgttcggggtcgaggctcttgaccaggacctcggtggattcgggctcgttgtaggtctcgtcgaacgccatcaggcggcgcactcctcacacaccggctggccatcctcgtccgtgtaggcgagctggctgcgatgcttgaccaggaagcactgcgagcagatgaactcgtcaccctgcatggggatgacggtcaccgaggaatcctcgttgctcaaatcggcgcccggcagttcgtagtcttcggcgatggcgttctcatcgtcgtcgatgtcgctcgaggcgttctgcgaggacttccccagcgcctgcagcgattcctcgtcctcatccttattgcggggggaatcataatcctgagccatcatggtcctttcgtcgtctttggttcgtaagtcgatatatatagcacggtcagcgccgtactcgcccataggatacacgatttgaaatactcgtaaagttcgacacgtggggcatacttaaaagaagtaatgtctttgcgacggaaagtggtgcgaatatgccagatgatcggcttgaaaaagcccgtttcgtacgcgtgagcaagacgggggacctcgtattctccattggcggcagggaaatggccgtgagcgtggacgacacgctcgaacgggcgattcttgaggccaagcaggtcagaagcgagatgcgacaggccccccagccgcatcagcagtccactttgccgatttcccagatacagtcgctgattcgcgccggcgccgatccggcccgtgtcgcggagaaatatcatctgagcgaaacgctggtacgtcgtttctccatggccgtggagaccgagaaacagtacgccatcgaacagttccttgccgtggcggcacccaaagacagcagggtgcgcaccatcagcgaactggtggaacgcacgctggcctctgctggaatcggcatggaatcagtgacctggaaatccacccggcgcggacttgagccttggcgcatcgtggcgatattcacttccgcgggccgtgagatccatgccgaatggacgtggaatatgcacgacaattccgtgatgagcctgaacaatgccgctcgaaaactgctcggcgaacagaatccggaatcagccacggattccaaactcaagccgacgattcctgaactgcccggcgactccgtacgttccgcgcgtatcgagcgcgccgtgtctgcttgggcggcgcctacgccttcgattccggccgcacggcctgccgcgatccggccctccgtcacttccacaggttccatgcccccggtggacctatccacgtccatctcaccggccacgaaccaggctcatgacgctacggcccccagcccggtctcttcgcagaccgccggacctgtttcgtcatctgccgcaggattgcagcaatcgcctgccacggcaccagagcagggttctgacaatatttcggacgagaccgtacggcgtggccccaatgcacagctggtagccaccgagcaggaggtggcggccgaatccgccgccaccaaacacgaggcaccagccaaaccggccaagcgtaaatcaggacgttcggccgtaccaagctgggacgagattctgttcggagactgaatttccgaatcaggccatatcgatcaggcagggaatatccatttccaatgccgtttgggagccatgcacgctcggcaggtgggtggctttgtctccttgcgtacgcgaatcgacgagggtcacggctcccgctgcctgcacgaccacatcgccgagcatcggccggactcgctcgcagaccggtccaaacaatccgtccgcgatggcctcatccctggtccgcaccaaggctcggtcttgcaggtaatcgcgccaccggcaagctatatcctcaggtcgttcatccggctcggcatacagcatcagcgagcgaggctctcccccgaccagtgacacgcctcgggtgagctgcggttcaacggcgatgtcaatccgctggcccatgtcggtttgcaccatgccgtggtcggctacgatgacgatcagcgtgcctttgggtgcgctgcgtttcaggagcgcgagctgggcgtcgatatgttcgaatgcggccacccagtgttcggaatcccacccgtaattgtggccgactttgtcggcgtcacggatgtacaggtaggtcaggccgggggtacgggaggcacgtgaggcggccagcacacgatcgcgtggggtgacgttgccttgatagtcggtgcctcgcaatgcggcttcggtcaatggcgatttggagaacttgggcaaccccgagcttgtgacgcgcacctcttgagccgcaagtttctcgaacaccgtctcctcgcgctgctggtcgagcggatcgaccatgggtggcacaggaatgtgcggattggctggtttgggtgccagcgcgtctttgaactggatgagttggatgagcttatggctggcgggttcgagctgcgtatagcccgccattgcggtcagtcccgggcaggttccggtaccgaatgcggccatggccgccacagtggtgcttggagcgcaggtggcgatgggacgctgattggcgcgttcgttcatcagcgaacgcagatagggcgcgtggccgaggcgcatggcgaggttccagaagcccaggccgtccacgagcaccacgatggccgattcggcgtcgggcagtcccaacgcgcgctggcaggccttgggatcggcgtggaccttggtgggagtcggatgcccaatcgcggcggacaaggcgggcagcacggcggacaggtgcagcgctcccccacgccgatcggccgggacgtcatccccatagcccacagtgggcaccagccgcagcaactcgtccatatccggcgtctcaacactcatagttgcccattcaagtagcacccctccccttggctcagtgcgcagagaacggttctcaataacaactgtgcgccccaacgcacataatcaaacaaacgcacatcgactgaaacgctagaatcacgccattttatcggcaaacatgtgcgattggcgcaccgaaaccagcgcacagttgttgttgagaaccgttctctgcgcactgtttcgcgccctcccgctaatatgggggcgttcgaaagggagtttcatggcatcacaccgcaaaccgtccgcgcaaacctacgatccgcgcacggtcaaggagcatatcgtcgagacgccgctgaacgaggagatgagcaaatccttcctcgagtatgcgtattcggtgatttacgcacgcgcactgcccgatgcgcgcgatggcttgaagccggtgcagcgccgtatcgtctaccagatgggcgagatgaacctgactcccgaccgcccgtatatgaagtccgcccgcgtggtgggcgaggtgatgggcaagctccatccgcacggcgattccgcgatctacgaggccatggtgcgtttggcacagccgttcgcgatgcgtctgccgctggtagatggccacggcaacttcggctcgctggatgacggccctgcggcctcccgttacaccgaggccaggcttggcccggcggccctcggcatgaacgcggatatcgatgaggacaccgtcgacttcacgccgaactatgacaacaagctcaaggaaccgaccgtgctgccggccgccatcccgaatctgctggtcaacggcggctcgggcatcgccgtgggcatggccacgaacctggccacccacaatctgggcgaggtggtgaacgccgccaagttcctcatggcgcattcggacgccaccctggaacaactgatgcgttacgtgcccggccccgactggcccaccggcggcacgatcatcggccgcgacggcatccgtgaggcctatgccaacggccgtggtacgctcaccacgcgcgccgccacgcatatcgagcatgtcacggcccgcaagcaggccatcgtggtcaccgagctgccgtacatggtgggcccggagaaggtgatcgagcgtatttccgacggcgtgaagaaccgcaagctggaggggatttccggcgcgttcgatctgaccgatcgtcataacggcacgcgtatcgtcatcgagatcaagaccggtttcgacccgcatgcggtgctggtgcagctgttcaagcacacgccgttgcaggacaattttgccatgaacaacgtggcgctggtggagggccgcccgcacacgatgggcctgaaggagatgcttcaggtgtgggttgaccaccgccgtgtggtgatccgccgtcgcagcgaatatcgcaagaagaaggcgttggagcgcctgcacctggtcgagggcctgctgctggccatgctggacatcgacgaggtgatccaggtaatccgcacctcggatgatgcggatgctgcgaaaagccgtttgatggttgtgttcgacctggacgaggtccaggcccagtacatcctcgacctgcgtctgcgccgtctgaccaagatgaaccgcatcgaacttgaggccgaacgcgatgacctgaagaagcgcatcgaggagctgacccgcattctggcctccgccgaagcgctcgaccaggtggtcaccgacgagatggacgaggcggtcgccaagtggggctcgccacgtcgcaccgtgctgctggacgccgacccggatggcacgctgacgccggtcgtggcgcagggcgccggggcttcgggtgtgtccaagtccgcgctcgaagcggtgaaggccgccaccacgatttcctccgccgaagccgatgtggccgcagccgcagccgccgccaagaagaccggcgagcggtccgcgctgaccggagccttgaagatcgaggacgagccgtgcgtggtgatgatgagcgccaccggtttgattgcccgtaccacgccaagcgcgatggacgtgttcaatgtacggtccgcatccgatgaacgtctgcgagacgatcaaatcaccacaatcttcgagacctccacgcgcgccacatacgggctggtcacgtcggccggccgcctggtgctcgcgcatgtggttgatttgcctgccttgcccgctgccgccacattgtcgctgaagggaggagttcaggccgacgaactgatcggcatgaccgaatccaccgatccgattcgtggcgagcgcgtgattacggcgatcgccatggagcagccgacatccggcaaggccagtgccaaggatgagagcgaggatggcggggccgccgaggccaagccgttgccgtcgctggctatcggtacccgtaacggtgtcatcaagcgttggaaccgtgaggcacccaccaccatggattcctggcccgtcattgatctgaaagatggcgacgaagtggtattcgccgccgtggccgaggatgacgaccgtctggtgttcatctcctccgattcctcgctactgacctttgaggcgaagaacgtgcgcccgcagggtcgcaccgcgggcggtatggccggcatcaagctggccgagggcgcccgtgtggcggcattcaacgtggttcccgccggcaaggtggcatggacctatgaggagggcgagaacggtttgacttccggctccggcgcggtggtgctcaccgtggccggcgactccgatgcactacccggcaccgaaaacggcgccgccaaggtcaccccgctggaaatgtaccccaccaagggccgcgctaccggtggcgtacgctcccagcgcttcctcaagggccagaacacgctgattcttgcctgggttggtctctacccgttgcatgcctccacatccgcaggctccccggtcgagcttcccaagcccgatatgcgccgagacggctccggagtggacctcgcctcccccatcgccttcattgcgtaacctcaattaagctccctctgatgggccgagccgtaaagcaaacacccccagtggggtgtttgtaggcgaggagcgaacgatagtgagccaaacacatagagaagagaccctaaacccgacctacactaagcatcaaggaggtggcgatgagactactggttgccgtatccaatgaaccgttggcccgcgccattcgtggtgcgctgcttgcctgtcgtcatgaggtgtccttggcaagcaccggcagtatcgcgctcgccgcggtcaccaaggagctatttgacgcagtgattctcgatgaatccctgctcggcatctccaccgagcaactcatcgaatcccttcacaatacccgtgcctccgtcaaggttctgctgctgacttcgacgccactcagcaaaaccatcggcgaaggcagccgctggcgagcgctgcctgacgagtacgccccgatcgaagagacgccctacagctccttcagcgcggattcacacgcaaacaactcagatgccgaagccgaacagtgcacggacaatgctgccgctagcgcacgagctaatgtacgacacccggatgccgtactgagcaaaccattctccgatggcgaactgctctcatacgtcggctcgcttgccaccgactcccccaccatgatcattcgtggcaatctcacgttggataccacgaatcgcaaagcctactacgcatccacacacaccgcaatttcactgtcccgtctggaatacagtttgcttgaagcactggtcaaggctgatggccagtttgtcaacaccagcgaattggtcaagctcgtcggcggcccattcttcgagcaacaagggctcctcaggaacgccctctacacactggataagaagctcacccacgccggcctcatcatgacccaacgcggctccaactaccgcattcgatagctgggctcaatcagtacagccgcatgccttggggaactggggtgaagccggactggtggaggatgcgggcgaaggggtgacgggcgttgaggggttcgccattgatgtcgctgaacgtcacggaaccggtgccattgcgtttgagagcgtaggccagttctgtggcggccttgcgcatttgttcgtcggaatcattggcggcgggttcatggccgaccgattgatcgaacgccgtcaagtgcttggctttggcagccgcgtatagtagcgcaccttgcgcattgagcacgaccgtggctccgatacggcgtgccggtttacccgcaccggcaggcgcgtccggccacgcgatggcggagccactgagatttgcggggtcgagcacactcaatgccaccacggactggccgcgatgctctgacggatgacgcaacgcatccacggtgtcgcgctcggcaaattgggccgcgccgaaaccacggacgaacatgcctcgtaccagtcgaccatgctcctccatgcgctgcaatatcggatacaacgctgagtagccacccgggatattttccttgtcgatcaccggctgcgcgatgacgccatacctgtccagcaacgtctcgaccagtgcgagcgcctgctcggtctgatcagtgtcttcggcttcagcttgcccgattacggcagaccacaaacctcctagcgtcatatccgtagtggctcggtgaatcggagcgacacgcccacgacgacgtgatgtagtggatttacgcgggcttgctgcgcctgcggttaatgcacgtaccggcgcgaagctggaattggtgaccttaccttgccagaccaagctccacaaggcatccttgaactgctgttcgctccactcttgcggaatgatttcaccggtgtttggattgatgtccggctccgcggcctcattccacacacgtttggcggcatccaccagttgacgggcatggaacgctccccctgagtccagtgcggtcagaatcgcttccggcatggtggcgtctgaagcgttcgatgtcgtaccatgttccacaccgctgagcaatattgaatccgccggatagaaagcaacctcaccggggtccatcgcactggttcccccggtttttgagccgacccagaccacatcgccgctggtcagcaactcatccagcaatgcaggttggtagtctcgtactcgtgcggggaataccgccgactcccagagtgcagtgggcagtgctatgccctccagctgctcgataacgcgcatgagcccgtcggcaccttcatatcgttcgccgccgaccggcccgataccttgtcggtcgataagaaacatctggaacgcctctggttctactggcttgactgctttacgcgccttggccaatgagcgagaccgaatgcggcggaatacgtccttatggagccactgttggccttgcttgtcatcatctacaaagtggccttgcagcaactcgcctttggcagccagtacatccaaagtatgcacggcatccgtagcatcgaggtgcagatcggccatgagctgatcggcggtgaaaggaccatgggttttggcgtaacgggtcacgcgaccagtcacatcatcgtcggcaagttcattccagaaagtgcgctcccccagttcctgttcgacttcgcgaatcacgtccgggttgagcacttgtgccatgtcggtggtgccgagcaagcgttcgagcacgtgcggatcgagagacaacagttgcgcgctgcgctcggcctgaggttggtcatactggtacatcaccacgccgacgaagccaaagagaatgttctcggcaaaaggcgatgacggctcggtctccacgtccttcacggtaatggtgccggcttgcaatccggtcatcacctcgttcagggcgggcatgtcgtatacgtcttgcaaacattcgcgcgcggtttccagcagcagcgggaagttcttgaccatacgtgcggcttgcaggagctgtgcggcgcgcagtcgctgctgccataggggcacgcgacggcccgggtcggatcgcggcatgaacagtgatcgggcggcgcattcgcggaatcgtgcggcgaatagcacggactcgcccacttgacgttctacatctgctttgaggtcttctgggtcgaaaaggaacaggtcttgagcaggaatatgtccgtcaccgtccggtagctgaatgacgataccgtcatcggcggcatatacctgcccatcgaaaccgtagcgttggcgcagtctgcggctgatggccatggaccacggttcgtgaacgcggcggccgaaggggcttaacagtacgatgcgccagccgccgtcttcatcgcgggtccgttccacgatgagggtttggtcgctgggaactgtgccggtgatggcttgttgctcggagagtaggcgggccaggttggtgatggcgttggggtctaggccgtctcggtggagacgggtgaggattgttgggatgaaggttgggacagctgggccttctgcggcagaactccccccagtccgcttcacgtctaatccggcggcgatttctcgggtgaagcgggctatggtacggctgaaaccgtagtcacggccagcgccttcaccgtgccagaacggcagacgggcggtgcggcccggagccggagtcacgaccacacgatcacgggtgatttcctgaatctgccatgtggaggtgccgagcgtaatgacatcgcccacgcgcgattcgtagaccatctcctcatccaactcgccgacgcgacgctggcctttgccggcgtccgcctcaggcaggaccacggtgtacagccctcgatcgggaatcgtaccgccagaggtaacggccactttctgcgaaccgggacgggcggaaatcaggccattatcccgattccataccagtcgcggccggaaggccgagaattcctctctgttgtattcgccggacatcatgccgattacggcatcgaacatgtcacgtggcagttcggcaaacggcgcagcacggagcaccgtggcataccagtcatcagcgttcaaatcgtgcatcgaggcagcggccacggtctgctgggcgagaatatcgagcggattgcgcggcacggccaatggttctatatcgccggcaatcatggcttccagacttgcggcccccgtgacgatttgctgacgggtgagcgggtagaacaatgcgtgagagacgccaccgacctgatgatcggcacgacctacacgctgcaatccggaggagaccgacaacggtgtatcgacttgaatcatcaagtcgaccgagcccatatcaatgcctagctccaaactggaggtggccaccacgcagcgcaattcaccacgcttgagccgttcctcaatcattttgcgacggtctttggagaccgacccatgatgagccatggcgatgacatcatcgccctcatgcgagccgacaagcatggtggtggaaccgaccacagcatcgtaatgtgtggagaacccttcgcggccttccggagagcccggatcccgcacagtgtcgggattggtgccatgccgggtctgtgcatagagatcattgaggcgcgcggtgagcttttcggccacaccacgcgaattgacgaacaccaatgtggtgcggtgcgcgagaatctcatccaaaataccgcgttccaccacgggccagatggaaccggaggtacggtcgcccgccgctccaaccaacgcggaggaatcgaacgcatcactcgcatcagaatcgtccccagaagtggaagaaacatctctatcatccaccggcacaatgcccctgcgttcggcaagtcgctgcatggccggcgtgacaccgctgatatgcggagcggaccgttcagcctccacgccaccgacacgctgcttggcattcacggactgcaaatcacgcatgttttccaacggctcaatcatgcgcagatccattgcaggccgcccaccgggattcacgatggtaaccggttgtccgccgcccaggaatcgcgccgcctcttcaggcggattcaccgtagcggatagaccaatgcgctgcatatgaaggtcactgaggccagcatcgatggcggtatcactgccctcatcagcatccgcatcgattgcatctcgcttgcgcgattccgcgacaaggttctccagccgttccagacttaccgccagatgtgcgccgcgcttggtgcccgccactgcatgaatctcatcgacgatcaccgtatcgacagtgccgagaatccgccctgccttcgaagtgagcaacagatacaacgattctggcgtagtaacgaggatatccggtggatgggaggctatgcgccgccgctcctgtgcggtggtgtcgcctgaacgagtggcgaccgcgatcttcggcacgggcagcccttgcgcctcgcattgtgcggcaatgccctccaaaggctgttctaggttcttggccacatcggccgcgagcgcctttaacggcgagatatacagcacacgcacaccggcacgccgcgtgcgtggcatggtcatcagccggtcaatggccgagagaaacgcagccaatgttttgccggagccggtaggtgcgatgaccaagacattacgaccggaatggattgccggccatgcctgagcctgtgcctcggtcggctgaccgaaggcatgctcgaaccacaccttggtgggttcggaaaacaggctcagggtttcgtacatatgtacgattataggtcagctgaagtaggcgatgacttcttcggcagtgccgtaggcgctttgggcaccaagcttggtggccgcataggcggagacataggagccgatttgcgcggattgcagcagcgtatggccagcggccaagccagccagcacagttcccatgaacgagtcgccgcaaccggtggtgtccaccgcattgacttgcgcggcggatacgcgatgccaacgtccgttctcgatcaccaccgaccccgacgcaccaagcgtcactatcgcccggtcgaatccgtaatcggtgaatcgttcggcgacctcataccagtcgagtgattccacatcgccgtccggcagacccagtaactgagccacttcatgctggttgaccagcagaatatccgtggcttccaccagttcgtgaggcagctcgtccataaatggcgagtcgttgagcagcacggtcacgccagcgtcatgcgcggtctgtgcggcgacgataacggtggagatcgggctctccaaacacagtcccaataccgcgcattcggcgatggtcgtgcgatgtgattgcacatagccggcacttgccttggcattggaacccggcgaatagacgatggtattctcgccctcagcgctcacggtgattaccgtggtgccgctggggccttcaacgtgcaggatatcggcggtgtcgacgccggcctcatccagcttgcctaataggaagtccgcgttggagtcctcgcccaccgcgcccagcaactggacattgacaccgaggcgagcagcggcagacgcctgattcgcgcctttgccgcccggcaacactttcatggcaccaccattgacggtttcgcctggcttgggcagtcgtttggtggtcacggtgtaatcggcgttcatcgagccgaccacgattaccgagcccggcgcatccttcagcgcttccaatcgttcccgtacgggctcgggcatctgtttatgttcttcttcacttatcaccatgggctccaagcatagtaggcggcgggcccaaatgcgcgcatgatcagccgcgcaacttacgaagacgctcgtgcatggccaccatcagcaccaagagcaccagcaaataccacgggtagagactgattgtcacatattgcgcgatgatgccgaacagtggcggcatgagcagtgagcccacataggcacaggccatctgcacgccgacgacggcctgcgatttgtcttcgccgaagtaggccggcgtcgagtggatgacgcacggataaatcggcgcgcacccgaagccgatgaccaccagcccaacgaccacgccaaggtggtgaggcaatggcacgaacatggtgaggatgccggcgagcaccagcacttgaccgaggcgaatcatgaccgggtccttgaatcgcatggtcagaaagccggaaagcgcacgccccacggtgatgcctacatagaataggctggcccagctggcggcggtgatcttgtcgatgccgctgtgcatcaccatgtagctggaggcccacagacccgccgtggattcgatggcgcagtagcagaagaacatcacgaggatttccttggcaccgcgaatggcgagcacgccggccacgccgagcggtttgcgttcagcaacagacgccccttcagcattaccacatccctcggcattgccgtcagatgatgcggcgccatcggtcgattcgccgcccccagtcgtgccacgtttcttccacagcggcaggctcagcaccaggatgacggtcagcatcacctgcaggatcgcgatgtaccgatagccccacggccagccttggccttgagacagcgcatagcccatgatgtaggggccaaccgatgcgccgacgccccacatgcagtgcagccagctcatatgccggctttcgtagtgaatggctacgtagttattgagcgccgcatccacgccacccgcgccaaggccgtacggtatggcgatggccaacagcacccagtaattcggggcaacggagaaacctgccaaggccgccgcagtcaacgccaccgaaacggcggtgaccttgcctgccccgaatttcaatgtcattcggtccgaaagcaacgccgagacaatcgtgaacatggaaatcaccgcggagatgccgccagcccacgccaccggcacgttcagatcctggctcatggtgggccatgcggacccgagtagcgaatccggcaaccccagactgataaacgccacatagatgacggcaagcaacagactggccatgttacatctcccattcacagtacggcaccggttgtgataacgatgtcatcagtctatcgaatagcgcttcagcaacacgcataaaacatatgacaacgtgctcacctcaaacgccaattacggaaattctcggtaagcacgatgtcattatcagcgacgtcttcgatcaggtatcgatcttggagcggtcgaaatcgtcggcgttgtcgacgatgaactgcttgcgcggcggcacgtcgtcgcccatcagcaggctgaagatctcggatgcctgggcggcgtcctccatgcggatgcggcgcagcatgcgcgtgcgcgggtccatggtggtgtccgccagctggtcggcgtccatctcgcccagacccttgtatcgctggatgtcgtcgttgtaaccgatgtgcttcttgtcgaggtcgaccagtttgccggccagctcgtcatcggaatacgtgtagatgtattcgcccttgtgcgagccggtcaacgcgatgcggtgcagcggcggtactgcggcatacacgtagccgtgttcgataagcggccgcatgtaccggtagaacagcgtcagcaacaggatacggatgtgcgcgccgtccacatcggcatcggtcatcatgatgatcttgtggtagcgcgactgtccgatgtcaaagctctggccggagccggcgcccaccacctggatgatggccgcgcattccttgttggagagcatctgcgtaatcgacgccttctgcacgttcagaatcttgcctcgaatcggcagcagcgcttggaaaccggcgttgcgggcggccttggcggtaccgagtgcggaatcaccctcgacgatgaacagttcggccacgtcgtcattgcccggctggcagtcggagagtttggccggcatcgaggcggattcgagcgcgttcttgcggcgcgtgacctccttggccttgcgcgactggatgcgtgcgtgcatttcgccgacgatcttctccagcacgcggccggattgttccttgtatccgcgtttggagccggtgatcatctcgccgaattgcttgtcggtgagccgggtgacgatcggcttgacctgcgcggtgccaagcacgtccttggtctggccttggaactgaggttcggccacgcgtgcggtgaccacggccacgagtccggcttggatgtcgtcgcgctccaccttcatggcggagtccttcatgttcaccttgagcttgcgggcgttgtcttccaccgccttgcgaatctgcttggtgatggcgttcatgaaaccgtccacgtgagtaccgccgccgggcgtctccacgatgttcacgaagctcatgattgtggtgtcgtagccgttgacccatcgcagggcgatgtccacgccgcaggtgcgttcgatttcctgggcgtgcagttcaccgccttcgcccacggcctgggtctcctccttataggtgccctcgccttggatgcgccagatgtcggagatcggctcgcctttggataggaagtcgacgaagtccttgacgccgccggtgtgcaggaattccacgacgcgcgggtgcgcgggctgctcgccgaacgcgccatcgacgacctggtcgccggccgtcagcgagaagtcctcctcggacaggctctcggtactgtcggcttgagcctcggtggagtcgtcgaagagttcggcatcgttggacgagacgtccaaagccggggcctggtcttgcgcaggttcgactgcgtcggcatcaatggcttcggcggtgtcagtcgccgtttccggtacgttttcgtcaacaatggtgattttgagtccgggcaccaggaagctggtctggcgcacgcggtcgatgagctgttcgtatgagaattcggcggttttgttgaaaatctccggatcataccagtagcgaatacgggtaccagtggttttgggagataccttgccgatgatttccagctcggtgggtcggttcttgcgagtgcgcttgaacggggaatcgggagacggattggccgggtcggcatccgtgtatacgccagggtgaccttggtggaaggtcatgtggtgcgtcttgccgtcacgatccacttcgacgtccagtcgggagctcagggcattgaccacggaggagcccacgccgtgcaggccaccgacggcgttataagacgagttgccgaacttggcaccggcatgcagtttggtcagtacgacctccacgccggacaggccggttttcggttccttatccaccggaatgcctcggccattgtccgcgacttccacggaaccgtcggtgtgcagggtgaccacgatatcgttgcagaagccggccaaggcctcatccacggagttatcgatgatctcccacaggcagtgcataagaccctgcgagtcggtggtgccgatgtacatgcccggacgcttgcgcaccgcatccaagccctcaagaacagctaggtccttggcgccgtattcttctttgggcatacagtcctattttctaataatttggctcccctcttcaggggagccttcaacggatggctccgtcgtctgacagcccactgggctgtcaaactcctcgcgcggtcggcctactaagcgggccgaccgtcattgatccaggaagtcgcgcagggtctgcgaacgggacgggtggcgcagcttggacatggtcttggactcgatctgacggatgcgttcacgggtcacgccatacacacggccgatgtcatccagcgtcttcggctggccgtcttcaaggccatagcgcatcttgatgacgccggcctcacgcggagacagggtttccagcacctgcttgaactgttcctgcagcagggagaaggccacggcgtcggacggagcgatggcgtcggtatcctcaataaggtcgccgaactcagaatcgccatcctcgccaagcggggtgtgcagggaaatcggttcgcggccgtacttctgcacttcctgcaccttctcaaccggcatgtccagctcgcgggccagctcgtccggcgtaggttcacgccccagatcctgcagcatctggcgctgtacacgagacagcttgttaatcacttcaaccatgtgcacaggcacgcgaatggtgcgggcctgatcggccatggcacgggtgatggcctgacgaatccaccacgtggcgtaggtggagaacttgaagcccttcttccaatcgaacttctcgacggcacgaatcagaccaaggttgccttcctggatcaaatcaaggaagagcatgccacgacccgtgtaacgcttggcgagcgagaccacaagtcgcaggttggcttccagcagatggtccttagccttcttgccgtcggcggcggcccacttgagttcacgcttgcgcttgaactccatgccttcactttcggtgtcgagcaggtgctgggcgtacaggccggcctcgatgcgctcggacaggtcaacttcctgttcggcgttcagcaggctcacacggccgatctgcttcaggtagtccttgaccgggtcggcggttgcgccggccgcgatcacacgacgcttcggattgcccgaagggatgatgttctcttcctcatcatccgtgtcggagaccacgtaggcacccttttccttgggctgctcgggtgccttggacttggcttcttcctcgtcctcgtcgtcttccacatcgtcgtcgtcggcatcgtcctcatcgaggtcttcgtcgtcggcatcgccttcgtcaacgtcgtcaagatcctcgccgaggtcgtcaacatccaaatcgtcgtcgttgacctcggcatcgtcatcaagctcgtcatcgacctgagtgtcctcgtctttgacgagctcatcgtccttggccttcttcgcggttttcttcgcggcggacttgcgcgtggtctttttcgagggctctgcggacttggacttcttggcagaagtcttgcgcgcggtggtcgtagagctggccttcttcttggtctcggtctcctcgctggactcggctgtctgcttggttgccgtcgtttccttcgtggccaaaactgctccttctgatctctcgccgtgaagtgcatataccacacgggcccacttctggcaagggcaaatcgtcaactatgtgagtaaaccaccctccacggacgattattcccacatcgttgcccgacgtgttgccgatcaccacacgctttccttccgcgcatcgcgcataaaacctcggaaatccgccgtttctgttcattcagcccgagcaccatgccggtgccacgcctcgatcggcggctgagaatatcatcgccgccagcgaacaatcctcatcgagcagcaggcatcgcaaggcgaacaccattgctcgcggatcgcccagccaccataaggtgtaagcgatcacggccaatggctgtatgcagtacggcaccggtgaggcttccgcgatatcgagcaacataccgatgccggcatggcaacgctccttatccggcatcatgccttcatcctcgaatgcgcaggtcagcagctcgcccatttgtgttctcgtacgtgccagatgcggtcgcgccgcgaattccatgagccatgacttggggcaacggctttcatcaataaccaacgagagaatcagcgcatcacgaatcgataaggtctcgcgcatgcccaccgcaaacgcggccatcgtctctcggcctaggtcggtgttcccggcatcgagacaagacagccattcatccaatggttcggccacccagtcggcattagcctgttgcgcgcctcgaagtcggcgatcattgcgaaattcctgtgatctcgtctccaactcatcaaagccaaagggctccgtctgctcggcggcgtgccgtttggcgtgtcggctcttacgcggcttgtgcggcgtgttgttgttcatcatgtcctccttgactaatggtgtgcaatctattggtgttgtggtgcgcgccgagccggatagctcatgcgccgagggggtgtgtgcccactatggctgaaaacgccgtatgacgcaggaaaaaacgaccattgtggttctagcttcaaaacccttgattcccaacgttcttgtgttcttcaaaccctgtggataagttattaggcatgtgcacaactgctaacaaccgcgaaatcatcgagccacgcatcattcagttggtgcgggaactgactgccgcccccgccaccgacgaggttgccgacgccctgaaaccggtgatggaacaggttgtgggccaagccgcctcctccagccaaggaggcaaacgactgcgtgcgttgctcgcattggacgccttcgatattcttgccggcgacgtgactcctgatcggcgtgacgccatgatcgacctagcctgtgccattgaagtgtttcagacggccgcactggtgcatgacgacatcatcgacgaatccgatctgcgccggggcaagccttccgcacaccgtgccttggaacaggccgtacacagcggtgccataggccgtggcttgggcctgatgcttggcgatattctggccaccgcctgcattgaaatcacacaccggtccgccagccgtcttcccaacaccgatgccttgaacgaggcgtttcttaccatgcagcgcgaggtggagatcggccagatactggacttggccgtcgagatgaccccgttgtctgatcccgaagctctggcgaacgcctcattgaacgtattccgctggaagacagccagttacaccaccatcgccccactgctgcttgcactgctggccgcaggagagagcccggatcaggccaggcattgcgcgttggccgtaggccggccgctcggactggcgttccaactggccgatgacctgttggatgtcgtcggatcaagccgcaataccgggaaacccgttggcggagacattcgagaaggcaaacgcacagtgctgttggctgatgctctgtctgcggcagatacggaggataaggccgatctgattgccatcttcgaagcggattgtcgcaacgacgaccaggtagcccgcaccattgaactgttcacgtcgaccggtgctcttgatcgatcccgcgagcgcatcgctgccctatggggtgagtcccgtaaggcgattgccggtcttgagctgaattccgaagcgcagcgccgtctgaccgaggcttgtgcgcgattcgtccccgaatccttgcgatagtccacaatgcgagccgccgggtcatgagaccatgaacaccggtgaaaactatgcgccgatgctccggccgcgtaaccggggccatgtacactgaacatgtttagtcgtgattaaaggaaccgtacgatacaacatgagtgagaacgagcccgcgcagatgattgagggacgctaccgcatcgtgcgcaatatcgccgagggtggtatggccaccgtgtatgaggccatcgatgagcgtctggggcgcaccgtggcgattaaggtcatgcacacacaactcgccaaaggcccgcatcgggagcagttcgtcgaacggttccgccgcgaggccaattcggccgcgtccatcgccaacccgcacatcgttcaggtgtatgacaccggcgagttcaatggacttgattttctggtcatggaatatgtgcatggcgtcaatctgcggcatgagatgaacgcccaaggcacattctccgtgcgtgagacgctgcgcgtggtcgcggagacgctggatggtctggcttccgcacatcgcgccggcgtggttcaccgtgacatcaagcccgagaacattttgatcaatgatcgcggccatgtgcagatcactgatttcggtctggccaaggccgccagccaggccacattgagctccaccggcatgctattgggcaccgccgcttatctggctcccgaaatgatcgagaacaatcaggccaccgcgcaaggcgacctgtattcggtgggcatcatggcatgggagatgctgaccggcaaggtgccgttcgattcggataatccggtgacgcttgttttcaagcatgttcatgaggacgtgccgtccgtggccacggtctgtcagggcattgatccgtccgtggcggcgttcatcgcccatctgaccgcgcgccaggtggatgctcgccccgccgatggcgcggcagcagctgaggaattgagccagttggccgccaaattgccgctggaggcgtggcaataccgtttgcatgccgaacccatcggaggtgatcataccgatgccaccgctgcagcgctggtaggcaatatcgccgagcaggccccgctgaccggcgtacctgccggtgcagcaacgttcaagccgtccgtaccagcgtttttggccgatgatgtcgcaagcaataccgtcgataccggtggcgccgcagacgtcaatcctccggctcctccggtcgcccccaccacggcacttgattcgtcgacgctagccgatgcttcggctccccataagacgcaaatcatggcacagtccggcagcgagacacaagtgctgcctcaggccggcgatgccttcacccgagcgcttgccctttccgatgagccggacgtcgcttccaacggcaccgggccaaagaagcagcgcagcaaaaaaccgctcatcatcgtactggtgatcgtgctggtactggctgcaatcggcggaaccgccggctggtggtggtttgccggaccgggcagctattggagtgtgcccaagccggatgacgtgacctgcgatgcgaatgcaggcaccgaatgctcgttggccggcgcggattgggccacgtatgagagcacgttgaaggctctcggcatcccccacaagacgcacaaggaatacagcgacgacgtggcggaaggcaagatcatctcttcttccgtgaacaagaccaaggccgttgtgaacagccgcataagcaagcgagccaatcaggagcttacggtggtggtgtccaagggcgtgcggatgaccaccatcccgaaggatattctcgacgcgaattcggccaatggcaaggacccgttgaacgcgctcaagaaggccggcttcgataatgtcaagcatgacgagtcgaaggatgagtattcgatggacacgccgcagggtgtggcattgacgatctcccctgatcccggtaccacggccaagcacaacgatgaggtgacgattactttgagcaagggaccgatgccggtgaccatgcctgacatcgtcggtaagacccaggatgagatgcaagccgcgctcggcgagttgaagctcacggccaatgtcaccgaacagtacgatgacaaggtcgaggccggtcaagtcatttccgcgtctcaggaagccggagcccagctgaagtggggcgatagcgtggacgtggtgatttccaagggtccggagatggcgacgataccgtccggccttgtcggcaaacaggaaagcgccgtaaccaagacacttgaaggtctcgggttcaaggtgaaaaccgacaaggtgctcggtggcctgttcggcacggtacgtaccgtgaaaagtggcgatacggacctatccaacggcggcaagattcgcttgcgcgacgccaatggcaaccccaccgtcatcaccctcaccatcgtgtgagagtaatcgactggctcccctcgctgaggggagccaacacacattattcggcttcttcagcggcctgccgggccttgagctcggccttgaccttctgggcgtattcgttcacgaattcctgaccgctcattttctggattgcggtggaaacacgatcggtcagcgaacgcaaatcatcatgtgtaatttcatcagccggcttcttcgcaacctcaatcggcttgccatacaacaccttggtcttgcccttcttgggaatcgacgtgccaatcggctgcagcttgtccgagccgatgatggcggtcggcacaatcgggcaaccggtctcgagcgcaagtcgtgcggcaccggtgtgtcccttgtacagtcgaccgtctgggctgcgcgtgccttcaatgtggataccgaacaggtgcccatcctcgataatctcgcgtgcatgctcgagtgcgccaagcgacttgctgccaccggaacgatcaaccgggaacacgcccacggacgtgaaccaccacttcttgaacttgcccttcaatcccttgccctcgaagtattcggctttgcccatgaagtgcaccatgcgcgggcaggtaatcggaatcaaagcatcgtcaatcaccgccagatggttggctgcgataatcgcgccaccctctcgaggcacgttattcagtccgctgacagcagggctcaaacgatgatgagcaatagggccgagacctttgacgaagaaccagtagagcacttggcattcctcccgcagacgaactagccattggccggtcgcctgattagagtgacagttatgactgagaaccagaatagcaatgccgacggagagcggccaacccccacgccgggcaacggacaggattccgatacttcgtccaagtcgtcgactcccggtgccgccggaccggccacgaatggtgccgatacaccgcaatcgcatgacgcgaacgatttggatgcggcgtgggccgcgttcgaagccgagcatcaggccgacttgcatgacgtggcttcctccaggcaggccaaaaagttcgagaagcaggccaagaaacgcgagaaggaagcactgctttccgtagatgacttggatatcggctcgttcaccgatgatgctcgcccgagccgtggcggcaaaaaaggcaagcagtcaggcccccgtgatttcaccggctccagctggctggataccgataatgtgatggacgcctatgatgatggcggcttcactcccccgaaccctgatcttggtccggtcaaagcatctacggtactgctgacggcgttgctcatcatcggtctcgcaggcgaaacggtgatgatattcgttcccggcttgaacgcgattcctctcttaggcgcgctgctcaatattctcttcgggctgggcgtcattttgggtctgggcggattggtggccaaaatcctcaaccgcaaagaccgccccggtgatcagggtggctattacgacgacggcgcgcgggtctaacgcttggactgggcggtttcgatccacttgttgaacagggcttcagccttgccggagtcgacagcatcctcggccagcttgtaggcctcggcgaagcgctcggccagtgtgccgttgccgaccagattgccgtcagccacgatggcggaggcagcgttgagcagcgcggtggtgcgggacgtaatgtccttgccggccaggaagtccttaaatgcgttggcgttgacgtccggcacgccgcccttgagctggtcgacggtaatcttggcgagacccagatccacggtcgggtcgaactcggtttcggtgaccttgccgtcgcgaatctcccagacggaaaccgggccggtgggggcgagctcatccatgccctcatgcgaagtgtagaccaagccggactgaccacggctggcgtagacggcagccatgatcgggctcaccttgcggttggcgcagccgatggccacgtgtgccgggttggcggggttggtcaacggtcccaggatgttgaagacgcacggaatgccgagcgcggcacgaatcgggcccacgaagcgcatggccgggtggaaggtgcgggcgaacgcgaaggtgatgcccacctcgtcgcccacttcgccgacggcctccggcttcaaatccagcggcaggccgaggtcttcgagcacatcggcggcaccgcacttcgaggatgcagcgcggttgccgtgcttgacgatcttcacgccggctgcagcggcggccacggagcccatggtggacaggttcacggtggcgaagccgtcaccaccggtgcccacgatgtcggtggtcccaccggaaacgttcagcggcacggcgtgggagaccatggccttggcggcaccacgcacctcgtcggcggtcagtcccagctgctgctgcatagcgagcgcggcacccacggcggccggattggcgttaccttgcatcaggtcgtccacgaaccactccgattcctcagcagtaaggtggtctcccccgaccagcttggtgagaatcgacttccatgtgatctcggccatgatgccctccttggcgtttcctacgccgtgtgatgtatgttcgccgctcattgtaatggttcgtcatttcaaggccctgaatcttccatattgcaaaatatggcgctattgctgttttcgtggatgtcggttcgtcgtcgagccgttggtttcgtaagcgtgaggggcgttcccgcgtattctgtcttccgaccaaagaaatgaatcacgaagaacgcctgggcaaaagcccattcaccggattgccgaacgtcaaaggcacggttgcagaggatgcgcggatcacggattcgccgccgcgttccgaacccgtgctcgagatccgggtgcgtccacgtgcgggtatgctccgatgctcccgatgcggaaggaggcgccgcgggcatgaccagggcggtggcgtgcggcgtcgtggtcgcttccgtgccgtgggccgagccgggcagccggtccacacgcgatttcgaatcggaacgcgcgtggccgatgagcgtcgcgaaccagaagaccgtaagcggttttccgcacgtcgcgtggcgcgccgccggaagacgccgcccatagggtcgccgaacggttgaaagcgtcgatgccgtctccgttcggcgacctcacgtcgatcggcgtggacgagaccggctaccgcaaaggccacacgtgcatcaccgtggtcgtcgaccacgaacggcatcgggcgatatgggcgcacgacgggtacggcagggacgtgttcggcctgttcttccaaacgttgacgcccgaacagcgcgcctccatcagggtcgtcgccggggacggggcccggtggatcgactcatgcgtgcatgagtggtgcccgaacgccgaacgcgcgcccgacgggttccacatcgtcagttggacgagcgacgcgcccgacaaagtcaggagacacccgtggaaccaggcgcaccgcgacggggacgagaaatccgtcaagcgcatgcgcggcgtcagatacaccgtcctgaagaaccccggcaagctgaccgacagacggtccgaggcgtccgggaacctgcgggacacggaccccaagggccggccctaccgttcatgacggctcagggaacccctccggacgatgcccaaacgaccggccgaccaggccgggaccgaactggaccgccgggtgttccgggcgtcccacagccgcatccccgagatcgtcgaactcgcccgaaagatccgccgtcatgggcccgacatcctcgggacaatcgaattgggctgttcaaacgccaggctcgaggcgtccgacaacaggatcaaggtcaccatccgcatggcctacggcttccaccacgcgaacaatcc

SEQ ID NO: 1374 - DNA, 6957 bp, Unknown
  R157_18m  MAG No. k141_49169
acagtgcttcgccgtttttgtcggcaacggcgtcgacggcctcgccaatcagagcgtcaggcgtgaaaccgagcaacgcaaccgcggaatcgtatgcgatgctgccgtcaaccgcaccaaccatgagctggtcaagcacggaaagggtgtctcgcacggaaccgcctccggcacgcatggcaaggcgcagcacacccggctcggcctcgatatgctcgtcttcgcagatctgctcgaggtacggtcccataacctcctgcggcaccaggcggaacgggtaatggtgggtgcgcgagcggatggtgccgatcaccttgtctggttcggtggtggcgaagatgaacatcacatgctccggcggctcctccacgattttcagcagcgcgttgaaaccttgcggcgtgaccatgtgggcctcgtcgagaatgaagatcttgtagcggtcgcgggccggagcgaaaccagcgcgctcacgcagttcgcgggcatcgtccacgccgttatgcgaggccgcgtcgatttccaccacatcgatggaaccgggaccgcccgtagcgagatccttacagctttcacattcgccgcacggatgcgaggtcggacctttcgcacagttgacgcaccgcgcaagaatgcgggcggaactggttttgccgcaaccgcgcggaccggagaacaggtaggcgtgcgtgagcttgttctcgtcgagcgcgcgcatcaacggaaccgtgacctggtcctgaccgatcacgccgtcgaacgtgtcgggacgataccttctatagagtgccagtgccatcgcaattccttccgcagtagtgccactaggctaccgattaattacgacacgtgcgggcgccgaaaaccgtcgaaccgcatactcgcgcaggtgtgggcgcgtgtcccgaaagaaaaggctcacgatggagtttaagctggatacagcaacaccgacattccaaaattgacagagtgtcaatttcaggtttagactggggacagtcaagaaattgacagagtgtcaacgtgtcgcgtaggtgagagacgccactcaagcgaaggagagagccatggacggacagcacaacgcttccgcgatgacagtcggagacgcacgccgtgcgcaaatcgtgcacgcagcccgcgaactttgcctggaaaagggcttttctaaagtcactatcagcgatatcgcaagtcgcgtcggcatgaccagatctctcttctatcactatttccaagacaaggaccaagtcgcggacgccgtactcgacgacgttatcgacgaagtcatcacacacttggaagagtggaacgcgaatcgcgaagtcggcaatatttcgaaagcgctcgacgacgtggtgcgactgacccggtccctcatcgccgatgagggaccgttcagccagcgcatgatcgaagacggcaacgcgggactgtacatcaaattcatcgacctcgtggccgatcgcattgcggaatacatctgcagttcaaccgtacgtgatttcgaaaaactgcatggcatgcccatctccaacgaacatgagacgttctacacgctcatcgttggactgatttcgctgatcagactgcacccagacattgaagacaccgtcatcagacaggtcgcagcgcagacgctgcacctgaacgaatacatgtaaacgcggaatcaacccgcgcgcacatgcgtgtcgagagaaaggaaaagcgatgttgttccaagtctatggcgacaccgccgtataccagtggatcggctggatcctcgtattctgctgcctcatcggtgccaatgagctggcccgccgcaccaaaaccggtggcgtggtcgcgttcctgatcgtgccggccattctgaccatctacttcatcaccatttacgcggccgccgctatgggcgccgagtgggcgctcaacaacccgacctacgttcatatgaccagctggttccactatgccaaactgtatgctgccaccgcgggctgcatcggcttcatggcgctcaaatacaagtggggcaagatcggcaagtccgagtggttcaaatgcttcccgttcgtgatcgtggccatcaacattctcatcgccgtggtctccgacttcgaatccgccattcgcgcctggggtaccacgtgggtttccaccgaaggcgtgacgctgtatggcggctggcacaacgtgttcaacggcgttgccggcctgatcaacatcgcctgcatgaccggctggttcggcatttacgtgtcgaagaagaagcaggacatgctttggcccgacatgacctgggtgttcatcgtcgcatacgatatttggaacttctgctacacctacaactgcctgccaacccactcctggtactgcggcctcgcgctgctgctcgccccgaccgtggcaaacttcttctggaacaagggcggctggattcagaaccgcgccaacacgctcgccatctggtgcatgttcgcgcaagtgttccccatgttccaggatgagtccaagttcgccgtgcagtcggtgaacaatccgaacgtgaatctgaccgtgtcgatcatcgcactcgtggccaacgtgctcgcactcggctacatcctgtaccgtgcgaagaagcagcacgtcaacccgtggctgcaggaagtcttcaagggcacccgcgactacgagcaggccatcgcccgccaaaaagtcgccgcctaatcccaatccgcgttcgctagttacagcattcgctaattacgccattcgctaattacagaaaatccggtattcgtaagatgcaattctcacgaatatcggatttctattatcgacaagaaattacttatgacatatttgatgtcacgcaacagcacacgctggctgctgtcacactgcagatcaccgcacgtcgctgaagatcactgaagaaattcgccggtaatcgggtcgcgatggtctcgtttgatgatttccagcactttttcctcggtattggaagcttggctttccaccacggccggcggcacgagcacacgcaacgcacgcccctgggccacgaccttgacaggcaggcgaccaacatattcgccgtccgccatcaagaccggcggctcgtcaccctcttgcgcgcgggtgatttcgatatcgcgcacacgcttccagccaaacactttgcatccgaggatcttgccgctgtaggcgcgcgccaccgcatccgcgcattcggcgacattgggcacatggtcgagccacaccaaatcaagcaagccatcagagaaccgcgaatacggcgagacctcaatgccaccaccgatatgccgcgaatttgccaccgtgagcagcggcgagataatgtctttctcttccaccgtgccatcggccaacgtggctttgacgtggtacccgtactgcttcatatgagtcaattccacaagcacggccgcgaaataacgcaacgaaccgttcggcaaacgcgagtggttcgcacggtcgttgatgctcgcatccaaaccgcacgagagcatgcccgcatagaagcgattgaccgccggatgcaatggcacatccgaatctccgaccaactcatcaccggtgctggaatcgacggcatatccaccctgcaacgacgtggccaagcccatatcgacgtcaatatgcgtgccgcgaacaatcgcgccgacaatgccatcgacagcggtttccacacgattgaccggcagttcaagtccacgcgcgaaatcgttgccagaacccgtcgccactatgccaagcggcttgccggagcagcccacggcattggcgccgagcgcaatcatgccgtcaccgccgaccaccaccaagtagtcatattcgtctctacggtttctggcgttcagcaaagagccttcaaaactctcaccggttgcatcgataacgttgaagccatgcttgcgcccggcttcccgcagcagaccgatcacctgattgccgacttcagcgcccttgcctttgttcgacgtcggattgccgacaacggcaacggtcgcattcacacaggacgtttcgctcatacttcagtacgataatcgcaattcgcgtcacacgccacatatgaacggctttccagacagatgaccacgttttgcgtgacgattttccgccatgagacgcttgtccaggcgatacttattcgcagacgatcggtcccgctctcgaccgcttgctgacgtgggatacgaatggcacttgcgtaccgatctgcgcttcgatcaacacatcctcaccttctatcgtgcaggatccgatcgtcgcattattaccggaaatggtacgttccgccacgtaacaggggtcggcagagcctccatatagcgcgttggccgccgccaccgacgctaggtcggccgcattctgcgcgtgatgcaggcaaagcaacagattgcctgccgacgcgaccgcactcagcattatggccgccaccgcgatcagcgccacaccggatatggttcccgaaccttcatcggatcggcgaatccaagcaaaccaatgtttcacaaagcgtttcacatcatacattcctttctgattcgcatccatcggacgctctccggcagtgtttcacggcatgtttcgcatgtcgcgcttgcgagttttcgacaccgaagacccacgtatagcccacaccccagcagccccgcatcacgcagacacaaggcgaggcgctagaagtagcgggtcgctttgcctgtgactcgtgcgggaagcacaccggttgggtcaggtattacagagcattgcaccgtaacggtgacgaaatccgcaccacggtcaaaccgtactgtcgccgaatcgccggccgcagccacagcggcagcccttgctttcgattcgccgccggcatcatcaaccgcgaaggcccgcgcaccggccgcggccgcatcctggcaattcatagacaccacggacgcacgccccaagcacaacaccaaaatcgccaccgccgccacgcaggggagcaccaccgcgaattccgcggtggccgctccctcatcggcatcatcggtatggcgtttccaccattgcctcagcatgaatcacccgacgctcagcgctttcttgatgatgttggtcagcagcgttttgatggcatcggatttcataatgcccaccaaaacggctgcgaatccggtggcggcaaccagcaccaccgcatattcggcggtggcggcgccttcttccggttcggcggtcagcgtgcgcatacgcgcatccaacaggcatatcgccttgtcggccttttcccgcatgacatgcagccgttgtcctgccctgcccatcaggcctggcaaaccatcgacattgattggcgttacgttgttcatggcgttcctttcgttcgaacaaccccggccggacggccgagtgcacccagtgttgcgcatcatcacgctcgcaggagcgtttttccggggttgtggtcggaggacgtaagttatccacaccctcggcgtgtcatccacagttatccacaaaacttcgtgaattatcggatctcgacattccccgcttttccgctatcgttacgcgcacatcgtcattgcacaaacgacatgacggacggaatgattccaaccgcaacaaatgcgggaagaaaacacaatccggtcggcaacaacagacgaaccgacaatttcgccgcagcctgttcgatctgcgcgcgctcatcccaatccaattgttcgacggctgtttccaaacgttccactggagaggcgccactgtgccatgaggaggcgaacgcatcgcgtactaccgcaagatcgccatgatccggccacacatcatcccaggaaacacctttgttcaactgttctccggccgatcgtagtcccgcgccgaattctcctgccgcaatatctcccacagcaatcagcgcacgtggaatggaagatccctgccgtatggcgacgctgagcatctctaatatcaacggcagaggaagttcccgcattcgctcggcgagcgcaaggtcagaaggcgcgcgaaccggcctccactgcttcagccatatcgcctcagccgcgcacaccaccgccgtcagcatccataagccagtcatcacatggctcctttcatatcatcctgccgcatcaacgcacgtatccagataagtccgaatgtgtagcaacagagagcaaatccgagacatgccaagcctttgacacctgaaacaaggaaagccaatgaatgcgcgcccataccttctcccaagagcacagtgagcagcggcaacgccatcaggagtttcaccgtcgccttgggcatggcgaacgcgttggaacgcaaatcatccaataatcgttgccgtttcaatgattcagccaccgcctgcaggcaacggccagtttcgcatccgagcgtcaggctcagctggcaggccgcatacaactcgccgctcagccgttcgacttggccggattgcccgaatctcccggattgctcgttgggcgggcatcgactgcggatcaccatggttatgcgcagtctggtgagttcagccgtggcgaacggcgttcctccaagttcttcgaacgcctgcaccaatgtggctccgctacgcacggaggctcgcagagacgccacacatgccatacatccgatggcgggcaatgcgctcgccgacgcattcaagtcgtcgattccttcggggttcaatccctgcttcccgccatgttccttactccatcgaccgactgcgcaccccggaccatctcccgttcgttcacctacatcgtatgtgtttcggcgtggccatagccatacggccagtccgaacaatatcgcggcgataacgcaaagacttcccatccatccacctcgattcaacgactccatgcacgtacgaaatcgggccactgctgagaggcccgcatttggctgccgttccatccggacagcaggtttccacgcagtttgccttccgcaaattcgagccgc

SEQ ID NO: 1375 - DNA, 3239 bp, Unknown
  R257_15m  MAG No. k141_145
acgggcggtcgtacatagccatcttcttcgcgtacgttccaggtttcacatgcctgatggcggccacaggatccactctcgacagcgttgcgggagccgccatcggcggggcggcctccggcttcctgatgcttaatatcagcctgttctcctatgaacagatgaataaccatcattggatgaacggcatcgtgcccatcaaccgcaaccaccagatcctcggacgattcgcattccttatcgcctgcgatctggtggcaggattggaagtggccgtcagcatcgcctgcgccggcatcatcatgcacgagccagttaaagtgacggatgcgatcggcttcgccgcgatgaccgtgctgaccctcgtgctgctcaacgccatcgtgcagccgttcctgtaccggttctccccttatcgcgccatggccgccattattctgagcatcggcgtgatcatgggcacggtcatcggactgtgcaaggcattgccggaattcgaaaagaccgtcgaacagctggccgaggcgatcagccggcaccaagccattgcattagcggcattcttgatcatcgacgtactcgccttggcgttctccagcaagatatcgctgcatatttacggtagcaaggacatctgaaccgaaccaaccggtagactcttatggagaacggatttggggttttccgaatcaacggaagaccccaaatgcatatatccccgtacgacgccggttcctacaatgcggcgggcgcgtcgtggaagtcgaacatgacaccatccgccagaccgcaaatcgccggccaatcagcatcggacgaatcatcgtgcatggcccacactcgcatgccgacggacttggccgatcgcatgccgacgagcagatcctcgaatacagtgcagtcggtcggctcgatgccgagcctcgacgcggccagcaggtacacgtccggcctgtccttgccgatatcgcccgcatcgtcaacgctgaccacctcgtcgaaataatcgaaaatgccgacatgcctcatagccggctctcgcagcatcggtggcaatgacgtggccacggccagtttcgccccgctcgccttcaacgttgccaggtattcacgcgcgtgcggcttggcttctaccaccgtggagtacatgacgcgagccatatgatcccactcctccatcagctcctcaggagtgtccgacaggttgaagcgtgcgatcgtgtattcggcgatctgccggaactgcatggcggcgaccttctgcatgtagtcgcccggtacttcgaatccacgcttggctagaaaatcgacatccacctggtcccacacgcccatggagtcgagtaacgtgccgtcaagatcgaaaatggcacctttaccttggttgctcacgttttcctgcgtcatgtcagctcctttgatggtcgtgtttttcgattctctgttttgcgattgattttgcgacttgcctgcgattgcctgccacgggtcagtcaagcacggacgatttgagcagttcctcggcatgttccagcgacgcctcgctttcactgccggagagcatgcgggcgatttcgtgcacacgcgcctctccacgcacttgattgatggtggtggcgattgatccgttatccgtttcacctttggcgaccacgtactgttcgtccgcccaagatgcgacctgtggcagatgggtgacgacaatgacctgcgcggattgagcgagtttcgccaatcgcgcgccaagctccaccgcggttttgccgccgacgcctgcgtcgacctcgtcgaaaatgaacgtcatgggaggtacggaaccgcccgccaccacatgtttttccgccgcaacgagttcaagcgcgagcatgagtcggctcagctcgccgccggacgcgcttttgcccatcggcatttgcggcgaacccgggaacggcgtgaataaaaaatcgatgccgtcagcgccggaagcgtccaaatgtacacgttccgatacacggatctctagtttcgaaccgctcatggcaagagaatcgagttccgcagtgactttggcggcaaggtccttcgcggcagcgacacgccttttacttaccgcacgcgccgccttcaacgcttcaccgaacagtttttcacgttccgcctgcaattgactaactttttctggagacgcgtccagatcctccaagtcgaacaccgcttgatctcgccaggcaatcacatccgacaattccgggccccaacgacgaatcaagtcgtcaagttcatggatccgcccgttgatggcgtccaagtcttccatgccgagatcattgtcgacttcgcccgacaaggtgaacaccacatcagacaaatcagtgctgatggaatcaagccgatcggccaattccgaaaacatgccgtccacatgaatggcacgaagtgcctgcgacgcgcgatcgatcagatcggtggcgctggatgattcaacatcgtcaacaacctgcgaggcatccaacgcgctcaacgcgcggttcacgccttcggcgatctcagccgcgttctcaatgcgatcacggcgagcacgcaactcggccatctcccccggctgcggatcgatacggttgattcgttcgatggactcgcgtaggtagtctgcctgctggcgcatggacgattcctgactcgacaatcgttccaaccgctcatccatggcacgaagcgcgttccaagccttgccgtatgcggccaacgccacatcatcgccggcatagcggtccaaaaactcacgttgtcgcaccgaagacgcgatacgcaactggtctgcctgaccatgaatcgtcaccaagtccgccgcgatcgaccccagtacggaacgaggcacgctacgaccagacagcatgctgcgggaacgcccggaagcgggcaccttgcgagacaggaacagttctccgtcttcaggttcgaaacccgcctcgtgcgcgacggcaaccgcggccggtgacgaagcgacctcgaacacgccctgcgcccacgcctcactcgctccaaccgatacacggccaccgtcggaaggaccgccggaaatcagccgaatcgcactgagcagcatcgacttgccggcacccgtctcaccggtgatcgccgtcataccgccggcaggcgcgatcagcgcggaacggatcggcccaagattatgaatctcaagttcttcaagcatcagtgtttttactcgttcgtttctttatcttccggaaacacat

SEQ ID NO: 1376 - DNA, 8587 bp, Unknown
  R257_15m  MAG No. k141_507
cctgattgtcgtaaagtgcgtctaagccgctacttatcagccatccggctccagtgccaatcgccgttccgacaaatgcgccgaccacggtgccggcaccggggacgatcgatccgacgaccgcgcccacggcaccgccaacggtcccaccgaggccatcaacggcaggcccgagaccctacgcggcatcgccctcggcttccgcaacctcgacaactacgtcacccgcagcctcctccacaccggcggcttcagacacaccatacaagcccacctataagcatcccctctacacaccaaaaccggaagagccggatgattccctgcaagccgatcacgccaatccgacccgacgactaatcagattgaggacggctgaattaagcttgtgccctcatgatacaacatgtcctgcgaccgacgccagacacaacggcagcattctgcccaccatagggcgtgtctttaaccagaaagtaccctcaaatacgttcagcaagatatatgcacgcagaacagcccttccgcattatcttatttgacatagagcatgccccttccattccacagaatcaagcaaataaacgagcggagagactggacacaccgcaaaacaatggcccaacccctccgctcgtttgttatggaaggaagagggatgaataagtatgtttacttcactgacttgatgaagacgatcagcaccgcgccaatcagcgagcagaccgctgcaagcgggaagagtgcgtgatagcccaccgaggaaattagcgccgccgcaacatcccacgcaccatattcaggacaaatccagtccgttgttgtccttggctttgctcaccatatcagtcaaatcggggtcgtccacagacaccgcgttctgctgactgagcgtcaacgatagcgagccattataggagtcgccgtcttcgtccttgccggacacgcttatggcaatcgaattcatcagacgctttctgccgtagttcagatccacggtgatagtcggcatctccggctcttcatccgtgccgaaatcccagttgcgcacattatcgagcgcctgacggtactcatcttcagcatcgtccacgccggcatcctcgatttgctgaatcacccaggatttcagatgcggatactgcgcttcatgactgatccagtaattcacgaaatgctgagacaacgctttgatatcgatttggtacgacagctgcgtattgccggcagacttggcagacgatgtattcgggaacagctggctgcgcacattcttatcttccagctccacgccgaaatattgttggatgaatttgctggcctcggccttcacctcggcagaccttttcgtgcccttggcccggtcgatgtcgttcgagtacccatcgtcgttcatcttgtccagctgatcgtagaacgtttgctccgcgccggtgatgtcccaagcaccgttcttgaccaacgcatccttgacgttcaatatcaagtccgccacatcactaccaacgccgttccttaagtcatcttcatattggtcggccgggcagtagatgtagtaggggtcgtcgtcatgccaaacgaatttctcggcgaatgcgcctttgtaccaagcgaaggtcgttgcatattcgtctgttttgctagtgaaggacgcggaggattcgttggtggttttgcccagcgaatacatgccagacatccgcgcgtcaagagaatcgccagtgctgctgtgggttctgagttcgtatttggtgctgcgcagagtggacagcgagttgatcgcgtcgaaggtgacgaccagcggattggtgggccggaagcccagcatcgctttgacggcggtgaagttggggatgatgaacgccaaggccgccaccagaatcgtcgcaagcaatgcgcagaaagcggcgatcagcttcttgctggatttgcgctgcggtgccaggacggcggttgcatcagtcgcctgatatgcggcaggagcgggaatcggcaaagccggcaggggaacggttggtgccggctgtggggcagcggacgcggcgtaaaccgatggggcaaccggcgcggctggtatcgatggtggtaccgcagacgccggcacagcaggtgccggtatcgacgcaggcggtacggctggcgatgcggccggtactggtgccgtcgcaactggtgcgctgtctacagacgctccacatgccgggcaaaatcgtgccggcccatcaactctatttccgcagtggccgcagtacgccatcgtgtgcctctctccctcaaatcggtctgattgccatcgcttcaatgttactcttcagcattacgcctcagccagcccctacgcgtaacgatacgagacgcggcagccttaatgcggttgttttgacgcgatgccaacatcgagctctggccaacgttctggtactcggctacatcttgctgcgagccaagaagcaggccatcgctcgcgccgacgaggccgaatggcggcctagcctcgctttaagcctcaggccagcacctccatggggtgataggtggcggtgtggtggccggtgatggggttccatacccgttcggcgaatgcgcgcagacgggcgacgccctcgcacagctcgtcggcatctccggcgtaggagaggcgcacgaagccgcgcccctcctcgccgaaggcctcgccggggaccacagccacgcgctcttcgtccagcagacggtctgcgaattcaccggagtcaaggccagtcaggcgtacgtccacaaaggcgtagaacgcgccttgcggttcgatcagacgcaataccgggcatccggccagaccgtccagcacgatctggcgcttggcgcggtattcctcgcgcatggcggccacgttatcttgcgggccagccagtgctgccacgcctgcgtattgcgccaaggagttcaccgaggagtgcatgagttcggcgattttgccggtctgttcgatgaccgcttcgggtgccagcaggtagccgatgcgccagccggtcatcgcataggttttcgacaggctttccaccacaatggtgcgctctttcatgcccggcaccgcggcgatcgatggtgccacggctgcctctcccccaagcgtttccccgaacgtttccccaaacacgaacggatggtaaacctcgtcggagatggcccaaatattgtgctgcttgcatacttcggcaatacgcgccagttcggcggcagaggttaccgcgccggtcggattgcctggtgagttgatgattacggcgcgggtgcgcggggtgatcgccgcttcgatgtccgccgcgttcacgcgcatgccgtgctccggacgcagcgccacggtgaccgggcggccgccgcacagcatcacttcggcgtcataggaagtgaagaacggcgagggaataatcacttcatcgccggtgcccaccacggctttcagcgccagaaacaggccaatcgtggcaccgtcaacggcttgaatctcggtttcgggatcataagtaagtcccttcacacaggcggagtaatcggccacggccttgcggtattcggggatgccaagcacgttggtgtaccgagtgcggccagcctgtgcggcctcgcaagcggctgccacgatatgcggcgcggccgtggcgctgggctcccccacggtcagtgaaatcgcgtcaggcacgcgctctacacggtcgaatacgtctcggatgccggagcgcgggatattcagggcttcggcggacaggctcgcgggctcggcggtcggcacagcaacccgaccggcagcaggcatagtagcaggcacagcagcagatgcaacttcggacagagacatgttggaaaacttctgcatatcatccctcctcaatggaattatttcatcgttctcttatttcaaaaggaattattacatccaattaggactttaaacgtaaacattccaccacacaacagaaaacacaggaagaactactgaaattaccaggcaaaatcggaaagccatcgcattccggcaacaggtacagtgaacacagagcacaacgaacggagaagacatcatgaccgcgattgacgagaccgaccagcgcatcctcaccatgctggaggccgacggccgcgccacgctcgcgcaactggcccaggcgaccggactgtcagtctccgccgcccagtcgcgcgtgcagaagctggagaagcgcggcatcatcaagggatacaaggccatcatcgaccaagagcagcgcggcttgcccatcagcgcgttcgtcaacgtgaccccgctcgactactcagccgaatcctcgatcccggacaagctgaacaatatcgacggcatcgtctcctgctattcggtggccggcgcccccagtttcgtgctggtggtgcgcgtggcttcccctaccgcacttgaagaactgctcaatctcatccaccgcacggtgccggtaagcaccgagaccacgatgattctgcagacctacttcgcacactgaccgcgaacccggtaacctgcgcgccgaagacctgcggccacacaccccacaaaccccacaggtcacaaaaaccatacgaccccacggtccagccacaccccacaaaccccacagaccgcacgatccccaacagacacatctgacatcacccaagtccgcctttatgtccactatatgaacgtgcctccggtgtgatgcggcttccatttcgacccgattcacgcatagacagacatccaacaatcgcccgaaaaatctaacaaacggaaacttgagccactccataaccacgccgaaagctttcccgttatccgagcgagactctatgcagcaagggcctgcgcgcatagaataaaaccgtcttaattccctagcaaatcgaggagaatcatgctcactgacgagtacatcaagcgtgtctacgaccaggtcgttgcccgtgacggcgatcagccggagttcctgcaggccgttcgcgaggtcttcgagaccctgcagccggttgtcgagaagcacccggagtacgagaaggccggtgtgctggagcgcatcgtcgagccggagcgcgccatcaagttccgcgtggcctgggttgacgacgagggcaaggttcaggtgaaccgcggctaccgcatccagttcaactccgccattggcccgtacaagggcggcctgcgcttccacccgaccgtgaccgagtccgtcgtcaagttccttggcttcgagcagattctcaagaactccctgaccacgctgccgatgggcggcggcaagggtggctccgacttcaacccgaagggcaagtccgacgccgaggtcatgcgcttctgccaggccttcatgaccgagctgagccgccacatcggccagttcaccgacgttcccgccggcgacatcaacgtcggtggccgtgagatcggctacctgttcggtcagtacaagcgcatccgcgacgagtactccggcgtcctgaccggtaagggtctggaattcggcggctccctggcccgcaccgaggccaccggttacggcgtgtgctactacacccaggaagccctgcgcgtgctgcgcaacgactccttcgagggcaagaccgtcgtgatctccggctccggcaacgtggccacctacgccgctcagaaggctgagcagctgggcgccaaggtcgtcaccgtctccgactccaacggctacatctacgacccgaacggcatcaacgtcgaggtcgtcaagcagatcaaggaagtcgagcgcggccgcatcaaggaatatgccgagcgcgttccgggctccgagtaccacgagggcagcaagggcgtgtggaccgtcaagggcgacatcgctctgccgtgcgccacccagaacgaggttgatggcgaatccgcacagaagctcgtggacaacggcgtgaccgtggtcgtcgagggtgcgaacatgccgtccaccccggaggccatcgaggtctaccagaagaacggcgtgctgtacggcccggccaaggctgccaacgccggtggcgtggccgtctccggcctggagatgagccagaacagctaccgtctgtcttggaccttcgaagaggtcgacgccaagctcaagtccatcatggaagagatcgtcgccaactccctggccgccgccaaggaatacggccacgagggtgacctgatgctcggcgccaacgccgccggcttcgtcaaggtcgccaacgccatggttgcccagggcgtgctgtgacgcttgcctctgagcagtactaagcagtagcgtaatgcccttgcttcccgtgaggaggcaagggcattgctatatgtacaacgagcaacaagtgctatccccaaatacgtaagcccgataacaactcagcttccacctccataaccccggaactcaccaccgtcgatcagcacatggatcagtgcagctggaccatggccgacgtggtcatcaaagccatcaacggagtctcttcaccgcgcgtgatgcacctgaacaccgatttggtggtgcgtgattcggcgtaattgccacgtggctgtcggcaggactctagataccgcgtcacaatcacccagtaatgtatcacgcagtgtataactcttccgcggaaacgaataccattcgttcatcatccatgtagcgggttcgcgtggactcactcaccggattcttggtgaacagcataagccacgcattacctgcctgatagccgcggactaagccagcacgctgatggagcttttcaatagcctccgtttcgttgaatgaattacgccatttgcattcaccgaacagaatcgttttatcgagcgaatccgcagcaatcacatcgatatcggtttgctcgtgagcaatcggatcattgccccaccatttgccgaactgagtggcaacaaaggggaggttgcccatagcgttgtttcgaataagccattgcaggcaaatcgtctcaaattgttgaccaacataggtatcaaacgctggtccaaaagcgagtctgctcgtaacctcctcgctgatattaccatccaaaatgctcatgttgcgccccacaaagcggaaccaatatgcaaagaagggatcgctcaccacatacattcccttgcgcgatttactcggatcttcaccaaacggcacttttcgctcaattaagcgcaaatcgaccagcgttttcagatatgctccaatcgaatcagatccgacacccgcatgttcagcgataagctttggcgaggaattaccacccgcaatagattgcaatatcgaataatacgatgccggttcacgaagctcctgacgcaacagcatcataggttcctcacgcagtacgcccaagttgtcgaacatcaagcgcagcacattggattcaaagccatcggcttcctgtatacgggccagataatatggcgtaccgccgaaagtcgcatagtattggaccagttcttgcggagatgtgttcgttagaaattttgccgcatccgcatagtcgaatggcaggagtcgaatctgtgctgtacgacgcccgtatagcgggcttttacgccccaatacgtcgttttccatgaatccctcgttactaccggatagaatcatcgtcacttttgtggcgaggaatccatggtcaattgctatctgcaacatggagggtaatgctggctcggcggcagctgcataagggaactcatcgaatacgaacaccatacgttcgtcagtctgtgcagcacgttcagcaacaaacgataacgcatcagaccacccgccaaacgacggggtggaatccggcataccaaagaacgacaatgccgctcttgagaaatcttcaagattcatcttggcgctttgctgtatggccgtgaagtacagcacgcgtttatctttgacaaattcgtcgatcaacgccgttttccctacacgccgtctaccgtacagcaccaccatttcgaacgaatcgctggtaaacagcttttccagcacttgtaactcgtgctctcgtgcgacaaacattgcagccctccgatccgcctaccgcccaataataagagtatcatggttaatgtaatcacgattaccttaattatgatactgataattgttgccctaccgcgaggaggatcttccttccgctgtcaaaacgaaagcccaacagtccagactgacgagcagcaacatcggcagatcaaccgctgacgccagccagcctgccagtcctttggcggaaccacaccacatagaccttcctcaacggcgccaagctgccacacgctggcagaccaacaccgctgtgtgcattctctgcgtcggcggcagtccaaaacttggcccagcaacgacgcttgctgtgcccagcgtcggcagagggccaagaattggacgcaaacgacacagaacacaccctcagcgtcggcagaactccaagatctgtaccgctgacgacggtaagccctccacagcgtcgtcagagatacaaaacctgtcccaacaccgacgcctgccacccccccagcgtcgccggagtcccaagtctcggcccagcaacgacgcctacggaccccacacataagaaaccgcacctccgatcatcgaatctgaattac

SEQ ID NO: 1377 - DNA, 7300 bp, Unknown
  R257_15m  MAG No. k141_1065
cgacgcggactctccagataagcagcatacatccgcgcaagggtgtctgcttctgccacatcaggaagcctatcggcatgagaagcatctttcaatgctttagctgaataccaaagaaaaattgaagcaaaacacgcagagccagcaggcaggattcatctacctcatcctgtgcaccgtctccggcgttgctgccggcctgcagaacacaggctgatctacacaccagcgcatatggggaagccccgctcacatcgagcagagcttccccgttttgtgtacatctttcatcatcttgcaataattcttacatgtaaacagagagttcttacatgaaagaattattgaaaggtgatgaaagaacttactttcacgcgcgccaatcatcccaacacgtatcgggatgacggcccattcccctcgcggcgcaacttgcccgcatcctctagcttcttcaacaaccggtatgcactgatatagctcaggccaaacaaatccatgacatccgccgtagtgacgacaccatcatttttttcggcgaaatccagaacaaggccactgcgccgggtggcatcgatgtcacgctggcgcacgtaagacgccagcccctctgaacgtttgtacactcgggcactcagcatatacggacgagagctcccgctaccgaccccctctaccaaaccagcttccaccagattctcaacagcggacacgatgcgtcgatgctccaaatgagaaaaatcgcacaattggaccacggtaagcctacgatgctcacgcagcagcgagagcacaatcagtgaccagaccggcaatggagccccacgtcgacgttcctcgtcgccaatcatggttacgaatgcctcgtcaggtaccacgcggcgcaagaacaagataacttcctcagcactggactgtgaataatccgggaaagaaccacccgccgcaatcgacccggcatagatggtatccacgcctcgtccggtgcgttcaacatatccggcagctttcagaatcagggcaagctgcggattgcgggaacgcggttgtgcagtaagcaggttatcttcggaaacaccctctatgaatcctccgggattagatatggtcaacccatcatcatcaaccaggaatctcaccgaacccattcgtgcataatcgcgatggcaaaaagcgttaatcattgcctcacggaatgcccctcgatcgaagtctggcagatcgacacgaatcaagccgctcatgacttcgtggctgggattccatggctccatcagctcgcctacacgatcaaacatatccaccaaaggcaacacgaacggatccatattgacctttggagacatgcctttcatcacttgaaaaacagccgatgcggctggaaccgatcgatgaatagcatcaaccgaaccaatggtgagcagaccagcaacagatggctgcaatccatacgggccatcaacaaccagctcaagtgcccgatcgaaatcctcatcagtgaaagacaacaacgagttttgcgcattggcactgcgaatatggcttctcaacttgttccgtgagtctggattcaaatcgtccaaccgagcctctggtgcaggttgcgcgctgaaatcgtagaaccgttgctgagataaacggctaatgaattgggaaacaaacagcggaacgacctcaggcgagccgtctgctttcagccggcgctgcaatgtcttcccctgactggtagatacgatttgctgactgttatccacctcaatactgactatcggcacctcgttctcatacaagagcgccacgcgagcgggaagctgcggaacagtcttattgaaaattagtaccgcaagtccattgatattgcgatgctcgtcacatacgccggtcacagtgccatcgtcttcaataccgagatacagtgtgccgccttcggtattggctagagccactacgttgtcaacaatttcatcatgcgattgagggcgcttctgctcactcttgaactcaaccgtcaaactttctttagtcggcaacatgagcatcccctttcaccatcttgcaataattcttacatgttaacagagagttcttacatgtaagaattattgcaagatggtgaaaggggtaaagagcaatccatcctgtcatctccagcaacttaaatccgatcatcgctgctttcggcatatctgatatcagccgctggtgccagtccaattacccaattgaagctcaacacggccaaagactctacgccgcagtggattcgcgctcgatgagcttatagcccacattcacggtctgcgggaagaactcgtcgtccaggttctcgatacgccgcataagcaaggtcagcgcggtatccgccatgcccttgaaatcggtggccacggtggtcaaagtcggcacgctgtacatgctctggctcaggccgtcgaagccgataacgcgcacatcgcccggcacacttacgccatcgtccgccagaccacgcagaataccgagcgcaataccgtcgttcaggcagtacagaccgtcgtacttgcacttgcctttcttggccaagccgcgcccggcctcgataccgccgtcaatcgaccacgaggatttgatgaaatcacggcgctcgtcaaacggcagtccggccgcgagaatcgtctccttggcggcccgcatacgaatatcacgcgagccgggaatgatgttgggattgttgggatcgtgattgtcgccgacgatgccgatgcgcgcacagccacgcgcgataaggtgttcgattgccgcccgtgagccggcgtcgctcggcgcgttcacggtgtcgatgggcaggctggtgtcgtagttttccagcatgacggccgggtgccgcttcaggatatcgaccgcacgtggcgcattgatggcgatgatgccgtccgaaaacgtgtacgacagatcgttgtcgtcggtaagataccgggacagttcgatgagcatgtgcgagtcgcgcttgtgcacttcctcagccacacacatggccagatgggagaaatagtcgccctcgaggcccgaggtaaggaaggtgatggtatcggaccgcccagaacgcagggaccggccagacaggttgattttgtagccgagtttgcgggcggcgtcacacacgcgttgcgtggtttcgggcttgacgtaatccttgcctcgcagggccgcggaggcggtggtggcggtcactccggccagttcgccgacatcctttaaggtcaccatcgttaccatctccgcatatcacgaaccttatcgataagaatccatagtaccgcccacatctcagccgaggatgagaccctcggtcgaggccctgcccggcgactcgaacgccgcggtcaccgtggtgagcaccgacgctgcaaacgaaaacatgtcaaaccaagaaatggacatgacggagtcattgttttccgagagggatatgccgcgtccacgggcagacgtcacgtatcaatcacgccgataccgtcatataactgttttcgatgtgagaaagctcatagcttccgaccacagaaaccagccacagcaaccccataacagcgttatagttctgtttgtcggcgtcgacaagagccagcagcgccgatgaaatgcacaccaaggatgtttagcgaattgttcgcagttcgcacgattcgatttgattcgattcgtgcagcccggatggttcacgggggcatgccgtcgtgatgtgcgtggatatgggcgatacgactctcgttcgggtcggcaggtcatcgtacaccagttacgaaaggatccgtccatatatggcaaggtttaccgagaatcgttggaccagcgcgattattcccgcactgctgattcatatcccaatcggtaccgtctattgctggagcgtgttcaagcagcttatcgctgaccgtctccacgccagccccgcctccgtggaatggggcttctcactcgccatcttcttcctcggcatgtccgccgcgtttgccgggccaatggtggagaaaaacatcaagaaatccgcactcgtctccatggtctgcttcgtggtcggcttcgccggcacgggcgtgagcatcgccctgaacttcctgccgggcgtgttcatctgctatggcgcgatcatgggcatcggcctgggcgtcggttatctgactccggtcaagaacctgatgctttggttcgccgacaacaagggcctcgccaccggcatcgccgtcgccggcttcggcctggccaaggccattgccagcccactgatggaatatctcatcggcacggttggcctggtcagcatgttcttcatcctcgccgcggtctacgcggtgatgatgttcgtcggcttcctgctcatcaagcgtccggccggctgggtgtacgatcccgcgacctcacacgtcagccgcaagacaatcctcaagaagcccgtgttctggggcatctggatagccttctatatcaacatcacctgcggcctggccctcatcagccaagagaaggacatcctgcacgatgtgctcagggccttcccgcagtatgccaacctgagccccgccaagtttgccgccgccatctccggcatcatcggactggtgcttgccgtggactccgtgttcaacacggctggccgcgtgggcttctccacactctccgaccacctgaagcgccgcgagaccgtctatcaggtaatcttcatcatgtcgattgccgtgtgcttgctgcagatcttcaccaacagcatcgacaacgctctgctgtgggccgtgctggccatgctgttcctcgtcaacgcgggctatggtggcggtttctcgacgctgcccgtgctgcttgatcagcacttcggcaccaaaaccgtctccaccacgcacggtctgacgctgagcgcctgggcgttcgccggtctgtccggcaaccagttggcctcgttcgtagttgcccacgcgcctgatcaggcccaccgctacgccgcgctgattccggtaatcaccggcctgttcgtcgtggccctgatcagcatcagcctggtcaagtacctcggcgacagaaacgtcacgaaggccgtcgaagaccgaggctgagctgccgcaaaacaacgattctgccggagtcgggcgcatcgatcgcatcaatcgatgtacgtcacgattttggcagaatcgttgttgttgctgttgagtacctgaggtcgtgcggcttacgcgccgaccagttcgagcatttgggggatgctctttttgccgaattcgacttgctgggtgccgtcggcgtgggtgatgacgatgcagggcacgctcatcgcgccgtactggtccttgagttcggggaagtgcgagacgtcgtaggcttcggcgcgcacggccgggctcagggaggcaatgcactgggaagcaagcacggtttccggacacatcgtgcaggtgagcgagacgaggatcatgatgttcagcgggtctgtgatggacttcgcgcgttcgatcaggtcgtcgcccagcggctggccgggaccggccgcgttgtacaggccgagcacgaacgagttgaactcatggccggaaggtacgccgtggaaggccagaccggtgaagaccagtgaaccattgccgtccttgccggccttgccgtcgccctctgccggcacgcagatgcgcacagttgggcgggcgagcggcaggacgccggcgacgtcgaatgtggcgcggccggaatcgtccaacgaaccataagtgggcagttcggtgccgtccggcaaagtgacggccaatggctcgccaaccaccaaagaagtaggcacagaagcaccatccaccgccgtgatcagccctgcggcatcaacggcgaccgagttcagcttgccattcgacaacgcgaccatctcgccgatgaaaccctgcaattccgccgaaagcggagtgccgtccagctcgagagcgagcgtgaccgggcgggtcatgcgtccgaagaccacgccaagctgctgcttgacggcggcggagaacagttcgccgggcttcttggcggcgctggctgcggctgcggcatcggcgctgcgtttggcgggagccggggcgggcgtcgtgccagcggccgaggcggcggaggcggccttggcctcggactcctcataagcagaagcagtgggacgcggcggcaccaagccggttttctcgctcatctgcttggcgtaacgctccagttccacggcggcaatcgcaccgtcggcggtggcggtgaccacttggcgcaggttcttgacgcgcagatcgccggccgcgtacacgcccggcaccgaggttctgaggtagtcgtgcgtgaccacgtaaccgtggtcgtcgagctccaccacgccgcgcaccaaatcggtggcgggcacatagccggcgaacacgaagacgccgaaggtgccggcgtcggcgggcttccacgtttcggtctggccggtggcaaggttcaggatcgaggcttctcgcaggcctccttggccggcggtgacgcccttcagctcgacctgataacgcacgtcgatcttcgggttgttcttggcttcggcggccactgcggcatcgcaggtgaagtccggttcgcgcacgagcacggtgactttggaggcgtatttggtcaggaacacggattcctcggctgcggcgaatccgccgccgaccaccagcacctccttgccggcgaagaactcgccgtcgcaagtggcgcagtaggccacgccgcggccggcgtactcggcctcgccctcgaagcccagcttgcgcgggctggcgccggtggcgatgaggatgccgaaggtcttgaggtcgccgcgtgaggtgtgcacggttttgatgtcaccatccacgtcgagaccggtggcttcggcggagaggaattcggcaccgaagtcctgagcctgctggcgcatggtctgggtgagtgcgcggcccgtggtgcggcccacgcccggatagttgacgacttcgttggtgatggtgatctggccgccgaaatcgtccttttcgagaatcagcacgcggtagcgagcgcgggccaggtacaggccggccgtcaggccagccggcccgccaccaatgacgacgacgtcatagagattgttggtctgagtcatgaaaactcccttacataccctggctccccgctctgaggggagctgtcgctgaaagcgactggggggagtgctcgcgagagctagcctgatccgatatgcttccctcagtctccctacgacagctccccgccgagaggggcgccagtgtatgtaagggagttttcatgaatcagaccaaca

SEQ ID NO: 1378 - DNA, 44380 bp, Unknown
  R257_15m  MAG No. k141_1238
caatcccgcggcaagacggttattatgatcacccatcgcatggccaacgccgaacacgctgatcaagtggtggtgctcgaacacggcaagtcggttgagaggggcacccataccgagctgatgacggcggacggcgtctacgccaagctgtttaccacgcaggcggatattgagaacttcggagaaggccatgctcggcgtgtgctgcaggttggttcccgcaagcaggagctgtccgacgacagtcggactgagggtggcgcagcgcgcgtaagcgcagaggcgggtatgacggttgaccgcctgcagtcagctttgccgacggcttccgttggcgggagtgagcaggcctcggctgagactccggctggtgttgcaaatagcgattcgtcttccaaaatgagcacattccaagtgatcaggcgactgcttaaggaagcccgacctctggcaggactgatggcagcggcctccaccgccggcaccatcggccatctttcggccactttcctgcccgtgttcggcattatcgcggcatttgcacttaccggtaatccggtgtggggcatgggtgttgcgcccgccgtcatcatgatgattatctgtgctcttctgcgtggcatcacccgatacattgaacaatatctgaaccacaatgtggcattccatctgctcgcactcttccgttccaaggcgttcgccgcgttgcgcagactggcgccggccaagctcgcgggcaaaggtaagggcaaccttatcgccatgctgaccaccgatgtggaactgcttgagatcttctttgcccacaccatcagtccggtggccatcgcggtaacctccaccatcatctacacgattgtggccgccaccctaagcccatggatggcgctggcgttgattgccgcccacctggttatcggcatccttgtgccgcgattctttgccaccggcgtacgtaaccttggccctgccatccgtggcgctgccggagaactcgacgatgtgatactcgatgacatgcgcggcctggacgaaatcatccgatttggccgcggcgaggaacgtgcgcaggccatcgaggaccgtacccatgcgttgtggaaggatcacgccaaactcagcaaggtcaacggccgtttcaccggaatcagcggactcttggtggctgtgctcacagcggcttcggtcgccgtggctattgcctgtgccggcgcgaacccgcagagcattccggctctgattgccgctttcgtgctgttcgccggctcgttcggaccgactttggcgctcgccgccttgcccgctaacctgactcagaccttcgcgtccgctagccgactgttcggactgatggacgaggtgcccgctgtgaccgagaacggcactgttgtgccgcaggagtatatgggcatgcgtcttgatgacgtcacctttgcatatgcgggggagcatgaagtcctgtccgacttctcgcttgacgtgccgcagcatggcgtgctgggtatccaggggccgtccggccgaggcaagtccaccatgctcaagctgctgctgcgctactgggatccgcagcgcggtcaggtgacgttgtccggcacgccgttgcccgaggtcgatgtgcatgctcgccgatgtattcaggccatgatgagccaggaaacccacctgtttgatggctctatccgagacaatctgctgattgctttgcctgagtccgaggttgaagctgcaaatgttgcaggcaatggggaagtgggtgccaagaccgttgattcccgacagcagcagttggcggcgcaatcggcagagggcgatgccgttcaggtggcagcagctgacggtctcgatgctcgtttgcgtcaggctctcgccaaggcctccgtgcttgatctcattgattccctgcccgatggccttgatactcaggtaggcgagttgggcgaccgtctatccgaaggtgaacgccagcgtatcggtttggctcgtgtgttcctgcgcaatgctgatctggtgcttttcgacgagccgaccagccgtttggatgctttgaacgaggctattattctacgttccattcacgctatggccgtgggtgagcagcatgcagacaaggagcgcggcgcggctgtggtgctggtcccccaccgcgaatccgccatgcgcattgctgatgcggtactcaatctgtaactgcctgtaactacgcgggaatcacatcgcattgcgttacgttaccgcgttgcactgcggttcctcgcgggtggcggcgatgccatctccggttgtcattgcgttgctgcgtttgtgttgcgatatgtgatgcggcaacgcagcaatgcggcaatgcaatgtgatgtggcaacgtggcaacgtagcgatgcaataacgcggtaacatggcaacatggcaatgcagtaacgcaacgcagcattcacgccttgatcaaagcgccgatgacgctgtcgaacgcagtgagactgaggggagccaaagcccaaaaccggcaaacacagcaccggccatgagccgatacaataaaggatttgattaatatgactactcatagagcatttaggtggccgtccctgctgacggaatccggccgcggcatcgcgttcggcggcgactacaacccggaccagtggcccgaggagacgttggacgaggatatccgtctcatgggtgaggccggcgtgaacgtcgtatcgctggcaattttcagctgggacaagatcgagccggtcgagggcgcgttcacgttcaagtggctcgaccatgtgatcgacaggctcggcagagcaggcatcgccgtggacttggcctccgccacagccgccgcgccgctgtggctgtacgaatcccatccagaggtgctgccggtagaccggtatggtcataccgtcaacgcgggctcacgccagtcgtggcagcccacaagcccggtgttcaaggaatacgcgctgcgcctgtgccgcaaacttgccgaacactacaaggacaacccgtatgtgaccgcctggcacatgggcaacgaatacggctggaacaaccgctacgactactccgacaacgccttggccgcgttccgcacgtggtgcgaggccaagtacggtaccatcgacgcgttgaacgaggcgtggggcacggccttctggtcgcagcacgtgaacagtttcgacgaggtgctgctgccacgtcacatgggcggcgacgccatggtcaacccgtcgcagcagttggattacgagcggttcggcaacgacatgctgctcgacttctacaaagccgaacgcgacgccatcgagcagatctgccccgacaagccgttcaccacgaacttcatggtctccaccgaccagtgcgtcatgaactacgccaaatgggcggatgaggtggacttcgtgtccaacgatcactacttccatgagggcgaatcccacctggacgaactcgcctgctcggacgcgctcatggactccctcgcgctgggcaagccgtggtacgtgatggagcactccacctcagccgtgcagtggaagccgctgaacacacgcaaacgggccggcgaactcatgcgcgactccctggcccacgtggccatgggcgccgacgccatctgctttttccaatggcggcaatccaagtcgggcgccgaggcgttccactccgccatgctgccccacgcgggcgccgattccaaggtcttccgcggcgtatgcgagctcggtaaggcgctgaagaccctctccgacgccgggctgcagggcactgagctcgagcgtgccggcacggcgatcctgttcagcgcggaatccgaatgggccacacgctccgaaaccctgcccagcatgaaactcaaccactggcacgacgtgcgcgactggtaccgcggcttcctggatgccgggctgcgcgcggacgtggtgccgctcgcctacgactggaccggctacaaaaccatcgtgctgcccaccgtgctcagcctgtccgacgaagacgttctccgtatcgccgacttcgcgaaggccggcggaaccgtcatcgtcggctatgccgccggcctgatcgacgagcacttccacatcggcctcggcggctaccccggcgccggcaacgggctcctacgcgacatgctcggcatccgctccgaagaattcaacatcctcggtgaagaagccgaaggcgagcccagcgaaatcagcctgtccaatggtctgacgacccgcctgtggcagaacgacgtgacttccgtagccgcggacaccacagtgcttgcctcttacgcaggtgagtccgccgccgactgggagctggagcgcacccccgccatcaccagccgcccctatggcaacggtaccgccatctacgtgggctgcgacctcaaccgtcacgacattgcccagttgctcaaagcacttggctcccgatggcaggagttgtcggcgcagccgactgagagtggtcaaactccaacctatcccaccacagatccccgcatcctgcacaccatccgccgatccgcagacggctccacccgcttcgatttctacctcaaccgctcaaaccagcccgtcgccatcaacggtgtggaaggtgatcccatcatcgcccaccgttgcgagactgacgccgttggatatacgctgaaccgcaacgccattcttatcgctaaaacgtcctgctaaaccgcgctagaatggcaatgttgtccggatagaggagtgcggcatgagcgacgagaaaacagccaagcgtcgagtgacgctacgcgatgtcgctcaggccgccggtgtatcgctcaaaactgcgtcgaacgtgatcaatggctccgggcgtatgacagatgagacccgtgccaaggtcgagtcggtcattaaggacctcgactaccgagtcaacgtggccgcccgcaacctcaaccgcgatcacaccggcttcatcaccctcgccgtgccttcgctgattccgccatatctggccgagctcgccaaccgcaccatcgaggccgcccgtcagcgcgactattccgtatacgtcaccacgtatgcggaaggctccgcgaaaggcgcgcgcgatctgctgaagaagttcaactccacggtgtccgatggcatgatcctttccatgagcgaggtggaaaacatttcgcccgatgatctgaaggttgattttccgctggtcatcgttggcgcgcgtaccacgtggggcattgtggatcacgtgaccccagatgatgtatccgcagccgccatggccgcaggctacctgtatgaccgcggttccaccagacttgcagtgatcggtgcccgtgacgtttacgacgaagatgcattgctgaatgccgtagaaggcaacgcgcagctgcgtctgcgcggcatcatcgaagagacccgtaggcgtgggctctccttggatccgcagctgattggcaacaccgatcaggattggaccatcggagccggtgcccgtgtgacccagcggctcattgattccggcgtgccattcgacggtgtgattgccttgaacgatcagttggccatcggcgcattgaccgctctgcgcaccgctggttatgaggtgcccgtgcaggtgcaggtcatcggcttcgataacaacgaggaagccccctacctgcagattccgctgaccaccatggattcccgccttgactggacggctcccacggcagtggatcgcatcctcggacgcatcgacggcagcatcaccaagtccgaactgctcaccaccgaatcccaggtcatcgcccgcgcctccacacgctgaacgacattgctgtaatgctggtgctgctgcacgaagtcgttgttatatagatgtcccatggggcggtgatttcctcatggggcggtgaatccctcatggggcggtagttgaaaatggctctattctgcggaaggtaaaattttaccgaccgccccatgggcaagttaccgccccatgggattttcgccgccccatggatgtacgggtaaaggcggccgaattgcctcgtgccgcccccgtggatatgcaagttaaagagcatcggcagcatgactgaatgcacatagagcgtcccccgcatggttgtgccacgttccatggcggggtcgccgtggtgactgtcgccagtacacgccatgccacgcgagcacgttgttgccggtgttccatggcggaaacgtcgtgggcatacaccttggatgatggcgacgacgattccaacacagtgcccagtaaagtaaccgccgataacctcaagaaatacgacatcagcccgcaaggccaggccgatgagattcgcgcggtcgccgaggccgtgaacaatatcggcgacaatgatggcgatggcgaaaacgacggcctgggtgtgttctactgggagcccgcatgggtgcccgtgggcaccggcggcaaggcgctcgcctctctgcagacgttcaagtacattcacaccggtgccgtcaccgatcatgtgttcaccaagatagatccagtggagattaccgcgactgactcggattccatcgacgcgatcaaagcgcaattgccgagtgaggtggccgtacactatcaggatggggtggacgagaccgaaaccgtgacctggcaatccgctgcgcttgactggattcgtggcgcaggcacatacaccatcaccggcaccaccaacgctggccacgacgtgaccgtcaccatcaccgtcaccgccactcccgccaaggattacgtaacggacggcagcttcgagaacgctgagaatgataagaactggaccattgccggcaccggtgcgtccatcaccgaagacagtggcaacgccgccgacggcaagcgcgcgctgaagttttgggcatccgatgcctacagtttctccgccacgcagaccattgccggcctcgcccaaaaggaggtctccagcctgaccgtcacgccaagcaaaaccacctatcaggtgggcgatgccatcgatgccgaccatgatctcaaggtcgtgggcaactattccgcaggcatgggcaacgtgacgctttccgccgaccagttcacgctcgattacgatttctccgctcccgctgatgcggcgaaggttaccgtaacgctcaagtcgaatccgaatgtcaccgaaacctatacggttgcggttaccgctcgggccgaaggtggttccggcaacggctcggacggtgcgggtaatggcggggctactatcaatcccgatacgggcgagggcgataagaccaacggtgcgaatggcgacaagatcactggtgtgctgagcaataccggtagcgcggtgactgccgtgggtcttgcggttgtcgttctcggcgtggccggcggggtctcgcttgctttgcgtcgtaagcgctcctgatagagactgatgcggcattatgatgcggttgccggcagccggcaaccggctgccagatgccatctgtcggctgtcgtttatcggttgtcggctgtcagatgcgtctgtctcggcgcagcgatgcgattctgtcccggttcgtgcatcaatcgtttgatgtgggtaccaggacagaaatcactgtcctggtttgcgaaaacgggtgtttttcgcgtaccgggacaattcccgttgccccggtttgcacgtcaatcgttctacgtgagaaccgggacagtatgttgatttcgggattggctgtattccgccgattctgtttgtcggggtatgtggactttggggattgtcttgtcctggttctcgaaaatggcccgaaattgcgtactgggacaacgatttctgccccggtgcaaacgtcaatcgattgacgcctgtaccggggcaaattcgcgcccgggaataatagggcgagggccggtcgcaggagtagagcgtgatgttgtcatgattgcgcccggctctcccacacggaaggccgggcgcaatcatgccgtttggttgcagcacccgcacatcgcctgcataaccgtgtacagtggcgtgtagttgcagtacatgaaggagcatcacaagccatgaccaacggacacatcaatcccgccaacgtgccggacatcgccttgaaagacggccattccattccgcaggtcggccttggcatgctacgtatcgatgacgagggcgtggcccctgtcgtcgaatccgcgttggaagccggataccgccacatcgatggcgccgccggatacaacaacgaggccggcgtgggtcgtgcgctcgccgcttccggatacaacaccggcgccaagcgcgagaccctgtgggtcaccaccaagctgcgcgactccgagcagggctacgactccgcgctcaaggcattcgacaactccctgaaactcctccagctcgattacgtggacatgtacatgatccattggcccacgccgttcgactggcgcagcaccgacacctggaaggcgttcgtcaagctgcgcgacgaaggcatggcacgcacgctcggcgtatgcaacttcatgcccgccgatctgaagcgtctgcacggggagaccggcgcatggccggccgtcaatcagattgagctgcaccccacgtggcagcagcgcgaagtggtggcgttctgcaagaagcacggcatcgccgtggaggcctactcgccgatggcgcgtggcgccgacctcaacgccggcgacggcaccatcgagaagatcgccgccgcccatgaggtcagcccggcccaggtgattctgcgctggcacatcgaaaacggcacgatcatcatccccaagtccgtgcatgccgaccgtcagagggagaatctcgacctgttcggcttcgccctgaccgccgatgaacacgctgccatcgacgccctcgacggccccacccgcgccggccacgaccccctcaccttcacctatgcgtgattgatggcacgtcgtaacgcccacttccgccgtcgtttcaacgcctctggaccgctggagcgcgtgctgattctcatcgttctcgccgtagcaatcggcgtgaccatcggcctgttactgccgcaggtcagctccgacgtggccaaaatcaccggtggctacactgccaccggttcagccgccgacactttgaacgcgctcgccgtagacgacaaccaaagctcctccggctacgaccgcgattccttcggtttccgcaccaccgacgtcgacggcaatggctgcgacgtacgcgacgacgtgctcgcccgcgatctcacggacatcacctacaaatacgccggttcctgtgtggtcgagtccggcacactggccgatccgtacaccgcccagaccatccatttcgtacgtggccgcgccaccagcgccaaagtgcagatcgaccatgtggtggcccttgaaaacgcttggcaatccggtgcgcacgactggtccactgccaaacgccatgaattcggcaatgacccctataacctgctggccgtcgacggtccggccaatcaggagaagggttcggcttccgccgcctactggctacccaccaacgccgactaccgttgcgactacgtggcccgccagattggcgtcaaagacaagtaccagctcaccgtcacctcccaagaaaaggacgccatgctcgccgtcctccatacctgcccgggccaggccgtgcccgcagacgaataggggctaccgctcaggattgttgagcataggtgcctgcccctcgtcataagcgcgcaggagccgtcggagcaaaaatgtggtgaagtatggtgcggtgaacacgtgttcgctgctaccgatattgccggcggatagtttcacgccgaactgaatttccggataagaatccgaagcgattagcgtccgcatggatttggcggtgccttttttcgatttcacctccaccggcaccagccattcgcgcgtgcggacgaagaaatcctgttccagtgtggaatcctcttttttgtagtagtacaggtcatagccggatttccgtagcgcttcagagacgatgctctcgtacatagcacccttatagacaccaagattacgattggcccgcagatcatcactggcctcgtcgtcaagcatcgctacgaacagaccggtatcgccgaaatatatcttgaacttgttttcgtcataattgcctttcaacggcagttcaggataggacatacatcggcagatattcaccattcccgaggtttcaagccattccacgcatcctcgatagtctttgaaacgcgctccgctggcaaccttgctgatttggaacttcttgttttccttggcgagttgcacgggaatatggttgaacacgttgagaattcgtgcctgatcgagtccttgcgtgtatttgcggatatcctcctggtagtccaaaataagctggcgctgcaattgcagtgttccctcgaacgtgccagtgcgtatatgggaggcgacaaccgcaggcatgccgccaagcacgcagtaatccataaatgccgtggagaagacgttcatttccacttcagagaatggcgtagcatcacacaggtgggtgaacatgctttcgatgacggcctcatcgtatccgcgagcccacagaaattcttcgaagtccaacgatcgcatttcgtagtcggtcttatatcccacgctattgctttcgatttgcttatagctgatgcccaacattgaaccgctgcaaatcacatcatatttgccgtcgattttaaagaacttcagtgcagtggcgatatcaggatgggcctggatttcgtcgaaaaagatgagcgtatcgcccggaatgaactttttggctgggtcgatcagggaaatattgcggacgatggtattcgcgccataaccgtccgcagtgattgcacgatatttcggttcctcaacgaagttgatttccactaccgaacggtagttgtgtgcggcaaagtaatcgatagtctctgtcttgcctacttgacgagggcccttgatgattagcggggagcgattcgggtcggatttccatgcattgagataggcatcggctttgcgtttgagatacatgaggagcccctttccgaattactgctatatcaatgattttacactttcatgagcgagttttctaccgtctggcacatttcatgagcgagttttcggaggtttttcacatttcatgagcgagatggcgggagatgtcagctgccagtccgccggtcatccatcaatcgtccgcagattgtccgtctgttgacgcgggaaacatgcctgcgctataactgtgcgcggtatgaagggaacaggtacaaacaatatggcagtaacacacaccgaagcagatgccactgcggcaaccgctatgacgaacgctgtggcagacatcgaacaggaaacaccggaaatcgggaaggaacgccagcttgccggagtcggaaccggggccggagcagggacgaataacaataagaagccgcatgaccatgcgctggccagtatccttggtcccgcgttcgtggcggccgtggcctacgtcgatcctggtaatgtggcggccaacatcacctccggtgcgaggtacggctacctgttggtgtgggtgctggtgctcgccaacgccatgagcgtgctcatccagtatcagtccgccaaactcggcatcgtgaccaacaaatccctgccggaactgctgggtgagcgtatgagcgacgccggccgattcatgttcttcatgcaggccgaggtcatcgccatcgccaccgatctggccgaggtgatcggcggcgccatcgccctgaacctgctattcggattgccgctgttcatcggcggtttggtgattggcacaatctccacggtgatgctgtggttccaaggtggcaagacgcaaaccacgttcgagcgcatcatcatcgtgatgctgctggtgattacattcggcttcatcgcaggcctgttcgtagccccgccgaaccccggcgaagtggtcaaaggcatgattccacgcttccaaggcgccgactcggtgttgatggccgcctcgattctgggcgccaccgtgatgccgcacgccatctacctgcactccacgctggtgaacgaccattacgcaggcggcgaaaagccgtcgatcaaaacgcagctgagaggctcgaaaatcgatgtggcctgggcgctgttgctggccggcaccgtgaatctggcgatgctggtgctcgccgccaactcgctgcatggcatgtctggcacggactccatcgacggcgcacagcgggcgatcacgcaggtgctcggcccggtgatcggcacgatcttttccatcggcctgctggcttcgtcgctgagctccacatcggtcggcacgtacgccggctcggaaatcatgcacggtctgctgcacgtcaacgccccgatgtgggcctgccgcgtggtcacgctggtgccggcactgattgtgctgtggttcgccaaggacccgactcaggcgctggtcatcggccaggtggtgctttccatcggcatcccgttcgccgtgattccgctgatgcgatacacgcataacaaggaactcatgggcaagtgggctgatggaaccgtcaagcacgtgatctttatgatcgtcgtggcgctgattgtggcgttgaacgtgctgctgattgtcctgacgctgatgggcagggcgtaatagactccagctgaaatcctgcgatagcacaacataataagaagccccggtgttggaaaccggggcttcttattatgttaagaatggttgaatctgccgtcagttcgcagccatacgccgcgcacgccgttcgcgcagcgcgcgcaaggaaataatgtctcgcgtacgaccggcaccgtcgcccttgacgccgaagaacaccatcaacaccattgccagacagatcattgcggagatgcgcagcgcccattgaatgccaaaaatcgaagcggcgacggcggaggcgccgccctgcttatgcaaagcggcaaacgtttccatcagaatcaccaacacgggtgcgcccacagcgcccgcaatctgacgcgcggtattcgtcaccgatgatccggcggacacttcgctcggcccgttcaggcaattcagggaccacgtggtaatcggcatcagcaggaaacccatgccgatctgacggatgaactggcagatcgatacccaccagatccacgtatccatcgccaccagcgacatgcccaaggtgccaagggtcaacacaatcgaaccgaacaaagccacgggtcgtgcgccgaatcgatccatcgcacggccgccgaagaactgggagatgcactgaccgatagcgcccggcagcatgatcagaccactcatcgtggcagaatacccacggtcggtctggatgtagagcggcatgatgaccagaatcgaactgaaggcgaaaaatgccagcgacgcggtaatggtgccgacggtgaacgaacggttcttcagcacttccaagcccagcagcggcggctgggggagtgccgacttgtccttggctacggcctcacgatagcgcttgccggcgcgcaggttacgcagcacgaaccagacaatgccaatcaggcccactgccatgggcccccacgttaccggtgcggcgaacccgtaggcctccgaattggtgaagccgaacatcagcccgccaaagccaatcaccgacaggctcaccgagaaaaagtccgcgcgggcagacgggtcatgcgaaccgaaattatgcagtccgaacatggccgccaccagcgagaccacgccaatcacggtcatggtcaggaagattgaacgccagccattggcgtcggtctgccagccgcccaaggtggggccgattgccggagccacgctcatggccatgcccacggtgcccatagcaaagccgcgtcgggacagcgggtagatggaaaacaccgtgatctgcagcaccggccacatcacgcctgtgccggcagcttcgagcacgcgcccgaccagcacccatacgaagtttggccccaaccatgccagcagggagccgaccgtgaacaccgccatcgagcagattacaatctggcgggtggagaaacgacgggtcaggaacgcggtcagcggcaccatgacgcccatgaccagctggaacacggaggtgagccactgcccggtggttacggagatgtggaattcggaaacgataatcggcagcgcggaactcagctgcaactgcgtgaagttgcccacgaaggtaataaaggtcaatatcgcgatggagatgaacgccgcccggctgagtttgccgtctacatatgattcctcgcggctcagcacccgctgcagttcgccgcgacgatttttgattccccgagctccgttcattccactcacgtgcatactccactctcgctgatcgaccgcaacaacgcatcaggcagtctctcaaagcaaccccaacacgctacacccaggggtagtccgtcgagatgcaatgccgagatgactggccgcccggttgcagagcaaattagtcccgttattcgagacgtcaaaatgaacgtagttactatccgatcacgttcgctatgtggttttccaacacccccccccctagcggttaggggtgtgatgtctgtaccatgttgaaggggtaaccccgtatacacccgtacacaggggaatccagaggagtgagagccgcgagacctgcggtatacggttgaaaaggaagaattggtgtttgagatgtcatctctgagcagtaacggtcagccgtctacacgcagcagacaggccaatagcggtgaccgaaccaccgctcagctcagtgatatccgccaaaagcagctcagccacgtgctgtactggcgattcttcgtcaatctcgccctcatgcttatcgacgccgccatgtacatcatcgccggagccacggtgctcaatctgcgtcatgaggcaacgccgttctattcgagcagattcaatttcacgattgactccaccgtttactttatgattgtggcctgcttctgggtgtggtcgctctatgtcgtcggcatttatcatcgccatgttatgggtgacggttaccagctcaatgtgctgctggtcaaaggcatggtcgtgtgctgggtggtgcagtgcgcgttcaactacttcttcgatctgggtctgacccttacctcgctctgcttggtggtgattgccggatggttgctcaccatggtggaacgcattgccagccgtgcattcattacgcgtagtcgtcgcaagggcgcctacgcttacggcacggtgatcatcggttccccgcacggcattggtcgcacgctaaaattcctcggtcagcgtcggcaactcaactaccgcccggtggcagtatgcccgattcatctcaatcccgataccggattgattgaacagagcaccgaccatgagacactccgtgaggagatgcaaaagaacgagggctgccagctgcccgtactcgagtacagcgatcataatcttgctgaacagattattgacatgaacgcgcagaccgttatggtggctgacgagctgcatcgctattcggataattacgatatcttctccgtgcgcatggaatcgttcggtctggagattgccgtgctggcttccgccgctgacacttctaaccatgagattcaggttcgatccatacagggcaccacgattatcacgcaacgtcttgcgcagtacacgccagcccgccgtatggctaagcgcctgtttgacttggtgatttcttcgttagcgatcatctgttcgttgattatcaccatcccggtggcgatcgccatcaaagtcacggatggcggaccggtgttctacaagcagacccgtatgggcctgcgcggcaagccgttccagatgtacaagttccgttcgatggtggtgaacgccgacgcgctcaagaaggagctcgcaaaagaaaccggccagaccgaccgcttcatcttcaagatgaagaacgacccacgcatcaccaaggtggggcatttcattcgccgcttctccattgacgagttgccgcagttcctcaacgtgtggatgggcgatatgtccgtagtggggccgcgcccgccgctgcctgaggaatacgcccgttacaaccgtctgtacgccacccgcatgctggtcaagcccggcatcaccggtccgtggcaagtgtccggtcgctccgatttgtctgccgaagagagtgaggcccttgatgtggcttacgtgcagaactggtcgattatgggagacattgtgcttctcttccgcacggtcggtgccgtgctgagtcacaagggagcgtactgatttctttccgtttcgctgcttcagtcttgccgcgcccttgccgcaccgcccttgaacgtgattacagaaagataagtcgatatatctatgactgattcgaacataccagaaatacctcagccgccggcaccctccgagcggtcgaaaaacgcggatgatcgccaagtgatacagccgtatgttgaccccgaggtacttgctgaagacgtccgagcggcagaacggcgtaagcaccgccggcgtatgagccatgaacatatcaggcggatcaagcgcaaaaagcgcattcggatggtgctgattgtaatcggcgcactgctgttgattattgcagcgctcgcggcgtggctcggactttccgcgctcaaagcgaaaaatgaagtggaagcagcgattcaggccgcaagccgcatccaatcacaagttcaagccggcgacaccgacaaagcgcaagccagcattgaagcattctcccagcatatcgacgccacgtatgcgcagaccaagcagccggtatggaaactggccacattggtgccctattacggttctgacgtgaaggccgcgcgagacatggtgcacattttggaagacgtgtcgaacaacgcattgccgaagcttgccaaggcggcacaggccttggatttcaacagcatcggtatcaaagacggcacgattcagctgggggatatggccagcgtggcacaggatctttccgccgccaatggagtagtggcggatgccagcgtagacatgggcaagattggcgatacacatattccgcagattaccgaggcggtgcagcaggggcgtagcaagttcaaggagcttgccagcctgacggatacggccagtcggctggcggatgtgctgcccaagatgttcgacttggatagcagcgagggcagtagcagtggcccgcgaacctacctggtgctggcacagaacaatgctgagctgcgtgccacgggaggcattccaactgcgtgggccacgctcaccgtcgatacaggcaaaatcagcatgagcacgttcggcgatccgcctcggaatggtctgttcagccaggatgaagccgcgagcgtactgacggcggaagaacgcaatctcttctccaccaagatggccacggactacccggacatcaatttcactcccgatttcccccgcgtcgctgatatcgcgagtcagatctggcatcgagccggtcatgacgatgtggatggcgtcatcagcgtggacccggtgttcctgcagcggttattgaaggttgccggccccgtgacgctctccgacggcacggtgatgagtggcgacaatgccgagcagcgaattctgaaccagatttatattgataccgatacgcaggcggagcaaaccgacttctttacgatggcggccagtgagattttcactcatatgctcaagaatgtagacggcaagaatcagcagctggtgcaaacgttccagaagtccgtatccgacggccatctgtatgtatggagtgctcatgaagatgagcagcagcgtatctcgggtacgaccatcgccggcgaattgcagtcgaacccggttcatccggttgcgggcgtgtacttcaacgatgccactatgggcaagatggactggtacctgaagcgtgaagtgaccagtacatatgacaaaacctatcccagtggcgccaagcaatacaccattcacatcaaactgacgaatacggccgatgccgccaaggtgaatgccgctccggatctgttgcgtggctatgaccataacggcaacccccgtacaggggagatcgaaacggtgctgtacgtctacgcccccgatgaagggcgcattgtggattggacccaggatttcgatcagctcgctgtgcacgatggactgacggtgggtgtgaaaaccgtgacattgcggccgggggaaagtttcgagaccacggtgcatgtgctggccagtcccgcggccgatgagaatgaaatgattttgagacagacccccttggttgattaaaggggcaacccctatacattaaggtggaaccatgaataaggaagaacggagcatagctgtggatgaagctgaacaggtgcaggatggtaatggagtcaccattctcgatttattcaatgtggtaagaaggcatgtgattaccgcagtggtcacactggttattgtgatggtggcaatctgcgcgtacacctttacctgcactccgcaatacaccgcaacttccgaactcttggccacttatcgcagttcagcggctgcgtcgggcgcatccagcaatgcaggcgagctgagctctggcgccaattacatcaatagccagattcaaacgtatccgcaattggtaaaaaccgagtctgtattgcagccggttattgacgatctgggtcttgacaccacagtaaagggattggctgcgagcgttaccgcttccaacccggatgacaccatgctggtggatatttcggttaataatccagacccgaagcaggcgtccagcattgccaattcggttgccgaaaacctgagaaaacaggttacttccacgatttacagcgatgagggcgataagatcatctctcccgtcaacctaactgtggtgcagcaggcgtacgctccggcttcccccagctcacccaacgtcaagctcaatctggcggcaggtcttgcggtcggtgtcattctcggcatcgtggttgcctttatcaaggatttgctggacacccgtgttcgccgcgattctgatgttaccgctgttatcgatgctcccgtactggggtcgctgagccgcaatgaggcttatgtcggtacgtcgccggtgattatctcccgaccggcctcccgcgaggcagaagagattcgacgtctgcgcaccaatgtgatgttcgtgctgcccgatgagccgttatccaatgtaattgtggtgacttccgccggcccgtccgaaggcaagaccacgctgagcgtgaacctggcgactgcattcgccgaaaacggtagcaaggtactgctgatcgatgccgatgtgcgcaacccctcggtgagcaaggctctcggcattgagggcgcagtgggcttgacccatctgattaccaaccgtgtatcgtcgcatgatgcgattcaacgctactggaagccgaacttccacgtgcttcctgctggaaaacaaaccatgaaccccagcattctgctgaattcccgcgctatgaaggcactggttgagcaggtttccggagcctatgactatgtgattatcgacaccgcccctatgcaggtggccaatgatgctgctgtgttcgctaaggaagggccggaactgctgctggtggccggcttgggagtgacggagaagaaactgctgaagcagacccaattagagcttaataccttgaatattcaagctgtaggtctggcgatgaattatgcggaacctgataaggcgcacaaatctggttattactactactacggcgaagaaagcgatgacgaaaaaagtaaaaaacataagaagcagcgcaagaagaacgaagcaaatacagattgaaatgcatgaagattcgaatattcattgagtgttgcctgtttcgctaaataatcacgttattaccataagaaaagataaggaagaagagatgaaagatttcgattcactcaagatagctgttgctggtacaggatatgtgggccttagcctcagtgtcttgctttcgcagcatcatcaggtcactgcggttgatatcgtccccgaaaaggtcgatatgattaattcgcgtaaatctccgattcaggatgattacatcgagaaatacttcgcagagaagaagctgaatcttaccgccactcttgatggcgaatcggcttaccgagacgctgattttgtaatcatcgctacccccaccaattatgacagcaagaagaacttcttcgatacgtctgccgtggaagccgttatcaatttggtgatgaaggtcaatccgaatgcgattatggtcattaagtccacgattccagttggatataccaaggccattcgccagaagaccggctccaagaacatcatctttagtccggaattcctgcgtgagtctaaagccctgtacgacaatctgtatccgagccgtatcgtggtaggcgccgatccggatgatgctcatctcgttgaggcagcgaagacttttgccaaactcctgcagcagggtgccatcgaagagaacatccacacgttactcatgggcttcacggaagcagaggctgtcaagctatttgccaatacgtatttggctttgcgtgtctcctacttcaacgagctcgacacctatgctgagtctaagggcctcaaaacccgtgaaatcatcgatggcgtttgccttgacccgcgtatcggcacgcactacaataacccgagttttggatatggcggatattgcctgccgaaggacaccaagcagctgctcgccaactatcaggatgtgccggaaaatctcattaatgcaattgtcgagtcgaacgttacccgcaaggacttcatcgcagacagtgtcttgaagaaggccggctattacggatacagcgataacaatgagtacgacgctgcggatgagaagccgattaccgtaggcgtatatcgcctaaccatgaagtcgaaatctgataatttccgccaatccgccattcaaggtgtgatgaagcgtgtgaaagcaaaaggcgcaacggtcattatttatgagcccacgctggaaaacggtacgaccttcttcggctccgaggtcgtcaatgatcttgaagagttcaagaagcgtagcgatgcagttcttgccaaccgatacgactcttgccttgatggtgtaaaggacaaagtgtacacgcgcgacctgtttcgcagggactgagcggagttcgaacaatgagcaggaagtcaccgaaattgtgttttgcggcatcatcgggagggcattacgagcaactgatgatgctaaggccgttgatgcagaagtatgacagcttcgtactgaccgagaagacgcaataccaggcgaaggccaagggtgaaagtacctattatgtgggacagattaaccgtaaggaaaagactgtattgcttaagctcatggccaatgctttccactgcttcggtattttcctcaaagaacgtccggacgtcatcatctgtactggcgtactggccatgttgcccatgtgtctgctcatgaagctgttcggcaaaaagctcatctatatcgaatccttcgcgaaggtgacttccgccaccgaatccggcaagctgctgtaccggttcgccgaccggttctatgtccaatgggagagtatgaagagcatctatccaaatgctatctacctcggcagcatctattaagcggacggattgggagacgaaccgtatgattttcattactttgggatcacagaaattccagttcgaccgactgctgaaggcagtggacgaactggttgcggacggcaccatcacggaaccggtattcgcacagagcggatacagtgactatcagccgaaacattacgcgttcaagcagttccttgaccgtgacgagttcgccgagcagatgggcaaagccgatatcgtcatcacgcatggtggtacaggtgcgatcatcggcgcggtgaagaaaggcaagaaggtcatcgccgtgccgcgtctcgccaagtacggcgaacacgtggacgaccatcagctccagctgctcaaagagttcaagcagatggacatcatctgcgtgtgcgacgactgctcgcagctcgccgcggccttggacgaggtgaggcataccgaatacaagccattcgtctccaacacgaagacgatcatcaactccatcgacgggttcatccgttcggaggtgatgggcgaagcctccttccgtaaatcgaggaatatccgtgtcctcatgatcggcaatgatccgtccgtcaagggcggcattaccagcgtgatcagtcagttgcttgaccatgattgggcggccgacggcgtgaacatgaagttcattcctacgtatattgcggcgaacccggtgaagaagattctgttcttcgagaaggcgttgcgtcggattcgtggactgctggcgaatacgcagacccgaccggacgtcgtccacattcatatgtcgtacaagggtagtttcgtacgcaagtacgaggtgcacaagctgtgccgcaagtatggtgttcccgatgtgattcacatgcacggctccgaattcaagaaatggtacgactcgtgcaagccggcgcagcaggagcgtatccgcacgatgctgcgcgaggcttcgtccgtaatcgtgctgggcgagcagtggaacgaacgcatcacggcgatcgagcccgccgcacgtaccgtggtggcgagcaataccgtgcatattcccgatgtgaccgttcattggcccgccgaaggagaacgcttccaggtactgttcatgggcgttctgatccagcgtaagggtgtgagcgatctgctggacgcggtggcgaaactgcgcgatacgggacgtctgggcgacatgcgtgtggtggtcgccggcacgggtgctcaggaggacgagctcaaggagaaggccaagtcgctcggcctgaccgatggtgctgtgcagttcgccggctggattgatggcgacagaaaacgtgagctgttcgagaacagccaagcgctggtcttgccttcctacaatgaaggcttgcccgtcgccgtgctggaggccatcagctacggcatgccggtggtcgccacggacgtcggtgatatcgcctctgccgtgcatgacggcgagaacggatacttgattgagcagggtgacgtggatgcgttggcggacgcgctggcgggcatcgacgataagacacggtatgagcgactctcctgtgcttcgcgcgaactggccgagcgcgagttcaacgatgcggactatttccgcaggatgaaggatctgtaccgtcaggcggcgaaggaggttcagtgaaaaagctgtccaagtacatcgaattcgccaccacactactgaaacaggccgtgcaggagcgcaggttcaggtacagcaacaccacgctgaaatacatgtaccaaccatgtaaaggttccaatcggttgctggtggtgttcagcgcctgcacgcgtccgggtattcccgcacgatacaactatatgcgtacgttgaaggatgtaccggtcaacaggctgttcatcctcgatgacttcggcgaggaccaccgtggcggatactatctcggcgcgtatcccgatttcgagatggaaaaggccaccaaggcgcttatcgacaagttcatcgcgcgccccgagatcagcaaggtttgcttcggcgggtcttcaaaaggcggttgggcagctctcaatttcggtgtgcaatacgccggacgtggactcggtgccgagatcatcgccggtgcgccgcagttttggcttggacggtatttgaacgcaccggccaatatggtcacatttcgagacatcgctgccggtcatgatcatgatgaggtgacgcgtgttcttgatgggtatttgctcgctcgtattaagcagagcgttcccgacaaggcgcagaccgtgttcctgcattattctacggaggagcatacctacatcgaccacatcaaatatctgctggaggctcttcgcaagcgggagtgcatgctagttgaagacgtgcagtcttacaaagaccatggcgaagtaagcatgtatttcccgaagttcttcgtggattccgtgaaatcgttgttgtgagtgtattgcttgaaggtgattgtgatgttcttcgatactaaagttcgtcagttgcgcatcaggaagtgggtgcgtgaaggtgcaaccattggcctgaatttccaacttgagcggggctcattcctcgattcctccttcccatggctcattaccatcggcaataacgtcacgttggctccagatgtgctggtgctgtgccatgatggcagcaccaagaaagcgattggctattctaaggtcggtacggtggtgattggagacaacgtatttgtcggggcgaaaagtgtcatcctgcctaacaccatcatcggggataacgttgtgattggtgcgggcagcattgtcggtggagagatcccatcgaatacggtggtggccggtgctcctgcgaaggtcattcaaagctacgaggagttcaaggccaagaatgaagcgcgcatggcttcgggacatgccttcgacacctcatacaccaatcgtggtggtgtgacccgggaacgcaaaggtgagatgcgccaaatccttgacaacgattcacatggttttattgtgtgagaggaaaagcagtgagtgcaagcccattaatcagcatcatcattccggtgtacaacgtcaaacagtatctgcggaagtgcgctgatagcgtgctgcgtcagacatacaggcaccttgaaatcattctggtggatgatgggtcgacggattcgtccggcgagatgtgcgaccgcttggcgcgtcaagatgaccgcatccgtgtggtgcacaagcggaacgctggccttggcatggcgcgtaacagcggtttggatatagccaagggtgagttcgtgatgttcgtggactccgatgattttgtggatacgtgcatggtggagaaattgtacgcgcaactggaaaagacgggtgccgacaccagttactgcgggtatagcgaatactatggcgagaataatatcaaaccgcagccggcggcatacaacaatcgaacattccgcgaacgcgacattatcgatcatgtgctgcttgagatgattgcgggcgacccggaggccaataaggaggcgttgctctccatgtcggtttggcatgccctgtattcgatgcaagtgattcgtgtacatgacatccgcttcccgtctgagcgtgagttcatttcggaggacatcatcttcgacatcgcctatttgcagcatgcggcttgtgtgacctacattgccgagcctctgtatttctatcgccacaccaataatgcttcgctcacgcattcctttgacgaacgttttctgaatcggcaaaagaagcagtacgcgcgtatggacgaagacctgagcaagattcgcgccgttgatgcataccgcatgcgactggatcgttatttcctaggccgggttcgtcatttcatcggcatggtagttgcgcatgggcgcatccatagggattatgacgcatatgcgacggtgaagcgtattatcaatgatcaggacgtgcgcacagtcattgatcgatatccatactggcgtaactctttccagctgaagatgatgaatatgtgcattgcgcatcgttgggcgctcgcagctataatgctggttttcctgaaacaattaaaaaagaaccgtcggttctaatacgttatcgaatgagggttgaggtgaacctatgcagattgcgactcggaaagaactccgtagaatactctcggaagagaagttgttgtatctgggccgtcgtgggtggtatcaggagctgttgcgtttgctgaagtcgcatcctgattattatgcgtggaagtacgccaaacgcatgcgcattacttgttattattatggccgtcgtagaaataatccatactatgcgctgaagtatctgctcagttcacgtcgtatgaatgctttgggacgtaagcttggaatagagtgtggcgagaatgtatttgatgaaggccttgtcatctaccatacgcaggggaacgtgattaacggcaatgcgcgagtggggaagaattgtcgtctttatggcaacaattgcattggcaatgacggcatacattcgacatgcccagtgattggggacaacgttcgaatttgtgttgacgcaaaagtgattggcgatgttcgcattgccaatcatgttgtcgtggcagcaggcgcggtagtagtgaaatcgtgtgatatagaacatgcggtgctggctgggatccctgcaaaggtcattggcattaaagagcactcgaggcgttttctggactgatgatgagagtaagaagcaaggccagtcgttcctgggctgattttaatttgggccgaatccgggagttgttccgtccttcgtcgcggcatgcaacgtgggtgttgtgcgcgcaagcttattttttcttctcgtattctttggtgtacacgttcagtttgccgcgcatgttgttgtacgtcaatgatgctctgaacgttctcattttcatttttgcgctgtatgagcacaggaaaacggcgcaatacaccagtctgatcatcggtctcatggtcttgtactgttccttcggtgttgtaggcggaatattgaatgctgagaaaccactggcattgatatggggataccggaatgttgttcgatatttcatgtatttttatacctgtatcgtctttttgaagaaatccgatatcgatattgtgttgcgtgtcgtttccatcgtgttctgggtgtcggtgccgttgtgcgctgtggagaaattctttgtgcagtatcccgaaggaacgattgttggtgatatggtcggtggtgtattttggggtttttctggtagtaacttaccgctgaatcttaccatctgcctgtatttgattctcgtatcatcgcgctattttgatggattagtcagaacatggctctttgtaatgacgcttgttgccgccacattcatggcctcagctgcggagttgaaggtttattttgcggagatgattattattctcatcgctgccatgatggggaagggaatatcatggcgtatctttgtcacgatgcttttgggtgccggggccttggtggcggcgtcttcttatttcattctactgaatgcgggaacgtctacaacatatgcctccaattacagtctgcaaggctatattgactatgcgacccgagactcgggttatacgggttccaatgatttaaaccgtttcactggcatcggcacggttgcgatcacgatttttaataatgacccattgaaactcttatttggaattggtcttggtaatgctgactacactaatttcttcagtacctctttttatgctcaacataatgcgatgcattatcagtggttccatgccatatggatgtttatcgagaacggatatgtgggtgtgattctgtatttggcgattatcatcgtcgcttggcatgcatgtgttacgtatattcctgtcggtaggatgcggacgatgacgtgtgtgacatgtgtccttatgattgtactgttcttctataacgtcacactccggatggaaccttcgggttatctgttgatgctcatcatcgcgattccgtatatttacgcattcaaaagctgcaaagcgcaacgaaacaaacgaaaggttattcaatgattcccaaagtcattcattattgttggttcggtggtgctccattgccggagaaggaacaaaaatgcatggaaagttggaagcaattcgctccagattacaaaatcgtaagatgggatgaatccaattatgatgttcataagaaccagtacatgggcgatgcatacgatcgaaagaagtgggggtttgtacctgactatgcgcggttcgacatcgtgtacacgcatggtggaatctaccttgataccgatgtggaattggtgaagccgcttgatgagttgctaacgaacaaagcttatatgggctttgaaagcggcgagtggattaatggtggcattggctttggcgccgaagtcggcaaccctttgattcaaggtctgcgtgatatgtatgacgatttggtcttcgtggatgaacagggcgaactcgacctcacgccgagtccccattacatcacccgtttcctgatgacccacggcttgcgtcaggacaatacaatgcaggttctcgatggagaaatgacaatctatccgactgactactttgcgcccaaggattacctgactggcaagatcgacatgactgccaacacgattagcatccatcagtactccgccacatggcaaccacctaagaagaaaatcgcgcgtacaatcaagcgattggttggagagaccgccttcagcaagttggtctcgatcaaaaaagcattcagtaaatgacgtgtgatgaaacgacaaagggttgtcatgatattaaagcagttgattcgacgtgcaataattggagctaaagcagattcaccttcctatgtgtcatttttgcgtaaaaaaggtgtcaaggtgggggagaggactacgtttttctcgcctaccactaatactattgacctgacacgcccgtggttgttgaaaattggtgatgatgtgcaaatcaccaatggagtcaccatactcactcacggctacgattggtcggtgctgaagggtgtctacggtaaagtcttgggatcctcaggcaaggttgtcatcggcaacaatgtgttcatcggcatgcaatcgactattctcaaaggtgtcaccattggcgacaatgtaatcatcggtgcgaacagtctggtgaacgtcgatattcccagtaactgcgttgccgcagggaaccctgttcgcatcatttcaacgctggaagcctacaaaaacaagcgtgagaagcggcaatatgacgaggcggctgaattagttcgcgaatatcgcacggaatacggtcgggacccgggcgcacgggagctgcatgagttcttctggctattctgcaacgatccggagcaactggaggagccctgggaaagagtgatgaaattggttggcaacgaatccatgtccaatgagtgtctgtgtcgtcataagccgatgttcgacagcatggaagagttcctcgccagtgtgcagtagctgtgcacggcatccctaaccgcgacgacgaaaaagaagaccatgattaagagaatctgtttcttcaacggcgtgattgcccactccggaggtacggagcgtgtgggcatcatgattgctaacgcactcgcacagcgtggcttcgatgtaaccatcctgagcttctgggattacgggcaaccgtttttccacgttgacgggcgggtgaaggtcgattatttactcaagccatccactgaggggaagctataccgcacattcatctacccagtgtggaagctgcgtcggtatatcaaaagccatggcttcgatgtgttcatcgatatcgattcagtgctcgcttattggaccgtgtgggcattgcacggactaccatgccaccacatcgtctgggatcatttcaactatgtacatgcacagaccgaacccagacgtaccaaggctttgcatctcatccgtaatcatgcggacaggcttgtcctgctcacgcggcaggacaagcagatgtatcttgacgctggttttccggaacgtcaactgacggtaatcaacaacccgaccccattcgaagacgtgactccgtcgccacgttcggagcaccgcgtgcttgccgtgggacgacttaccaatcagaaaggctgtgatcgcctcatttcggcatggtcccggattcaccggaaggttggtgactggagactgactttcgtggggtcgggagagcttcatgatgacttggtgaagcaggtagaagatgctggaatagacaacatcgatttcattccggctacccaagatgtgcaggaatggtacgacaaggcctccatctatgcattgtcgtcccgttatgaaggtttccctatggtgctgcttgaatccatgtccaaggggttgccgattgtcgccaacgactgcctgactggtccgcgtgaactggtgcatgagggggtaaacggttgtcttgttgctgatggcgatgtagagacattcgctgaaaaactgttgtcactgattaacgatcaagcgaaacaagacgagttctctcgtaacgcgttgtccatgtccaaggattttcatatcaagcctatagcagatgaatgggaggctctgattgatgacctcgcatgaatatggcgattctaatccattgctgtcttttgtcatcccggtatacaacagccaatcaacgattggccgttgccttgacagtattatttcacagatgaatgagtcgtacgagattatttgtgtggatgatggatcgacggacgacagtccagctattttggacgattatagcgagcgatacgacagcatatccgtgctgcatgtcgacaacaatggtccatcggtcgcacggacacgaggagtccaggctgcggcaggccgatacatagctttcgctgatagcgatgattattatgccgcagggcggctgtctcgaattgtgggacaactatgcgactatgagggatacggcatctatgtctttggatatctggaacgagacaagccgatggaaaaccctatggagcataggatatccaatcttgttgagaaggctatgccgatatcggagttccttgacatctactcacagcccgagaataattctctgatgaactacctgttcaacaagatgtaccgtgctgacatcgcaaagtcggtagattttgatcctgctgtttcgctcggtgaggatgctatctacaactatgcgtgttatgcatcctgtgatgatgtattcgtaagccgaacagcagcatatgtatatgagaattactctgctggctctctttcccgaggcaagcgactggactatgtttggacagcgtatcagacgattctcactgccatccgaccattgctgtccgaacacaagcttgaagaaagattccgcctgctgcagcgttcctatgcaatcagcgcgttgcatgaatacatacgcaaacgtgacattgcgaaacgggatcgtcatgcagtcaaagacattctgacgtttgtgcgtgctcacggttcttcttggtctcttgacggcgtgggaaccgttgatgctttgctggtgcgcagcgtcagtatggggtgtttgccattgggactgttgttgtgcgaaggcaagcgtttattacagtggtaagacgacgtttgaaactggtcgtagctgatacatgaaatgggagtgattggtagccatgcttagaaagaccctgttgatgattccgccgcagtaccttcccgtaccggctgtccacggtggtgcggtagagcaactgtgtacgcggcttatcgaggggaatgaacgtgatctgcgtttcgacatcgaggtgttgtcctgtcggggatgaactgctcgacagtttgtcccacgcacatacgcgtatcacacaggtgtcgccggggcttgcggatcgcctccattcctgcattcataacaaaagagtcttcgccagtttgtgtggtgaggggcggtgtcggtgtcgttgccgggttcttcctgtgtgcgggtacgaaaggggcgttctcctgttaggttcgtttccgccaagaaatagaaccgaggaacagagggaacgcctgtgcccaccatatcagccggcgcgctcaagcgcatgctgggcctgcccgcgaacgtcgtgaccggcgtgccgcgcatcgcgaaggacccgcatggcggggacgtcgtcatagtcccggtgcgcccgtacgcgaacgacatggaccggtgcgccagatgcggggagcatggccggccgtacgaccgtctgggcgtgcgccgctggcgtcacctcgacatcggctgcggctcatgctggagcacgcgccccggaggggcgattgcgcggggcacggggtgaccgtcgcgatggtgccgtgggccagacgcaagagcgcgtacacgcgcgatttcgaacagcagacggcgtggccgggcgtgcacgcgcccagaagagcggtgagccggctgatgcgcatggactggaagggcgtgggcccggtatgcagacgggtcgccgacgacctgcgagcggagcagggtccgggcctgttcgacgggctgcgttccatcggcgtggacgagaccagctacaggaagggccacacgtacatgaccgtggtcgtcgaccacgaccggggacgcgtcatctggatgcatcagggtcacggacagaaggtgttcgacctgttcttccaagcgctcacgcccgcccggcgcgagtcgatccgggcgggcgccggcgacgggggcgcggtgggtcgacgagtgcgtgttccgctggtgccccatggccgagcgcatcttctacggtttccgcatcgtctcctgggccaccgacgcgctcgacaaggaccatgaggctcgtctcgtggtacaactcgaagcgcctgcacgcctcgctgggctacaggacaccggaacaggccgagaacgagcattatcgaacacaggcggcacaagctgtctcatagcagaggcggcacaaaaatcaggccacttcagtgcgacagacgaatgcccatagtttcacccctcccactcacgaacatcccctaacttcgaacactaatgcttttggcacacaaagaatcatagacataggggatatcctcgcatccccccctacaactagactgccgcatagagtatgcacagtcttctaatgcacgacagcattctctcaaactaaaggcggaatcagtaccgcaaacggtagtctcgacatcaccagaggtagtccaatggcaaaagccacgaaaaaacagctagcgatcaatatgattgccaatgtcgttgcgttttgtgttcagtttggtgttaacttctttctcaccccatacattgtcaagcagcttggtagtgaagcatacggatttgtgacactttcctttaatatcgcaggcttcgccggcatcatcaccgctgcctttgactcaatggtcgctcgcttcgtgcttatggaagacgctaacggtaacgatgataccgcagccaagtacttcaactcagctctcatcgtcgatacagttcttgcggtggtgctgtcagtacccttcgggttgattgttatcttcgcttccgatctgttaagtattcctgttcggctgatagccgatgtccaacttgccttcgcttttgcattcttaggaacgctcatcaatcttgtgttcgcttccttcggatgcacctactatgttaaaaatcgcttcgatcttgaagctagacgaaacatcgagggcaacatcatccgggcaatcgttctgattaccttatttgtgatgctgccggccaaaatatatttcatcactggtacggtaatgattgttatcatatataattgtgcagcaaatctgtactataaacataaactaatgcctgagataccaatcactcctcggaatttcagatttgcatcggtgaaaaagctgctctcgtctggaatctggaattcagtcaatagtttaagtaccacattgctgaacactctagatatccttattactaacctgttccttggcgccgcattcagcggcatctacgcactggtcaaaaccgtgcctaacttcctaaatcagcttattgccatcctggtaaaagtgttcgtgccgaatatcaacatactgtacgctcagggaaaaaaggatgagcttcttcgcgaagtattgttctctgtacgtattatgggctttcttgtcacggtgcccatcggcttcctgatggtatttggcgaatcgttctacgaagcatgggtacccacccaagacaaccatctgttgcagtctctctctctactgacgttattcccacttatcgcctctggtatcatcagcgtaattgtcaacgtgtatatcactacgaacaaactccgtattcctgctttggtactgctgggagtcggaatcaccaacctcacactcgtgatcatcttcctcaaattcactgatctcggcatctggactgttccaatcgtcggcatgatcacccagctggcctattatgttggcttccagcccatctacgccgctcgatgtctcaatcttccctggtatacgttctacaagaccataggccttggtgcgatgtgtacgattactatggtcgcggcaggttcactgtatagaacagtgtttgatgtccatggctggattccgatgattatagccggagtcatctgttccatcgttgcaatgacagtcaatatgtttatagtgttcaataaacgagaacgcaggtctttgctttccaagataccgttcctgcacatccatcatgcggaacacagcgcataatattcacacacggtaacggcggtaccacatttaagagactatgttgtcaagctggattattttggttattcgctgtttgtggtgggtgatggtcaggtggtggtgacggctttgaggtcgagtttgccgcaggtcaggtagatcatggtggcgaagtagtccatgttcctgaagcctctcgcccgtcgtttgacgttctggacgacgctgttgacgccctcgagcacggcgttggtgtacgggtgctcgaagtaggcgacgatctcggcctcgaagtcccaggtgaacctcgacccgggctcggcccacggcacctgcgcgaccacgacgccgcacctcgggcagtccacgcggggcatcgcggcgaccagctcgaccctccagcagccgaaatcctggccacgccagcgccgcgcgccgccgccttggtcgtaaccgtgccggcgttcgccgcatcgggagcatctgagcatgcccgcacgtgggcgcacgcggatctcgagcacgggttcgggacgcaatggggagtcggcgacgcgcgcgtcctcgaccaccgtgcctttgacgttgagaagctggttgaatatgctgctcatcaggcgctttttggctgtgtttttcttggtcgttaaacatcctacccaaaaagcgctcttctcttactcccacaacggttcaacgacgaaccaccacccacgaaaacagcaatagcgccaaaaatatacacttatatacacatatatacacatatatacatgaatatgtgagttcaagcgaactgatgctacgccggctcgtccccgtccccatcaaacttgtgctcatcctcgtaggcaacgatgtccatatcgcctcgatggagtttcttgagtgtttcagccactcgcgcctgctcatcatcaacaacagggcgctcgccggctaagcatgtgagaccatcggacactgcggaaaaacactgccgaacccgcccaacaaacattgaagcaatacttttttatttgcttcgttactgcgtattctgtacttcacatgtgcgaaacgttggaattccgccaaaattttatttgcctggtatttgcttgggtgggtcgcaaagcgcggttgcggcacgattcttagtggtggtgccttatggcgtcgggctttccttgcaaatcgaggtaaggaaactggcccttaacccggaatttgaaaaagtaaaaggtccctggctgttcaccagccagagacctttttggtaacaactgaggttgaggaaacctcggcagttgggtccaacggggcgaaagtctgtggcgccgccgagaagattgccccgaagctagcgcgacctttctgctacaacacagcataccagcatccatcgaaccttccccgtacactggacagaccaaaccaaggaactactagcgtggcaccttggcacggtgtcattgtgccagcaggcatagtgactggttacaactaaagaggaggttctcatggaaggcaacgaccatgacaaccgtccgagatctgaccgacaataccgggaaggcctgatgacgggcctgttgatcgctctggccaaccaagttggacagggatggtcgacggctatcatcatcgccacactggtactgcttggattaagtctcagacgaggccgctgacttgtcagcggaacagccggaatcttttacgggttccggcccctcgtcttcaatcagggcaccatttcaaggcagaagaatcaggcggcctttttgcggccgcggcgcttcatggtgccagcggtggcgttggccacgtcgaagatcacggtcttgctttcggggtaggcggtaccgttgacggactggtaggcgatttcgccttccggagcctcaggcagagtgaagtatgccttcactgcttcaatgagcgtggcttccttgacgcttaccgaagcagcctgcttgccttcgggcttgctgaacttaatggcgttgtcggccttggcggtggtcggggtcacggcgatctgcctggtcttgtcgttaatcagcaccttgacgtacgccgggaatccgagcacttcagcggtggctttgttgaaacgaatggcggaatcggtgacggtcagaacggtcttgcccaccggcttgaccagctgaacctcttcgaatccctgaagcaatgaagccataattgctctccttattgcattggtcacgtgtttttatttacgtcactaattgtaaccagctaatttcgcattatacaaatcatatgcatgcatgattgcataattgaagaacatttgacctacgtattgcgctcctcgaatagcactgatttaaccaataccaagaaaagcggaaacaagaacccgcaatatcagccgtattgaatatagcaatatgcaatttcaacatcgcaataactgacggcctttttgcttgctctattcgccgatattgcattcaggccacagcgccgagcataatatcgacgccgtgcttgatctccgcatacacgcgttcaaacacctcgcgtgattgacgatgagggtcttcggtttcgagtgccgtaggcaaaaacggccgcagcataggtacgcaatccatgatttcgatgagcttgtctgcggcggtatcgccggcaatcggactctcagcatgcatatgtttgcaagcgttcacgaagtcattgaacagaaatactttgcgaatagccagtggattctgctcaagcaaatcggaaatttgctcacgctcaaaacacagaatcaggtcggcttgccggctgatatcggtggtgagaggggtggaagaatgggaattcgcgtcgatgccgtcgttcttcagcaaatcgataaccatcggatcagcgggatgcgggggatagtgcagagtacccgcgctgcgcacggtgatattgccgctctgcaagccaattcctcggtcggcaagcttggctcgggtgtagtattcggccatcacggaacggcattgattgccggtgcatacatacatgatttgcataacaacgtcccttctcaagtgttgtgagcattccctcatatattccagtgagcattcttcgcgaatatgcgtgcgttatgtaccgtagcaataacatgaaaaaaccgggaatcatcgactcccggttcagtggtattcgcgaactatgcttcagcgtctaccgtttattatgtcagtcacgtcagcgacgagtggtgctcttgcggacggcgaacagggcgatgcccgcggcggcaagcagcacaacggccacaccgtacggtgcgatggccgcaccggtgttggcggtggtagcagtcgtggtaccggactggtcaccggttccggttgccggaacctgaatggtggcggtcttggtaccggatacagcgccaacagccttgaccgcgatggtcttgccagcctggctggccttgaacgtgtacagcaaagtcaaggaaccatctgccttggcagtgaacgtcttggatacttcagcgatctgctggacgtcggcgacgatggcatcatcgtagtacacggtgacggattcattcggttggaatgtgcctgcagggaacgtcacggtagcggtggtgccgctgtaagtaaccgttgcaccgtaatcatcagccatggcggtattcgttgcgaaaccaaagcccagaactgcggcgataacggccagcacggccataatcttcttcttcataacttcgaacctccacaatagaaccggttactaccaataaaaaatcggttcttatcaatagaaaatcggtcttttttcaattacagcccccaaccatacacccccctttgccggtatataaggggtaattatgttaacggataaggggggtgtgacaacgtggtcacatcatgtgacaacgttcgaacatattgtcgccgcattaccgttgcggcggggtctcctgacgttctgaaaacgttgctattccaacgattgcggtgattggcgatacgtgcatggtaaacaacagggaaatttttttctgcgacacgccgacgggctactcggattctgattcgtactcgtcgtcaaaactgaacaggtcctctacggtggtgccgaacacccgcgccaaatccatggccagacgcaatgatgggcagtattgcccctgttccagccttcctatggtctcacgtcgcacgttgaccagatcggcgaggtcggattgcttcataccgcgttggagtcggtgaagtttcagactagtcttcatcgtcgcccccggtgccggtatcgtgttccaaccatagatatcgaatatcggaaatggccaaggcgcacatggccaatgcgggcagtagcattggcggaataatgtgaactatcgagcggtcaatcaaattcagtgtggtgtagatgaaaccgacaattaccagaatgcccaccaaactgaccagcgcgaattgcatggccgcgctttgatgcatatcggaaagctcgtcgcgtcgcgggttctgccgtcggaatacagtcatgccccatacttcgccgccgatccacaacagcgccgcgatcgctgccacgattactccgagcaggttattgccaataagagccatcagcatgcaggcaatggcacctatggattcaaggatggcacgaaagcaaatataccgattaaaggtcatggccgtctccgtgaattatgcgagcgatattgaattgcatacgcaattataaagttaggggggtaaccccttgtgtggtggttaggccaaccggcggaggttctttgcgtagaccgagaataatcgcaatcagtaattgttatgggcgatccagtagttgtacgctgcgacgatgccgccgtagcgctgctcgcagtagctgatgaaccacttgaactgggtcttgtagttggtctgccagtccgcgccggcggaagccatcttgctaccggggaaggcctgacccaagccataagcaccagacgtggggttggtggcggtggggctccaaccggactcgtgattgatgatgtagttcgcagcggtgaagtccgcttcgctatacccgttgtctaacagatactgatgcgcccaggactgaacttctccagccggaacagtggtgccgagatcggccgacgatgatgacgacgtcgacggcgactcggtggaaccagtgcccaccaggatcaccttatccaccggggccttcttgacccatgaggtgaatacgttggaagagacgaccttgtcgccggctcgcttgaccagcgaggtggtctccataatgcccttctggccctcggtctcgaccttttcctgacccttgggcaggctgctggtctccttgcgcacttcattgaaggcgatctcggtatcgttggtctccacatcggcatccgcgcgattaatggtgaccacggtggcctcggtgaccttggatttcagcgagggcgatacggcatcatccgggtcaagcgtgatatcacccgtctccagcacgtccttgacggtggtcatgttggctttttcgccaagtactacgcgcgaatcgccattaatcttcaccgtaatgaacgtggtgttcttgtcggcgctgttgattgcgccacgagtggcagaacgggatgcggccgaatcggtagccgagaacgaagtgatggtggaaatcggcttcacatcatcagcatggtagaaactgcgcgacaccaatcccgccgcgccgagcagacctgccgcggccaccacagccgcgatcttcatccactggcgcttgttcaacggcctgagcatacgggtcggcttggcatgtctcgtcattgcgctccttgattggatttcacactgcccaccatgataggcggcgcagtggatgaaggaaaatcaggctcaggcctgctggtcggcaccggactgggcggccttggcggcggcgaggtcgagtgccttggcctgggcgatcagatcgtcgagatcggcggcctgcagcgcgccggcctgctggaagatgacctcgccctgcttggcgatcatcagcgtgggcaccgcctggatgccggcggcctgggccagatcctggttggcgtcgatatccaccttgacgaaggcgatgttcgcgttctccggctcgttggaggccgcctcgaaaatcgggccgaacgcgcggcacgggccgcaccaggtggcccagaagtcaacgaacacgatctcgttgtcggtgatggtcttctcgaaatcggcagaggtgatggcggtggttgccatgatgttcctttcttctgtgttttccttggcgtcgccgtacggccctcgtgcgtggccgccgggcgattgccttattcatgcaatacgtcttggcgcttggagccgtgcggttcgtggccgtcggctccctgctggctaccagcttcccagcaccacccaacatttgtgtcgtattttccgccgccggccaaacgtttcccaagatttcgctggaaggtgacgcgcggcgcgctttgacgcgcaataatgggatgcatgccagtcatgaatgatgaagtgcccgacgagggcgattatgatgccggccgtggccgcggcgaattcgacaacatcacgcccgaggacttcatccacgggggcggttccggccacggcaacccgccgggctggctgggaccggccgacatcaaccgggcgcgtcatcagatgcccatcgcatacgtggagatcgtgcccgtgcgcaccgatgagatgggccgcatctcccaggtgggctcgctgctgcgcgtatccgatgacgggtcgatcgaacgcacgctgatcaccggccgtgtgctgtaccacgagacgctgcgcgaggccatcgcccgcaatgtggccaaggacctgggcgacatcgccctgccgctgctgccggtcggactccagccattcaccgtggccgaattcttccccacgccgggactgagcgaatactacgatccgcgccagcacgccatcgcactgtgctacgtggtacctatcgccggcgactgcaagccacaggacgagacgctggatgtggaatgggtggatcccaagagcgacgtaatgaacacgttcgtggcgcagatggtcaacggccacgggcgcatcgtgcggcaggcgttggcctgggccggaatctgacagttgttttgcttcccgctggtgggacgtgaatgtgaaggagtaattcatggcaatcgaattggccaatcatatctatcgcgatggcgaaggcgtgccggtggtgctgatgaacgcctacccggtggaccaccgcatgtgggacgtgtgcgcgaaggcgctcgccgactccgccgacctgaacgatgtgccggacttcccgatctgggcgccggatatggccggctccggcgcatccccggtgccgagcgacgccgattccggcccccgcatggcgaacggcgcctacagcgaggcgctggatcgcctggccggagcctacgtggacctgatcaaggccgccggctacgagcaggcgatctgggtcggactgtcgatgggcggctacgtggcgatggacatccagcgcctgtaccccgaaacggtggccggactggccttgtgcgacacgatggccgcgtccgacggcgtgggcggagagaaccgactgaagatggcggacgccgccgaacagacgaactcggtcgaaccggtcatgcacttcgcgcaaccggccgatggcgattccaccgtcaagaagactcctgaattcatcgcgaccatgaccggctggatcaacgaacagaacccggctggtctggcttggcgtcagcgcatgacctatggccggcccgaactgggggaggtgccggaaacgatcagcgcaccgagcctggtggtatccggcgaactggacccctctagcaatccgagtgtgatgcgtccgctcgccgagcgaatcgccggcgccgaattcatcgacattccggactgcggccatttcagtgccgtcgaacatccggataccgtggcgcgagcactgctctcgctcgtcaggcgcgtgcagaacgcgcagaagaacgcataggagacctcgatgggcactgacattcatttctcacctctggcactgacccatgcgctgccattcctgccgctcgcgcaaggtgacatcgactatcaggtggaccggcgcggtgaacccggtctgatcgacgagctgttggccgagccgaccaccaaagtcgtgcttacgcgcggcggacttgtcgccgtaccgcgcggccaaggcgagctcgtggactatgagaacgtgaaaatgcggctcgccacgttgccgggcgcctatgtgtccgccgaactggcacgctaccccgaagcggtcgccatgttcctcggctcctatgtcggggcgcgcggcgaatccgtggtcgccgtggatatcacgcgcgtgccggaagccggtgttcccggtgttggcgggattgctggtgtttccggtgctgccggcggcgtgctcggcacccaggattccggcaccgtggacggcgcgctgggcaagaacggcatcagcggaggtgctgccgccggaatacggcagccgggaaacgccaagggcaatggcggcgtagccgcagccaaaatctccgggccgctcggtgtaccggattcggccggacaaggtgcggacgatgccttcgatgattcggtcggcgcgcccgtacagcccttggccccgaagcccacgctgttgcaacaggccgtgacccggttcgactgggtggacctgcgcggattcgcccctcacgccaacgcgcgcgaggctgggcaagccaccagtgccatcaccttaagcatctggcacagccgccagcggttctgccccacctgtggcgcggcggtccggccggcgctcgccggatgggcgcagcgatgcaccaacgaggcggacggcaaccgtgtgctgttcccacgcgtggagccggcggtcatcaccgccatcgtggacgggcacgatcgtctgctgctgcaacacaacgcggcatggaaggattcgaggctgtattcggtgtccgccggatttgtggaggcgggggagaaccttgaacacgcctgccgccgcgaggccatggaagagaccggcatcaagctcggcgaggtacggtacctgggctcgcagccgtggccgttcccggcttcgctgatgatggcgttcaaggcacatgcgatcaccaccgacgtgcatgtggacggcgaggagaccatgaccgcgcgatgggtcacacgcgacgaatacacggccgagctcatcgccggccgtatggcggcgccgggccgcgccaccatcgcccgctacatgattgaggaatggctcggtcgcgagctgtgacggaccgcgaagataggttaagcttatgactatgagtgatgacaacgaaaacgaacagccgctgaacctcgacattcccgaccacctcgaatactccgaggagcatgcttgggtggaccgttcggtcgaccccgcaatcatcggcataaccgaatacgccgccgaccagcttggcgaacttgtgttcgtggatttgcctgagcctggcgcccgtgtggaggccggcgacgagatcgtggagcttgaatcctccaaggccgtccagccgttgatcagccccgtggcgggtacggtcaagtatgtgaaccgtgacgtggcggacgacccgtccgtggtcaacggcgatccgtacggcgaaggctggctgctgaaggtcgagcttgacgacgatgagccggagctgctgagcgccgacgaatacgcgaaggttgtgcggtagttccacccatagctcccctccctgaggggagccagtatgtggcatcaaacctatatgcatcgtgcctcttatggaggggttataacctgctagattgattatttgctttagtttgttttcgtgtgatataattaagtcatgcgtgtcagggaatgggcgaggcgtgagggcttcaacgagcagacggtgtggcagtggtgtcgcgagaaccgtatg

SEQ ID NO: 1379 - DNA, 52224 bp, Unknown
  R257_15m  MAG No. k141_1312
gaatcgtccggtgttggggtctcgcagctgttggcgggcttggattgatttgttggctggcatgttgtttttttttcgttggaaggggctgtcgtgtttttctggttccacgttatctattgttttctggttttctcctgtttcttcgttatctcaccaccaagatatctgttatactgagtatgtccacataaagataatgaaagaggaaaccaatggcactcaccatcgaagaacaacacgaaaccaacgacctcgaccacgacatcctcgccacccgcgaagtcaccttcatctgcgggcacaagcgcgtctacgaggacatcagcgcctgccagaaaagctggatggaacgctgccaacggtgccccaactgccagtacaagcgcgacaaggcatacgtcgaaaagctgtctgccgaaatcaactcaccagaactcctcgagatgtggctcaaagaaaaccctcctactaagaccagcaggaaaggagccatcagactatttaggcaaggaacctcaataaacactgacgactaatagaagaaacaggtaaacaagaaaaatggaacgcgactacatgcacctcggagacatcacaaagagggatatcgcgaacgaaatccgtgatatcaaaacctctcatcaatatcccgaggaaggatggaagatcaatggcgaccccacaacgctccagtacttggcggagctgtgggcggagcaggaaaacgaggagcagcccgaagaccgtggcacattcccgttctggcttgagacgcatgtcggcgatggcagagtggaggaacccgagaaccgcatatacgaggtcacggttctggccgccaccagacagtacgtgcagttctctgctccggaaggcatggattccgaagaggccaaagcgtggtttgacgagcatcgtgacgatgaaggcgcgatcgtgttcgagggaagcgaggagatcgcggacgaggaattgtatatggacggtgagtgatttttccgcgccatagcatcttgtgtgagcatgtccagtagttcacctactttgggtcttgcagcttttgctgtcgtaggatcattggtttctatgaaacgtcattctatgtggacaaataatcctccggtgccgtatggcatcgggggattttttatttcaaaccttgcatgatttttttcatttacatgttatactgaatatgtccacatagaatgaaagaaaccacaatgaacacgtacaagaacttcgaaaaaaacgccaacatcatactcgccataacatgcgtcctctgcgcatgcttcatgtggagagtcacaggagtcgcaatggtcatcacatcaatcggattcgcagcctcaggaatactgatgattacccacttcgcgatggcagcaagccggctgaaagaaaacctttgacccgcgaacgcatatcaaagcggaaaggggagtcgagactatgagtgaaaccaaacagccattgccgtatgatccgaagctcatcgccgaacgatgcaacccgttggccctgcggctcggctgcgcggccggctgctggaatggcgagaatttcaaacagtgcggcaaaccgcctgtggcgattcgccgttgggctcgcgacgacgggtacgacgacagcgggcttctgcccgaggagggcgtatacgggcccgcgtgcaagctgcatgccaaccatgatgtcgtcccgctatcggaggtgttgaaggccgtggccgatgccggctgctggaagcatgatccgtcgctcatgccaccgctatcgggcgtatggccatacgacccgatgcgcgtcttcgccttatgcgacccgtcctggctgcgtctaggatgcacggccggcgtatcccgcgacggggactacgaatcctgcggcaaacccgtggtcgcgatccgccgttggatgcggacggacggccccgactgtgaggatatgcccgaaaccggctggtacgggcccgtatgcaagacgcacgccaaccatgatgtcgtgccattggccgtcatattggacgtgatgacgggaggcaggcgatgataagcacatacgactggttcatcgcccgatgcaaggcggtcatcaaccattccaggccgcccgaaccgccgatgcgcgtccgcctgcacgaggcgggtcatgcggtcgccggccaccggttcggatacgtgcagcagggcatcatgctgcgcgaggacgataccggagagaccagccagcagtacgccaccggtatggacgatgacatgtccgtccgattgcagacggagataatcatctccatgaccggattcgccgtgaccctggaatatccggaatacaaaaccgacgcgctccgcatcggcggcgacgtgcaaatgtagctggtgaacgcggcgattatccaccgaatcgacccggcgatgggctccgccgacgagatcatggacacgctatgggtcagggcgcgcctcgtcgcaaggaacaacaagcccctgattcaggcggtcgccgcaaggcttgaccattacggtttctggaccggtgaggagatccagcgaatcatcgacgactgcgaaaaggagctggaccgatgagcgtcctggaatggcccgccgacctgaccgacctccggctgccgcccgcatgggacgggcgacccgtcgactggcatggctggcatccacccatcgaagcccgcgccctgttcctctgcgagaacaacggcttacaacgcgatccgcaaccatgttccggctgcgggcacccgttccaaccctggtgaaaccaaggattgacggccgacgggcgcgcctccatcaccatcgaacgctgcgggttctgcaacacgaccatcgcactcgagaccgggccggacgggacaagcgaatggacgttggatgatagcgactacgggccggaaggcagttccgacaatcagaaaggaaaccgatgatgttcggattatttggaaaaaagaaggaaaagcaacctccggtgattctcgatctgagtgtcaaggaaaaaccggacggttgggatgaactgatccggctgggcttcgagccagtgttcgtcaaccataggccacggccgaacggcatttcaggcgactacgtgcagacccgctggcggttgaaggcgaacccggatgtgacatgcacggtatacgactcgtgggagggcggaggcggtgccacgttcctcgacttcgacgccccatggaatccgcggcggattcacggcggatacaatctcagctggcccaattacacgctcgaccggctccactccttcggaaaggtgctgttcgagggtgacaggagcgaattcaaggagccggattccagcaatctcgacttgagagggatcacgccggacccggttagggagaaaatgcgggaactcggattccgtatggaatgggatgacagccatgactcgaatggggatgattccgatgaagaatattggtgcaaatacgatcagggagaacttcgtgacttgcaccgatcgcgccttgccctgtacgcccatgtcgacaggacagccggaacagtcgccatcgtggatgtcgagaccgggaagcaagccacgttgggatttgataagctcctgaaactggatcgcatcgaatacggaaagaagtcctccatgaccggacccgatgccgaggaattggaatccatacggaaggaataccggcgtcaaacggaacgcgacgaacgaatatcgcgccgggccgcggaactgcggcatgatcggctgaatcggacaggaaggcagcagggggaggaatcatgagtctggaagccgtgcgccgtctcgcgtggacggcgatcgtcctatttattatggcgatcgtgttcgcattcaaccacgggccgatcctcgcctggctggccgcgaaccatacgccgctgctcgtcggacttctccaatcgctgttgtggcttgtcgcgttcctgctcgtcgtccttggattgcaatgctggctgtccatcgtggatgatgacgagaccccgttcgcgatcggtatgcacgcgcttggcatcatgctcggcatcggctggtgggcaggcctggcggccctttcatcgcatcagccggccgacgcgaactgctacgggctgctgggcggctgcatccttttcggcttgttcgcatggatcatggaccggcgccagaaggcgggcagggaggcgtttccgaggctgcgcgaccagatagccgacttcgcggtcacgtacatcgccagcgaagagtatcggaagaacaacggggacggcgaatgatggatgaatgcgaacggctgacctatgtgagcggcgaggcagcatgcaatgcggtcgatatcgccaccgcattgggcggcgggttccatgtcagctttccgcccggccgcggcactatgacgttggccaagtatttcccggacggctccgatgtgagcattgaggttggcgacgatcgggccgccgcctcgaacagccggttcgaaaccgtcgaatgggacatcgaggacggaataccacagaaactagtggacatgttgcaccctaaagcgggttaatgccacggttttcagattttcttcaagaatcgttctttgaacgaatgataatcgtagtatccgtccggttttcctccacccaacttcggaacaggaaaagccggtcaatcttccagaacgttgtcttaaaaaaggatgctgcgccgatgcgaagaattaagatattcatcgataacaccattattcccgcagacatatacgccgggcagaaaatcgctttcatcttcctgccagcaggccgtcaaacagctcaaggtcgtgaacaagtcgtgcatcaagcctcagtggataatgagaacgggcgtgtaatcaacgtgacctggcaggctaaaggctggttcaaccggctcgtcacccggcattcgcctcttctccgacgcatgctcggacaacccgacacctaccggttcgacgacaacatcgcctctccggaatttattcaggagcgtgcagattgagcggggcagcacataagaccgttcaaccagtaagccgatcagccgtaagaaggaagaaccgattccaacgacgtgtcgccctatgtctgatgtcggcaatgattttgtcaggcggaatggcatgtctttttctgccgcataatgaaaccgcatacgcaggtgaacgtttcaaccagtccaccgcattaaccacggaacagttgacagcatcaagcatcgatgatgcggctagcaggagcagtcaaaggggagacctcacggcggacggcacatgggatatgggcgaccagccggaccgcaagctcaccatcatccacgcggacaatccagtggtccgtgacctgatcaacgggcgcgacgaggatcagactccggccggattcaatccggatcatgcgaccggcgacacgggcaacgcatacgcatacgggcaatgcacatggtgggcgtacgtgcggcgcacgcaactgggattgccggtcggcagccatctgggggatggcggcatgtgggccgattccgccaaggcgctcggctattgggtggacgataccccccgacaaggggatgtgatcgtgttcagtcccgcgcaggttagcaacgcatgggggcacgtcgccatcgtggagaaggtcaacggcgacgattccatcgagatcagcgaagccaatgtgaacgggcaggtcggcccgttccgacgcaccatcgaggcgaaacagacgcatgaataccagtacatccactattaaacgcgctcccattatcctgacgtttctcctgccaatcgtcatgctcgtcatgccgacgatcccggcatgggcggccggctccgattcggctccgatttccatggcgagcagtgtcagatcgttcccgaaacacccggtcccgcatcgttcgttcaccagtttccgggcggggatgcccggtatttcaatgccgggaggaaccgccccctcctttcggtctaagtcttctttcattatacgcgcgtagtgatataatcggaatcatgtcccagaaggtcgtgatagaacgagtgcaggtgcggggtgccgcaccgtatctcggcatgagtgcgaccccagacgggcagcaggttcccctgtattcgaccaacccggacatcgtgatgcgctggctgtgcgacggatggcgttgcagatacaatcagctgcgctcccgtcgcaccaagtgggacagggaatcccagacggccgtcccgttgaacgggaggccggacatgcgttccgaccgtcaggcgcgattggaatgctcatggtttgcagccctgcccgcgatggtgctgcaatccccgaacaggatagagaacacggactggtggagcgcgaacaaacgccgcaaaacattgaagaagaagcataggaacccgggcatgacgccccggttcaaaaaacggcgtgacgacctgtatttcgtctgctggcacaacaagggcgcgaacgcgaactaccggcggttgaaccggcatcacggcgaagtcgtcatcaccggacagaaccccggcgcatatcgtctggacggccaaccgtgccggtacagcatccacatccgcgtccgcgtcagtcagcccatccgcgactatacgagcgtcggcgtgaactggacacgacgcacgctcgtgttcgtcaacgacccgttgccgataggccgtgagcgcaccggcgcgatggtcggattggacagagggtgcgtccacacgctcgccacgtccgacaatcgtttcatcgacctccccaagcagcggttggagcgtatcgaccgtgaaatatgccgccgtcagaaggctcaggcgcgacgggtcaacatgtcgggcaagacggtgagggaataccgtcgcaatccgagccacacctatgagcgtaccggtcgggaactcagccgactgtacgcgaaggcgcaccgcatcatagacgactggcagcacaagaccaccagcatgctcgtccgcgaatacgacctcatcgtattggaagacctcaacttgcaaggcatgagccgcaaagccaaggcgaaacccgacccggacaggccgggcgcgtacctgcataacggccagtcggcgaaacgcggcctcaaccatgccctacgctccgccggtctcgccggtatagtcgaaaaactcgaatacaagacccggctgaccggacagaaccggcttatactcgtcaaccccgcgtacacgtcgcagacatgcagcaagtgcgggcattgcgccaaggagaaccgcgaaagccaagcggacttcgaatgcaggcaatgccacgcgcgcatgaacgccgacctgaacgcggccaacaacatcctcaaacggggattgaatcatctcctcggcttggacgaagccgggcacgccgaaacggagccagacgcccaacccgcctatcgcgggaaggacgcttccaccatgacgtgcggaacctcaacacgataacaacgtgttggaatcccggtgtttcaacaccgggaggacgtcaaccaatacgtgtacgcgcggttcggtatccaattgccgcacccgtccggcatgcaggccacggtcggcacgcccgttactgacccgcagccgggtgatctgatggcaaacgcggggcatgcgggcatttacatcggcaacggtctgatgatccatgcgatgaacccggtcgatggcacgaaggtcacggccgtcatgcccggcatgggatattatcgtctgctcggctagggtacgcctatactgtggtcaatcgtccatccggccggcacgttgccgatcatcccgttgtgttggtcgtttccgttggtcttcctccttcatgcgttcgtatggtcgagaatccaataggcgatactgcgggcggtatcctccggcacgtccacgtgcatggatgcgctgccggattcgatataaaagcggacgagcccagggtccgtgagccggtcgatctccagcaggtcatcgtcatcctcggcccggcagtattcgctcctgtcgttcgccgcctgttcacgcagatgggcgggcaggtacgggttggcgagaatactgcgatgcagttctctgctgtcggtgaatgtcatggtcatttttcctagtttagggtggcggtgccggtggatagtgggatcagttgggaaagtagtgggctgatccatgcccattcggcgaatagtagcgttacccagaagaataggcaggtggttgcgcgtaggatgattgggcctgattggatgcgccagattagtgtcatgaggttccatgatgttgttttcttctggcggtctttgtgccagatgagccatgacaggcctgtgaggatacaccagattgttagtgttgcggtgaacaggagttggctgactggagcgtatttgctggctttttggatgctgcgtgtgatagtggcttttgcttgctgtatgggagttgattgtttggaggcgagttcttttggtattccgtcagcagtgttggcccaatatttgaaccgtccgcggacgatgagtctagcactcagactgtcctgttcatctagcgagtatttacaggtggtgagcgtgatgaggcgcgcgtctttttggtctgtctggtcggcgatgacggcggcatcatcgggggtcgtcatccaagatgattgcatttcatacacgtaccagtggtcggctgtctgaatgatgatcggatccccgggtttcaacgtgtccgccggccctaggtcaccgggggtgcggtgtccggcgtaggagctgttgccgatgcttccgggcatgacggttccttggtagtgtccgataccatagttgtcaaggactttcagatcggtgccttcttggatggctcgttgccattcggtgccgaaccgggggattcgcatccagccgatcactgtcgagtattcgggttccggttcggtgggtggttctccggtttggggtttggcgatgcgggttgaaccgtcagttttagtgggttgggctgttttgaatccttggttggtgacgatggtctgttgcgtgtggatctgattcattccgttgccgatgtacacccatccgacgtgcattactaggatgatggcgagaaaaatcgacatgcctgcgaacaattgcaacagccggtaacccactccttgtgattgtttgtcttctctcttaggaacggtgttctcttcaatattccggagcgaaatgtcttcagtattgtgctgaggacggagtcggcctggtcttgaggcggcatgtcttcccattggtctttttttctttcttcccggatacggtttagttgacgaattgaagcgggatagcggtgacgttcgatgcctccaagaggaaacgaaaccttttactgacttccgttttaccgttttaccggaacgaatgctatcgtcgttatctcgtgcgttattcgtcttgttggaaactgcctgatccgcctgtgaatcggaccgggatgtccgcgcatttcgcggtttccagcaggagccggaacagtcggacggtgtcctccctgccctccatagggtcgaaacggatgccgtcgcctttcgacatggcggtctccagcatgtacgccacctgaccgtccgccccgatgaacgcgagaccggaaccgttctccacccacgcctcgcggatcgtgtcccatcggaagttcaggtatcggccgaacgcgcgatacacgtccgcgccgacccacatggaccggcagcaggccaggaattcgggtgatgtgatattgatgttgaagccgtttgacgtatcgcccatcatgaatcccacccggtcgccgtccttcccctccacgaacgggataagggtggcgagggtgacggcaagcagggtgaaccaggcgcggtcgccgtccttcaacggtgtccgctccccgttcacgatgctcatgttgacatggttgaacgcgtcgacgatggcggcggactcctcgaaggcggcgggaatttccccgtccccgctcatgtggaacgtgccgtctgggtcgaattcccaatcatattcgaccggattgttgccggtctcgtcgttggtttctacgatgatgcgttcgacgctcattgcttctccttgtccaatacggttctggatactttcagatatcgtgtgccgcccgactggcgtagctggcggttgttgatgctgtcgatgaccggggctgggggatccgtatacgattcatgcgcccggacgatcacatgatgattcgggttgaacccggagtacaggtgcgtgatcgcgaaggtcgccgatagtacgtctagatccttgaaatcgtagatggtgtccgttcggaacccgtcgatgccggtcggcggttcgaccggttcgagaccatggacgccgaacatcgccaccctgaccctcatgtccggatcatgctcgaacaggtgcgcatattcgtcgcgcagcacatcatattcggctatcgcccgtttcgcggtcatcggcatactctccgggtcggcaagcatacgtttcacgaacgcaatgccctcgtcggtgatgatccggtcatgctgcccgaaatcgaccaagccgcgttccttcaacgcgtcgaaaccataggggccggtatgccacgagtcttccttgagcctgtcgacggcgaaaaacagcatggcgtactgggctttcgtgatgctcttcatcgattgtcccccgtccattggctcaggtatccgcgcacgtcggccgccgtgccctccctgtcggagtcgaagccgtccggctgccaggtgccgtctgacatgatcagcaggtccagactgatgggatggtcttccgcaccttggctttggaatatgacggcgccggtttcgaccgggtcgccgttcgagaacaggtcatcccagtacacgtcatccgcctccaatgcctcgaccctgccaagaccggcgacggtcttccggtagccatcgagaatcttcccgcgatttctgaccgcttcgatcagccgacttgccgcatgcgtcggatcggcgggcaatagcgcacggaacacgctttcgccgacctcgaacaccagatagtccggatccgaagagcgcgtggcggggatacctgaatcgttcaaccgtttcacggccttgtcggcctcgtccatgatgccgcggtccttgcgccactggtcgtatccgacgtcgaacaggaccgtcatggtcgtctcatagtcggtgtcgaaggtcgttgttttcggatgccaccagccgtcggaaaccgtccagtggatcaggttcccgtcgaattcaaggcgaatgcgccagtagtcgaacggtccgcttcgtgtttcgaatgtggatttgcagtcgaacagtcttctcaggttcgaccattcgtacggtaacatcggcgtgattctgagcagaatgatgttgtcggccatcaaccagtgacagtctgcgaagaaacgaatctcgggcgtgacgacgctcattccctgcaccatcctctctgtttcgtctccacatacatggcgtcgcgcacctcggtgtcgttccaaccccattcgcgggcgagatgcaggtagtgttcgcctatcacatcgatgacggattgacggtatgccgcaaccgccgcagtggtcagccacgtcatccggctcgtacgggccgtggattgaatcttcgcaggtttcgttcgcgttcatgatggttccttttcattccttgcctaacaggtcaagtccagcgcataccgtctcccatacggtcttgtcgtcgaatgcgatgagcatgccggatatgctgtattcgctcgcatgaggcaacgcgtcgccgcaatccacggccgcacgccaggtgccgtcgaacatgtcgtagtcgtccagatcgcccgcatacgacacgtccgacggcttcgcatggccgagccgtcggaattcctcgtcggtaagaaagcgccattcgcgcgtatcgcgcacgcgcaggttgtctcggttggcttgcagtgtagcgagtatcgccttgcgggcggtcgtgtggaaagatgctgttttcatgatgttcgtctccttttcgtccgttctacgtgcgacgcgaatttcaacgccttctcgcccttgtcggtcagcgcgtcgaacacttggtcgatgtagtatctgcgttccagcacgcccagctcacgtagtctttgcgattcctccgccggtttgaccacgccatacggtttaagctctttcaggattgcgatgtcccgcccgtccaacaggggcgggtcgtcgggttccagcaacgctttcagacggttggccttgtcttccatgtcggatacggcgacggccagcgactccggcatgggcgtatccgtaccttcgcacagaccgacccaccgtttgcgcttgcctttcgccctgtcgaggtatctgtccgctgtgagagtgattatccgcacgcggaactcgtcgaagtcgcagactcctttatgatggtcgtaatcccaccagacgaaggtgccatccggacgaatcgagcaggcgaggaacacgtataccttgttattagggttgcggatgtccgctacgtagtcagagcattccgattcgaccagagcgaactccacgccttccttgtccaaccggtccaataggtcgcggacggattgcagcgtcttctcgattttcagcattgttcagtccttgtccagtcggcgcacgctggccagcatgtgcgatgcggtctgacggcgcgtttcatacgggttgccaagctcctcgcccagcagccacccttcgaacacggtcgcggggtcgagttcggggtatttgttgcaggattcgcatacgcgcatgtagtgttcggccatatcctcggtgtccttcgcctcctgttcgtcgtggagcgtgctccggcaccattcggcgcctttgtcgaactggtctttcagccacatgagccggtcggtgcgtggcatgggcgaagccagcagtcgggccagctcgtccaatgtctgctcctcgcccatgtcggctgtatcgaggacggtgttatcctcgacaagctcgtactcaagctcgtaccgcgtgcggacgatgcggatggtgtctctgtcgggaaggttgacggtaatctcgtatcccgcttgggggtcgcacgcggtgatgcgtccgcactggtggtcgttgtacacatgccagcccggcagtgtgcgggtgacggtgatgaggatgtcgcgtgttttcatttcgtcagttccattccttcggggcgacgacaatccagccgttcgacagcgggtatacgtcgcagggttcgtcagattccaagtcgtcgttcaatgggttccagtcctcgaagccgtcgtgggcgatttcgtcggctccgtccgcttgtcgcggatcatcgaccgcacgccggcggcggcgccggccaggtcggcaccggtcaggtctgcaccgttcaggtctgcaccggtcaggtcggctctggtcaggtctgcatcggtcaggtcggctctggtcaggtcggcaccgtgcaggttggctccgcgcaggttggctccggtcaggtcggcgtagcgcaggatggcatcgcgcaggtctgcatcggtcaggtctgcatcggtcaggtctgcatcggtcaggttggctccggtcaggtctgcaccggtcaggttggctccggtcaggtctgcaccgtgcaggtctgcaccgcgcaggtctgcatcggtcaggtcggctctggtcaggtcggcaccgtgcaggttggctccgcgcaggttggctccggtcaggtcggcgtagcgcaggatggtgccgcgtaggtcggtgctggtcaggtcggtaccggtcaggtctgcaccgcgcaggcagtcgcgcccgtatttttcgaggatggcttcgatgttttcgccttcgaggatgccgtttggtgtggtgattttcattggttttcctttgctcgttgaagttgtacgcccctcccggcccagctaggagagggggtgatattacattttcggcggtcagagagtggccgggtatgcgctccggtcgagttccgtcacatccactacctgattcggctgcgggccgtctaccgcgaagtcgccgatgccggccaccatgtcgttcgcctgctcgatgcagtaatcgacgtcatcgaccaagtagccgtcatcatcgcagccaaatgtaccgataccgtcaataatgcggccggacggttccactacatcatcaagctggattacggcacgcggcgggaagcccaagttccgcaagatcagcatccgtatagtcgcttagattcggcacctgtcgcaacgagccgacctcgaaaaagtcggcggcccagtcgtagccgtactgcttggactcatcgtcccattcgttgatgctgatctcgactgccttgttgttgtcgatgagtttgaccatttttgctcctctttcttttttatgtggacatattcagtataacatgtatctcatatatcgcaaaaatgcagaaaaccacctcccacaaaaaagaaggaggtgggcttttgcgtcagaacaaatcagccaagcagcggcacgctgtagaagccgccctccgaaagcatcagtagcgacccatcaccaatgggagagccatcgctcatcgtggaaaacgtgtcgcagaaccacgcatcatgctcatgcaacactgtgggcacgggcgtatgcccgaccacctgcgtcagacacatgtcaccgtccttggcgaactcgctacgatcacaccacaggggagagggagtgcccgcgccgccgcgcgccggacctatgtcagacatgggcaccaccagcgaagccgggtggagaatcatctggttcaaacgttcggctatctcttcgaccggcatgctcatgtaatcgacaccgagccgcctgcgcccccaggagcaggcgaggccggcatgtgtggccagaacgttcccgtccgtccaagccagtcggaacgggatgtcctgcatcagctcatgcaccttgcgatgtgcgccaggcttgaaaccgggcgctattgcgcgaaccctcgcataggaggaggagccttgcttcaaaaaatacggcacatcatgattgccgagcagtggaatcacctcacggtcgccggattcaagtcgataccatgtggcgaacgtaccgaagaaccggatcagtccattgttggacacgttccagtcgtcgcagacatcgcccaacaggaccatacggtcagtgttctcgcgttgcgccacccgactaatcagcggcagcagatctgctttcgcatgcaggtcgccgacgaacaatgtgcgcatcaaattgtcgcccctagggtgggcaggatgcccatgtccggtgtggtcaatgcgattcgacccttgttgactatgagaatggcggtgtggatgcgattctccctgccgtctgtataccaagcgacatactgtccgccttcggtgatgacccggactggctggttcatgtcatctgcgttcaggagacggacgaccgccacaccgtaaccatgttcgatggttcgacgaacggtttccatgggagtccagccgtaggtcgcaagccgccagccgacgaatgcgatcagggcgagcaggcagatgaccgccaatgcggtttgccgtgccagcagggatacgatgaccaggatgagtagtccgacggcttgcagtagctgggggagtgccgcatgggccagctcctgccatgtgggtttcggaatgatgcagaacggccttccggtttgaggctgccaggtttcttcggcctgctgtggtggggtttctgcagcggttttcgtgtcctcatccgtttttctcggtgccggtgatgtgcggtggcgtttccctgctggtttcaccgagggtggttgctgtttgaagtcttcggtcttcgcgttcgggccggcatgcgggtttgattccgcgagcctacgttccatttcgttgatggcctctgccatgtgctatctctcctttatcgcttgtcgcccggtgtcgtgtagtcgtgttcgcgtacctgtcgttcacggttgaaacagttatgcagcaggttgacggtgctgaagttcgcggactcgtcgtcgcggacggcttgtaggatgcgctgccggttgtcccagatcagcttgtcagcctgtttctcggtgaggccttccaagtcgccgtcttggttgaagtgcacgtacttgtgcttgtcggggtcccatccaccgtacttgcgggcctctttgatctgttcctcgctcatgtcttccagatgcaggtcgtgggggctgatggatggggctatgcgcaggtcgccgatcgtggattcgcccttgttctgctcgtcgtggttgatggtctgccatgcggcggccttcaacgcggtcatgttctcctcgtcgggtttgaagaagatctggtctcggatggcggaatccatcatgtcgtggcgtttctcctccagttcagtgtcgaggtcgaagtcgtcatccccggatttttcggcgagatcgtccacgaggtcgttgtcggtgaagccccagtcgtcgccgtggatttcggtcagttggccgctgtctatgcgttggctgaggtcttcggtggtgatgaagtccatcctgtggttcacgtacccgtcatggtcgatggacagggtggtttccccgtcttcgtcgccgtcgctttccattacggagtaggcgtgccagccggccggcaccttgttgcggtcgattcgcccatcgtccaaggcgtagccgttgagggtggatccgtcgggcatgtcgaattcgatatggcgtgcctcgtaggggtcgtcgaatgcgccggtggctgtgagcagctggttgaagtcaggctccgtgtcgtcggtgaggaggctggccacctgttggatttttgtgtcggaggggaggctgtcctgcttgtcttcgtccgcgaatcgtccgtccgagctgcggcgtcgttggcgggcttgggctgacttgttttggttggtcattggaactctccttctatgtggacatattcagtataacaggcatattgtcgttcggagacaattctaggggtccggcctcccgttttggcgagaagccgtgatgtcgcggaatcggcaatacctgttatactgaatatatccacataagaaatgaaagaggaaacccatgtacgtcaatcaaaggcgacgcctattccccgtatggctccgaagtagtgccccagaccgagggcgaggaccgcttctgtggtgaacctatcaagggcaagcgcatccagatcggagcctatgccaagtcgcgcgtgtatgtgcggatttcctcgtatagcagcgcgtacaagatggaagagaaggatttcgagcagccttactatgagaatcacatggattgacatgttatactgaattagtccacataaaaatttcgtagaaggcaccaatcatgctcggaaaacatcaaacaacaaggcagcaaacctgatggcaatcgacccaggaaccacgctcatcctcatcacgtgcctcatctgcacgatagtgctcgccttcgccggaaaagaaacaggcgacaagacggacaccagacacgacaacgaacaacgaaagcgcaaacgttgaaaattcactcgaccgtacgcgggacgccggggaatggacgctctcctatatcggacagctcggacgccggcggcatgtgaaaggcggacgacgatgaggtacggcgcatcatcccgacacatgggggagccccggccggcggcgggcgtggagccgggactgctggccgccggcctcgccatggcgctcctgctcatggcgttcggcgccctcgccaccctgggcggcgcgctcctgctgcggctcctgtccggcatccgcatcatgaccgccatctcgcaggccgccgccgccacgtttttcatactgctcatgtcggccggcgtctgccggctcatcgcacgcatacgcggatgggatccggacccggatcccacggaaaggaactgatcatggcattcgactacatgcatccgccggaggatttcgaatatctgggcgaatggtgcaaagcgtggcgggatcccgcgacgggggattggacgataagccaattgctcgacggcctggagaccgagcagatcatcctgtccggcgaggaggtcagggaattggcccggctcgccgcccaacacgatccgaccgattacgagctggagtacggggagctgcgccgacccatgttcgcctcgccggacgagaacgggacggccgtcaacgccgcggagggcgcgggcggcgaacaggcccgcatccattcggtcgaagccctgcaccggttggggcggttctgatggacgggtactggtggggcgtgctcaccccgttcgcgatcatactgggaatcctgctcctgtatctgacgggcaatctgttcggcgcgatcgtcagctgggcgtggaagaaggcgcattacggcctgttgaagaagggttggatcgccgaggactacgacgaggattcaagggaatggaccacccgccccggcgcggaacgcctggcggccgcgttgacccggtccggcgaataccggatgctcccgtgcttcggctggatgatcctcatcgtccgcgaccacaagaatgagaaacatgatgagaaaaggaattgatccgccccatatcgtcgcgttgacgatagtcgtctgcgctgccatcgcccccgcgttcatgctgtggggtcggacgatcggggaatgggctgtcggaatcgccgtttatacgctgattacggcagtagtgctatcgctgctcgtcctcgattttgttatcgtcagatatgatgtcatggcattgctgatacaagctctgtccggttcggaaatcgtcggttcggtatcgcgcctgctgtttgtactgggccagatatgggtcatcatcctgtccatacggattcccccatcgttctgggaaaagcgtttggcggtattgcctttccaagcggatccggataattccgcactcgcgctctgcattggtttagcctcaggcgcttttcttcttgtcatagttgcgctttggatgcctaaagaccttccgggggtcccggaattctggaatgcgcaggtttgtatggattcgattttcggggtcggtcttccatggtccaagccggtcatattcaccgtgtcttcgaaaggctacacgatcatacgtcggaatgggatgctgaagctgaacgagcaggccgacgagttcttggactattgcccaacatgggtttcgattcgcaacgaccatcatcggggactgctcctgatcgaacggtaccacccgggcatgcaggacattgtcaacaggttggatcgagaggccggtatccggcatccggcggataaggagacagaaaattgaacgaggaggaatacgaagagctggcacgctggctgccatgccaccccggccgatgggtcgcatggccggaaccgttcggaacccgggccgaggccgacgcgttgttcgaatcgttgcgcgacggcgggcttgaatcattcaaggtcgattcggccgcgctccgctggcggatagacgagttcaaatcgattgtggacgggcgcgggcttatctggatggaggtgagctgcgcatggtgaaaagcctcacaatcggattggtcgatgatggcgttgcgacatggaacccggtttccgatgggaacctactggtgacgggtggcgcgggatgcggcaagacctggtggctgacacacaccctgatacctggtctcaacgaaatggggcaacgggtctatatgtttgacgggtatgtggatcgaggttataccaagcccgtgcaaggtgtgattccggtgaacgatcccacgtccatcttggaagagccggattcctttctgattatcgaccatgtgaatccgggtcttgaagacgattcagctttgatggagacggtaagggagagtgacgcccgtatcccgattatcctgtccgtccaactggttccagaccgggagcaatggtccgcatgggcagaactggacatattttcatccaaatacaccggcatgccgtgggctcggatgggaatctgggaatccacgagtcgcgagagaccacaggtggtggctatatgagattttctgcgggttttggaacaagaggcatatcgaggggaaacctgatgggcaaactggttaacggaatcatcgcggccatcgccacactgttcatcatggccggcatttccatgccggcattgaccgcaaccgatgatacgtatgttccgaagaacgattctgctggcaatatcttcgtgcaggatcaggcgaacgtactcagcgctgaaactgaaaaacatgtttacgacctgaataagtcgtgggagtcacgtgaggacaagccgcagctgctcgtcgtcaccgtctccactttggatggtgtgcccatcgaacggaaggcgaaggaactgttcgaccggtacaaacccggcatgaaaggcaagaacacaggcctcgtatacctgctgtccatcaaggaccataaggaccggctaaccgtcggcacggggattggacagacattcaaccaatccacgtgcgagagcatcatcaactccgggcatgcggactataagaaatcatactggaacgccggcatcagcaaagtcctggacaatatcgcttcaacagtgcaagacatgcccgagatttcatccgcatcaacgtcggctacaacccccgcaccaatgccggcatggaccggggttctcggcgtggtgattgttgtggtcggctcggtgctcttgctgatatggggattgcagtcagatgacaagaggttcagctgatggagcttgtcgaatacgctcaggcggtggaccattcgcggatgccattgctgttgagggtcctgaatgctctcggttggtatgccttcctcgcggacattccgctcatggcgtatgcctattgcctggtgatggcacggaacggctttcctaatctcacgatggacgagggcaggctcgtcggcgcatcggtgctgctgctgttcgtcgccctcgcgctcatgtccccggccgagaactggaacccccgaggcccgaagccgaagaccatggacgagtatgtgggcgacgtgtggaatctcgatggtctcgcgatcgccgaacccggatatatggaaccgttgtccggtttcccccgaatcaaaggattctaccgggtttcatggaagcggaacgggcggcgcgtcgaaggcacgctgggcatcgacggggcaaacgtcgaactgcgcgataaccaagggatgattgtttccccggtgaatccagggacaccggtatggaagccgggcgcgaaacattcgaaagggtagccgatggaattcaccgacagcgacgaactacgccgcgatattctcgccaaccaatatctgcccgaacatctgcgcgaacgggcgaagaacgatacaagcgaatactgccgtgccgaggatgccgacaatctgctggaagtcgaccggctcacgggcaacgggctcatccgcttctatatggaggccggcaacggttccatgcaggtggacgtgcccgaggagaccgcccgaagcatcgcccggtggatcctcgaccatacgaacgcgtgaaggagcgcatcatgaagaacatctttgtcctgaattccgtcatcagactcatcgaacggaacacagcccatgccatacggtttgcgcggatcggggcggctctgctgctgattgcggtaggaacgctggtattcggcgcttgtgttctcctgacgggaacccctcttgtcgttctgtttaccgcgttcgtgatctgctcgtttatcgggagccaactgttcggcggcgcgattctggtgatggaggaagaccgacggaaacagccgacgcgacggggcgaacggtaatgaaaatgtcaagtgcgcgcgttcggtgcaagtccgttccgtccagagagctctccacgctcatcctgcaccgggatacgggcatcacggatccggagcgcccgttcaaacacgaatgctcgtgcggccgctggttcaccgcattggactggcatctgcacgggtgctggacgggttccgaatgccagtacgacgagccgccgagcatcctccacgaatatgagaggttcctcgcatacgacctgttgtgcgaggcattggggcaggtcggagtgctggcgcccatccgatacaaacacccatcccgaatgggaagagggaggggaaaatcatgcgtggtttcatgcgtttcgtcaggtcgagccgtctgctgacggtcggcgcgatcgcgttcatcatcaccctggccgcggcgctggcggcgttcctttgcgaccggctgggtgtcggcgttccgtggctcccgtccggcctgcacgcggtctccgcgctctccgggctgaccgccggcgcaagccccgtattgcactcggacatgggatggcagtaccggcacccgtggtggcgcgaacggctcggggaactgggcatacgacagtcgatgagccgcaagggcaactgcctggacaacgccgccaccgaacaggtgttcggccatctcaaggacgagttctaccgcgaccgcgaattcgactcgtacgagcggttcaaggccgagctcgacgactacatcatccactggaacaccaaacgacgccagatacgactcggtggacacaccccggaggaattccggagagcgtccaccgtggtctgagcctgtatcctaataaacagcggccaacaatcggggcgcagttcaggcaggtggccgcccctgtttttttcgcatgccgtcaggcgttgaattcgagtttgttgaacgcgccccggtattgggtcatgtccatgccgccgtcgcgccagtcaacgaaccgatccatgccggcttcggcgcggctgatgtagaagtggcgcaggcccttgctgtcggccttcttcgaatcgagcagggcctggaactcctcgggcgtgaagatgaagaacacgggcttgcgcagctcgtcttcgacggagaggatgtatgcgccgaaccgggtggtgtcggcgttgcgcgggttgatggagtgccatccggacatgggtttgccggtgtcggagccgaggttgcggctggcggcgatgaacacggggtggcgcctgccgtcgtgtccgatgatgtagcggcccttgcgtccctcgttgctgaacgtctcgcccatttggccgaccttgtcggcgagggcttcgatggcgcgtttgagggtgccgccggtcacgggcttcgggttttcgagttggctgacgcgggtttcgagctcgttgaggcgttgttcgaggatcgcgatccgctggctgtcgatgttttccatcttttgctccttgatttttggattgtatttctttcatcagtatagattatatattagatgtaagttatatacaagtagattgcataaaataagtaagatttttttagaaaaacgcacccaaaaccacgctccgactagactggaaaacagcaccaacgacgggagccagccatgaccaagaccagaaccaccacagccaccagcatcatcccattgctcctgctcgccaccgcatgcggaacgccaacagccaacccggaatccgccgcaccgcagacgaaaacacagacacagacgaaaacggaaaagaagccggcgcccgaacctaagaaagaaaccccagccgaggaaaagcccgaagagcagaccccgaccgcaccagaaccggccacggatccaacctccggcgaatggacggaaaccatgaactcgccatccgacctatccggccagctcgacgaagcgtggctgcgctgctcaccacagaacaacccgaccccggaactgttctcatggaaacgatcagtgaatcacgacggcgtatggctgcacatcacggaaggcggaatggacggatctgtccagcaagcctgtatggatagtctgttcggtggagctaagtcggagccgtccggcgaatggacggaaatggatctgaatggaataagtcgctggcagaaacaggatgacggggctgctgacatcatatggaagtccgcggattgactaataaggacaaagcaatgagcgtcacgaaatcgaagacagcggaacacgatgcagacattaaggacaactctcacgaacgcgcgaagctagaggctttcgcagaagctcaggcactcatatcgaaactgccgcgcgaaaccgttctagacacaatgagccacgaagatatggaaacgcaatttgaacgccgaagcgtctaaaccacaatcaggcttcgctacgaccggctaggaggctaaatcgagcgtggctcagaatgcctacacgatatatactcaaatagtcccaatgcggaatatttgagtatatacttgcaatatggctatagaaacagcagagactttactgactactcaagaggccgccgaaaaactcggcgtaggtgatcgaaggattcgctcactggtcagtcagcatcttctgaatgcagtcaaagagggagaccgtctttacataaccaacgaatccgttagacgactcaatcgcgttgaccgcaagcgaggacgcacattctctccccgtattgcctttgcctcgctgtacatgatctccggagagagcgttaactggctcagcgcttcggagaagtatcagctcaaaaaacgtctaacgacattgaatgcaactgatttggtctccttgtgcagaaatagggcaagactgtgttccatgtggtgcagagagagccgactggaaaaggtaattcaggagatacgtttatccgcaggcaccggcgagctggctgcagagttcaatttgactgaaacaagcgacgtggaaggatatctgctggaaagcgatctgcagcgaatagtcgaacaggcaaaactgcgttctgactttcaacccgcaaacgtcagattgcatgtatcctcctacattccgaatggttccggaaatatgccaatcggagtatgctcagccgatctcgccgattcactagatgtcagagaatgcggtgccggttttgataagctcacgcaattactatcccgtttccaatccgataacaagggtaaggacagccgatgaatacaatcgatatttcggcccaggctcaaccgtggagtacggtctttgccgtcgctcagcattttacgtctgatgaatggctgctcactggcggtctgatggttcaagcgcatgccatgctccacgggcttcctgtccgccctaccaccgacgctgactttttattgaatatcctgacctatgatcgaatagccacacagatggaaagctatcttgccactatgggatacaggttgcaaaaagacgccctaactaaatatgcaactcgatttgaaaaccctgcccacgacaaagtgtacatactggtaacggattatctgtacggaaagaaaaaaagagaaggtgccactctttcgggaatgagattatgcggtatgcccggaggtggtcaggccatcaaacgaagcatgcgacttcaacttagatatgaccagcaatccgcatccatcgcaattcctgatctactcggcgcattgatgctgaagagcgctgcgtgggaagtcgataagacagctagaagagaccgccatctcattgacgctgcattgctgctctctctaatcgacagtccagatgaggaagcaaaaaggctccatagttccaatgaccgcaaacgaattttgcgcttgcatgagttacttgctgcagattccgactattggtcgagcttggatcagacgcatcggcaggatggaatcgatacgttagacacgctaaccaattgggcaaaaggagaacatcattagggttcgctacggccggctagggctcggccgagggtgatttcgtcggcgtattcgaggtcggagccgaccggcagaccactggcaaggcgcgtgatcagtattctgctggctgcccgtagtcgtcgtattgttcttccgtctcggctttgcgccggcctttctcctgtacctcgtcgacctggtcggtgccgctgatttcagttcgtcggccgatccagccgatgatggtgaatgtgatgcagaagatgacaagcagtatcccaatgacggcgacgatgccgaggattcgaccgtagctgtgtgcttggccggtcaaccattggatgaggttgccggccgttatatcattcgcgtattcgggactgtctgacaacagttccgcacgccggttgcccacaccgagaaaataggcggcgtagccgatcaggggagcggctatcgcggtgatcgagccgactgcccacatgaggaactggtagcggttgtaccatttgctgattttccaaagaattcccatagaacttattgaaccagccacagacgagaggaagttcccagagtcctaatccatttagacagtttaagcgcgaacatggtaggcaacttgaatcaacaagggatgccgaaaggcatccctattattcaagaaaaaactttgggaaataccgaaaaaatgttggaataaaccgattttgcatgtacgttgaaggaaacgaagacgaccattcccatcagccgtacgccgaagccgataagcgagttcggtctgaagccgggcaaatacaggccgtccgcggtgaaagtcgccggattcgacccgttggacgccaaccatgccgcatctaccagtggggtcgcttccctgcctcgacaggacgtgcaaacaaggaaaggaaaacactggaatgagagacaaccaaacgacacggcgcatgccaatgatcgtgacggcaatggcctgcgcgaccgcgagcatgctggccggcctggcactggccccatccgcaatggcagccgacacgaccatcacactgcaaggtgcagacggagcaagcctggccggacacacgttcaacgtctaccagataggcacatacaccggagtggtgctgaaaggcaaccagatctccagcctcggaatccaaggcaccaccgaatccaacgcatgggcggatgacgccatcaccatcgccaacggctacgacaaggacacgtccgacgacatcaccaaggtcggcggatacgatgccgcaggcagcatcgccgccatcgacatggccaagcaggccaagcagctgagcaacatccaagccgccctcaacgcctccagcaggaagccggccaccgtcacgggcggagccgacctgaccacgcaggatgccaccctgaacatcaccgtgccgaaagaaggcctctactacatcaccgactccgcaggcagcccgatcatcatcggcacaaaatccggtgcaggcaccgccatgagcggcgcccccggccgaaccctcggcgtcgcggtcatcaagtcgaagagcgtgacaaccgacaagaaggtcgtcgtggaccgtgacggccgacaggtctccaagcagggtgatgccgccgacccggtggccgtgaccgtgggtgataccgtcacccacaccatcgacgtgactgttccgaacacggccgtcaaattcaagctcgccgatgcccctgccggacaggaatacgtgaaaggtagcctgaaggtggctctgagcgggactgccactgacgtgaccgccgataccgtcatctacgacggcgaaacccagcacggcgcgaaagccctgccaggtgacgccactctcaagaaggaagacagaaccccggccgacccggatatcaccgttccggccggaggctgggctctgaacgccaccaagctcatcaccacgcagggcggcaagaagatcaccatcacctaccagagcgtcgtcaccaaggccacggccgagaaaccatccgaaaactcggtttccggcaccgccatcttcaaggacggagcccactacaccgtcgtcaccaatggcgacaaggttgacctgaaatcctacgatttcaccctcaagaaggtgagcgcagccgacgtgaacacgctcgtggatggagctgaattccagatccaacgcggagacaaatacctgaagctggatacgacgaccggcgaatggtccgaagccgccgaccaggcttccgcgaccacattcaccaccggtgactccaacaacgacggcaaggtcgaccataaggacaatgccgcgcaaaagggtcttatcgcattcaagggtctcggctacggcacctatacggtgaccgaaaccaaggagcccgccggctatgcctcctatgcgaagccgagcttcaccgtcaccatcgacgatgcaggcaccgccatcaggttcgccggcaaggatcagccgggcctgaccaccggtatcgacaacaacacggtccaagtcaagaacatcaccaacctgacccaactgccgcagacgggcggcgtgctcgcgttcgcgttctggctggcctgcgccatgcccctgctcgcgaccggcggcaccatggccgtgcgcggcgcgcgcaaccgccgcgacgcgctgatgctcacgcacgacggagacaccccggccgtctgacatacgggggcgcggagcaatccggatcatgccgtgtcccgcgcccctcccccttcgttttcattcatggttcttttggctcgccgcaaggggttcgtgcgggtcctggtccatccgtcacggacagtcaaggggcggggaaggaaaaaacacacatgcacgcatggttgaaacgggcggtcgcgggactgttgtccgcggtcaccctcctgggcggcgggctcctgacggcgggcaccgcgaacgcggacgagatccgcatgcccgacatcggcaagaccatcacgagcctgacggcatcggccgccacgacgtatccaagggagctcgtcaacggcggattcgactacctgcccgcggacgcttccacgctgcccgaccatctcatcaacggcgacttcgaatacccgaccgccgacatcatggggaaatcggacgggcaattctggtatatcagccagaacgacaattcatggtggacgaacgtgaagctcaccggcaaggagaagcgctccacgctgcccgccggattcgacaagagcaagttcgcatggcattcgacgcagaccgggaacacgcactatccgaccctcgaacgcgctgatgacatacaggtcgattacaagggcgacggcacgaaccattacagcgagatcaccgccgcgcaggccggatccacgctctatcaggacgtggccaccacgcccggcgtcatgtaccgttggagcctcaagcacgcgagcatcaactcggcgaacatcgaccgcatgagcgtcatgatcggcgaacccggcaaggagaccgctcaggaggcgacgcgcaccaccgtcaacgggaacggcgacaagaccggcaaggtcggcaccgagatcgccaccaaggtctccaacagcgcgtccgacgggtggaaccgagtcggccagtgggagacctacaccggcacgtacatcgcaacctcgaccgtcactcggttcgcgttccgcagcatcgaaggcggcggcaagacgcagggcgaagcgtgggacggcaacctgctggacgacgtgcagttcaccaaggcgtacaagctttcctacgataagaacgcttccgacgcgtccggttccgtcccgtccaacggttcggcagacacgacccaacccgcatccacgtccggcgaaagcggcgtgaagaccgcagcggatacgtcggacgacgtgaacaaggtcgtgaacggggacttcgagttcccgaagtggagccagtacgatccgaaggcgggcggcagcgaagcgctcccgtggatgtacctcgatacccaaaccggtaaggcgaagacctattggcaggcgatggcgggcaactccggcaagaccatcaaaggtctgaacacgaccacgttcccatgggttgacttggatcatccgggacagttcgagatccaccgcgagaagaacggcaacctgtacgccgacgtccataaggaccgcaccgtcggacaggtcctccagaccgagccgaacacctcgtacacggtcagcatccggcattccgcacgcagcaagacccgcgcggggcatgagaacagcgaacccggcgcaatcaccatgctcgccggccccgacaaggatcacctgaccgcaatcgaactgacccgcacgacattgagcgagaccggacgcaaggcaggacagaagctcggccccgccggaacgaccgtcaccagccccgacgacagcgtggacggcaccaccgaccatgcgggctgggatcacacgaacggctgggagacgtacaccggcacgtacatcgtccccgccggacagaccagcacgctcttcgcctaccgcggcagcgtgaacgactcctgcatcgacgacctgagcttcacgaaggcatacccgctgtcctacgacaagaacgctcaggatgcttcgggttccgtcccgtccaggacgaaggccaacggcaccgaaaccgcggccgcgaccggcaccggttccgtgaagaccgaggcggacacgaccacgaacaaactgccggaccacctcgtcaacggcgacttcgaatacccgagcatgaagagcctgcaacactacttcgccggcatcgaccgcaaccgcagccagtggatcagcaacggacagggaggcgacttcgccaaatggtccgacatccccggcggactggacacgaccagattcggctggtccagcacccagacacagggcgccatgtccgaacagcgcgcgaacgccgtcgaactccagaaggccaccggcgaaaccacccagatgggcgaactgtgcgcaagccagaaaggcaccgcgatctaccaggacatcgccaccacgcccggcacgctctacaggatcgagctcgaccacgcgagccgctacagcatccaccttgaccagatgcaggtcatggtaggcgcgcccggccacgagcagcccgtcgaaatgacccgcaccagctcgaacaagtacggcgacaagatcggcgagaagtccaccaccatcgccacgcactcgaccaacccgttcggcaaccagtccagcaaggacgacttcagccactacgtcggctactacacgatccccgcaggccagtccgtcacccggttcacgttcaggcaggtatccggcgtgaacacgaccagcggcaacctgctcgacaacatcgtgttcacccaggcgtacaagctcgactacgacaggaactccgacgaggcgaccggccagaccccgaacgacaccgccaccgtcaaacccgccaaaaccagcgccacgggcggcgtgaagcccgcggtcgacgacacgaacaacctgccggaccatctggtgaatggcgatttcagcgtgaactacaaagaccaatggctgaccggcggttggaactggacatccatcacccctgatggcaagtacctgaactccgtccgcaactggaacgacagcgccacaacctggaagaccgtcaatggttgggacaagaccaaatttggctggtccagcacccagaaggacggtaccgacaacatccagcacaaggccggcgcgaccgaaatccaatacgatgaccaggccgacaacgtgtacgcggaactctgcgcctacgagaagggcaccgcgatctaccaggacatcaagaccgtgcccggcaccctgtacaaggtgagactgcggcacgccagcctgaaccagaactacctcgacaagatgcaggtcctgattggcgcgcccggccacgagacgcccgtggagatgacccgcaccaccgtcaacgggcacggcgacaagctcaacgagaagtccaccaccatcgccaccaaggtcacgaacaacaacgaccgccaccacgagagccagtgggagacgtacgagggcacctacctgatccccgccggccaggccacgacccgcttcacgttcaagagcatcgacgccaagcagctcgactacggcaacctgctcgacgacatcgtgttcgacaaggcgtaccgcctgacctacgacaagaacgcgtccgacgcctccggccaggttccgtcgaacgaacgcggcagggagaacaccgtccagcccgccaagtccaagaccacgggcagtgtcagactcgcggctgacaaaaccgcttccggcctgactgtgcatgatctgaagaacggtgaaatcgcccccgtgcagtacggcgatttcaagttctccacgaccgatgggttcaccgcggaccagatcaccgatgtgaacggcttcgacgtcaaaacgaactgggatcccacggaggagaaccaggcatacgccggcaagattctgtccaccatgtaccagccgaacaagaatggcgcgaacctgatcctgcaccatgtgggacagtggcgcgactcctccggcacgcaacggtggctcaacgccaagatcaccgtgaacggacagaacctcggctccctggtgtacctcgaatcgaagcacgagttcagggcatcgtatggcaagtgggacttgcatccctcgtcccgcccgtacatggatgtgaccgtcgacttcctgctggacgacgggtccacgccgcagggactgcgcggtgcgaccggattcaccgacatcgacggcggcaccagcggatacaacgagggcgtcgaactcgtcagcggcttcgacggcgcgtacgtgcgctccgacgcgcatctcgcccggttcggcacgaacggctgggccggcatcacggacgagaacaagaacaatgccgacgcgcatggaatgaagcattacgtcggtgccacgttcaccggctcgtccttccgcgtccgctggtcggtcgcctcgggacaggcccgccagtccggcttccagccggtcgattcgaccatcgcctaccgtctcacctacgacaagaacgcgcaggatgccaccggttccatcccgtccgacacggccgctaacaccactcagcccgcgaaatcggagaccgacggcaaggtgtccgacctcgtgcagcgcaccaccacgcatgaggacggcagcgtgaccgtcaagaccatcgacacgagcacggacgtggtgtccggctgccaggtctattatccggccggcaccaggatcacattggcgaccgcgaaggccgactccgactgctgggattccagccagatcggcaggcccaaccgcacgttctacggttggagcgcgaacacggacgccaacgacagggacgtgcccgtcgccgacaccatggaccggaacacgctgaacgcgaacgtcaggacggagatcgtcatgcccgccagggcgaagaccgtatacgcattgtgggccatcaaccccaccctgtcgtacaacgtgaacacgcccgccggatccaacgcgcccggcacgcccgccagccggaccgtgccctacaacacggccgcaccggatacgagcggctggacgacgggtgacacgggcaagattcccggctaccggttcgacggctggtacaccgccccgaacggcggaaacaaatacgatttcaacacgccgctcaccaacaacgtgaccgtctacgcgcactggatcggcaacgggtacaccgtcagattcaccggcaacggcgcgaccggcggcaacaccccggaccaggcgttccaatacaacatcggccagaacctgcgccggaacgggttcacgcgtgacggatacacgttcaccgggtggaagcgcgccgacaaccagcaggcgtacggcgacggccagtgggtcaacaacctgaccacgcagccggacggaatcgtcaccatggtcgcccaatggtcggccaacgaggcccacatccgctacaatccgaacccgcccgcgggcaagaccacgggaggccagggcacccccaactgggacggccacaccggcgacacgcccgccatcggagggaacggctggacgatcgacgggtacacgttcgccggctggaccaccagcccggacgggagcggcgccaggtacgcgccgggagccaggtggacggcgaacggcacgctcaccctgtacgcgcagtggacgcccggccaggccagcctcacctacgacggcaacggggcgaccggcggcaagaccgacccgcagaacggggtcaccgaccagaaggtcaacgtacgcgacaacggattcacccgcgacggatacacgttcgtcacgtggaacactcaggccgactgcaagggcaatgcagtgaaacctaacagcgagtggacgttgcgtggttccagcaccctatatgcctgctgggccggtaacgcacaaaccctcacctatcacggcaacggcgcaaccggaggcaacacggcggcacaatccggcaagaccggtgacgaactgaccacaaacgccaatggtttcacccgcgacggatacacgttcgttcgttgggacaccgccaaggacggttccggcaccgcatacggcgaaggcaagaacggcgtcagccagtacgtgatgaagccagcaggcaacgacctgtacgccatctggaaggcaaacccggcaaccatccagtaccgcaacgactggccgaacaccacaggcagcacacccgacacgacgggcgtcaccggccaggacgtgaccatcgcccgaaacgggttcacccgccccggctacacgttcaccgggtgggccagggacaggcgcacgaatccgagcctccagcccggaggccggtacacgctcactcccggcaccacgacactgtgggcccaatggaaggccgatccggcgcacctgatctacaacagcaacagcggctccaccagccagacccgcaggacggacggcgtggtcgaccagacgctcaccgtcatcgccaacccgttcacccgctccggctacacgttcaccggctggaacacgcaggccgatggcaggggcagggcgtacacggcgggcaacgggttcaggctcgtcgccgacgcgaagagcaacccggtcaacacgaccgttctgtacgcgcagtggaggatcaacggggtcgccctgaagttcgatccgaacgggggcaccggcggataccctgacatcaccgtcgacgcgttcacgacggtcaccatcccggccgacgcgaaggagccgaaggtgcaacggcccggcttccggttcaccggctgggccatgaaacccacgcccggcaacggcgacacgatcctcggccccggcaagggcacggtcgccatgcccgaccagggcagcatcaccgtgtacgcgcaatgggcgccggccatgaccacgctcccgttcaccggcggccacgcccaggtgccgaccatctggctgtacgccggattcgcgctcatgctgatcgcgctcggcgtgatgatgccgatgctacgcatgcgcatggccgcaaccaagcgcaccggtaagcacatgccgatcaccggcggaaagcacgcgaagtgacggcagcggccgaaaccgacgtgtgggagagcgtcgcggatgcggtccgcgacaagcgggcgcgcgacaatcgcgcccgccggctcgtccgccattcccggatctacgcggtcgccgcagtcatctgcctgatcgcgggcatggtgcttgtcgccatgccccgcatccagcagacgctcggcgaccgcgccgttgacgagcaggcgcgatccgtcagccagacggccgcgctgtttccggaatcctcccgtcaaagcgtcatccaatctgccatcgcatataatcagcgtctttatgaaggcggtcagccacagataggcgaacctgtgttcgatgggaagaccgagggcaatttcgagggcgatgccgaataccggcgtcaactgtccgtgaatgggttggatgccatgggtgagattctgattccgaagatcagcgtcgacatgcccatcctccacggagctggtcaagatgtgctcgaacatgcggccggccatctggcgggcaccagtctgcctatcggtggcaagaatacgcgcgccgtaatcaccggtcattcgaatctgaaaggcgcgaccctgttcacccggctcggtgaactcgaagacggcgacccgttctatatcaaggtcatgggtaacacgctcgcctatcgagtcaccagcaaacgcatcgtctctcctaccgacacgaaatcgttgcgtgtccataaggggaaggacgaggtcacgctcctcacctgtacggggcagggcaatacgctgcgactgcttgtcacgggggagcgcaacagcatgcccgatcaggcccccttgcccggagatgccacgggggacgtaaaaaaggcggcttttgtttcgggcgtcaccgtgacggggatattggctgtcggattttcgctttgtcgcagtcggcgtgccgtgggtcatcatataggtttgccacggacacatgatagtgacaatttgcgttagtaaaaaaaggtgttactatatgtttgtgaaacaaaaacacgtaatctcccgacatcggggtaaacccgaaaaggaagacacatacacgagaaagaagaaactccccatgacacacggcatcaccaagatcacagtggcaaccaccgccgtgatggcaacccttgccgctccggcagtcgcaatggccgaagaaaccacaaccaccggcgaccaaaccaatcaggcaatcacacaggcccaagacagcatccagcaggcacagcagagcaccaccgaagccaaccaggccatcgcacaggcatccccgaccggcgtgaccgaagcacaggccaaggccgacgccgccgcagccgcactggacaccgccaagcagaacctcgacgccgccgccgcccagcagcagacagccgcaaacaaccagcagcaggcgcaggcgaactacgacgacgccaataaggcccagcagcaggccgcacaggatgcgaccggcacggccgacaagatcgccgccgcccagcaggccgcgaacgacgcgtccaacgccatcaatgacgccagcaaggccatgcggcaggcctccgatgaccagtcgaaggcagaagccgacaagcggaccgcacagaccgcgaaggatgaggcctccgccgaatccgcctcccatcagaaggacgccgacaaggcccagaccgatattgatgcggccgacaagcaggccacggacgcgcagaagaaggccgatgacgcagataccgccatcagtgatgcgcagaagaaggccggccgggccgacgcggacgcaaagaaggccgcggccgacaaggccgccgccgagaaggagctggccgcggccaagcagcagcaggccacggcgaccggcgacaagacgaaggccgacgaggcggtggacgtcgcgcaagccaagctggatgcggccaggcaggccgaggccaaggcgcttgaagccaagcagaaggccgatgccaaggtcgagcaattgtccaaggatgatggaggtctttccgacctggccgcgaagctcaaagcggcgaagaaggccgcagccgacgccgccaccgcccagcagaaggcggaacaggcgcagaaggatgccgacaaggcggtgtccgactcctcttccaacgccgaggcgaagcagcaggccgccgccgatgccaagagcgaggccgacgccaagaaggaagcggcagacgaggctcaggacaagctgtctcagggcgcagtggcctacttcggcgacaagggtgcctctcaggcagtcaaggttctcaccgatccgaccgtcaccgagtatcttgacgccattcataatggtgccaagggtgatgcgaccacgttggacaacatgatcgaggccctgaagttcatccaggaagccaatcagcttcgcgcgaaggaaggcctgcagcccctcaaggtcagtgacaccctgatggcacaggccatggcggatgcggattatgccaacaacaacgtgaaccatccacttcaattccccgccagcgaaaacctcgcctggggttacactgatccctttaagggctggtacgacacggagaagtccatgtatgagaaggacatgtccgacggtgtcctggattgcaaggcctcggacggcaagcccgtcaaaccctgcgcttatggccattacaccacgctggtcaaccccgatttgaccctcaccggtttcggcgtcagccagaacggcaacatcacgggtatcggcgggaacacccatagtcagctgttcaccgaaaacgctaacggaatcggctccgacgcgggccgcatcatggacgttgacgcatacctgactgatttgactgcctaccgtgattccctgaccggagccgacgccgcataccagaccgcattgtccaagagcaagcaggccgcacaggacgcttccgatgcggccaaggcgctggccgccgcccagcagtccgcacggaaggccgctgaggaagcccagcaggccgcgcagaaggccagggatttgcaggctgccgccgacgaggcgcagaaagcgtatgacgaggccgtgaaggcgaacgaggacaaggccaaggcgttggaggaagccaggaaggatcaagccgataagaacgcggcttattccgccgcccagcagtccaccaaggaagcccggtccggagccgccgccgccaccgacgcccagaccgcagcccagacggcagtggacaaggcgaacacggcagtcgccgccgcacaggcgaagatcgataccgccgacaagctggcccaaaacgccgccaggaacaagacggatgcggaagccgcgatcaagcaggcgaacacggacaagacgaaggccgaagccgacctggccgacgccaaggcagccaaggccgaggccgagaaggccaagcaggccgcgctcgaagccaagaccgtttccgacgcgaaggttgaagccgccgccaagcaggtcaaggccgccgacgaggccatcgccaacgccaaggccgcatacgcgaaggcgaaggacgacctcaacgcggccaccggcaagctcaacgacgcccagaacaccatcaagcgtctgcagaacgccgaggagaacctcaagaaggcgaacgcgaagctggccgacgcccaggcgaagctcgacgaggcgaacaaggccaaggatgaggccgacaaggcatacgagaaagccaaggccgactatgatgccaagctagccgacaagcaggcgtccgacaaggagcttgccgccgcgaagcaggccgaagccgaagccaagaagcaggccgaggaggaagccaagaagcagcaggcggcccagcagaaggccgaccaagccaagaaggatgccgaagccaagaagcagaaggccgaacaggccaagaagcaggctgcaggtgtgacgaacaatggtctggcctccaccggatcggacaccaccgcaatcgccacgctggcggcgatcatgaccatcgccggtgctggctgcgtgctcctgcgtgtacgttccgccaagcataccgatggatggcatgcagtcgaggactgattctcaccgcaccaaacgtgttttgcccgacttcgacccgaaacaggggagaggcgggcaaaaccgtatttccgcattccgaggcaaaacggtagcttcttttgttactatcagaaaaaagtcagtgaattgcgtgaaagggtctggctatgaacgatgtgggccatgcgccactcccgggcgacgtgctgctacaccaatacctgcaaccaaacaacatcaccatgtaccgtctggcgaaagccatgaacctgccacaaaccaccatcagtggcctgatacacgggaaaagacgcatcaccacaagcctcgcataccagctcgcctacgtgttgggcacatcaccggaatactggctggaattgcagatgaattacgacattgaaaactacgacaaattcgacgaaagcggactgacggtcctcattgataatacggtcggcgacactgtctagtcagaacgatgacgagcagaagaatccgctaacgccagtttcgtccatgcccactttgatggcctcgattccgccaattcgttttccgctgccgcgcattgtactgctgaggatattctgtgctggcgcttgtccttgtattttctccctcggagtggctgaatagggcttgtttccattggtttgcgttcatggaattctttcttagttgggagaggggacttcttattgagaactattcctatctgacataagatacattatcggctaaaaaaaacgattttaggataatgcttgtttcgcttcctcctagaagagctcgttttgtattggtttgctgagtcgtgcgtggatcagcttgatatagtcggaatcgagttcgcttgccgtgcattgcatgtgttcgagcagacatgcttccaatgtggtgccgcttccggcgaacggctccagcacgagaccatccgccggggtgacgagacggacaagccagcgcatgagttcgaccggtttgactgtcggatggaggatgccgtcgactttcggccgttcagacggtgaggctttcggacaatacctgaaaaccgggtagaatcgactcgcgccgcccatatcgtcatattcggcgcccgtatgggtcatgccccagccgtcaccgggtttcgtgcttgcgcgtggtttgccttttcgactgacggtgacgccggactgtcggtcgagttccttggccgtggactggtcgaacagcatgttcggcgtgaaacgggcggcagccgtgtagtcggtgcgattcgctttgtccgcaccatatacatggttgtctctcggcccggagccgaaccgtccatgctggttcttgcccttcgactccgcctcgtccgccgtgttgcggaatgggacgcggcatgcgtcgatatgcagtgcgcctgtcccgtgtccgagcagattgtgggcgagattcccgtccaacggcttgcgggccagacagatgggttcgtgcgcgggcttcagctggctgtaccagcctttgaacggtttcgccgtctcggatcgcgtcggctccacatcctcgcggcgttcccggtcgatcatgagcgtcgcatccgaaccgtgtggcatgccggacgcgtacacccagtcgatctggtcgcggatttcgaagcccgcatcctcgatggcgcatgccaaccgatgataggtgcggctggctgcgaacgccgccacatgcccgcccggcttcaggacgtgcaggatatccttccacaggtccacgtcgaacgcgatgcctgtggaatcgaagctgcggttcatgaaaccgatctcatacggcgggtcggtgacgacggaatccacgctgttgtccggtaaggaggcgatgagccggcgacaatcccccttgtataggcggaggttgtcgcccagatcttccagctcgatcaatgtcggaaccgtttagaattccgggtcggtgccgtcgccgttcggatccgtgctggctggcgtggtcgtagcccacggatccattgcgggctgtgagggtgctgcaggttgcgccggtgtctgtgcgggagcctgttggctgtaaccctgctgctggtagttgttgtatgcgccttgctgatagccgttgttcggctgctggtatccgccgccgtaattgttctgccggtagccgttgccgttggactgttggccgctggtcttctgaaattgcgtgacgccgaaccggaggctgacacccaaatcggtgacgatcatttcaagattgctacgctgttggccggtggtcttgtccgtccaattgttggttttcatgtaaccggtggctaccacgcgcatgcccttatagcaggagcgcatgatgttctgggcgaggtctccaaatgctgcgcatcgcatgaatacggcatccccatccacggtctgcccgttacggtcacgtcgacgcgtattgtgcgcgatggtgaaagtgaccgtatctcccctctgctcggggtttgctgtgatattgcctgcgagtgtgagtgtcggctctcctgccatgggttcctggtctccttattttttctatgtgaacatattcagtataacaagcatatacgaagaaaaggcatgtcggataagcatcaggacagaggagaaaaacctgacaccaatccgacataccccttttagcaggatgggctcactccactacggcggaatgagcccatcaaggtttctatccgatcagcgtgaccgccttacaggcggatacgcttcctcgaaccagccagagcgagagcgataccagctccggcgaggaccccggcccacaggagcatcggggtgccgacaccagtggaggcgagacccttctccttgacgagcacagtctcgttcgacttgcgcgcgtcaccataggagataagcttgcccgtctggtcgtacaccttctcacgccagtagtaggtgccggtttcatgcacggtcaaggtcggcgagtggacgccgtccttcgcgtcgaccttaccggtgacggcgatgagcacgtcgcccgactggtcgccgttggactgcttccacaattcgaattcagccttggctgcctgctcgcagttcttgagcaggagctcgtcatgcaggtcggccctgccgttctccatcgtgacctcaccctggctcctggtggacacctcgcacttcggtgtctcaggcttccggacgcgcacgatctcggatgcgaggccgaaagcgtgctgtaccttgccgtgggtgagctgacgccatgcgagggcggtgagcggattgtggttctggtcgccggtcaggcttggggtcatggtccaatgccaagcgtaggtgcccgattcggtcagggtgaacgagtcggtcgtgtaggtgccgaacttggtgacatccttgatgtcggtttcgtggaccttcaccgcgttgtcgggcacggtgtcggtctgctcgatcgcggccgccggatcatcggagaccttgtagaggacgccgtggaagtcgaggctcagcggggtgctcttcggggtctcgccttcggtgacgttggtctccgggtaggtgggccacacgtccttttcgttggtcttggcgacgacgagcttgtcgatggtggtctcccccgccttgacttccttgctggacactgtggagtcgagcttcggggtgaggcggaacatgacggtctcatccgcggtgaacggagcctcatgaacatccttggcgaacggataatcgtcggacggtttgataccggtctggctttccgtgtcctgatccttgttcgcgatgtcgaacacgaacgtcgcgtatccggatggcaggttcgtcagatccacaccatcctcggccttccattgggcgacaggcttgtcctcgtcactgctggaaatcaggtagtcgccggccttgttcgtggtgaacgtcgcggtggcgagcttcacagcctgcttgggcagttcgacggtcttgcctgcggcggtatccttctgagcctgttcggcctgttcgcgggtcatgcccccgtagagcgcgccgttcacgcggatggtgatctggttgacttccgtttccctgccttcgccctggccgtccttggtgtgcagccagtcggcggtgtcggtcttgccgtcaccgttcacgtcggacacgcccagcgtgaccttgtcgcggatgacgccgcccttttcaaggtagacgacatcggtcttgtcggatgcctgagcggaaccgatttgcacgctcggacgttcggtgccatcggcgccggtcaccgtgctctgatcgttcttgtaagcgtcgctcacactcgacttgatggtcggccgcatgttgcgcacgtgctgagtggtttccgcttccagcacgttgtcagaccagtcgtagtcggcgggcaggtactgcctcatgttggcgtcctgcatgccgggcgtgatctcccacacccatgtgtaccagccggtggcgggcaggctcgacggggtggctcccggggaggccttcacgaaaccggggtccatggtgatggaggaggcgtccacatgactggtggcgccgtccctgtcgccggcgacggtcgcggtcgcggccttcaccccgtccctgacggtcgtccggccctcgatcggcttgttcgcgaagtagtagagggtgccggtgctcttgatggtggcgccctggatccagtcgccgcccgtcgggtccgcatgccaggtcagatcatcctcgggcgcgtgcccgtattcgatgcgatggtccgactggtcggaccggatggtcggcttgaagttcgcctgcacctggaacgtgatgttacttgtctgagtaccggggtcggtcggactcatcagattctggttcggagaggacagtatggcggctttcgggatcttgcggctaagcgtataagtcacctcgccgttgccggtcgcggtccatgcaagatgctgatcggagccggtggtggtgccgctgatggtgttctttccattctggtcgaacactgccgggccgttcagggtcgccgtgtactgggcacccgcgatgttggctccgttcccgttctggatgccgacgttgatggtgcctttgcgtttgccttgcgtgtactggtattccatgttcaggccggcgggcgtgttggcgaccgcctcattccacaggctgttcatcttcgccgtgtacgtgtcccagctggtcccgtcggcccagccgaggcgttggatgcccgacaggtattcgttgcccctcgggtcgagcttctggtggatcaggcccgcgatcgcggcctgcgtgaggtcgtccctgtccccgttgtacctgtcggtcagccatgcgaggcgctgcgcgtccggtttcgtattcgcgtcggtccactcgccccacgtgcccgccgtgcccgtgtagagcacgtcggcctcgatgcagtacgcgttcttcccgttgaccctgtctacgacgcccagcgactgcgccatgttctcgtacttcttcccgttgctgaacgtgatcgtgcccacgttcgtccacaaaccggggttgccgttctggatggagcgttcgaacgggtcgcgcatggtggccgcgttcgccgtgcccgccacgagcatgcccgccgccaaagtggcgacggccgcactggccgccgcgatcgtgcggaccacatgtcggattgtggaaccgcgagtgggattgttgtttctccccatatcgtctcctctgataggaaggatattttgtcgccagtgatggtcactggactcttgcggtttttaccataacgtcaaatcttgtaattaaccggttttttattgagattgaccgatattttttgtgagcggccaccttaccgttgcgcttgcaagcgcatatcattggatgcattctgaaattgtccacgaaacaaggcctgatcggcgaccgtgtattggagacacggttcagcctgacagtcaacgacatagtataaggaaagacaaatgaatgagaaagaagaacctatgaacatgaacgtcacgccaccggttgagccggtgacggaattcgaagtccacctacctccggatcgtaagcatccgaagtggctggttccgttgattgctgggggtactgccgtcgttgttttggcggctgtcggcaccggtggatacctgtattggaaccataatcagttgacggcggcttcagaggaatgcgccacctcatacgacaaggcggtgaaggcgcagaagaagctgacggagtatctggagtcggatgcggtgaagaccgcagtcacggtcaaggattcggaggtcaaggacgcgaagacggtcgccgtattggcctcgaccgtgaaggccgtttcgaatacgaagaccgatatccccggatgcccggcggatgggttgaagggcatccgggcggtgaccgcgcagctcgacaagaccgcgaccgcgtatgcgaagaccgtgaacgagatcaggggcaaggcggatgcggtcaacgcctcgaagaccgacaagaccgtcgccgacgcgaccaaggtcctgaacgactccaagggcagggtggaggacgacaaggttcgcaccgcattggagaacgccatcaaatcgaaggacgggaaggcgatctcggatgcggtgaaggcggtcaacgactccgtcagggcgaagtccgatgcggacgcgaaggccagggccgaaaaggaggagcaggcggcggagagcacggcccaggcgccggacaacggctcctcctacacgggcgatacgaccggaggctacaccggatacacgcaatcccagggcggatacacgtacacgccgcagcaatccaccggtggcgggtacacgcccgcaccacagccacagccacagccgcagcccgcaccacagccgcagccgccccagggcggcggcaacggtggagacggtggatgggttgaagataagttctgtggcgtattggggagtgatccacacccctgctgattcttttggagccggctcgggaactgccagcgaatcctgtccgagaaagcctcgtcgaccgaaaacgtcgataaggtggtacaggccgttccgtcccatgtcattcagtagtggtccttcgcggagaggatgcagagcctgtcgtcggcgacggtgtagatgatacggttggccgaatcgatacgccgcgaccatgcgccggacaggccccatttgaggggctcgggcttgccgatgccctcgaacggggtacgctgcatatcccgtatgagcgcgttgacgcgcttgagggtcttccggtcctgagcctgccagtacaggtagtcggcccaggcgtcttcggtccagcagagcagcatcacgcgcccgcttcgacaaggtcatgggccatcgtctggccctgccgtacctgcgccatgccgcgcatcaccttgtcgctcagatacgggttctggtagacgcgcagcgtctccatgagcgaatcgtagtcgtcggcgctcatcacgaccacgttgtcctccgggtccgcgttggtcacgagaagggtgtcggcgtcctcgttgaccttgcgcatataggtcttgagattcgccctgaaattgctgtaggccacggcctgtgtcatcacgcacctcctatttgtacaagaaattgtaccaccatgttgccggaacgcggcgcgccccgcgtcggtcgtagcgctcccgccgggcgtcaaacgggtgcatgtccccgccttaatagaacatttgttcgaatgctggttcggttcttgttttcgggaaggcggtaggtcatggcttggagattcgtcacgcacgcatgcgggcaccaggagcggatcaacgtggacggcccgtacgtggtcgtcgaacagcgggtgaggaacgcggaacgggtgtcatgtcccgcctgcatcggcatcgcgtcccggcagcgcaacaggctcgacgggttctgcgaactgtggggctcgaaatcccagtgcgaccgggcggagccgatacgacgccgcaccctcagccaagtcgacgtgctcgcccgccacgcgcgcatcgaggaccgtgacgcgttcgccgaactacgcagacaggtgctgcgcatgaacgacgcggcatggtggatcgaacacaaaaacgacgcggccaccatgctcgcccaggacatcgagctttaggattgcggaaagctgaggaagcccgtggacttcggctccaagagactggacgtcccatgttccgaagaggcgtatcttcgcttcaaaaaacaagggatgcctttcggcatccctgatgttgctgccatgctgtgaggagccagttgcaggagggtcccgcatgacagcaagctttgcgaacagactgcaagtcgaagaacggaggcgttcgcctcacagcctgttgactggatcagacgttttgagaccgatcaggagacggcgtcgcgtcgttccctgattccggttcggaggattcgtctgcatcattggatttcgtcttgcgggccacggccgtgattcccaatgctccgccgatgacgacgaggatgccgatgagccagccgacccagccgattcccacgccggtggaggcgagcgggctcacgccgttcgccggcggcttggaagtcgtgccgtcattgttgttctggctgttgtttccggcattgtcatcagggttgatggtggctccgtcatcgtccttgccttggtattcgaacgtccatgtgacggtcgtgccgtccttggaggcggtgaacaccagcttcgagtcggatgcggtcttgtcaagcttccaatcggatgggacgttcgagatcttcacctcggcgcctttggcgaccctgtaggtgccggatttcgtcgggtcgaagctcgggagcggtttcccgtcaacggtggctgccacgcccttcaatgcgtccgcgcccgtggcgggcttgtccggatcggtcgtggaatcgtatgtgaacgtccacgtgacgacggtgacgtcgcccttcttgatgtcgtaggacagggtgccgggtttcgcgccaagattcttatatctcgcccaaccgtcgggcaggccggagagtttcacctccgcgccgtcgggaatggtccatgtgccggtcttcgtcgggttgaacccgtcgaccggtttcccgtcggcggtggcggtcacccccgccagttcgcttggatcggccttgtccctggtgctcggcgtggtggttccgtcatcgtacttgaacgtccaggtgacggtcacatcatccttcgtgcaggtgaaggtgagcgtgccggtcttcgaatccgccttatggtcaagcttccatccgtcgggcacgtcgccgatcttcacctccgcgccgtcgggcacggtgtatgtgccgtccttcaccggattgaagtccttgacggcggtgccattggcggtggcggtcacgcccttcagctcgcccggatcggctttgctgctcgcatcctgtgaggcggtgtgcagcgtgtaggcgacggtgccgccgctcttcttgccctcgatcgtgacccggtacgccaggtcgccggaggtagacttggactgcgtgatcttcccgtcgacgagccagccggcggcgttcgtgtcaatctcgagcggcgcgcccatcggcttcagcagtcccgtgttcgaggtggggatcttgtccgcgatcgtgtcgagtgccgattccttgactccgaaatagtcggtggtggatgggtcgaacctgtcgatgcccagggcggatgcgatctcgtccttgtgattgttgaggaacgccttctctgcggtgctgaacttgtcgagcggattcggagccgtcgaacgggccgaaatcgacgaggacgggttccctgatacctgatccgcgaaagcggtgggcaacatgatcatggggcttacggacagggccaggccaagtgctacggcgacaatccgtttttgtttcatcatgttctttccttttcttgtttttttgcccgacatttcatgccgagtcagagaaaattaatggaaggcttgcgacctgatgcggtcgcaagccgttgctattagaagctgcgtccgcgctggcgccgacgtgcaacgagtccgagaaccgttcccatagccatcaacaccatcgacaggaacgctacggttccgccgccgactcctgtggaggcgagtccgagagcattgtttccgttgccgccgaatggtttgcgagtgacatgcaccttgtaggtggtcttgaccaatccgtcaccggatgtgacggcgatggtggcgtccgcacccttcttctcggtgctgacggtcatgccgcttgccttgtcgtactgcggggagaccatccactcgtccgggtcattcacggatgcggcatattcatgtttggccggatcgaatccgttgacggccgtaccgtccacgaggatgccggtcagctgcgccttgtgggttgctgccgtgatataggtgacggtgtacgtgtgttgcgcgaacgtggtgccgtctggggcgagtacgttgaccgtgtatgtgtaggtcattccctcgtgggctaccgtgactgttgcggattggccgttctttggcgtgtaggcgaaagtgccgccttccgggatgatgtaagaatccttgtcggatgtgacgtatttgccggttttgtcggtgtacccgtgcgatgcgagcgcggtgtcctgttggttggccgggtcgactgtggaagcctgtttggctgggtcggcgggcttgaattcggttaccgcggttttcacggggcgggtgacggtcagactgtagatgcggctggttccggttgcggtgtcggtgacgatccattcctgacgggtggattgcgcgttctgcgtgatgttgccgcctttgacggtgaccccgtcggaggcttcgggtagcacgtatgggcttggatccttctcccccaacgcgagcacgtagtcgagtcggttcggattccagttgtcgatgagctggcccttcgtgttttctccggtcttgttcacgtacaggccggtgagttttgcaggggaatcggctttcaggtcggccggctggaatttcacgttcaccgtgtagtcggctccgttcacgttcaccttgagcatgcgggaggctccctctccgagcgcgagcgtcggtttggatgcctgggcgtcgacaccgtgggtgaggcccagcgtgtagctgtcgccgaccgcatcggccggtagggtcagcgtgtattcgtgggtgtcggggttgaatttcacattgaagtctttggccccgtcgtatacggtggtttcgcctttagcgttggtgcgggtcacggtcagatcggtgaagcttgtatcctgggctcgatccgcggtgacatccacttccaccggcacggtgacgcttttcttgctggcggcatcctggatggtgacgtcgccggaagccgtcccggtgaggcgtacgaacttgctgacggtgtcgccggttcccttgtcgacaacctgcacgtctttgccccatttgatgggcagtgtggtcttgatgccggtgagggtcaccgtgtccgtgctgggcttgttggattcgtccagtgtcggaccggcgtaatccgcatggtattttccgccgtcaaccttggtgagttccgtttcggtgccgtccacggtcaccggggtgcccgaggtgtaggcgaacggcagtgtcacgtcgaatgccggagtgggcttcgtcgcgtcggcggcctgcttgtagacggcggtgccggatacgttcagctggcccagcttgtcgccggattccacggtgacgttctggtagtcggggctcagcgtgatctttcttgctccgtcagtgacggtgatgtcgcccgggtaggaggcgctttgatccaggaccgcggatgcggtgttgtctttcacgctgagaaggtatttcttgccttcaacggtggtgttccatggttgggtcgcctggtcgtcgacgattttgtcgacgatttcataatccgtgacggtcaacgtgaacttgggcgcggaatcggcggcgctggtgtagacgacgcttccggtgattttcccgttcgtatcaggtttctggctggtggtcagagtgttctgggatttgtctgtgccggacacgaccacctggttctggaacttgcctttgacggtggcgacggtcgccgcgtaatcgccgttggcgtccttttcgaaggtgacgggcgttcccgccacggtggtcgtgtattcggtgtccttggcggtctgagtttcactgctgccgttgttcccgtttgcggtgttttcgtcggcggtggccgtcatgactccgggccccgccatgccgagggtcaatgccgctacggtggcgatggtgcccgcgttgcgcagaccgctgctgttacgtttggccattttcgagggttctccttgcctgagttttctcaaacagttctcactgtaacctcagggtttgtaattaaccgattttttattgaaaataaccgatttgtttttcgcggggttgcaaccagttaacttaattgcttgctttcgattgttttcgtatgatatacttgagtcatgcgtgtcagggaatgggcgaggcgtgagggcttcaacgagcagacggtgtggcagtggtgtcgcgagaaccgtatgcccgtcccgttcgagcgcatgaacacgggcacgattatcatccacgacccgaaatacgagaaccagcccgccgcccccacagcgaacggcaggacggtgtgttacgcgcgtgtcagctcgtccgaccaaaaggacgatttgc

SEQ ID NO: 1380 - DNA, 3397 bp, Unknown
  R257_15m  MAG No. k141_1783
agcggctattgacaaacttgtcagtttggacgtattgcgtgtcgaacacgctgagccgcgacaaattagatgcctgctgctcggatgcgggtctattggaagtcatatttatcggcacatttcaatgcttgctttggaacatattactttggtcgatcatgatgttgccactgtagacaacatttaccgtcaggattacgtgcgaacagacattgggaagaaaaaggttgatgtgctgaaatccagggcgtcaagatgtctttctatagatagcattgataaaatgataacttgtcatagtgaacttgatgaattaattgaccgagagaaaatcaacttagtaattcaagcggcagacgttccaagcaccaccgaagtcgcaaggatgattaactactcatgtgataagaaagatatagcgttcattgttaatccaggctattttggtaattcggtaagtttgcctgaattctattatccgaacaataaatatgactatatttcttcacacttggcaatcaaaggcaagctattgctgcaccatgagtccggtaagcttagctatcgattatgttcaacattgggatcgttggtagcggaacaggttgaagattatcgatgtcattgctgtcctgctcattatggagaaaagggttacttcgatatatatgattatgcttggcatactgagcaagtttgtaaagaaccagtgccgcctaatcttctgtaggattccagtactggtagggtatggagaaattattagatgagtaattcgttaaggctcgtttctgctcctgtgcgcgaaagcaggttgtgggatatcccaggttacgtgccatggttcacggcggacagcgcgacggccatcggcgtggccctgcggtatctggcggtctctctgatcggatacaagctcaccggatcgaccacagcagcgggttggttgggctcgctagccgcgatcgcacagcaggcggccgccgtgttcggcgggacattcgccgaccgtcacgatcgcaagacactgatcatcgtgaacgcgacagcgggcgtcatctgttgggggtcagtcgctgcgctgctcatggccggcaagctggtcttccccgtgctgcttgccatcgcggtgttcgagtctgcggtcaacgggtttctcggccccgcctcggatgcgatgctcaaatccatcgtcgatattcgctcatatccgaaagcgcgcagtctcaacgaaggccgtgacgcgaccatcaacatggccggcagcccagtcggcggcctgctgtacggcatcgccccgtggttgccgttcctgtcggctgcggtcatgtacctgctggcaggcgtggctgcgacacgtatccgagtcggcggaaatccgcggaacggcagcgatagcggcaacggcgatagcgacgatgacggtgggaaagcgggcggcgcgtcatttttccgtgatttcgccgaaggatggtcgtggtcgctgcaccgcaggatgctggtgttgacgatggtgtcgtccgcgctggcgaatttcggggtcaatggcttccagtatgcgattcagctgcatctgatgcgcaccggcgtgaacgcgacgctcatcggattcgtgaatacgggcgtattcctcgcgatgctggcgggtgcgttcatcgccggacggatcagcgataccgcaccggtcgggccggtgacatgctgcggattcgtgttcatctgcatcgcttcgctgccgatgctgctgaccgacaactactgggtgctgcttatcgccaacgccgtgatgtgcctgccgttcccgatcatcaacgcgttgcagctcgggttcattttcggtaagacgcccgacacgatgcaggggcgtatcaccgtgacgcttaccgtaccggcccaggcactgtccgcgttctgctcagcgacggccggaagtctgctgcccgctttcggattcagcgggactatgctggtgttctgggcggtgatgctcgtcagtatgctgctaatcgtcagttcgcgcagcctgcgcaccattccacgcgccgaccagtgggatcgcacaccgctggagtagccgcggacggccaccaaccatggggactatgcaccgctgcgcgctgctctccgcacacgtcttccattccgcaaaccggctgcgctgacaggacgatgagtgcggtcagtttgcggcagtcagtttgggaagaactcaaaatctcgattcagcaggctcaaatcacgagttttcagattgtggtctggaaaactcggtggaagaggctgatcccgggagaaattgagaaatccggatgtccgtttgcgcgaccgattctatgaaaacttccggatgcgcgcgggagtttagcgcgaaacatgaatccggcgaagttctcccgggaacggcttcaaggtcgatttttgagaatcgcggaattccaacgtttttgttgagagattatgcatgagagtaccggattctcgtaaactcccgcgtccggcacgggagttcagcggcgaattcccgaagtcagcgtaaactcccgcagaatctgggagattatggcccgacgaggtctaccagaacgaactcccagattggccgccgttcagccagacgaaaacgacccagcaccggcggaatcgaacaaacaagcgccacaaccaccatcaagcagtcggcaacgtcattatgagctgataggaaccaaccttcttgtccgtcatcccagtaaacgttgcgttagttgacatgtcagggtattattctcgaacagtgtgtaaacacactattcacgtatacctctggcgtgtccggcgatgggatgcccgcggcggatatcggacacgatcttcccgatccggcactgttcccggaccacgcagtccgcgaccatgcacgccaggggaaccggattgccgtacgcctgccactgctcgagccgtccggcgtaggtgctgccggcatcatgcctgatggcgatgggctcgtaccccgcctgcatgagcatcatgttgaggatctggcgtccggtacgcccgttgtcgtcggcgaacgggtggatgttctcgagtgcctccgcggaggcgcgctccgacggggggtaccatcatcggaaagtccgccggaaacggcggacttttccatatccgcctccgcatcgtccgaaacgcccattctcctcatcagagaatcatcaagaagttgttccgtgcttactttcaagaatcttgatgcattaaccaggtcgtatacagaccagcctgttttccccgacatctttagggacatggccgaacggccaattcccatcgcttcggccaagctggactgcgaataaccataagccgtcaatagcattttgacattgaaggtgattgtcgactccagctgcttttg

SEQ ID NO: 1381 - DNA, 18506 bp, Unknown
  R257_15m  MAG No. k141_1908
agcggctatcccctgtggacttgccgtccgcaaacggttttgacaaaccgtttgccgccagcaagtttgaagattagacataaacaaatcctccgcatggtctaagccatacggaggatcaactgttttacggacacccgtctattgatcaagcggcgttttttcgtatagctccaatcagatgaaggcgcgctcgccgaagatggcggtgccgacgcgcacgatggtggagccttcttcgatggcgtaggtcatgtcgtgggtcatgcccattgacagttcggtgcagtcggccgtgccttcggcaccggaggcaataatctggtcgcgcgtgcggcgcagatgcgcgaagcccgcacgaatcgtgcgctcatcatccacatgggcgccgatagtcatcaatccctgcaagcgcagtccgcccatcgcaccgatgcgctgagccaagtcgatggcgtggctgggtgcgcagccggacttcgattcctcgccggattcgttgacctccagcagcaccccgaccgtaatgccgcgcatggtggcacgacgggcgatcttctcggccaactcaatagaatccaccgattcgatggcgtccactaccggcagcaccttactgattttgttagcctgcaattggccgatgagatggaaaggaatatgcgttgcagctgcggcattggccgtgtcagcctcagcggcatcaatcacgcctagcgaataaccacgctcccccagtcgttttgccagaccgtcagccttgacagtaatctcctgtggacgattctcaccaatcacgcgaataccagcatcgatagccgccagaatctcgccgacatcgcgcgtcttggtggcagccagcaattggaccgaaccggcagcacgcccggctgcggactccgctgaggcaatccggtcaagcacgcgatgcacaccatcagtaatctcttgtgcgcgcgcctgatcgataacttcgttggcgagatccttatggtccatgtatgccgtcattgctgcccctgttcgtagattccccaccatcgtagtctcatacgcgcacataatgcttgttattgaacaaaagtgaagcccccgctgttcatgcgcgggggcttggtgatgctaggccgagcgagtgggactagcaggtaccggacttgcggcgcttgaggatgattacacccgcaacagcaagtaccacggcgaggatgccaacaccaagcacggctgcaccggtgtcaggtatcttcttgtgcttgccggagtctgcatcacccttgttctggttggaatcgttgccttggttgggcttgtccgtgccggaaccgggcttatcgccaccctggccaggcttcgtggtgctcttctcaaccagacccgcgatggcatcgctgattgcctcagtcgcagcctgtacgtcagactgggcggcctgaccatcactcgtcagcgcattcgccgtagcgactgccgaatcaagcacggccagcgattcatcagtccactttgtgcgatccacggcagcagcggcatcgagctgagcgctcagcgcggcacgatcttgcaccgtagctacaagcaccagcttcttcgctgcctgcttcagctgggttgcggcatccaccaccgcagcttcggtggcatcctcagccttatacacctgctgcgccgaatccaataccgccgcgtactccgcccatgaagtctcggtgtacttggaggcatcgtcagccttaggcgagtcagcgagcgcctgtttgagctcggtcttgtcgatcggtgtgggctcaggcggctcaggcgtactgtcgtcaatggcatgaacctgccattcggcaacagccggagaagccgagccggacgtgataaccatacgcaacttggtagtcttgaccggagtgttccacgtgccatcagaccaccccttggcatcgccggtggcccagccagcagacggtgaattggcggtcacagtgtaggtggcgtcgggaatatccacgaagttgccggcaccgttgttcgccaaggcgtcccagtactgcaattcccacgatgccggaatacccaatccgccatcatccgaggtgaattgcacgcggctagagtcgatagtcacttcacagtcccactcgtagtcgaggcgcatctcaccggtgttgggccaagtgccccagacatcctcgttggcaatggtgatatcgggaatgatcttgccgtcgttcaacgcggcggcacccttgacccagccggatgccttgccgtccacatcggtggcggtggcatcgccctcaatgtagccggtcagcggcacggaagtgtcggatggaatgtcggttttcgccgaagcggacacgttgccggccttatcggtggcgcggtagtacacggtggcgcgcgacgcgctcggtgcagcaatcggcttgctgtacgtggcccattgaccgtctgtgccaatgcggtattcaattgatgcgacaccggaaccggtgccgtcatcagcggtcaaggtcagcgtgcgctcctccttatcggcggcggcggtcacggttggcgcggcggagtccaccttgccgccggccttggccacgtcggaaacgttgccggcctgatcggtggcgcgagcccacacttcgacatcgccctgctgggaaagcgtggcaatggccgcgtttgcattcgcggcgatggtggtccagctcttgccttgatcagcggaaatctccagcttggcgataggtgcggtgtcgtccgtggcctgcacggtggcgaacggagcggtggtgagccactcgctattgcctgcgttagcagtaacggcaacggttacagtcggcttcgtggtatcagcggcaggctggtagccgtcctgcacggtgacatttaccgacacattgccctgctcgcttgcctcaccgggcacgccggcgaccacgccgtaggccgtaaacgaaccgaccttggcatacgaggaagcatcaactggacgccaaattactggggaggcaacggttgggttcccgtacttcacatccactgtggccggcagagtaggcgcagtaccggtggcggtggtcacgctcttcggcgcagtgattgccggcgattcgctggagtcggagccgacttcccattcagcaacggccacggaggcatagccgccatccacagcttgaccggtcatgtcgagctttaaggcagtagtggtcaccgcatcgaaggtgacggcgttggggttggccttgcctgtggtcgttgtataggcactcgggttggtgacatccttccatgtgccgtccgcgtccaagtactgaatcttccacgaggcgggcgcgcgcagagcgttggaatccacgtcgaaccaaaccttagacgagttgacgcgcacagtgccatcccattggtagaccagagaatcgccggactgcgattgcgggatagaacggtagttggtccagtgattcggcgggaccacagcggtttgcaacacacggccgtcgttcaccgaacccttccaagcaggcgtttcagtgaacgtggcgctcacctttgcgtacggagccacgttggtggagggctgcgttttctcggccttggttggatgggcggtggaaaccatctggccgtcggcggtccaatcgacttcatcaatgcacacggcacggcggaaatcggtgccgccttccttgtcgccggtgtgataggtcacataccatttgtcgccgaactggagcaccgaggggtgcatcgtggtggccgagccagaaggcacgattacgccttggtacttccatgggccgagcgggctgtcggaagtggagtactggatgcaagcttgatagttcgattccacgcaggtggccgtgcccgaaccgggcttaccgccgtcgtacacgttgtaataggtatcgcccttacggaacacccacgccgcctcgaagaatcccttcgggccgttcgcgttgctgtccgtgtccttcatggtgtggaggttcggcgtggtgccatcagccttggtttccacctcggtgtatgaggtgcggccggttgtggcgtccttcttcatcttgatggcgagctgagtgccgaacgtaccaaagtgcaaatatccggtgccatcctcgtccacaaagaatgccggatcgatggtttcaatctgggtttgcgatgtggtgagcagcggcttgccgatggcatccttccacgggccgagcggactcttcgacttggccacgccgatggcgaacgggtcctgtccagccgcctcagaagccttgtccttcaccggcacgtagtagtagaaccaatcatcggaagtgtcgctcggggtgccgttatcgtcggctacgacttggccggcgtacgcgccatcgccggtggcccagctgaacaggtctgccttggcgatggtcttgtaatgtgtccatttgccttgattcaggccgtcttcatcggtgacgtatacgccccagtccttcatgttgaaggagccgtagtcgggcgaagcctcatcgtgaccggtgaagacgaagagtttgccgtcatagctcagcgcggatgcatctgcagagtagtagttctgcgaaagatcgttcggggtgtcaataccctcgttctgcccgatggggttgcgcatgtagctgggcagtgcgctattgtcgatttgggtgacggtgacatcaggattgttatacggcagttcgttatacgcgtgaccggcaacgctgggcgcgttgtcagcggtggctgaatcggcggccattgcggtcggcgcaagggcaaggcctgacagcaatgtcgctgcggcgacgagtccaccggccaccgcgcgaaccgattgcgcggatacatggaaactcatagtgctcctcattgagtgagtgaaaagagtaatgatgggtagaaggaaaaggctagagccccctctgtgagggggctcactcggcagaatgactccgttgcgggtcaggccgagtggcgagccgaaccgtggtcgccggactggcgacgcttcaggatggtcacgcctgcggcggtgagcagcacggcagccgcagcaactacggaaaccgcggcaccagtcggaggcacacgatcacccttgttgtccttatcatccttatcagtgtcggtcacaccaggctgctgggagccgggcttctgctcaaccttggtggcccaaaatgccttgtcaagggcatcctgtgcggcatcgacatcggcctgcttggcatccttgtcgtcgtacaccttctgagcggcggcaatctggctctgcagagcctgccatgcctcctcggtgtacttcgacttgtcagccttcttggcctgctcgatggaagcctcgagggactccttcttcaccgtttcggcggcgggcttctcttccaaggccttgacggccttgttcagcgaagcggacgcttcctggacggcggcctgagtgacctcaccgacctcaccgaccttgagcacaccttccgcagcctcgatggccttgttcaaggcctcgacactcttatccgtgtacttgccggaagcggcctcggctttggccgcatcgatggccgcctgcaacgtggacttctccacgtcggtggcgagcgcaacgagtgccttctggccgtcctcgagcttggtcacctgctcggcgacctgttctgcggtggcgttggcatcgtcgtacacagcctgggcagcgtcaatgatttgctggaactcagcccatgaagcggcggtgtagcggcttgcatcgaggccgttggctgtgtcaagagccgactcgagcgcggtcttgtcgaccggggtaggttcaggctcggtgccgtcaataccatgcacgccccactcggccacggcggccccgaaggtgctgctgccggtgtgcggagtgagcacgagtcgcagcgacttggtggcgaccggcttgaaggtcacagtgctccaacctttggcatcggtatccgcacgagaagccggcgagttacgcacaatggtgtaatcctcggtgggctcgacatccttccaagaaccatcctcggcgaggtactgaatcttccaagcgtccgggacttccagaccacccttcgaatcgtcagtctcagcgaagttggcccagaactgggcgcggctctggtcaacggtcacggactgaccgaagtcgtactgggcgtacatgccgtcctttgccttgccccaagaaccccagaccttgtcgttgacgttctgatcatccgtggtcggccaagtatcatcgacgactacgccgtcgttgagcttgccttcggccggtgaccaggtcgcctcggaatcaggcgaaatggtggccttggtcgccttgccttcaatccaaccgaccaacggctcaggctcaggctcaggagtggaggaaccgttcgggtcggcaaccacgtggacagtgagcttggcagctgcggaagacgaaccgtcgtcgacggtaccagccacctcgtagtcaccaaccttggtcaggtcgatggccttgatgtcggcatccttccacgtgaccttgcggtcgtcgttgtatccgttcgggaacttcaccggaaccgtggcgggcaggtcgatggacttggcgttctggtagacggtctgctcaaccggctgcgcattacccacggtctgcaatgcggtatcggaacgagctgcgatgtgtgcaaccgtaccgctcagcgcaccagcgacgatgcccttgacatcgaatacggcatcggcgaccagctgagcgtcggtcaccttatcccacgtgacggcgaggtcacggcgagaaccgtcggtgtatacggcgctcacggtggagggcagcttcagatcatcggccttggaaccggtctgcaccagtcggttgacttcgtccacgctcaccggctcgatggcgtacgcctcgaactcggaagcacccacgatggcgcccttcgggaagaccacgcgcagcttgtcggtttcgacggtgtcggcgaacttcacttcgttgccttcgttctgattgaccgtgtaggactggccgtcagccagcttcacatcctgccagttaccgtcagcgtcagcgtactggagcttccaagatgaggccatcggcacgccaccgccatcggtccagaagaagaccttggccttcttcagtggcaccttgccggcccacttcagttgcagccacggctccacaccagtgttgtcgccccagttgttccaggtctcgttcggcgtgttggtgtataccacctgaccgtcgatgaccttcttggcgttgtccttcggctggtagccgttggtgtagctggcagaggcgctcgactgcggggctacgttcacggtaccgtcagaggggatgccgtgaacggtgatttccttggagccttccttctcgccatcggaagcggtgagcttcagaacgtagtcgccttcctcgttgaaggtgacggtggtgctggcagcagtatcgtccacgaacttcgcggtaccgccctcggggccggaaaccagctcccacttagtggtgacgtcgccttctgcgggcagaccgtcatccttcaccgtaccgacgagcttggcaccggatgaggtgctggaagacacgtaagcatccacctgcggagcctggttctcggaagtgccgtcagccttgataccggtgttgtaggcttcgatctccttgacaccgacggccatgccggcctgcggcgtgaaggtgacgcggatagtcgtggtctccaccggagtgaactggatacggttgtagttcgcgcccgcgtagttcggggtgcgcacctgatccgcaatcggggcccatgtgccgtcatccttctggtactccaacttgtagttggcgggctcggcatagccggagatggtctggctggacgagctctggtagaagtacaagcggaggtcgtcgatcttctgcttgccgtccttgaacttgatattgagcgtgtcggtcttgttctcagaacccttggtaccccagaacgattccatcacggtcttgccgtccaccgcgttcttggccgggtagttggtgtccttctcggcgtaggtggtaccggtcacgtccgcgtccttggccacattcgtggtggacttggaagcggagtcgacgttggcaccggacttggcgaacaggtcggtcacacgctggtcggcggtgaaggcaacctggttggcggccttgatatcagaaccagcggcattggtgatggttacgccggccttgtcggcatcctcaacggtgcccgtggacggatcgtaaatgaggtgtgcgagcttgtcggaagtgaaggcgagcttgccccccacgtacaggctgtagccagcaggtccaccatagcggctgccgtccttatcccacacgatggaaacatcttgaccgtggtagctcaggttgttcaccgtgaagtagttccagccggggatctcaatcgggttcagctcaatcttgttatcctcgcgcggcaccataccggctacgtcctcgaccatcgtccagttcgtggtgccgagctgggtgtggtggatccaggagcggtaggtgatcttgccgccgttctgtgcggcgtcaaggttcttgtcgaggttgttgatcacgccgtcaccgtttacatcgccgacgttgttgttatcctcgttccagaactcgttttgatcaaggtagttgttatcgccgccctgatagtgcgcgaacgccacccagtacagcagtttcttgaactgctcattggtgatgtaaccgttcttggctgcatcgtaattgcggatgccggctgaatagacctgcagcagcggctgtgcgttgataatggagaagttgttggaaccggggaagttcagcgccgccttgtccgcctggttggcggtgaagaacgggaagatcgggaactcgttggaatcctcgaacaggcgcagagccttgttgtaatcttcgttgccggtaggcatcaggccttcggagtacgggtagtagttattgatctccttgtacttggcgaaagcaccgtcgttcagccacttgtgcttgagcaggttgtcggacttgtcccacagttcagtggtgacttctttctggatcttgtcggcgatggcctgcatcttctcggcgttggcggtatcgccagcggccttgtaggcctgagcagccgcattggcgttggcccacatattggcggaaccatcggcgcgatccatgcgctggccggagcgacccggctcagagaaggaaacggcgtcggcatcgttaccggtcatcgaccaccaggaccagtcaatcaagctgttgtcattgttgttctggttgtcgttgttgtccggctcgctcttggaagcgagtagaccttgcacgtcctcggcaccctggtcggccagctcctcggccacggtggacggaccgccgtgcaccttgtaggagtcccagccggcgcgcgtgatgtactgcgtgtagctatggttccagttggccgggtcgcccggattgtcgtggtagtagtaatagcccgccttgctcttcttggcggtatcgccggcggaaagccaggtgccgtaggagtactcggggttgcggaaccacttggtgtccatcatgaacatgccggaggtgagcacgatttggttgttgtagccgagcacaccctcgatggaggtcgggtactggaaggtgttgccaggcatgttggcgtcgagcatgttgaaacggctcagccaccagcggtagaccacggtcttatcgatattgtcttccggagtgtccacgtagggagcgttatcgacccaccacttgttgtaggtggtcacggaatccttgtaggaggcggcagcatccttaaggtcgccggtgtaacgggcctcatattccttggtggagtcaggcagttcgttggcgatcaggccgagctgaatcttgacggtctgcggttcgttggccttgaggctcaacgtgctggtgagtttgccaccgctgacgatccagttggaaccgtcctggttgttggcggagaagcgcggatagatggtcgtcaggttgttcttgacgttcacgcggccagtaagttcggtggcaccatcagcaccctcggcggcgaacggcgaggccgtggtcagtgtgacatcgcggtcctgcgtgctttccacggtgaggttcgcaaccatcacgttgttgtaggtgatgtacttgacttccttgatcttgaggctcttgccaccggtctggaacagggaggtgaagtagctcggcgtctgcttgcgctgggaggcgtcttcgttaagggtctggtttgatccatcagcgtttacggtaacggtgaagccgctcctgctggtctggtcccagtaggcggtatcacccacaaaaccgagctgattaggcgtgtgcgtgtacatgtaggcggcgcgaccacgggtgaacaggtagttgttgccgtcggagccttcatacgagtaagcacccttgtcgttcgtgcctttaccagttggctgtgcaccagtacgggtgagaatcttatcgatccagaagtcatggtcggtgtcgatgccggccaggttcttcacgtcgttatcgaatgtctcctgcagatagctgacggcagggttatatgtggtgttgttcgccgccgtcttcatcggatcatcagatcccttgaacgacggatatgccacatccgcattcttgatgacgggcgcatcggctgcctgcgcggtgactgcaccgccggtggccagtgtggcgaccgctgcaaccgcgccgattgacgcaagccaccgctttcgtgttgattgatgcattcctgcttggacctctccgccccggtctttcgcgtcttcgctcaggctacgtcgcatctatgagaccaggacttcttctgtggatgctgggccgcagagcccgttctccgtcagtttcctttattggctattgggttcaccggaatgagtatcttcagtgaatctggtgtgatatccgccatggatatcacggttggagcaattcaccgaagctgattccacatcataaccgagcgaatacggtttcgcaactttccctcagcgatatcaaccatcttatacaacaaaaacccggcaatttctcagttttcgcatttactttcgcattagagcattgctgcgtttcgccgtgtcgcagtacctacggcgcgccgattcagcctcgctgaatcaggaaccaacaggctcccgctggcgggagctggctcgcaaagcgagactgagggtggcttacacggtaccgcttatgaccaccctcagtcgactccgccgacagctctcacagcgggagcatataattaaaaatctcctgcacgggtattaccccacacaggagacctcattccccggatgtgttttcggctccaatcgatactgacatccggcctatgccgtcatcgacttattgcagacgatggcggcataagtattattttgccggccagttgcgcgcaggccggcatatcgccgatatttatcgacgctggaagacacgcatctcgcctatctcgcggttggcccacgagtagtacggcaccaagcgcagcgtcgcgggctcacccgcacgcggttcgtcggcatccacgtacagcggcgcgtcatcctcgtcggcgtgctcgcgcactgccggcaaatcaacggtatcgactccacccagcaagtcggcctggaaagccacagcggcatccgcaccggtgacgccatcggccagacgatagttccacaaatcaccgggattatcgacctgttcggcgcagtagaccagcggtccgcgcatcacggccacctgaccggcatcggagcgcacgcgggagttggcgcgcacgaacttcacggacatgtcgagctcgagcgcaatctccaacgtatcgccggcgttgaccacaaggtatacgaagccgtcttccagcgaacccactgcgggcttgccgttcacggtcagcgtgtaggagccccgcgaccagccggggatgcgcagtccgaaacggaccgagctgtcagtggcgctggcgggcaggctcaccgtgtattccacatggccatcccacgggaagttcgaacgctgctcgaccgtcaggccggaagcgaattcggctgtgttggcgatgaactggtggctcagcacggtcttgccgccgtcgcgctcggtgtagatgtagcggtccacggaggcgatgagtcgggcgatgttggccgggcagcaggcgcagccgaaccagtcgacgcggtgggagagcacgtggtgacggtccgggttatccagtccgtcaggcgtggtctccagtgcattgacgtagtagtactgcttgccgtcgagcgagatgccggcaatggaaccgttgaacagttccttctccagcacgtcggcgtattcgcccttgggctcgaggtcgagcatctgctgggcgaacatgctcatagccacggaagcacaggtctcaccgtacatcgtgtcgttcggcagatcatagtcgtaggtgaacgactcgcccacgtgggtggaaccaatcgcgccggtgacatacatacgacgggtgacgatgttcttccagaaacgcttggcggtgtcgatcagtccccgatcgccgagcagtcggcccacatgggccacaccagtgcacaggtagccgacgcgcacggcgtggccatccgcggtctgctggtcgcgcacaggttcggcggcctggaagtaggtgggcttgtagaagccgaggtcggggaagatgttgtcgccgttcagggccttcagctgcttggtgtagaactgagggtcttggccgcgcacgtcgatgaggtattgggagagcgtcaggtaacgcttttcgccggtttcctcgtacagtttggcgagggcgagttcgatttccgggtggccgtcggcgccatgaatcttgccttcttcgggcccgaagttggcatccaggcagtcggccatcttcttggcgacttcaagggcctgctcgttgccggtcacctgatggtaggcgacggcggcttcgatgtagtgacccatcacatacatctcgtggctttgctgaatcaggctgaagcgcgggcggtcggcccatacgccggacttgatctggtacggagtgtccaagtagccgtccggctgctgagcgcgggcgatgagatcgaccgtgcgatcgcacagcgccttgagttcgggatccggatggtaggccagcgcataagcggcttcctcaagccacttgtagacgtcggaatcctggaacaccatgccgtggaattcgtcgtccaattcgccggcggcaaccttcagattggcgaccgcgtggcttttgctgtcagccagctggttaccggccgggtcgtcgggcactgtggtgtcgatttcgtcgttcatcacgccccactggtaggggatgacggattcgacaatctggtcgcgacgccgcttccagaacggggaagtgattgtaacgttcatgatcagcccttcacggctccagccataaagcccttgacgtagtacttctggagtgcgaggaacaggatggcgcagggaatcagcaggatcacgacgccggcctcagtggcaccgtagtcgataacacccatggtctgctgacgcatgttcaccatcgccagcggcagggtggacttggacgaagagctcaagtacagcggaatcatgaagttgttccatgcttcaaggaaggcgagcaggccgaccgtaaccatcgaaggcttgaccacaggcaccagaatcttgaacaaggcctggaggctgttgcagccgtcgaccatggcggcctcttccatgtccttcgggatcgcgtcaaatgcgttacgcatgatgaacgtgctcataggcagctggaacagggtgatgactaggccgacgcccagcaggctgtcgttcagaccgatgtccttgtaccagaccatcagcgggatcagcagcgaggcgtacggcaccatcaggatggacaaggtgaccatgaagccgaggttacggcccgggtagtcgaagcgggagaacgagtagccggccagtgtgcagacgaccacggagaacacgaccgcgaccagggtcacgattatcgagttgaacaggtacttgggcagaccttcctgataaccgaacagggtcaggtagttggccacgccccagcccttggactgggccgaaccggcctgcgggctgaacgagcagatgatgacccagaccagcgggctgatgaagatgatggcgagcagagcctcaaggattcgagcgatgacgcgcttccacaatggggtagtcataatgtgttacctcccctttctcacttggtgttgtcgcgcatgccgcgcatctggatggagttgatgatgaccagggccaccagcacgatcagcgagagcgccgcggccatacccagatccttcttggaatcgaaggcgaagttgtagatgagctgcaccacggtcatggtggagttgttcggaccacccttggtcagaatgaagaactgatcgaaggcgaggatcgagccggtcacgcagtagatcaggcacatcacgatggtcggcttcatcagcggcagggtgatcgagcggaagatacgccaggaaccggcaccgtccatgcgggccgcctcgtacagatcaccggggatggcctgcagaccaatcatcatcagcagcatgtagtagcccgagaatcgccagacaatcacgataatcgtggcccacagggccgactggccggtggccagcaccgaaccgccctcctgcatcaggcccaacgagctcagaatcttggtgacagggcccacctgcggggaatacagtgcgtagaacagcagggacgcggacgccaggcccgtcgcggacggcagcaggaagcaggtacgcagcacgttgttccacttcgagctctcctgcacgatcatggccatgcccaggcccaggaccagcaggaagaccgtgacgatcacggtgtactccaacgtgaaccagatcgagggccagaacaatttgttctcgaacaccttgacgaagttgtccgggaagttcacgccgcggttgccgcccagcaggctccaacgcgagcaggccatcaccaccagcagcacgatcggcacgaagaacaggacgacgatcatcaaccagtccggcagcgagtacaacaggccgcgacgcgtctcggccgccttcgccttggacttatgcacgggcaccgccccggcgctcttggaaacactcgacatgtttctctctcctttggggaataactgtgaaatggtaatcacggaatccgaatgcaatccgatgtcagggcttcgaggaaggaggactccgaagccccgccaacacaccgcattcaagaggtatgtaatgatgaaggaagaaaaggaatgaagaagaagatagaagttcaattatgtggttgagccggcccctgccctcacaaggaagggaccggctcaatctgttcagttgttattcagttattgctgtgatttgatgagcgatggtgaggagcatcaccaccgaatcactgggcagacaggacgtcggtgacggccttgttgtcggccttgaggtcaccggaaccccacacggcgttctgcacgagcagctgccacggggagccagcggcgttgaaggcttcattgaaggccggggacttcggggtctggccgttgccgtcgatgatcacggagttgatggtctggatgcgcgggtcagcgtcgttgtaagcggtcttcagggtctggatgttggaggcggtgtcgccccggtcagcgaaaacttccttctgagtgtcagactgcatcagccagtagaggaagttccaggcctgagcaacgtgcttggagtccttggagatacccatggcatcgccaccgaggaacgtggaggtcttgccttccttggtgcccgggatcggagcgacgccgacctcgaagcctccgtccttctcagcatcgaacagagcagtggtggaggtgttcgggtaaggcatgacaccgatcttgccgttcgcgaacggagcggtccaagtggcaccggtctcttccttggagcctgcgcccaaaccgttggtggtgttggccagttccttgtaagcgtccagaacgcccttcatggagtcgttgtccagagtggcctcggagccatccttgttcataacggattcaccgtcagcccacacggacgggaagaggtcgaagaccagagcaccaccggactgaccggcgaggtaggaaccggcaacgccatccttgttgagggcggcgaccttcttggcctgctcggtgaactcagcgatggacttcgggccctgctccgggtccaggccagcttccttgtacagggccttgttccagaccatcacggaaacatcggtgatgaacggcagggtgtactcggtgccgtccacggtgccggcctcaatgtggccctgctgcaggtcggccttgttgtccagaccgtcgatctgcttggtgatgtcagtgaagatgccctcggaagcccagtacggaatacggaccacgtcgccggcgaggatgtcaggcagagagtcggtctgcgaagcaccgccgaccttgccttccatatcgtcgttcgggatgatctcgagcttgacctggttcttgtggctcttgttgtaagcctcgaccacgttcttggcctgacgctccagcggggaacgggtccacagggtgatctcggtgccatcgtcggtgcccttggccgggatgccttcggcggtggcggtaccgccattgccggagccaccacaggcggccagcggaacaatcaacgcggcggcagcgacgccagcaagagtacgggtcagtttattgaaagacaccatgttcgcttctttctctatttatccgctcaactatgagaggcggtggcggacggtccgcctccttggtcttcgccctgctcgctcctttgctcggaacaggtaacactgcgaaagccttttctcaatataaacgaacatcgccatttttgcaaaaacgctttcgcactttcgcatattttcgcatatcgaacaggtttgatatgcattttgcgcgattgtttgactcaaacaaacacttatttttagcgctttcttacggcgtgtcgccaaaagccaacatattcgaacgtgaacacaacgctttctttcattctcttctcaatcgcacaaaaatgatcactgcgccacgccaaaaatagacttgcgaaagttttcgcgtcatgtctacaatagaaaacaatacaaaggggtatcggtacaatcactactttcgcacgaaagagtgcagcaatatactgctgagaaagaaacgaggaatcgaggcattatggcccagacattgaccggacgcgcggcacggctcgaagacgttgccgctttggcgggagtctctttggccactgcgtccaaggcactgcacaacaagccccgcattagcgaagaaaccaagcagcgcgttctggacgccgcccgccagctcaactactcccccaacaaactcgcccaatccctggcccgcggcaccaccggcactatcggcctggtcacctccgatctgcagggccgtttctccacaccgattcttatcggcgcagagaacgagttgcgagcacaatcgacctcagtattgttggccaacgctcgtggcgacgccgcgctggaacgtcagcatgtcaagaaactgctgtccctcaaggtcgacggcctgctcatcgtgcagtgcgaaaccaacccccggcccacgcttggccatgactggggcgtgccactggtctacgtctacggcccctccaccgatatcgaagattgttcggtcacctgtgacaatgtggacgccgggcgcatggccatcaaccatctcatctcttgtggtcgccggcacattgccattatcggtggcgacgaaacctataccgccgccaccgaccgcaccaagggtgcggtcgaggcactggccgagctgggcatcgaaccggccgggccaatccggtacggcaagtgggacgaaggttggggccgcgccgccacccgtctgctgctcgatcagggcgtcacgttcgacgccgtggtctgtcaaaacgaccagctggccagaggctgcattgatgcgctcaagcagcagggcctgcgcattccggatgatgtcgctgttatcggccatgacaactggtctgtgctgacctccagctcgaggcccgcactgacgtcgatcgacaatgaaaccgagaccatcggccgccgcgcggcacgatacttggtcgatgccatcgaaggcaacccccatcacggtgtcgactacgtaccctgccgccttatccagcgcgaatccaccctcccgctggactgatatcactcgagaccctaccgcttcttggttttgcggccctttaagtagatgtcgatgacgatccatacgccgagggcgaaggccacgacgtagcccatgaagccgatgaccggaatgccgaagataatcggcttcatgccggcgtagtagacaatcgac

SEQ ID NO: 1382 - DNA, 11301 bp, Unknown
  R257_15m  MAG No. k141_2288
ccggccaatccacgaatgcgatatctccatagatgattgcgttctgtgcgttacgcagtactagggaaatcttgatttgctgtccatcagatggcttgaatccatctgccacggcgcggacctcgccattgaacgtcgtgccgccgtccctgttgtctattttggatattccactgatggggaaggcggcggttccctgagccttggcgacgttgtatgtatccggattgagcacagtaaaatcaaccgtttctggggcggtgccttcgcctgcttgaccggcgtcatatacagtctgattcgggaatgccatattcagtgcttgcgtctgcgagaacacgatggaaccgtctttggcccgccccgtaatggtaatctgcggatactgcacctgctgggtcttactggtgttgcgcagggcgaaagcgtagtggacatacccttgctggtccgccgaccagccggattccactattttcagaggattgtcggtgacggtgtcttgattgtctccatcagcgccgtcagtgccgcctactccgcccgtgccattggcattgtcggttcctgacccgttcgaggagtgcccgccatcggccttatcggttgattggctgctggattgtgtcgaggaatcgggtgatgttgccgacccgataatgccaagttggcctgccaacacaatgcctcccgcaatggcggcgattatcagtgccgctccggcaatggaccacagcacgatggcgcgtttgctcaagtgcagacgccggaatagtcgagacgccgacgcgctgccgttcgttgttctcgttgatggcggatttgccgatgatgcgttcggtatgggcggattggactgggagaacagcgcctggcgaaactcttggacgctctgtggccgtttgctgggctcgaatgcgcacgcatagccgatgacggcgcgtagtcgagccggtactgcggcatcatcggcaagtcgctgctcgtagtcgctgacatcgggatatacgccggtcagcatgaatccgagtagccggcccagcgagaatacgtcggaacgcgcgtcggttttggcaaagccatattgctcaggcgaggcgaatccgtaggtgccaagcgccgtggtatcccgtgaacggttgcttgcctctgaccggatgcgcgcgatgccgaaatcgatgagatgcgcgccatcctgggccacgatgacgttggccggcgtgatgtcgcggtggataacgccgtgctggtgaagctcctgcacggcttcgcaaatttggtcgataagctgcatggccacattcggtgcaagccgcccgttttcctccgcaatttgcgcaagcgtgctgcccggcacgtaatcgtagacgatgacgaaccggtcgggcagctcgtacgtcgcttccacacgcggcagacgattactctggcaggcgctgagcgccgcccacacattgcgttgcgctaggggagagggaatcttcttgcgtacgaacgggccgttgccgtcaatgctcaccagttcggtgacgccggaaggtccgcgagcgagcgtacgctcgacatggtacgcatcgtcgatgctcatcgcatgcatcgcctgcttatcgtccatgtctctccttgatgccctcttacttgcgtctcactggtgagtgttgttgggccgaatgtcgtcaatcggccggtagcaacgtcgcctctcccatacgatacaactcgtcgtccgtggcaatgcggtcgaatccattgcgtatacaccagatgataatcgcgtcgcgtcgctgtttgcaccacagttcggaaacgcctgcaagacgaagtagccgttgggtttcacgtaatgtgcacttgagaccaaaagccagcataatggcgtgatctcggccggggcggcttttgccggagaaaatgtcataaaccactgtggcgttgaggccggatgcccgcaccacgtcggctcgtctcaggtcatgggcttccatacggtcgaacagatagtcggtcagcgtgcgtgcgctgacgagtccctcatcgagatactgctcaatgctggcgctggcgagcagccgatccaacagttcctcggtcaaatgttcttcggggatgtctgccattgcccatgctccttgtcgctgtgttgcgggtgctgtgctgcgccatcgtacgcggttgctcgattcccagcgtacaggacgccgacttttcggaaacacgccgaaaaattcagttgtcagctgatgtatggcccgcgcgtgtcgccgacaatggtcgatgccatccgtgtaggtgcggtggcggaaaggatgttcatgcgcggtatcaagcatcgacaataaagctaacaggcatacaaaatgctaatttgcgtacataataacaacgccatacactggtttcgatgtatcgcagagcaaagcgagcaataagaagggacgcaatgatgagcgaacgataccggcttgccatggcagtcggattgaccgtaacggttgccgggcttgcctcttctgtgctggtaatgctgctgcttaaggaaagaagggcatcatgacaacgccatttgatcaacaacctcagccggttccaccgtccgaaggcacgaatgacgcaccggaagatcgcgcgaatgcgcctaccgtgccgaatactgtaccggctggccaaccgaacgtagcgtctgatggtgctaccaccactccgatgactccggctacggcatcgcagcggcccgccggcgcgccatttgatcgtgtatatgcggtcagtccgcaacagctgttccaagttattcacgaccagctgactactggcgccacgtttaccttggataacgaaaacacccagaccggagcgttttccttccactcctatgatggggtgaactgcacgctaaccgtattcccgcagggtgcggcaggggccgccattcgtctggaggcgactggaaacgaaagcgccaagcgcgttgatgagttcctcgccgctctggacaagcgtattggtgtggctcctgcacccgccacacatggtgccggtgctgccactggttttgctggtgccgctgcgcctgccgtgcttgctccgaatgcacaaggggtgaagaagacttccaagctggctgtgttcgccattatttggggagtgttgttcgtactcgcccaatttgtggatgtttctggccgatcctggggcggactgctgttcgccacggtgattccggcactgctctcaggcttcgccgtatacgtgacccgcccgagtggcaaggtgcaaggccgagtgctggcctgggtggcagtcggtatcaccgttgtgggtctggtaatcggtggcgtgttcgtaattcgtgacggtgcgaaggccaaggctgatcgggcggaattggaagcatcgctcgccaccaagtgcgaagcatattcatggccggagtcggatatcgcggcgctgctgccgcagccgaaatccacaaagggtgaaattagaagcgagtcttcggactatttctccatcgaggtgtgcggtaccgacgccaagcagtatgccgactacgtcaagtccgtgcaagacaacggtttcaccgtggactatagcaagtccgctgacagtttcaatgccaagaacgccgatggatacagtgtgagcgtttctcgtaacactgacgacgagaccatcatgtccatcactatccaggttccggaaaagaaggaagatacgtctacggacggcgacgccgcgaagcaggatgataagagcactgatacgggcactgattccagcgatgccaacaagcagagcgaccagtcttcggatcagaagacgcagcagaacaccaatgacagtgctgacttcaaggccacgatggacagctacgaggcctttatcgatgagtatgttgccttcatgaacaaatatcagaaatccgacaacgtggtcagcatggctaccgactatgccagcatgatgaagcgttactctgagttctcccagaaggtagacgccattgacgaaaactccctcagcagtgaggattcggcctactacaccgaggtcatgactcgatgcacgcagaagctcgcatcggtgggccagtgatcagactggcgtatcgaggtaacggttttccaagaaaggaacgatgacgatacatgggtatacgcggcagacagtacacgccaatggatgagccggtcttcaacaaggccatccccggaacggaggctctggccggggcgctgaaggacacttttggcgcattccgtagtgggcttgggattaccgaacccgtggtttcggtgaattgcgaaggttgtggcgctccgctttccggtcatcgcaaagaagtcgttcgatgcgaatactgcgatcgcgaaacgcagctataaccaacatgccagcataacggccggtcttgcgattgcatagtcgcaagatcggccatatgcatgagatatcgaggaaaaaacagatggcagttattaaggcgttcgccggcgcgctcggcggtacattcgcggacctgtggcgtgatatcatcaccgctggtccgttcacggaacacaccgtcgttgtgccgggcattccccgcggaagcaacaacgatcgcggttcgaatgaatacggttccgagggaataatcaccaatggttcgcgtatctatgtgccagagaatactgcggcgttcattttctctgaaacaggtatcgaaaacgtcatcaccgagtcgggcggttatgaatatcgcaacggggagcagagcgtgctcgccggagacggcatcggatcgttcttcaatcaggttgccgatcgattcaccttcggaggtcagcctggccgcaccaaatatgtggccttcgtcaacctgcgtgagattcgtggcatcaaattcggcacttctgcgccgctggtgtataacgaccggttctatggcgtcgatttggaaattcgcgcacgcggatccatgtcgctaaaggtcactgatccagttcgattcgttcgtaactttgtgcctgccactaccgtgtcgtattcattcgatgatgaagggccacgtaggcagattctgtctgaattcgtacagtcgtttattgtggccatcaattcgttgtccaatgaatatcgtatttcgcaattgcccggcaagacgaatgacatcgcggcatgcgtgcgtggcgatcgggccaatgcgggtacgtggaatgatcgttttggctttgaagtgtccagtgtgggcatcgaaagtatcgaattcaccgagcaatcacgtcaactcgtgcagcagttcgcctcgaataagatgaatgttgccgcatacgagggcgtttcccaacaagctggcaatatggctgcccagcagcgcattgcgcaaggtattcaagacaacggctttggcgatggtggcatgttgcttggcatgaatatggcgcaatccatcaatcctatgacggccgccccggttcaagcgccggcacttgcgccggcgccggaagccgctgctcccgccgctcacgcgacatccatgtctgtggaagaacaagtcgaggcgatgaagaaattgaaggaattggttgatatcggcattctctcccaagaagaatttgatgcaaaaaaacacgaaattcttggcctataaacggcgcattcatgcaactcgagacagttgataatgagggaaacgctggtgcgatatatcggcgaaaacaatggatgaatatatcattgaataagcagtaattatcaggatggttggattcacattgacgtggttccgaccatccgcagatctgcgactacaagggagagaataatgttgaacaacagggttcgtttcgggaacatgaagcgtgtcaatcgtgcggtttgggcgttgaccgtgattcttatgatggttctgggtcttgtgcttgctggatgctcggggtcttctgacggtgcggacggcaaggaggaatccacatattcgaaaattgtcgccatcgccaagaaagggcgttcgctggccgatgtgaaagacgagctcaaggatgccggtttttcctcctctgattatgaggtgaaaagcgacacggacaaaatggtgctcagagcttcgaactgggttgtccaatccgtggaagatggggacaagcctgttatcaatgttcgtaaagccagcgatatagcgcaggaggaagaagcgaagaaggtagctgaggagaagaaagcagctgaagaggcagccgccaagaaggcagctgaagaggcagccgccaagaaggcagctgaagaggcagccgccaagaaggcagctgaagaagaggctgcaagaaaggccgctgaagaacaggctgccgcgcaggccgaggcccagcggcaagctgaggaggccgctcgacaggcacaacagcaacagcaagcgcagcaaaatgtgcattatgcgaattgctctgaagtccgtgcggctggtgctgctccgttgtatcaagggcagcctggatacaacggcaagttggaccgcgatcacgatggcgtggcctgcgagtaacggattcgatatttcggcgactcagcgcttgttcgggccgccgtccgggaacatcaagtaagtgatgatgccggcggcggttccactggccaatgcgccggtgatgacggcgagagcctgcatcgccgtgctgagcgtgggcttgcccgttgcggcagtctttgaagccttcaatgtggcggcactgggcttgcgtttctcggcaatggcattgtcggcagcgttgccaccgtccgtattgactggggcattgtcggcaacggcctcgccgtcctgctcttgggcgcgccgttcgcgaatgcgttgctcaatgggatcgtcgaccaaagtcttgatgatgcgtgccagatcgcggtcttcacgacgtgcgatctcggcgctgaacaccgtacgtaaagcgagatactgcagtttggtcatcgggcttttgccggtctccaagttagacaccgtctgtcgcgcgactcccagctcgtcggccagttgctgagtcgtccatccggctaccttgcgaatcggacccaggttctcctgaaacttatcaatccaccattgttcgatttcagacgccgccattacgcacctccttccacgctgtcaccagtgtacgttacctgtaccgaaatcaatccaaaaaacagtgttcatgtgaaattcactgcgtatttgcgctttcgccggcttaccgagattagccttagacaaggaatagcagagtagaagcagaaggtatgcgcgtattcgatttcgacggaaccatctatgatggcgaaagcctgttcgacttgtacctgtattccgcccgccacgacccgaaagtgttccgctatatcgcccccgtgctgcggtacgcggtcaaatacaagcttggccgggccacgcttgaacaaatggaatacggcgtgggcaagatgaccgaaggctatctcacggaactgagccgatccaaacgggtggcgagcgtcgaacagctcgtggacgatttctgggaccgatattacgcacgtatcaagccttggtaccagcctgagtcggacgatgtgatcctcaccgcatccttcggtctgacggtgggggaggcctgccgcagactcggcgtgaggaatctcgtggccagcgaggtggatgtggagacgatgaaggtcacgtacctcaacttcaacaccaacaagaccaaacggttccgtgaactgtacggtccggacgccgtcatcgacgagttctacaccgactccaagttcgatcagccgatgatcgacatggcccggcatgcgttcatggtcaaggggaacaccattacgcaggtcaagtaggaaacagcagaaaacaacacaacgtaaccaataacgaaagaggaatccatatgagcatgccgctcgatctatacgtaatccggcatggcgaatccgaagcgaacgtcatcgtccaggcgggcgaacagggcgacaactccctgtatacgcaggacaacgtcaccgtacccgaccgctcctggagactcaccgccaccggacgcaagcaggccgactgcatcggtcgttggctggtcagccagcagcagctgttcgaccgttacatggtctcgccatacgtgcgcacccgcgaaaccgcagccaccatggccctgcccaaggccaaatgggaggagaaccgtgtgctgcgcgaacgttcttggggtgaaatcaacaccatcaccaaggacgaattcaaaaacaactacgcacgtaactggaacttcaagaataccgatccgctgtactggcgtccgccggcaggcgagtcgattgccgatgtggccgaggaccgtgtgcataacatcctgacctcgctgagccgcaaatccgattcggaatccgtggtcatggtcacccacggcgacttcatgctcgccctgatgctcaccatcgaggatctggccgacgaggaattcctgcatcgcgccgactcggacgactggaagatcaccaactgcacctgcctgcactacacgcgccgcgacccggaaaccggccgcacctccaagcgtgtgcgctgggagcagaccgcccggcccgtgctcgacgagacgaccggccgctgggaggtcaaggtggagccgtggcgcgaattcaagcgcccgtacctgtccaatggcgatttggtggatgtggtgcaggccgtcgatccgcacctgctggagtattacggcaaatagcctttcccggaagagagacttcacaaaatcttcgtgagctagaatggcgcgtagtgcggctggttgtgaatgccgtgccccaagcgagagcgaggagagtagtaatgtccaatatcttccaatggcaattgcatggcgacggcaagacgctggcgcccggcgaggtcgtcgagcccgatgaacgtctgacttgggtgcgcaccgccggtatcggcgcacagcacgtcatcgccatgttcggtgccaccttcctggtgccgattctgacgggcttcgacccgtccaccaccctgttcttcacggctatgtccaccgcactgttcctgcttatcaacaggaacgtgctgccgagctatttgggctcgtccttcggcttcatcgcaccgatcaccgcggtcaccaccgccaacaagggcattgcggtcgccagcttcggcatcatggtcaccggtattctgctggccctgattggcgtgctcgtgcattacgccggctccaaatggatcgacatcatcatgccgcccgtggtcaacggcgcgattgtggccatcatcggtttcaatctggcaccttccgtgtggaccaacttccaagccgcgccggacaccgcactggttaccctgctggccgtgctgctcgtggccgtgctgttcaagggcttgctgggtcgcctcaacattttggtcggcgtaatcatcggctatgtatatgcctgcatccgcggccaggtcgacttctccgccatcggtgacgccgcatggatcggcttcccgaagttccacctgccgcaggccgatttttccatccttcccatgttcgtccctgttgtgctcgtgcttgtggctgagaacgtcggccatgtcaagtccgtggcccagatgaccggccgcgactacgacaaccagatcggcaccgccctcatggccgacggcctgggcaccacgctcgccggcttcggcggcggctccggcaccaccacctacggcgagaacatcggcgtgatggccgccaccaaggtgtactccaccgccgcctactggtgcgcagccgccttcgccctgatcctgagcctatgcccgaagttcggcgccgtgatcaacacgatccccgccggcgtgctcggcggcgtgaccacgctgctgtacggcatgatcggcatgatcggcatccgcatctgggttgagaacaaggtcaacttcgacaagccgctgaacatcatggtggcagccatcaccatgattattgccatcggccaattcgcgttcactgttggtggcatttccttcaacggcattgccattggcacgatcgtgattcttgtggcctaccacggcctgaaggccattggcaaggcaaccggcactatcgccaaagacgatccggatattttgtagtgtgttttagggctactgggccgtattgtggctcagcccttttgcacaatggcttctaccttcacgggtaggggccatttgcgtgttccatggggcggtgctcgccttacgtggtggtagaacccatggggcggtaattggcccatggggcggcaaacatcccatggggcggtaaaaccctcatggggcggtaggtgaaaatggctttattctgcggtttcacaatttcttcaaaccgcctcatgggcgagttaccgcctcatgggcgagttaccgccccatggggtcataagtaaagagtgggatgacagcgtggcgagcatcaagcaaagtagggggcttacgctaagctcggaaagcttgcgtaatttgcgtaacctttgacatgaaaggccactgtgccccgtaataatttcgatgatcgtgacgattccgctgatttccagatgaacgacagcgcggaatcccgcccccttacctttggcgaacttggcgtacccggaccgctggtgcgcgtacttgcggcagatgacaagaagaccgcattccccattcaggccgacaccctgcccgattcactggccggccgcgacattctcggccgagggcgcaccggctccggcaaaaccctcgccttctccattccgctggtcacccggcttggctcctatgattcgcttggcgaaatcgcgatggaggagttccgcaaggaaatcaagcgtcgcaagaaggccagcctggaagagcgccgcgctgacgatttcctgccgcacccgcgcggcctggtgctggcccccacccgcgagctcgcgaaccagatcaacgacgtgctgatgccgctggcccacacgttcggcatgaacaccaccacggtgtacggcggcgtcaagtacatccaccagatccgcgatctgaaggccggcgccgatatcgtggtcgcctgcccgggccgccttgaggacctgctgcgccagcaggcgctcacgctctcgtccgtcgaagtcgtggtcatcgatgaggccgatgaaatggccgatatgggcttcctgccgccggtcaagcgactgcttgagcagatctcgcccgacgcccagcacatgctgttctccgccacgctcgatcacggcgtggatgaagtggtgaacaccttcctgcatgatcccaaggtgcacgaggtcgattcggccacc

SEQ ID NO: 1383 - DNA, 17548 bp, Unknown
  R257_15m  MAG No. k141_2872
cggctcacgctccgcagacggccgcgtgccgagcatctggatgagccagaacgcaccgcgactgggagctgtctggcccaattcccgccatacctggctgggcaacgcgtattgcacggcccgtcgcggggtgagtctgttccgttgactccgccagtgtgcgttttctctgtacaaggaaaggcatattgcatcatttcatcagagagaagacgcgatgaactgtgataggtgcggtgctgccaatgacgataggtcccgtttctgcacggaatgcggtgctccgctggcaccgaaacttgccgtgggacacaatacggtcactgatgttccgcctgtgccgatgccacccgccggtcccattcccggccccggtctcagctctagctcggcccagcgtcgtctgcgcccgccactatcgcggtaccgcagacgccggtaccgggccataagcgtcgccaaggccgctgcggccgttaaagatatgggtgtgccgatttatgccaagcgagtagccgcaacatccaaggccgatacgaagaaagtcgtgtatacctacccggctgggggcagccagtggacgataatggtgcgatttatcttggtatcccggatccctcagtcgagggcatgccggccgacgttatcggtatggataaggatgaggcgaaaaccgcagtagaaaacgcatcgaacaacaagatcgaggttattctcgagccgcgattttccgccaagaaggattttggcaaaatcgtagcttccaattacatttttggtgcgccgtttgaggcgagcaatgaggaaaatgattataaaatattgcaaccgatacgtctgtactacggtgtgggagccgacaacactgaagatgtggtgaccaccggttcaggtagtgattatgatttcgacccgcacgcggattatgccagcactagcaagagtgacaggagtttgccgtatatctcggctgcgggcgaatggcgtgttacgggcacctattgcaaggatggtttcttacctggctcgggtggatgcatctcgctgatttcgaagggtcaagacggaatgaaatacgggtccggttacccgtatttggtgcgcaaaggcgatgagtccaatggcatatggaacgatcgggtcacactgtgcacgcccaccggagacattggcgggtgcattctgcactacaaggatggttcgattcccgataatgaaaccaatatgcgcaaccacttgttggccaaacagtggggcatgttcgagatgtaccgtggctacggatggccggtatgcgacggcacggtctaccgaggctatggggagacggaagggtgtgaccatggtcaatatgtgaggactgatgatatccctgatggtcagcaatccggtgccacctacgaaatggatgacttctacgtttacttcccggtgggatcgaagatcagcaaactcgaggattccgactatttctccaacaaggcgctggctgcggcgaacaaggcggggaagccagacaccgaccggccgttcttcatcatgcgcgaccccaggggatacaagaccacaagcgtcgaagcatacaagaacggcgagcaaaccaccaatccgttcgtacccggtataccgatgagcggtggatacaacccgctagtgaagatggatgtggctcccagcgccgatgcgtcgtctgaagactcggccattgccaatacgtcgcagtcgagtaagaagttcgttgccgcaggcctgtatctgccggtgtatcttgcctctcaaggcaacggcaatgcggaaggattggcaaatacgatgatgaccggcatggataacagtgccggcaatcaggctgtcggggcccttggcggatggagtgctgtcaattcatggctgagttcccatgggtacagcggcaccagcttcaaccgtgatttcggtgatgtacaggccagcaatgctggatatgagaattacagtaccgctcgtgacgcggcccgcatgctggttgccgttgatgcggtcggtggcactggtctgatgaacactgatattgcttcggagggcgtggtgattccgagcggcatgaccgtgcatgcacatcgtggcatgggcatccagaacacgtggaattacttcgccatcgtggaggtgaatggcaacaaggccgcggtctctgtggtcacgcaaaaccaaggtcaggatcgtgccgctcagctgatgagccaagtgcttgcctcggtggatagcacgttgcgcaaatagtacaagcagtatttgcacatgcaactgtgtatacggaccacgccttttggttggcggctgagtggggactattccatcgcgttcatttcccagtagaatgaggctatagtgcgtcattcgaccagagagaagagcaatgatgatctgtaagaattgtggtgctgacaatgatgggggaagccggttctgcatgcactgtggtgcgccgctaaccgacgtgagtgctcctgctcctcaggcggcggccggcccgattccagtgccgctgccggacaatactatgacggtgcttgatcacccgccgctgcccggcccaaacgatgggaacgcctatgggcagcccggcgtgccgacatcgagcggtgtggcaggagcgccgaccgcaccgggagcaagtcatactgggtcgatcgcaccgggagcagtgccgcaggccgctccgggtgctcctgtcgctccgggcgcagccacgccgccgagcggcacaacgaccgcaaccgccacattgccgaatctttcgggcaagcgtggcccgaatacgctgattatcgcgctcgtggcggtgctgctggcgttgatcgtagccggtgtggctttattcctgacgtatcgtgccgaggtgtggggtggtaagtcgctgcctgatccggcgtccatcgcctccagcgtcaccgataagaacggcaagaaggcatcggtggtcaaggccaaggatgtgaccgaggcgttgaaggccaagggcctgaacgcgaagacggttccggtgttctccggcgaggatcgcggtgtgttcctcggctacgagggcacgaatcctggcgctcgcctcaaggccggttccacggtggtggtgcaggagtcggccggtcccggtgtgccgaagggcacggtcggcaaggatgtgaacaaggtgacgaacacgttcgcgaatatgggcgtgccgattcactataagaaggttgtgatttcgccggacagcaagactccggaagggcaggtcagcgtcacgtacccggctcccggtgcagggctcaccgatgacgagaagggcaacggcatttacattggcgtgacctccaagggcgatggtatcccggtggatattcttggtgcggacaagaacaaggccgtcagcgacttggagtcgcaaggctacagtgtggatttggaaccgcattactcgtcagagaaatacgtgggcaagatttccggctcgtacccggctccgggatccacgttgagttccggccagtcggtgaccttgtattacggcatcgataagtccagcaacatggacgtgctgagcaaaaccaactcgtatgacaacatcaatatggccagcatccacgcgtccgcaatgatcggtatgtactgcaagagcgaggtgacggatgccgccaaggactgcatcacactggagcaatcctcgatgaatccctttggctccacttcatccgaggattatcagtacctgcaaatcaaaggccatgagcctgaagacaaggccgatgtgttgggcctgaccaacttctctcaggacatcagcggcgcgatgctggaagcggattcggaatacggcatggccgcggacaaattgccgatgaaaaaccatctgctgttgaaagactggggtatgttcgagctgtacgcgggcatgggtctgccgaactgcggctcaaaggtgatgttcgcttcgataggcgagtactgcgtgaacggcaactatgaacgggcgtcgttcgacgatggcgaaatgacgccaccggccggggctgagaacgggtcgaccggcatgacctacgacatgaaggacttcctggtctacttcccggccggttccgatgccaagtcattggatgattccggttacttcgacgccgccgaactggcgaaggccaagaagcagaaggccgtggataccagccgcccgtacgttctggttcgtgacaagagcctgtacagcgagatcagtgtgagcgccagccggggcaaggacgtggacccgtttgtgccgaccaacagcagtatcaataactatcagaacgcgctggtgccgatgaggccggctcccagcgattcgaccgtctactatctggtggagcagaacggcgatctcgactgggattccctgccggacgccgaggtcaagggcactggcgataaggccgcttccggtgagacgaccggtgacaagtccaaggacagcggcaaacgagacgccacattcaaagaggccatgaaacaggcggcaggtaactatagtttcggttccggtgtcggcgcatggggaaccgtaatgaaagtcaataaggatggcaccttctcaggctcctaccatgactcggatatgggggccacgggagacggctatctcataggaaacgacgtcgatacgctgaacggcaaggcattgctcaacgtgacgagcggagcggataagggatacacgttctacgatttctcgtagtgattcagctgccgtgcggagcggcggggaacgtgaaggaccggcgcgtatgctgtgcgaaacagcattacgtccctagactggtgaggcatgacgaacctgcgattccgcgaagacggcagcttccgcgtgctgcaaatggccgacatccaagacggccccaacgtgctccccgataccatccgccttatccgtgaagccattcgcaaagccgacccggatctggtggtgttcaccggcgaccagatccgcggttacgatcctgcctacatcgacactttcctgcgccgccgtggcgaggaaccgggcgctcgcgtgcgtgcggtcaccgaggtcgaggccaagctgcgcggaatcaagcggcgggccagagaccgcgtgaacaatcgtctgctggccatgaagtccgacggcagcgattccgacgcccaacaaaccgcgtccaccgcgtccacgctggtctactccacaacatccgatccacaggatgtgccgacgactttggacgagctcatggacgagacccgtgacaaagtccgccgcacgtttgccggcttccttggcccggtcatcgaagcggaagtgccgttcgctgccacctacggcaatcacgatttccagtgcggcatcctggccgacgagcaggacggcatctaccgcgaattccccggctgcctgaacccagtcgacagccttgagccaggcacttttgccctgcccattgaggcttccgacggatccgggcgcgtagctatgtccgtcatgatggtgaattccggcgattacgccggcaagcccgaagagaacgacgcccaatacccggcctatgtggtcaatccgcgtggtcttgatttggctgattccgatgggtatggcacgccaagccccgaggcgatcgattggctgggagccgtacagtccgaacttggcgaacgcaacggcgacggtaagccggtgcctgccatcgccttccagcacattccgccgcaggaattctacgattgcctcaaagaggttcccgcatggacgccgaacgcggtggaaggcgcacgtacccacgccggtcattgctacgtgctcaaccatgagatctgccggccgggatcgcggctgggtgaggcgattggctgtgcagacgagaacgtcggtgaagtggacgccttgcgtgaggcaggcggctacttcgcgctgttctgtggtcacgatcataagaacgccttcgtgggccacgcgcatggcattgatttgggctacgcacccacctgcggattcgaatgctatggccccaagtcgcgctatcgaggcatccgcctgtttgaattccatgaaagcaacccggccggctacgtgacccgcatgctcacctggggtgatctggtgggccgatactccagcaacgaggtgcgcgtctggttcgaggaccactgcgtgaccggtgccatcagcatgcgtaacgaattgcgccgcccgcaggtattcgcagtgctggccggtgccatgagcctcggttttatggccgtcatccgctcgttggtgaagaagcgataaaaacacgtgaggccggtatgaactggcctcactgagtattaagcgttggatccgcctgaaccctgcttaactgttatttatttctgggtgcggataaaaacaccagagccttcggtgttaatcagcatccaatcggatggtccatccggcgttccacgcttgacgagcatggcctgtgcttcagatggcaacgcatcgctggaggttccagatggatatccggtgaaggtgccacacgggctgaatcctgacttgtcggatttggacttgtcgtcaattttgaaagccgacgcatcacacttcagcgttaccgtgccatctgaattggatgtggcggatgcaaacttaccgctgaacttggtctggatacgtggcgcattcgctgcggaatcgccactgctcatatctgcctcgtccacagtgccggagaagttgccccgatcatccaacgaaatggtggtgaaggcgctgccatcgccagcaatcgtgtaagcgtattgggcaccggccaaatcagaaaacaccttcagtgaggccgcatccggtgtgccggatttcttactgctcttgttggaatccttggaatccttggaatccttggagttgcccttgtccttggtgctgggcgccttcacgtccgcgtccggcagggaatcccaatcgggttcggacgcttcgaccagatagtaggcgtcggcgtcgcttggggccggcttcatcttgacgatgtcggacttactgccgttgtatccgttgtagggcaggaacggattggcgccgttcccggcaccgttgtatggagcggtggtagtgtcgtagagcttcggatcgcggtacagaatgaacggtcgattggtgtccaccgccttctgcttcttggctgcggcaagcgcgtctttgtcgaagtagcccttatcttccaacccctgcaagtcggagccggtaggcactacgaggaacagatcctgcatgtggtattcgccggatgtgggccaagaatcacccatatgcacgccattgccgtcatacattttgccgttggcccaaaagttggtcaggctgatatgcggcatgagctcgaaggcgccataatcttgtgtgactaggtagtcggctttcggactgttgcagtacggctgctgaatggcgtcgcaggcaatcagagtaccgtcgtaatcgccggtatagtcagcattatcactgccgccttcagtcaccttgtaattgtcgatggtgatgcacttcccatcattagtgcaccactggccgtcggctgcgcgtgtggtaccgagcagcgcgtcaccgcctgtttcggccaaatcatggcctgtaaaggcttctttggtgtcgctggcatcgatgccctgatacagggtcacgtcttcgccggaagacagggacgatcccggagcggggctggcgccggaaaccttacccacgtaatccttggaagagaaacgctgttcaacggtaactgtgtggccctcagactcgagctgggatttgacggtatccacatcctgacccataacgtcgatgggcagagcggtgtcgtcacccttggcggccacgccaatgtagatgcccttgtctttctcgtcgtccttgaccccagtgccggcggcaggataggtggccacaaccgaaccttcggggttcttcttggcgtcagagacaaacaccttcttatagtggaccggaacacccatatcggcgaacgtctcagtcaccttattgacctgtgcgcccagagtgtctttcggcacgccggggccggcggattcctgcaccacgaccgtggagccggccttgacacgagcgcccggagcggcgttcttatagccgatgaactcacccgaatccttgccggagaacaccttctccgttttcgcgttgagtcccttggccttcagcgcggccgtgacatccttggccttgacggccgacgccttcttgccgttcttatcggtgacgctggaggcgatggatgccgggtcaggcagcgacttgccgccccacacctcggaccgatatgtcaggaacaaagcgacacccgcgatgatcagggccgccagcaccgccaccagcatgatgatgagtttgtttgggccgggcttggtcgcggcggttgtggttgccgttgccgggaccgtctgcgtggccgtggcaacggtcgcagtgggctgcgtagccgccggtgcggagacgaccgccggagccgacatgccagcagcaccctgcggcataggaatcggcggcactgccgcaccgccggggccggggactgaagcggcagccggagcgggagtcgctcccgctggcgtgggcgcaaccggcgcgtcctgcggtgtcatggaagcactcgacgctgcagtattcgcttcggtggcggtgagcggcgtgccgcatgtttcgcagaacttgctaccttccgcgttatcggtatggcaattggggcaaagcataaatggaatctcctatgaatcaacgagactgcggagccgaacaataatggtctgactggtgcggccatcggcaagcgcagtaaaaacactgccccggcaaatatgtcggcaagtgtggaaggacgggattgtttcagccgcgcgcgttgtagtcggcggacagatcgttcatcgcatgcagcagcttgtagaagtagaccagcggtcccacgatgatgaaaattcccaagacgtcccacagccagaaggtggctgcggtaacggtgggagtcatgccgcgggcctgctgctcatcgccaatacgggcgctgaggcggtggtaccacaccagccagccgatgcccagcgtcaggccaccgatcaggaagaacatcaggcagtagtgcatcgtgcgcttgccgtcacggcgcgaagcgatgaggttcagggtctcgcccacttcgctcatttgccagatatcgtaaatgccgaaagtaataatgccgagcaggatgtacttcagcaggctgcgcttggtgcgcagttggttgaccgggcgcgggttataggcggcttgctgtgctgcgggctgctgtgggaatgtcggctgtacggcagccggagcctgcgccgggaactgcggcgcggcaggctgagcatattgtggcgccgcgaactgcggcgctgcgggctgcgcggggcgtggtgctgcaggctgctggaagaccggctgcggtgctgtaaattgcggagctgcgggccgctgaccgttcggttgagggatttgcggcatcggaggcatacttggatttgtcataatggacctcttctctcgctgtggaagcccatgcgcctccacgcatagttgcaagtctagtagtactgcgccgggaagcgctacgtgtgctggcatattgtgagatgaacggggtgttggaatgggccgtcgctaggatggaggaagttacgcatgttaccaatgcgtaaacgaatatccaataagcgattgtatgaatggttcgcacagtaaaggaggaacaatgggtcagggtcaatcatccgtttttgatctcgcggcagtggctgcggcgtccaatggggggaacaacgacccgctgctgcctccggcacgattcatcggcgatccgcagaagccgagtcgtatgccgtataacaagtacgccgcctacgacaagcagatcccgtttgattacccggagcgcacgtggccgggcaagcgactgcagcgcgcgccgcgctggtgctccgtcgatcttcgcgacggcaatcaggccctcgtcaacccgatggattccgagcgcaagctgcgtttctggaacctgctcgtctccatgggattcaaggagatcgaggtgggcttcccgtccgcttccgaaaccgatttcgacttcatccgtatgctcatcgagcgtgagctgattccggacgacgtgaccatcgtggtgctcacccagtgccgcgagcacctcatccgccgtacttacgaggcgctcaagggtgccaagcgcgccatcgtgcacttctacaactccgtgtctgtgctgcagcgcgaggtcgtgttccgcaagaacaaggaagagatcaagaagctcgccaccgacgccgccgaactgtgcaaggacctcgagaacgaggccaagggcatcgacctgtactacgagtactcgccggaatccttcaccggcactgagccggagtacgccgtcgaggtgtgcaacgccgtgatcggtgttatcaagccgactcccgagcacccgatgatcatcaacctgcccgccaccgtggaaatgaccacgccgaacgtgttcgccgacgaagtggagtacgtctccacccacctcgacgaccgtgactccgtagtgctctccctccacccgcacaacgacgaaggcatgggcgtggccgccaccgagctggccgtgctggccggcgccgaccgtgtggaaggctgcctgctgggcaacggcgagcgtaccggcaacgtcgacttggtcacgctgggcctcaactggctcacccaaggcatcgacccgcagattgacctgtccaacgtgcccgagatccgcaagacggttgagtactgcaaccagatcaagatctccgagcgtcacccgtacgccggcaacttcgtgttcaccgcgttctccggctcgcatcaggatgccatcaagaagggtctcgaggctcgtcaggtggccgccgagcgcgctggcgccgatctcgacagcttcgtgtggcttgtgccgtacctgccgatcgacccgaaggacatcggccgcacgtacgaggccatcattcgcgtcaactcgcagtccggcaagggcggcatggcctacctgctcaagaccaaccacaatcttgacctgcccaagcgtctgcagattgaattcgacaagatcgtgcaggactacgctgacacgaccaagaaggaagtcaaggacgaggatatctggcgtctgttcaaggacgagtacctgccgatcgaacagtccggcatgaccgccgccggtgtggttgtgggcgatactcatgacgcctcgctcgcgccgtggggccgcttgaagctgctcaaggtggccgtcagctccggtgaggatggctccgataccgtgctcaaggctcgcctgctcgaccgcggcgtgaacgtcggggtcgatgcgcccgtggagcgcgaggtctccggcatcggcaacggtccgatcgccgccttcctcaacgccatttccaactttggcgttgacgcctcgattatggattacgtggagcacaccatgtccgtcggcaccgacgccatggccgcctcgtacgtggaatgccaggtcggcgaggccgatgatgcgcagatcgtgtggggcgtcggcatcgattcgtcgatcaccaccagcgctctgaagtcgattatctctgccatcaaccgttcccagcgcaagcgctgagcgctaacaacaaaacaaagctccctctgattgcatcagagggagctttgttgtctgtgcttacttactactgggtgacgccgttggtgccgttgttcccgccggtgcctccggaattaccattatcgttgccggtattgttcccgttgttcccgccggtattgccggtattgttgccattgttgccatctccgccggtagtggtgccgggataattcggacactcggtggaatagctcggattggcgaggcactgctgggcgaactcctgggcctgctgttgcttcttggcttcctcttcggccgccttctgctgtgcgtcctgctcagcctgcttctgcgcgtcttcggtggactgcttgttggtgttgttggacaggccgctgctctgtcccttgcccaagccccaagtgccgtcgggtccaccgatcttgccattgtctttagcggtcgggaactgctccacctcggtaccttgcaaggcctgagccatgaactcctggaacaggtgggcggggtatccagtggaagagatgccgtatccggagaaggccggcaccgcctgcggattgcccttatcgtccgggttccagatagcccacacattcatcatgctgggggtgtatcccacgaacgacgaagccatttcgtcgttggcggtaccggacttgccggcgatgggtcggcccagcatgttggatgtgccggccgccgtaccgtacgtggtggtgccctgcatggccttctgcaccaaagcgcagtcgttggcatcgaacaccttggtgcctttgctgggcgcgttgtacatgtccttattgttggaatcaagcactttggacaccatgtgcaaggtgctcttcacaccattgttggcgatggtcgaatggccttgcgccaaatcccacacggtcagggcgttgatgcccagcacgttgtacatggagttttcatcgatatcgccctgaatgcccgcttcatgggcgattgcggccgtgcgcttcggcgtcagatgctcattgacgttcatgaacaccgtgttcaccgagttggcggtggcctgatacagattgatgttgccccagttgttctccagagcgttattcacctcttgatccaagccggtgaagtgctggtgggaattgccgttgaacaacgtatcgaagctgacgccggattgcgcggcccccagcaaagcgaacggcttcatagtcgaacccggttcgaatacggcctgatcggcattgttgagctgcttggacagataatctgaaccggcgtatacggacaatacttcaccggtcttcgggtccagcgctatgccgccgatttgcagggattcaggcatgtcgtccagacgggtgtcgccgatggactgcataaggtcctgcttgctcttgtcgatggtggtgatgatcttgtatccgccggtatccaaatcctctttggtaaaggccttggactgcaccagctcacggcgcaccatatccagcagataaccgttcggccccgcgtattcgttttgctgcgccaccgcggcagtctgcgggaacttggcatcagtgtgctgcttggcagtgatgtaaccatcctcctgcatgatgttcagcacacgcttgaagcgcgatttggccatatcggcgttatcggccggatcccacgtggacggtgacggaataatgccggcgatcatcgccgcttcagacagcgtcagatccttggcgtccttattgaagtatgccttggccgctgcctggatgccgtaggagttgcggcccagatagatggtgttcatgtaattgcacagcacctcgtccttggactcggtttgcgcgattttgatggccacgatggcctcgcgcgccttgcccgcataggatgtggtttcgcccatgtaataccgctcggcatactgctgggtgatggtggaaccaccttggcgcgtgcccttggtcacattattaatgaatgcgcgggcgatgcccctcagatcaagacctttatccgtgtagaacgtacggttttcggacgccacaatcgcgttgccgatgtagtccggcagcccctcgcaagagatgattgaacgattctgttccgcgtaggagccgatcgcggtggtgccgtccgcgtaatacacggtggttttctcggccaacgcgaacttttcgggttgcgggacctcggtggtggtgtacaggtatgcgaatactgcgataccggccagcaagcccagtccaatcagggagaagaagatgcccagcacccatttcagtacacggtgcttgccttttcctgtgttctttttcttcctgttcggggctcgatggctattggaagccttgtggcttgcgtggcgggaacggctctcctggggcgtataggggccctcctgtgcggagtggtcggctctgctttgcgcggtgcgcggttgcctcagagcggggccattgcctcccgaatgtgcacgacgagtataagaagccatggtgtccaccgtaactgttggccttgaacaatcgtttgacgtgagcgtaaccacacgcatttatgccggtatttttccggaattcttacaattgggcacgttccttgatgctgcatgaatattgcctgaatgcgctggttggcctgccgtgcgacccggcgcgcacgtttcgtgttgctgcgctggtccatacgtctccatagacttatccccagcctccacgcggcgctatgtcacccaactcccccagggcaggaatgcagcaagggtaagtggcctctgacgggtgcgtggaggttttccatttgtgcggatttggccgtgagctggcacgagcacggctccctgtccggggcgcggccgtacagtcgaacgtatgaatgacgcacagacccctagaattcgcgacccgcatgcggcggtcaatctggtcggctcaggcgcagcgcagcctgactcgtcgtcgaacgttgttgacccattggctgcgctcggcccggtctccggttcagatgcatcggcatccacatcaggctccttaggggatttcaggccgctgggcatggacgatgcggatggggcatctgatatcgaccgtggcttggcccggcttgacccgcttaccgtgcgcccgcgaatctccagccgcgtactgtgcgtggtattcggtctgctcctgatcgctattggcttcggcgtgtggtgggggtgcgtgtttaccgaaaacggacaatcgtacgacgaactggtctggaaaaacctgcacaacgatgtaccgtcctggaccaccggcatgatgaacgtcgtcgcacaatcctggctggttatcgctgtcagctgcacaattgccgcaatcggcattattacggcgctgattcgacgccgctggtggttggccgggcaaatcgccgtgttcgccgtggtctgcttggccgtcacccgtatcaagggtctgttgccgcgtccgttcatcatcaacactgaatcgcctgccgctaattccgcgccttccggacacacgatgctggccgcagcctgtgcggtgattctgctgcttaccgtgcctcgcgcggttcgagctttggcgggcgtcatcggcgtggtttgggcggcgaccgtcggtgtctctgtgatatacgggcaatggcatcgcccttcggatgtggcgatgtccatcctgctggtggcgggattggccctgctcgttctggcggttacacgcaagtccggcatggacgagccgggccaccgcgtctcctcagtgagtgtgcagatcgtcggcagcgtgctgattaccgggggcctgctgttgctcgcctacagcggttatgcgatctggcaggtggtgccggggctcaatgtcagcgccagttgggcggttcagggggcgaatgtcagcgctgttgtgggcattacgggtgtggccatgctcgcattcggactgttgctggccctacgtcagatcactgcagcgcccttaagcaggctgggcctgatcggcgctccgccggcaccgcccaaacggtaaaacatgaggtgcgaacggccgaatttgcccggcacaacggcggaatttggcagttggatatgattcatgagtattatgacgccagaaacgtcgtgtgtttcgcgcaatacataaggagtgggtatggctaccaaactggtgattgtggagtctccgaccaaggcccacaagatcggtgactacctgggcaaggggtacaccgtcatggcgtcggtcggtcatatccgcgacctcgcgcagcccagccaggtgcccgcggcagacaaggccaagttcggcaagttcggcgtggacgtcaacgacgggttcaagccgtattacatcgtcgacggcgacaagaagcgtacggtcagcgaactcaaatcggccctgaagaacgccgacgaactctatctggcgactgatgaggatcgcgagggcgaggccatcgcgtggcacttggtgcagaccttgaaacccaaggtgccggtcaagcgcatggtgttccacgagatcaccaagaacgccatcaacgcctccctgaacaacacgcgcgacgtggacggcaatatggtcgacgcacaggagacccgccgcatcctcgaccgtctgtacggctatgagctgtcgccggtgctgtggcgcaaggtgggcccgggcctgtccgccggccgcgtgcagtccgtggccacccgcctgatcgtggaacgcgaacgcgaacgcatggcattcaagcgtgtgccgtactgggatatcgtcgccatgttggccgcgcctgacgcgctgggggagcgtgccgaattctccgcccgcatgatcgcgctcggcggcaagcgactcgccggctccaaggatttcggtgccgacggccagctgaccccggacgggttcgcggcgaacgttcgccagcttgatgaggctggtgccactgccgtggctgaagcgctgaggaccgccgatttcactgtgatgtcgatggaaaccaagccgtaccgccgccgcccgcagccgccgttcaccacctcgaccttgcagcagaccgccggcaatcgcctcggcatgggtgctcgcgtcgtgatgcgcgcggcccaaagcctgtacgagaacggctacatcacctatatgcgaaccgattcggtgacgctgtcgcaggaggccatcaccgccgcccgcaacgccgtctcctaccatttcggcgacaagttcctctccgccgagcccaagcagtacgccaccaaaaccgctggcgcgcaggaagcccacgagtgtattcgcccggcgggctcgcgcttccacgacccggatgagctggcttccaaacttcccggcgaccagctgcgcctatacacgctgatctggcagcgcacgctcgcctgccagatggctgacgccaccggctccaccgccaccgtgcgcctgtctgcgccggccggccccaccgagggcgaggccgtgttccaagcgtccggcactgtcatcgaattccccggctttatgaaggccacgggggaggggcgcaagcccaaagccgccgctcccggcgctggggctggctcggaccaggctgctgccgccggcaagacggacgtcaaggccgtcaggggtgacgcctccgaatccaacacctccctgccgccgatgagcgtcggccagcaggtcgaggcaagcgacatcgaaccggacggccatgaaacccagccgccggcccgctacaccgaggccacgctggtcaagacgctggaagccaaggagatcggtcgcccgtccacttacgcgagcattatctccacaatcatggatcgcggttacgtatacgagcgtggccgtgcgctgatccccagctggctcgccttctccgtgaccaagttgctcgagacgaac

SEQ ID NO: 1384 - DNA, 28071 bp, Unknown
  R257_15m  MAG No. k141_2891
cgcggccagcgccagctcatcatcggcgaccgccagaccggtaagaccgccatcgcgatcgataccatcatcaaccagaaggccaactgggaatccggcgacccgaagaagcaggtccgctgcatctacgtggccatcggccagaagggctccaccatcgcctcggtgaagcagagcctggaagacgccggcgccatggagtacaccaccatcgtggcctccccggcagccgattccgctggcttcaagtacatcgccccgtacaccggctcggccatcggccagcactggatgtacaacggcaagcatgtgctcatcgtcttcgatgacttgtccaagcaggcagaggcctatcgttcgatttccctgctgctgcgccgcccgccggggcgtgaagcctacccgggtgatgtgttctacctgcattcccgcctgctcgaacgttgcgccaaggtctccgatgatctcggcggcggttcgatgacgggtctgccgatcgtcgagaccaaggcgaacgatgtgtccgcctacatcccgaccaacgtgatctccatcactgacggccagatcttcctgcagtccgatctgttcaacgccaaccagcgccccgccgtggacgtcggtatctccgtctctcgagtcggtggcgccgcacagaccaaggctctgaagaaggtctccggtacgctgaagatctccctggcacagtaccgttcgctggaatccttcgccatgttcgcctccgatctggatgcggcttccaaggcccagctgacccgtggtgcccacctgaccgagctgttgaagcagccgcagttccacccgtactcgccggaacaggaagtcgtgtccgtatggaccggcacccacggcaagctcgacgacctcgacctgaaggacgtccttccgttcgagcagggactgctggactacatcgaccacaacaccgatatcctcaagaccattcgcgagaccgaggaattcaccgccgacaccgaggctgccctcgataaggccgtggacgagttccgttcgacgttcgtctcttccgccggcaagccgctggtcgagaagaagccggacgttgacaaggccgcgccggttgatcaggaaaagatcgtggcgggagaaaagtaagccatgggctcgcaactcgcattgaaatcacgcatccactccaccgagtcgttggcgaagatcttcaacgctcaggagatgatcgcgtcttcgcatatcgccaaggcccgtgatgtggccctgaacgcgaagccgtacaccgatgcgattttcgatgccgtgcaagcgttggtggcccacacccatatcacgcatccgatcgcggtgaaggacgagaagaacccgcgcgtggctgttctcgccctcacctcggatcgtggtatggccggcccgtacacctcttcgattatccgtgaaacggagtcgctgctgtcccgcctcgatgcggcaggcaagcagccggagctgttcgtgtacgggcgtcgcggttcgacgtactacaagtaccgtaatcgtgacatcgcggcgacgtgggaaggcgacaccgaccagcccggcgtggaaattgctgaaacgatctccaacactttgatggacgcctacatgaagccggctgagaaaggtggagtttccgaactctacatcgtctacaccgagttcatcaacatggtggtgcaaaaggtgcgcgtgctgcgcatgctgccggtcgaaatcgtgaaaaacgagaccaaggtgcccgatcctgatgaagaggcaccggctactgcggatgtcgctccgctgtacactttcgagcccagcctcgaaaaggtactggacgcgattctgccgaagtacattcagtcccgcatccacgagtgcctgctgaccgcggccgcgtcggaaaccgcaagccgccagaacgccatgcacacggcaaccgacaacgcacgaaacctgatcgacgaccttacgcgcaagctcaacgcttcccgccaggcctcgatcacccaggaacttaccgaaatcatcggcagcgctgacgcgctgaccaagaaggaagagtaggaacgcatatggctgacaaccagaccactgcggccgagcctaccaacggtcgcgtcacccgcgtccagggctcggttatcgacgttgaattcccggtgggtcatctgcccgacatctacaacgccctgaaagtaacgatcgtcaacaccggcgccaaggaagaaggcgaggcgaaggagaccgagatcaccctcgaggtcgaacagcacctcggtgattccacggtccgttgcgtcgctctgaagcccaccgacggcctggtccgtggtgcctccgtctccgacaccggcgccccgatctccgtgccggtcggcgacgtgaccaagggccacgtcttcgacgtgtccggtaacatcctcaacaagaagccggatgagaccatcaccgtctccgagcgttggcctatccaccgcaacccgccggccttcgatcagctggagtccaagacccagatgttcgaaacgggcatcaaggtcatcgacctgctgaccccgtacgtgcagggcggcaagatcggtctgttcggtggtgcaggtgtgggcaagaccgtgctgattcaggaaatgattcagcgcgtggctcagaaccacggtggcgtgtccgtgttcgcgggcgtcggcgagcgtacccgtgagggtaacgatctgatcggcgaaatggccgaggccggcgtgcttgagaagaccgcactggtcttcggccagatggatgagcagccgggtacccgtctgcgtgtcccgctgaccgcactgaccatggcagagtacttccgtgacgtgcagaaccaggacgtgctgctgttcatcgacaacatcttccgcttcacccaggccggttccgaggtgtccaccctgctgggtcgtatgccttccgccgtgggttaccagccgaacctggccgatgagatgggttccctccaggagcgcatcacctcgacccgtggtcactcgatcacctcgctgcaggccatctacgtgccggccgatgattacaccgacccggccccggccacgaccttcgcccacttggatgcaaccaccgagctgtctcgtgacattgcctccaagggtatctacccggctgtggacccgctgagctccacctcgcgaatcctcgatccgcgttacgtgggccaggctcactacgactgcgccaaccgcgtcaaggcgattctgcagcgtaacaaggagctgcaggacatcatcgccttgatcggtatcgacgagctcggcgaagaggacaagaccaccgtgaaccgcgctcgtaagatcgagcagttcctcggccagaacttctacgttgccgagaagttcaccggtcgccccggctcctacgtgccggccgacgagaccatcgaagccttcacccgcatctgcgacggcgtgtacgacgacgtcccggagcaggcgttctccggtatcggcggcatcgatgatctcgaagagaagtggcacaacatgcagaaggaactgggtgcgtgatggctgcagaaaaaaccacgatgaaggtcaacatcgtcgccgctgaccaccctgtgtggcacggcgaggcgacgagcgtgaccattcccgcctctgagggcggcatgggcatcctgcccgaccatgagcctgtgctcacggtgatcaagcagggtacgctcaccgtggttgagcccgatggcgatcgccacatgttcgaggtgaccgacggattcatctccttcgactcgaacaaactcaccgtggcggtcgagcgcggccacgacgtccagtactccggcaccgccgagtgatttgaaccaactcctcaaggggctctctggttttccagagagccccttttgctatgtatgccatgtgttgcgctacagtggtggcctatgcgagttattgttgccgactgttcggccgagtattcgggccgcctcaacgcctcactgcccctggccaagcgtgtattgctgatcaaggctgattccagcctgttgattttctccgaattgggctcctacaagccgctgaactggatgaccgcgccctgcacgattcgtgagatcgacccagccgccaaatccgcgcaacattcccgggaaagtgtcgctggtggggctgtggatggtgattccgcgacgcattccccggaaagtgtcgccgctggtgagccggaaaaggtgctacgtgtcagcgccgacaagggctctgacattcttgaagtgacgctgcaacacatctattccgaccaaacctatgatctgggcgaagatccgggtctcatcaaggatggcgtggaagaccatctgcaacgctatctggccgagcagatcgagcgtatcggcaagggagccaagctggtgcgtcgcgaataccctaccgccattggtccggtggatatcatggccgtgaatgccgagggcgagcatgtggctgtggaaatcaaacgtcacggcggcattgatggcgtcgagcagctgactcgctactgcgaactgctcaatcgcgatccgctgctggccccggtgcatggcatcttcgccgcacaaaccatcacgccgcaagcccaggtcttggccaaggaccgcggcttcacctgcctcatcctcgattacgacgatatgaaaggcaccgaggacgacagtctcaggctgttctgattgttcttggcttccctcttgaaggggagttttcgaacgtacatagagagactgaggggaggcctcacggtatattccgtgaagcctcccctcagtcagtttcgctgccagctcccctcttggggagagccatcgagattgtttagtacgcggcgagaatatcgattacgaagaccaacgtggagttggcgggaatcgaaccttgctccttatctccataggcctgatccggcggaatcaccagcagaacctgagagccgacggtctggccgaccagacccttctgccagccctcgataacctgatgctggccgctggaatcgctgaacagatcggcgtcgattgtggaatcgcgatcccaggacgaatcgaactgcttgccatccgtaagccaaccggtgtacttgaccaccacggtgttcttgtcggtcagcttggcgccgttacccttgatcagcgtctgcgagatcagcgaatcaaccgaaccctgaccgttcatgtcaatggacggcttgccattcttggctcgcgtcaccttcggcagattggccggcacatccttgacttcctcgccagtggccttcttcaggtccttggacttggatacaaacgtcatcgccaaaatgtaagagtatccggacgaatcctgagcgttgacgccaaagccgatcgtggtgttgatcttggcacccttgatctggttgtagtaggtcgaggagagggtcttggaatccaccttcagcgagcaatccggcgtgttcttggtccaggtgtccatgagctcggtgccgtctttaacgttgagcgcgatgccttgggcgcagacgcggtcgccctcctcgattacgtcgccatcgcccttttgcagcaccacataggagccgtcggacacggtcatcggcgtattaaaggagatggtcggcttctcgccgagcttgcccttggcggtcacgccggcaatttgccccttcttgtcagaagagtcggaagaggatttcgagtccgagctcgaactggagcaggcagccagcgatacgcacatcgccagcgagcaggcaagagcaacggccttgccgagaggggataacatagatttaacagacttacgcatgacacaccaccctactggtgaaccttgattttctgcgctcctaggtaataaacaggtgaagattgtagaatggttaagttatgagtgctgaagaacagactacaagaccggataagggcgccaagcgtccatcccgtcatgccaagatcatgcgtggagtggtgacgcctatcttcggtctattggccgtggcggctgtggtgttggggtacatgaatgccacgatatggaagccctccactgaaatcaccgcttccgcaaccatgagcggctcccggtatgccgtcactgatccgaatgtgctgaccttgttggatcagaacgccacgataaccgtggactcgggatcctctcaggacgaggcgtgcgtggcgttgggtccgtccaaggatgttgccggatgggtcgcgtccgagaagtcctatacccgtatcaccggattggcgtcatggagcgagctgagcacccagaagggaagcagcacgagtcagggagcgcctgccagtgccgatgacgcggtggcgttcaaggattccgatatgtggactgccgtgaaatgcggcaccgggtccgtttcgctggagagcaagaagaccggcgcctcgacggtggccattgtggatttgggtgaaaatgccaccaacgccaaggtgcagctgcactgggtgcgctccgaagtgccggactttgcgatgccgttctatctgtccggtggattgctggccgtgctggccgtattgtgcgcctccgtgttcgccatgccgccgcataagcgccgcaagcgcatggtggaaggcacggcaagcgccgtaattgaggaagaggcacccgccagcatcgcagtgtccgggaagccggatggtgcaagtcgacgtaatcgtcgccgccacgccacaaatcggcgttcgggccgtgcgtcctcgcaatctgaagccaccgaaacaccggttatcatcgacccaagttcacgtaacctggtcgccgaccagcagactggtgccgagagcggcgctgagaccggcttcagcgccggcgataacgaatcgacttcggtaatcacccctgacgaactgcaggcctacttctcccgcttggcccaagaggtcaataccggagacgactcggccgatgacggacaggaggaaagctgatgaacaagcgatggaacaaactgtgtgtggccgccctcgcctgtgtggcgttggtcgtgccgttgaccgcctgtgaaggccggctgccgacgccggctgctgatacctccaccaaggttgcgccggatttgaccgaggcacaggagaagaagattcgcctgaagattctcaagacgatcgatgaagccgatcaggccaagaatcccgatggatatgcggccgttatgggcgggccccagctggacattcgcatcagccagaccacgatcaaccagcgcggcggcggtatgtccaaatacgcgaccattcccaaggacatcgcccagacggtgattcccatggacgacggatggcctcgctcggtgttcaccatcacgaccaccaccgaagatcagcagtccaagcgtttgctggtcttcgatcaggaatccgcccagcagaattacaagctgatggccatggctcgactgtttgagggggccaagctgccgaagttcgagattccgactattggctcgcagatgggcactgcaaaggatgagaagctggtggccactcccgccgatgccttgacccaatacgccgatgtgctgcagaacggctccaagagccaatacgcttccaagttcgcagacgatttgctgcgccaggaactggccaataccacggccaaggtgcaggaaggtatgcaacgcaacaacggtacgcaggagcagaaattcaccgttgtgcctgaacagatgtgggtgatgcgtgctgcagacggtgccggtgatttggtggttggccgtattaacggcgaatggactcgcaaggcgggggatggccgcgaatcgcagccggcttccgatgacgagaaggcgctgttcaatagcgacaagtacaccagcaccatgaaggtcacgtatgtgaacgtggtggccttgtacattccgttggcaagctccggtgagcaaatcaccgccgtgggtgccgaccgtcagccggtaaaggtcgaagcgctgtagttgttgccgccgcccaccgcgcggttaacgccccaccacgatatgattcatccaccacgatgtcggtaagttttacctttcgcacaatggtgccgttttgagtcacatcgtggtgggcgttttgctacgtggtgggaatttcaccgcgtagtggaagaatccctacgtggtgggaatcggcattacaatcaatgtcagcaaatgtgattgttgttgtacgcgaatcgcgtggaatcgggaggtattatggcagagcagcagttcaatccgggagtctcattggcgggcgccgtcgatttggaggcgctgaagcatcaggtcaaggccgagcccggccaagcgggcggcgcgcctgccgctggtgggtacgtgatcgacaccaccgaaaacaccttccaggcaatggtgcagacttctgcgaccttcccgatcctgctgctcctgtgggtgccgaccgatgaccgcctgttcccgatggcccgtgtactgggcgacgcggtgaatgccctgaacggccagattcagctctcccgtatcgatatctcgtccaatccctcgattgcccaagcgctgcaagtgcagggcgcgcccgcactgtttgcgttgattgctggccgtccgatgccgctgttgcagggccttccgggtgacgacgagctcaagcaacttaccgacgaggtgattccgaagatcattcaggccgccgcacagtctggtgtgaacggtaccgcgccgtactcgggtgatcctgattccgatgccgccaagagcgctggtgccaccggtgccggcgcgggtgctgagcaggtgccgccggagcatgccgaagcccatcgtttggccgaggagggcgattacgccggtgccgccgccgaatacgagcgcgtgctcgaatccgacccgtccgatgcactggccgcccgcgaacgtgcgaaggcgctgttgctggcccgctccagggccgctgatgtacgtgacgtacgtgccgctgccgccgcagcgccggacgatgtggaatcgcagttggccgtggctgatatcgacatgattggtggccagattcaagacgctttcgaccgtttgctggactttttggccgccgggcacaaggccgatatcgagcaggttcgcaagcgtctgctcgaatacttcgccatccccgaacccaccgacccgcgtctggctcgcgcccgccgtcgcctagccaccctcatgtactaagtggttttggctcccctctttgagaggagctgtcaggcgtagatgactgagaggagcgcgcgagcgtacttgattgcttcccctaaaccatccgattcttcccgaaatactgctggaatcttggcccctccagcgccagctcctcctcgaaatcgtccgcccacttacagaacggacggttggcgagaccatcgttattgaatcgcgcctgatcggtgatttcggtgatgcagaatttcggaatcgtcagattggtaaccggcccggatcgttcggcctcggctacgatgagcggcgcgttcggcccgccgaacacgtccacgctccagccgtcttccgcaatccacacggaataccggttcttgatgattaccgagccgccgcgcttgatgagttcggcggcgatgcgcgtgtcgatctcgcgctcgacctcgtagcgcgtgccacccacggacggacctttgacggtgacatacgcttccgagaaccggtcgcggtattcgtccagcacggccaccggatttacgtcgggcgtcatgtcgacgtgaaccttgtgcgagaccagccgcacgcgcaaggcgtaattgtcggcatgcacgtagtagctctgaataatgagggtcggggcgtcgccgtcgtcgtattccgccggcagctcgcggcagaagaagcggcgttcgtattcgaagtcatctgtaggttccgacataacctcattgtagagccgatgatggcgattttctcgttattttggcgacgtatgtgcctcatgcagcgtgatgtggtgtacagtaaagaagttgctcgggtttgtagctcagtggatagagcgtctgtctccggaacagaaggtcgtgggttcgatccccatcaagcccaccagcatggctttcggctagccgccggaagccttttgcatattcggcgcgtgatattaagcgcgtgcaaagctggtgctggtgctggtgctggtgctggtgctggtgctggtgctggtgtcggggtcggtgatgccggctcgcttgggtcgtggaaaaaccgcccggtttggcgagaacggtagtcgaatcgtctggaatcgtctggaatagcaaggaatagtctgttgatggccgtatgccgggcatcatgcgcgctaaacgcgacttcgctcagtagactgctacgtaatcggcattgccaatcgttgctgatcgtgcgattggtcgtagccggtggtgatgtgtaccggcgccggccgcagcaggtgggcgcccccaagatgagaaggagcacaatatgagcgaaaagatggaagccgtagccacttccgaggcgccggccgcgctgggcgcatacagccaggcggtgaaggccaatggcttcgtgttcgtatccggccagctgggcattgatccggccaccggcgaactggcgggcgagaccgctggagagcaggctgcacaggcgctgaagaatattaagcacattctcgacactgccggtaccggcattgagcatgtgtgccgcgccaccatctacctgaagaacgtcgaggacttcaaggaagtggacgcacgttacgctgaggcgttcatcggctccgtcaagcccgcccgcgtggcctttggcaacaacatgattcccaagggcgcgctcgtggagatcgacgccatcgcggtggagtgattcgaacgttttcccggcggcccgtctgcgcgcatggtgtgtgcagacgggccgccgcgtattgtgcgacgcattccggggaatgtttcgctgggcgggggtgcgaggtgtggttccgcgacacgttcccgggaacgttgcgctggaatcgttgggcggtggtccgtgccacaatagagaccatggcatccaaaggaaaaccgtcgccgcgttcggccgtaagcccgctgagtgatgagcaggtcaagcgtctggccgcccgccacacgcttgtggactcgacacagtattacccgaccggccctcgcacgcccaatcagccggaaatcgacgcccagaatcccaaggccaccaaacgactgctgggaggggtgtccattgtgttccgcgccagctgcaagaccaaggcctggggcctggaacaggtgccggaaaccggaccgttcatcaccgccgccagtcatatcaccatgtttgatgtgttcgtgccgatgatgagcctgttccacatgggccgccgcccccgttacatggccaaggccgagatggcgaagtggccattgatcggcaagtggttccggttggtcggcatgcagccggtgcagcgtcattcgggcaaggccaagcagatcgaagagacctcgattgatattctgacgtccggccgcccgctgacggtctggccggaaggcaccgtgacccgcgacccgaaaaagtgggtgatgagcattaaggagggcgtgggatacatcgcccttgaatcctcgcgcagactggggcatcaggtgccgctgtacccggcggtgacgtggggtgccgcctccatcaaccactggtggccatggccgcgcaaaaacgtggtgatgtgctatgaccatgcgctcgattactccgatctgcttgccgacatggactcatggggtgaagagccgcctgccgaggccgtgaacgagctgatgtggcgcgtgctcaaacgcatgaacacagtactggaggaaattcgtggcgagcagttccccgctgaaggctactgggactaccgcagcatgagtcgcaagccttggccggaagccggcggcccgttcccggctgagaagtagccgcaccggttcccgtacggggagcctaggcgagtagcatggcacaagattgtgccgatgaagttgcgcgacaagcgaaggtaggaatctgatatgggtaaaaatataacggttctcggcgcaggagcatggggtaccgctttcggccaagtgctggcggacgccggcaacacggtgaccatgtgggccaaggagcagcggattgtcgagggcattcgcgatcaccaccacaacgccgtgcgcctgccgtccgtcgaaaagttgccggacagcatgaccgccaccggggatcgcgccgaagccgtcaagaacgcggacatcgtggttgtggccatcgccgcgcagttcgcgcgagtggcactcgtcgaattcaagggactgattcccgatcacgccatcgtcgtcagcctgatgaagggcatcgagcgtggcaccaacaagcgtatggacgaagtcgtccgcgaatcccttgacctgccggccgaccggttcgccgccatttccggaccgaacctgtccaaggaaatcgccgatcgtcatcctgccgccaccgtggtggcttgtacgaacctcgataatgccacgaaggtggccgaggcatgtaccacctcctatttcaagccgttcgtgaccaccgacgtcatcggcctggaaatgtgcggcagcctgaagaacgtgaccgcgctggccgtgggcatggcccgtggtgccggctacggtgagaacaccgcagccatgatcgaaactcgtggactggccgaactgaccgcgctgggcgcagccgctggcgccgatcccaagaccttcttcggcttggccggtgtaggcgatctcatcgccacctgtggctctccgctgtctcgtaactatacgttcggcgcgaatctcggcaagggattgacggtcgaggaggccaccaaggtcagcaacggtgtggccgaaggcgtgcccaccacggatgcggtggtggctcttggcgagcagcttgatgtgccgaccccattggcgtatcagatgagccgcgtgctgaacgaaggcatttcctgctcggagatgcttgccggactgttcgggcacgaggttaccggcgaataacgagagaagcgacgtatacgttgtacgtgcaaagtcgtgtggcgtatacgtcgttgacgtgcgcgagtagactggtgtgcgtctcttgtgcgcggcggtccgagcgcggttcggtccggttggcggtgcaaagcataggcttgaaaacggttgtagtttcaataaaaggatggttatggccaagaagcgtgttgtggtgctctatggtgggcgtgcagacgagcattcgatttcctgcatctccactgccggtgtgctgggggccatggacactgaacggttcgagccgattccggtcggcatcaccaaggacggcaagtggatcatcaacggcgaagatcctcgtggctggaatctggatggcggcgagctgccgaccgtaaagatcaccccgggatcgcgcccggtgatgcttgacccctctcgcggccaggacggtttcttcatcggcgagcccagccgcatcaattccgccgattccggcttcggcaccagcttcgtcagcatgtccgacccggaaatgcaccatgcgctgacctcccttggccatgtggacgcggtactgccggtgctgcacggcccctatggcgaggacggcacggttcaaggcctgctggaaatgatgggtgtgccgtacgtggggtgcggagtgtttgcttccgccgcctgcatggataagcattacaccaaggtggtgctgggtgccgccggcattcccaccgcgccgggtgtgacggtcgatgcgcgcaacttcaccgccgccgatgtgcttgccaagatcgaggacgccggtcttacctatccgctgttcatcaagccttcgcgcgcaggctccagcttcggtgtgaccaaggtcgagaaagccgatgaccgcgagacccagcaggatcgtctggccgccgccatcgccaccgccggcgagcacgattggaaggtgctcgtcgaacaggggattgatggtcgcgaaatcgaatgtgccgtgctgtgcccgaaggccggtgacgagcccgaggccagctggcccggcgaaatcgtgctcgatcatcagaacgacgaccagttctacgatttcgactccaagtacatggacgcctccgccagccacgtggaagtgccggccaatctgccggtcagcgtgcttgaggacgtgcgtgacgtggcccgtcgcgcgttcaaggccgtggatggtgccggtttgagccgtgtggacaccttcgtgacgcctgatggcacggtgatggtcaacgaaatcaacaccatgcccggcttcacgccgatttctatgtatcccaaggcttgggatgccaccggagtgagctacaccgaactcatcacgcgattgattgagggtgtgctgaggtaagtgtggtgcggaatcggccgccaaggaagaaggcgcgctgaacgtcatcgccttgccgcatgattggtccaactacggcgaggtcatcgagggcttcaagaagaagtacccggagatcaagatcaccgagctgaacccgaacgcctcctccaaggaggagatcgacgccgccaagaccaacaagggtaccgacgccgcccccgatgtcttcgacgtcggccaggccatcgccgccacctccaccgactatttcgccccgtacaaggtgcaggcctggaacaagatccctgatgctgccaagaacgtcgacggcgcctactgcgccgactacaccggcatcatgtccgtgggctggaacgccgacaagtacggcgatgtcgcctccctgaacgacctgctcgatccgaagttcgccggcaccgtgtccctgaacggcaagcctaccgaggccggcgcggccttcaacggctatctgatggtcaaccagctcgccggcggcgacatcaacaacctgcagcccggtctcgacttcttcaagaagctcaaggaagccggcaacctgaacaccatcgatgtgaccaacggcaccatcgactccggccagaccggcgtggtcttcgactggaccgacacccaggcctcctacaagaaggaactcaagtccaagggcgtgaactggaagtacaagaccttccccaaagcccaggtcgtcagctactacaaccaggccatcaacaaggacgcgccgcaccccgccgccgcacgcctgtgggaggaatacctgtacaccgccgaaacccagaacctgtggttcaagggcggcgccaacccggtgctgctcgactccatgaaggccgacggcaccgtcgaccaggccaccctgaaggacgccatcaccatcgaaggccagccggtcacctacagcaacgatgactccacccgcatcaccgagtggcttcaaaacaactgggacaagacgatcggcaactgagagtccacgatgaccgccgcaatcgcacccatcgcaccgaacggacccgccgcctccaaggccgcgggtccgtccgccgcatcgacccccgcttcgtccgcactggcgaagcaccgtcaggagcttggcacgctcgccaccacgctcccgttcttcgcctacaccgcctgcttcctgctggcacccaccgtgatcgtgatcatcggcgcgttccaggatcgcagcggcggtttcacgcttgcgaacttccacaagatgttcgaagccaacaccatcgccgcgttcggcacgtcaatcctggtgtccgtggcctcatccctgatcggtgccgtggtgggcgcgctcgcctcctacgcgctggtgatcggcgccaagccgaacggaccgctgcgccgtatggtcgccgccatctcatcggtgctcgcccagttcggcggcgtgatgctcgcgttcgcgttcatcgccactcttggcatcaacggcatcggcaccatgctcatcaaaaccctgactggctataccgtgaacccgaattggctcagctccctgccggggctggtgaccttctactgctacttccagattccgctgatgatcatcatcttcctgcccgcggtcgattccattcgtccacagtggcgcgaagcctgcgagtcgctcggcggcaacaccgtccaatactggacgcgcgtggcctgcccgatcctcgcaccccgcttcatctcggcgttcctgctgttgttcgcctccgcgttctccgcatacgcgaccgccgcagccctgttctcgcagcgctcgattctggtgccgttgatgatccaaggtgccatgcgcaatgagatggaccccaaccagcagggcttcgcgcaggtgctggcattcgcgatgatcatcgtcgtggccatcgtcatgctgctgagccacgccgtggaaaagagggccggacgttggcaatgaccgaaacttccacaaccaagccgccgcagctgcgtgccgcccgcgtgcgcaaacagagcatcatcaaattcgtgatcctgttcgtcaccctggcgttcctgttcgtgccgctgctggccatgttcatcttcaccctgcgtcacccgttgtccggtcgctggtcggccgcgccgtggacggcgattttcaccggcaacggcgaatcgttgggcgccgatctgagcgtgctatggcagggcgtcggcatctcgctgtcgttgagcgccgtcaccgtcgtgatcatgctcatcctgctggtgcccaccatggtcatcgtgcatattcgctccaaagccttggagcgtgcaatcgaatgggtggccacgctgccgctgaccattccggccatcgtgctggtggtgggtcttgggccgatctaccgttggctttccgccgacgtgttgagcaccaacccgatctggctgtgcttcgcctatgtgattctcgtgatgccgttcgccttccgcgcgatcgccgtgggcctcaactccatcgacgtcaagacgttggtcgaagcctcccgatcgctcggcgcctcctggcccaaagtgttcttcaaggtgatcatcccgaacctgtggcagtcgatcctctcggcatccttcatctccatcgccgtggtactcggtgaatacaccgtcgcctcgctgctcggccgtatgaacctgcaggtcgcgctctaccagctcggccaatccaatgcccaaatttccaccgccatgtcgctgctggctctgctcttcggcgtggtgctcctcgttgcgctcgacctgatctccgacgcaatgcgtaagtcaagggaaggtaagtgacccgatgaacaacgattcaactcccacccgtcaggaaaccggtaccgcagtggacgccgccccggcgtccccggccatcccggcagccgtgtcctccactgccgaggacgccttcaagaacgatcccaccgctaccctcgagggcgtgcgcggcaaggacgtgaccaaggctgccaaggccctgctcaaagacaccgccaagcgcggcggtggttccattcagatgcagaacgtcgtcaagatctatcccggctccaccgttcacgcgctcgacgacttcaacctggacatcaagcccggcgaaatggtcgtgctgctcggtggatccggttgcggcaagtccaccgcgctgcgatcgcttgccggtctcgaagacatccaaggcggacgcatcatggtcggcggacaggacgtcaccggtgtgccggtgaacaagcgcgagatggccatggtgttccaggcgtactcgctgttcccgcacatgaccgccctggagaacgtggaattcggcctcgaagtgcgcggcatgggcaaggccgaacgccgcaagatcgccatggaacagctggagctcgtggggcttgccgatcaggccaagaagtacacgcagcagatgtccggcggccagcagcagcgcgtggccctggcccgggcgctggccatcaagccgcgcgtgctgctgctcgacgagccgttgtccgcgctcgacgccaaagtgcgcgtccagctgcgtgaccagattcgccgcatccaactcaccaccggcaccacaaccgtcttcgtgacccacgatcaggaagaggcgctggccgtggccgaccgcatcggcgtgatgaacaagggcaagatcgagcagatcgccgccccgcaggacctgtaccagcgccctgccaccgagtacgtggccacgttcattggactcaccaaccgcctgctcggcgcatccaatggcgacgaggccgtggtcttcggccagcgcgtgccgctgctcgccggctccgccaagggcgattccgtggccgtgctcgtgcgcccggagaacctgatgctggccttggctggcagcagcgattcgcacgtcggcgaacgcgcccgcgtggaggtcattcacttccttggctctttggttcgtgtggacacggtcatcacctccggcgaataccagcgctggaacaaaggtgaacagctcaaggccaccgtgcagctgcccgccagcgagctgccggccggtctggcggtgggcgatgacgtgattgtcgccccgcgtccggtcgccgcgctcgcctgctgaatggcgttgcgatgatcgtgcggttctgttctgttttgtgactgtacgatcgtcgaatggcttatctgcaatgatatgtgtgggacggcggcgatttttgggcgattatcgcgtgccgtcccacgccggtgtgggacggcatgaacgtcaaacgatgtacattcgtgccgtcccacagattgtattgaggaatcgttgcaatgacgccatttcttcgtgcggcgtcatcagtcatatgtggagtggtgtgggccgccgcgaaaaaatcgggcaaaatcgcgtgccgtcccacaacaatcccgcagagtagaggactctctcggcatggggattgattgacgttgatcattccttgcccattgatgattttccccattcccaatgcaatcgaaacgccgtgccgtattcttgaagagtattgcacgtgtgatcggtccgtttgcggccagtgactatgggggataagtatgagcgaaccaatgccgtcggcgcagcagccgcaggtacctgagcaaccacagcagccgcaacaaaccccacgcgattggtggttcacggcccatcgccggttttcgacaatcggctcggcgctcgccattatgatggtgttctggatcgggctgaatattctggccactgaagcactacgaacgctgcttggcgccgatgtgcccgcttgggctgtgctgctcgcctcctccgggccgctgtatgtggtggccatgccgctgagtatgttggccttcactcgcgtaccggttattcgcacccggcagtaccccatgaaggcgggggagttcattcggattttcgtcatgtgcattccggtaatgctcttgggcaatatgatcggcaatatattgtctgccggagccactgatggtcaggccaccaatcgcatcaacgacgtgattcttggcagcgactggcgggtgaacgcattgttcataggcctgttggcaccggtttgcgaagaatggatttttcgcaaggagattatctcccgcctgcgccggtacggagaaaagaccgcaatcatgttctccgcattggcgttcgcgctattccatatgaacgtgttccagttcttctacgcctttggcctaggactgatgttcggatatgtatacacacgcacctcccgcctgcggtattcagtggctatgcacatgctgatcaacctgaacggggcagtgctcgccccattggtgatacaacagatcgatccccgcatcctcgacggcacaatcagcgaggccgaaatcatgcgtatggttgaaaccggcaacatgggcggcatgggcatcatgatgttgtacggcacagtgatgttgggcctctgcattgccggtatcgtgctgcttatcaccaagcgcaagagctgggagttctatcttgcgccagaggagttgcctgcggggcttaaaatacgcaccgcctatgccaatcccggcgttattgcgtacctactgttgactgtgatgcttaccggttggatgctgttcgcatgactgtcatagccggacccagagaggcgagccgggagatatcacagattgtctgacgagccgccatcttcgacaaggtatttagtgcccgaaccggcgatggcgcgcgcggccatatccctcacggtggagggcagcacaccctcgcgcgcgaacaccagcacctgaccggtcatgccgtaaggggagaagccggtgaacttgaccagcggtggctggccctccagtgccacgtcggcggtggctttggttacgcggtcgagaatatcctgactgatagcggacgggtcaccggaggccttggccgtgaattcaagcgtggccatgccttcgctgaccggcgtgagcttggtcagggcggcggtattgagtactgaattggggatgaccatcatgtctccggaacgggtgcgcaccacggtctgtcgccaggtgatgtcgtgcacggtacctgtgacgccttgaatggtcaccagatcgccgggttggatcacgcggcccagcatcaggccgaagccgccgatgacgttggcgatcgtatccttcaaacccagtgaaatcgccacgcctccgacgccgagggcggtgaccagggtggtcggattgatgccgaacaccggttgcagcaccatcgccgtaccggtgacccagatggtcacgcgcgtgagattcacgaaaatcgaggcgctgggaatctgcgaactatccagaaccctgcgcagcacgcggctgatcacgcggtcggccacaaatacgatggccaatacaatggccagccagatgagtttgcccgcattgacttggaaccagtgtgcgatgtcttgtgcatattcggtcatatgccctactgtatcgaccatttctggtgaagtcgtaaacatgcgggcccacgtcgggttttggccgttgcggtggtgccgatggtgcgataccggtggcgtgccgtcggcaccaccggcaccaccgcggcaccgcggtgcagcatcgtcgtggtgatgacgtcgccgtgacgcctagtcccggtgctcgcggcaggtctggccgaggccacgggccagtcgaatcggatcgagaatctcgtccagctgctcggcgggcaggtcggtgcgttcgccggccacctcgcgcacggtacggccggtgtgcacggcttcggcggcgatgtcggccgcgtgctcgtagccgatgtaatggttgagcgcggcggaaatcgacggtgaggactgggcatatgaacgccccaggtcagcattgatttcgatgccctccacgcaattgacgcggaacgtctccatggcccgcgtcagcaacgccatgccggtcagcagctcatgcaccatcaccgggtcgaaggcgttcagctgcaactggccctcggccacagcccagttcacagtcacgtccatgccgaagatcgtgaagcagcactggttgacgcattcggggatcaccgggttcactttggccggcatgatcgatgatccggcctggcgagccggcacgttgagatcgttgaaaccgcagcgcggcccggaattgagcagtcgcaaatcgtcggcggccttcttcaggtgcacggcaaggctcttgatggcggccgacgtggccacgtacgcgcccatatccgtcatggcggccaccggatcgggcgcggcggtgaccggcaagccggtgatctgcgccagatgcttgatggcggacttgcggaatcgcagatccgcgcaaatgccggtaccgatggcggtggcaccgaggttgagctgggccagcagcggcaccacgcgatcgaatgcagccaaatcagacttcaacagcgtggcaaacgcatggaattcctgaccataggtcattggtacggcgtcctgcagctgcgtgcggccaatcgtcacatcgttgatatgtttgtcggccagatcgtggaaggccttggcgagtttcttggtggactcggcgagcggcccgatcgcgtcgataagcgcgagtttgcaggcggccgggtaggtgtcgttcgtggactgcgactcgttgacgtcgtcgttcggatggatgtatgtgtaatcgccgcgctggtggccggcgatttccagcgcacggttggcgatcacctcgttcatgttcatgttcgacgaggtgccggcaccgccctgcatcacatcgaccgggaactgatcggccagtttgccggcctcgatttccaggcaggcggcgcgaatggcctcggccttggccgggtcgatcaggcctaattcctcattggcgatggcgcaggcgcgcttgaccgtggcataggcgcgaatcagctcgggatgttggctatcggtgatgccggagaccgggaagttgccgatagcgcgctgggtgtgaatgccccagtagacgtccgccggcacctccatctggccgatgcagtcatgttccagacgggttttgttcgatgtttcgctcatgcttccatcttcctgtgtgagggctggaaacgccagcatgggaggctgattgcgccttgtgagaaacctcacgcagggttcattcgacggaaacaatccagactcgctggttttcggtcaagcggtgtacccggggaatcctgcggggccgttcgacggtgagatgggggatggcgcggcatgcgtggcggcggccggcatgccgggggcggccgaatcctgcgcattgtgcacgaagatgcgattccagtaattaagcatgtccttttggctcatggccaggtatatgcccatggccagcacggccacatcttctttaagcaggtctttgatttcgatggcgtcgctcaattcgggccaacgttgcagcacggcgagcatgccgcccacggtgaactcgaccatgagatcggttttcaggtcaaggttcttggggtcgcgttgcaatgtgctgagcatttgcagacggcagaagtcgcgcagcgattcggtcagttcaagcgtgctgtgcgggcctgccaacagggccaggcggtcgaggcgttgccgttgctctggatcggagagcgtggcggtgacgcggtctcgccattgttcctcgggattgccattggggtcgggggtgcggttaatcggaatcgattcgacctgatgcaggatggctgaatcggccaattcgggcaggctggagaagtgataatagaacgaattacggttcacgccagcctcacgcaccacatcggtgacggtgatcttgcggtagtcgcggtcggcgagcaattcccagaaagcgttctctaggcgttctttggcgggcagcacctcggaatcatggcgtggacgtggcatctcttcctcctgatgcaccagcgtgatatggtcacgctgtctaataacttattgggcagtataactattatttgtggacatgtctatgagctaatcggcgatttcagttgcgtcctccgctgagggcgaagctgcggtgtcagtgtcggtgtcggtatcggctctggccggggccgctctatctgttcctgtcgcggttcctgctggggtctcagctgttccttcggcggtcgcagaactcggcgcggaagccggggcgggcgtcggcctgcgtttggccgtggacgccttgaacagtatcgccagggcctcaaccaaatgacgccggtctgcgggggtcagccctacatacgcgccaagcatcgccggaatcgaagcggggaagttgctcatcacctcgctgaagctggtggcgccgttggcgtgcagcacggtgaacagcgcgtccaccgcacgctcgcgctgttcgggcgtaagcgtggcgatccaatggttcagctcctcgttaaacaactgcgagctggaactcaaatccggctcggtgatgaactggtcgccatccaatagccaggtgaaggcggaatgctgcataatgccatccgaatcggaagagaccacgcggcaaggctccggggtctcgaaaatcatgcccacaatcgacgaacttggcacgattttcgtcaccttcggctggatggtgcggtaggcggggctggtcacaatctccggcgggaaaccggggccgtccagtgaatagacatgctgaatgcgcttgcgcaccttggggtcggcgttcatggccgcgtaaatcgccaggttgcctcccttggaatggccgaccagaataatcggaccttcccacagtcgcgccaccgtatccagataggcgctggctgaacgttgcgccggcaccggatactggaaagccatattgaaatcttccttccatccgatgagcgaatcatcggtaccgcggaaggaaataaccaacgtgcctttgtaggtcggcttccggcgcttgtggccgtcgggcagttggaaggtggcggcggcgaattgggtttgctcgccctgattgatgtgctcgaccaccgcgcccaggcgaacgttggcgtagcgggggttctcgcctgcgacctggaacaggtcgtgggtcaggtccggattgaccactgaaaccatttgggcttcgtgcggcttgtcgtcggcatgcgttttcggcgaacgatgcagctcgcggttggcctcgtcaaggcttaccgattcaagctcgggatgccagatacccttcagccagatcagtggatgcttgggctcgaaagcgcgaatgcgtgcggcgaacgagcctgactgcgtctcatccagcatcaacgtcggacagatactggccacatcctcatagatgagcgtggagatgatcaaggcgtcgatttcattgaacggcaagtcggcgaaggagcgcgtttcggtgtgcgcgtaatcgataatgccggtcatacgcacctcctgcttccgttgatattgcatatccccttgggccatgtggtcttgcgattgcgtgcggccgtgcggctgcgcgcagcaattaaccatatacattccattgtagggattgtacggttttggccggcgcgatcgagcaagactgcaccgacggcgaacaattcgtgggaggattcccgtcagcttgtcgaaaattgtcgggtagcgggggttgcgatgccagccagccgaccatcctccggcgctacgcgccatctcccgccggcgggagggttaaccactcaatccttttgacgaggcggaccgctgggccggtcaagggttcggcagatcgaagcgcgccagatccacgccctcgagttcaagcaactcggccttgatgtcgagtcggccgccgtagccgccaaacgcgcggcccgagccgactacgcggtgacagggcacgatgatggtaaccggattgcgcttcactgcgcctccgaccgcctgcgcggccatgcggccgccgccgcgtcgttcggccaattcggcggcgagttcgccgtaacttaccgtcatgccatagggaatttcggccaccagattccacacttcatgttggaatggcgtgccggcgggatgcaacggcggcgtctgatctaggccggggcgctcgccggcgaaataggcggtcagccatacgcgggtcatacggaacacatcgggttcacgatcggattcgcgattcgaatcgagaacggcttggtgatcggtggcccaccaccagtcttcaagacagagctcggtcaggccctcgccgtccgaggccatcatcatccggccgatgggcgtttcgactgtggcccgcatcagttgtcgttgcgtcataccgccattatcgcgcgttgagggatgaagcccataccgtgcctgatttcatgaaggacgggtcgtgctgtacggtcagtattgcgtgctgggcagcgatatctgacatagtgggggttcttgggccggcatgagtgttctttccgacatcccaaccgtctaactccgtttcgaggggctgatttgggctgttccagaggtctatctccgtttcgaggggctcctcatccgggaaaccacaagtataaacggctccgggctaacgtcattacgccgtttttggcccgtgtctactcagccaccagccccttgaaacgggagtagacctccggagaaggccaaatcagccccttgaaacgcagcgacccctctgattggagtcaatcagaggggttcggcacattgctgatgcagctggtccgccgtccgccttgaggcggaacgtaaccaagattcaggcgggattactccgcaacgagcgccaggaaggcggcggccacggcggctgtcgggttcgggaattcctcgtcctggttgaagaacggcacgtcggcgtagttcaggaacttcacttcggcacggtcgccgatcagggccttggcctcttcggccagctgatcggttatcgtcatgcgttcctgatttccacggccatggccgtgccagatgtgcccatcgcttggttctacccgctgtttatgctggccatgcccatcgcctggctgctgtatacggccaccgcgagttatgtgcacggcggcacccgataatcgttggaaaaccggtgggacacgcgggggcttggctttttcctgagattggcgtatctttgtcacctgttgcccgtgaaggtaacacatgcggacatagcttagttggtaaagcgcaaccttgccaaggttgagaccgcgggttcgagtcccgttgtccgctctcggatggctggttcaggatgattgattcagcctgaggatgacccgggcggttggcgcagtggtagcgcacttccctgacacggaaggggtcacaagttcgaatcttgtatcgcccactcgatgaatcgccggcagaatgttgccggttttttcatcacaagctcgggcgattggcgcagcggctagcgcacttcgttcacaccgaaggggtcgtaggttcgattcctacatcgcccacccgatatcacgctcgtcagtctatgatggcgggcattttctatatctgccgtgccacggttccttatatggcgtccggcctcgggtggcatttggctgtgagcggtttccgattatgagtggcgtccggccgtcgtgcaatcccgctgcgcgcggtgccgtttgggctgtaatacgggtgctttgaaccggccataacttcttcatatgtcccggggcttgtgtcgtgtgccgcggcgcgcttccatagtggatatggcggtgtggaaggggagccgccatacttacttacacaaggacgtcttggtccgccagggcaacgcgcatggaaaggggtttgcgatggtgtgcaccacgctgaatttcgcggagaaatacctgctgaaaaccgaagtcaggtccgttgccggtatgtccggcggcacttccgatgctggtactgatttcgatgtcgatttcggtggcgagggcgacctcggaagcgatcatgccaccggtttcaatcgctcgctatcggccgacgattattgggctgcagccggatatgccgatgagtcattgtattgatggacgtgatgacgcggtaagggcgcgtcgataagtgcggctggtgtcgcggctgatgccgcatctggtgctcgttcggtggtcgcggctgatgttccgtacggagcctgcaatggttttgcatcggtggtgcgtcaaaatccggaccgtcgccgacgctgtggacgtctggcgacgttgaaaggacagataatggattgtcaacgccgctgagaacgattggcgacggtggtgggacagcggatgccccaccaccgtcgccaagagtggtacttgtgtcggtggcgtccaagacatggcccggcaccgacatcagatactctgaacgtcggcggattcccgttctgtgtcccagcgccgacgtttgattcctgcttatgcgagctggcgtcggtaaaaaggcagaacttggttcaccggcgatgtctcagcacgtttgcgcgcgtcggatccttctggagcagcgggaagacgagcgccacaacgagcaggacggcgatggagagcacgccgaacgaggcgttgccggtcagggacgtggtggtggctaccaggaaggtgccgatgattgaggccgttttagggaagaaacaatagtgagaccggggaacccttgaaatcattggggaatcatggtggcgatgcatgcgattaac

SEQ ID NO: 1385 - DNA, 9224 bp, Unknown
  R257_15m  MAG No. k141_2983
acgccctcgctgagttcaggcagacgataggtaccgggcttgccggcgaacaacaccggatcctcaaggaatgcagcgttggctgcggaggcggcgaacttcgcgctgaacgagccgtacgtgccgaatgcggcgcggcgggtaatcaacgatgcgcaggcgatttcccagaacgcactggcgccaccattgcccaaggcgatttcatagccttccggcaggtggaagaattcggtgagcccttcgcgaatcgagccgaccaattgcttgactggagtctggcgatgtgaagtgccgagcagcgtggtggcgccggcgtcgagcgcggcgatttgctccgtgcgaatcttgctggggccagagccaaaacggccgtcactgggtttaagcgatgcgggaatgttcactgtcatgattccaagggtagccagagtgggggagctgtgtcataacttttccgataatcggatgaacaataggcggtaaacggttggaatgaagcacttttccggtgatttcaggacatgaagtaaaacgtttgacgcacccgaagtgtaggctatgcgtttgggcattggccccagttcgttgtacagtagcaaattgtgacggaacggtgacgcccatatcaggtgcccgtgagcccatccaaggagtttttacagtatgaagcatgcttcgcacaaggcgaccaaggtctcgcgccagcagttcagcttagcgaaggtattttttgcctccggtaaagggtcccatcgtgctcgcgccgttcgtgccatgcaggctgccggcagtgatgctgccgtgctgggtcttgatcccgcggtagctgagaagattaacgaaatcgctccgcagacccgtcgttctattcgtcaggccgcccgcgcggctgaacgtcgcagccatattcttgcttctgcctctctggcagctttggccggtactgccgccactgcaatggcttttgccaacactgaagagaattccccggtgcttgccgatgcggccactacgactacgcagattaagcgcgtcaccgatgtgagctccgcttcccgttccgaggcccgtaccgatttgaatgaatccacggccaatgccacgcagtcctccaacgagggcggctggggcctgagcaactcggacagctcgttgaataccgacttgatgaaccacaacaccgccaacaacccggtggttgccgcgtggatggacggggatcagtcggtgctgcctgctggtttcaatccgaaccatgctgtaggcaggagctcatcaaacacttacccgtggggtcagtgcacgtggtacgcctatcagcgccgcaccgagttgggtctgccggttggtggcagcttcggtaatggtggtcagtgggcctccagcgccagcgcgctgggctactgggtggacagcacgcctcgccatgtgggcgacgtcgtggtgttccagcccggccagcaaggcgctgattcctactatgggcatgtcgccgtggtcgagaagatcaacgccgatggttccatcgagatatccgaatccaatgtgaagggtttgggtgttatctcctcgcgttcgttcactgctgctgaggctggctcgctgcagtacattcattactgatctggcgcattcggcacgccgaagaaatccaatgttcccaatgggagcagacggcatcgcattttgggccattaaccggcacggtgtaaggtgaaggatttatgaaggcaaaatcagcactttcttctgttttcgcgtcctgtgtggcggtggcatgtctgtttgctgttgttcccgcagcctccgccgatgaaggcacagtgacctctacgaagtcgttcccgtcctactcgcaggttcgtcgtaacctgaccgccgaagctacctccacctccactgatgacaattccagctggggtgatgtggaaagcttgaatgtgccacagacgcagtctcaggccgaaaaagaagccgcagctcgtaaggccgccgaagagcgggccgctaaggagcaggccaccgctcaagcggctcaggctcaatccgctgccgccagccgtagccaggctcgtacttcgttgagctatgccgataccggtgccggtgtttccgctggtgctgcggcatccattgatcgtgcgtactccttgatcggcagtgcgatggactgcaccgctctggtgtctgccgcgctggctgcccgtggtatcagcttccatggatggccggaacagtatgccaatgttcccggtggctatgtggtgaccgatggttcgctgcagccgggcgatatcctgatttacaagtacaccaacggcaccaatggcggcgctcactatgatcatgttggtctttatgtgggaggcggcaaggccattcacggtggttggaccggcggcgttgtggcgcttgccggcacgttgtctaatcgcctgaccatggtggtgcgcattccgtaagcgccaaaggctttatgcatcgactccgattgcgtcagcgtcggagtcgattgcgttatagggctgattgatgcttcggcgtgttgcctatgagaccagtcggttgatgctgtgctcgactggtgaagattgtcccgggtatgttacagttccgtgttgatgatgaatgctaaacacattgcttctacattggtgacgattgcggccgctgccgcaatgttcgcctgtgtgacgccgacggtcaacgctgcagatatgagcactgctgtggtgtcttctcgctctttcccgaaagtgacgacggtcaagaagaacattcttgccgaatcgactgccacctccactgatgacaattccagttggggtgatgtggaaagccttgatgtgccgcagacgcagtctcaggctgaaaaggatgccgcagctcgtaaggccgccgaagagcaggccgccgctcaggcccaggcatcgcagacccaggccgcgagccgttcgacacaacgtgccgcgattccgcaggttgatttaggcagcgccactggttccggtgctgatgtggcccgctttgcttcccaattcagcggctatccctatgtgtatggcggcaacactccctctggttgggattgctccggctttgtgcagtacgtatacgcgcaattcggcagctccctgccgcactcctccggcgcacaagccggtgtgggcactgctgtcggtagtctcgcacaagcgcagccgggcgctatcgttgccaatgccactcaggcagctatcgatatcggcaatggtctggtcatgaacgcactgtctcctggcttgggaacgcaggtgaccagcacttccgtgttctccggcggatattccattcgccgcgtgctgtagctcgcattgctcttatgaagcgcgtccctcggggcgcgctttttgcgtttttaccagcgctgtatggagtggggagaagtattccacggcaaagcgagacatgtccagcaaaattccgtgttgttctttttcggctgagtttgccaacaaatccgagtgtcgcagggtattgttgagagtacgcgatattacatatcgcaataacttcaaggaggtcgtcatgattaacgacaaggccattctcgtcggtgttgacgggtcgcatgccagctataaggcaacatggtgggccgcgaattatgccaagcatgccggactcacgttgcagattgtctgcgcgtattccctgccgagctatgctgctgtatcattcgatgccacatatacggcgatgggggatgacagcgccgcgcattccgatgctcaggagattctgtccaaggccaaggccatcgcagatgagcagggtgtggaagctgccacactaatcgtcacgggcgatcccgcttcggtgttcgtcgaactatcgcgcaactacaacctcatcgttatcggcaaccgcggcaagggcggcttggccgagcgtctgctgggcaccacgtcttcgtcgctgccggcatatgcatactgcccgattgtggtggttccgtacaccgatgatgacggtaacctgatgcacttgaacaacaccatcaccaaggtggctgtcggttccgacgaatccaagtggggtctgaaggctctggagattgccgccgactttgctgccgtctggggcgcagagctggatgtgatgtccgctgtgccgaacctgaagggcgttgacggcgaagacgcggtcatggaatcctacaaggaagaccttgaggtgcgtatcaagcccctgcaggaggcccatcctgacctgaagatcaataagcagatcgtctccggcccggccgtcagtgcgttgaccaaggccagcttcgaccatgatgtagtggttgtaggctctcgtggacgcggtggcttcaccggtctgctgctgggttccaccagtcagggactgctgcagcatgcagccggaccggtgtatgtggtgccgcgcaagtatgtggaggctgctgagtctcgtctcgacaccgtgccgagctcgcctgctgatgtgcccaccaagtcgttggaggagattgccggcgtcgaggagattccggtgaccaaggccgagcccgaggtggccaagaagatcgaggaaaccatcgatcctgatcggcagtaagtctcaatacggaaagaggctcccaatgggagcctcttcgttttttctgccttcgttcaactgccgtctctcaggcttcgcctacagacagctcactgggctgtctgcttcacggctcagcctcagagaggggagtcaagtaagtctcagtgcttgacggtgacgctcatgcgcaccggggtttcctgcacgtatgtgtgcttgaccgtgcagcccttgtcgatgtgacgggtgacgcgctccatgagcttgtcggcgtcctcatcgctcaagcctgcgtcggaagcatcgatcaccacttgctcgtcaaagccggtgtaggcgtcgccgtcggcgtcataggtgccatccaccacaatcttggcgcccttgccttcacccagcgtgtgttcgatggcgaactggctggacagtgccgcgcaaccagccagcgcgaccttcatcagatcacccggcgtgaactggccgcgatccttgccgaacttgatgtgcgcgccgtcctcgctgaacgcgtcccacgaaccgtccttgttgcgttccacccacagtcgcttggccatgatgtctcctcgtctatccgtgcggcgcgcctgtcgcgtcgcgaccatctcccaatctagccgaaatcgtcggaaccgtgccgccgacggtcccgaattcggctgtcggcggtcggattccgtctgcacgctacactggagcgcatggctttgaccccggaacaactcgctgacatccgcacccgcatccccgcccgtcccgagacggacgtgcccactccctacgaggatctcgtgcgccgcatcctcacggaaggcacgctgaagtcggaccgcactggcacgggcacgatctccctgttcggccagcagatccgcttcgacctgtccgacggcacgttcccgctgctcaccacgaagaccgtgttcttcaagggcctcgccaccgagctgctgtggttcctcaagggctcctccaacgtgcgctggctgcaggagcgcggcgtgcacatctgggacgaatgggcggactccaacggcgacctcggtcccgtctacggcgtgcagtggcgttcgtggccagcacccactccggacgatccgaaccgcaccatcgatcagatcgccaacgtgatggacctcatcacgcatcatccggattcgcgccgcatgatcgtctccgcgtggaacccggccgaggttgagcatatggccctgccgccctgccatgcgctcttccagttctacgtcgccgacggcaagctgagctgccagctctaccagcgctcgtgcgacatgttcctcggcgtgccgttcaacatcgcctcctactcgctgctcaccctgatgatggcgcagcaggcgggcttggaacccggcgaattcgtgtggaccggcggcgactgccacgtgtacgacaaccacatcgaacaggtcctcgaacagttgtcgcgcgagccgtacccgtacccgggaatcgccatcgacaaggccgattcgatcttcgactacgagtacgaggacttccatatcctcgactaccgccaccatccgaccatcaaggcgcccgtcgccgtctgacattacacttctgttccagtccaatcccactcaaggagtccgaaatggagcatgacagtagccgaagcggctatcacgaacccgagcccggggacgccgggctcgacgagaccgaggactggggcgacgatttccccaagacgttctcggtgaacctcatctgggccgaagcccgcgacaaggaaggtcgtgcgggggccatcggtctggacggcggcatgccgtggcatctcgccgaggatatgaagcatttcaaggagctcaccgtctcgcacccggtgatcatgggtcgtcgcacctgggagtcgctggatctgcgctacaggcccctgcccaaccgcgacaacatcgtcgtctcccatgaccagcagtaccgcgcacccggcgcgaccgtggtcgacagtctggaggacgcgctcgacctggcccgccaggaggccatcccggacgacggtctcgaccgttccgaaatctgggtgctcggcggcgcgcagctgttcgaggaggcgctgccgcaggcgaacaaggtgttcgtcaccctgctcgacacggcagtggacgccgacacgtacgcgcccgacatcgccgcgctcgccgacgacgagcacgctggctggcgaatcgacgaccgttcgccgtggctggagccgaagaagccggaatccggcatcgcccgctaccgtttcatcaagtacgtgcacgcatcccgttagctgaaagagaagtatgaccgacgagaagaagtacaccgtcatgaccgtgtgcaccggcaacatctgccggtcgccgatgggcgagattatcctgcgccattatttcgacgagcgcggcctgtccgaccgcgtggacgtcgaatccagcggcgtctccgatgaggagtggagccatccgatcgacccgcgcgccgtgcacgtgctgcgtgagcgcggctatggcgacgagattccgcgcaatcatttcgcgcaccggatcagccgcgacgagatcaaccgcaccgacctgttcttgccgatgaccgcttcgcatatgcgcgcgctgctacgcatgctgccgccggcgaagcgcgccgaagtgcacatgtaccgcagcttcgacccgaacctgcccaagccgccggtcggccgcgaaagcgagatcgacctggtggacccgtggtacggtggcccgcacgaattcgaggtggcgatcgaccagattgaggaggtcgccccgtacatcgtcgactgggtggaacggcagctcgagaagtgaggggccggcggctggctgtgagcggctggctgtgggtgtaagtggttcggccgtgagtggctgaggctacgaggggctggctgtgagtcgaggtcgtgaacggccgccgggagccgggggtgagatcggctgaatgccgtggccggactgcggaggaagttgcggagcaacgaatcacggacccatcagtgaccgtacgttcgtgacgattttttttcccccgttcctaccgtcgccgacgtacggtgagtctcggtgagcgtacgttcgtgacggcaggggccaggaacaccgttacgaacgtacgccgagtccggaggaaaggctgtaaacccgctatttgcccagcagttcgtcatggctgccggttcgcatgaacatggcggtaccatcatcgcgaatccatagatgcagccagtcgccggcattgccgatgtgacattccagtacgccgtttaaatcaccggtaagtgtgtgggcgcgatgcctacgcctcaatgcttccttggagcccgccgtgtcctcaagcaccagacgaatgacttctttcagcgggcgtaaatcagcgtgcttgcgtttgagtttcttgatatctcgctggaatgccgctgtgtaatccggtttgagcattgatcagattcccaacgaatcgaacatctcatcggcactgttgaaacgaggtttgccgtcggtgagcctgttcttcgcctcgtcaagggcctccatagttgcaggcggcacggtcgtataggaaaggtttagggggatgcgcttttcccggacaatctgcttgtagaaggcgcgggtgaccgaagacaagtccagaccgagatcctcggctatgtttgcggctttctgcttggtgtccgcatccacgcggactgtgacggatgccatgctcatcattaacctccaacatcattgcgtaagacaatagtatgtatttgtatgctaatagtcaacattctgcggttgcggaccgtgtttgctgttctgatggaggagtgggatagttagaggcctctaggcggaatgggtggggccttaaaccattgccgttttgcgaaggagccttcgatgtccaagagtaccaatgccggtgtttccatgagcccgtcgtgcgcgagggcgtggcgcaggctggagcggtcgtccgaaggcgacgaggcgatgttgcccgtgatggtgcgccacctaggccaaccgcatgaggaacggcaagggctccaccgccaggcaggcgcgcatcgccacggccggcaaccgcaaacgctccgtacgacgctccacacgttgacacccgtccactcccatgcgtacgttgttgcaacaccaccacgcatggtgcgagcgttagtgtctccactcaacccatcagttcactaaacacggcacctcggcaacacgagtgggtcgccggggtgccggagcgcggggtgccagaatgccgaagggccgggataccggagtgcccggtcatcgaggtaccgaaatgccgaagcggtgtatgggtgccgcccggcccaggtgagtcacgcccgggtcagtttcttgcgcctgagacgcagcacgacatcggcggagttggcgacgcgcttggaatgcgtcaccacgatcacgcatttgccgagctgatgggcggcgtgctgcagcagatgaatcacctcgtcggtcatctccgggtcgaggctgcccgtcggctcgtccgcgaggatcgcgcggcccggggcgaccagcgcgcggccgaccgccacccgttgacgctggccgcccgacaggtgcatg

SEQ ID NO: 1386 - DNA, 17519 bp, Unknown
  R257_15m  MAG No. k141_3118
cgtcagagatacaaaacctgtcccaacaccgacgcctgccacccccccagcgtcgccggagtcccaagtctcggcccagcaacgacgcctacggaccccacacataagaaaccgcacctccgatcatcgaatctgaattacttcagtccaacaaccggggtgcggttcactgaggggagttctgccagtatagctatatcagtcgtcgccgagcgtgacgtgcacgccgccgaccagcgagctgaccacgttgtagatcagtgccgcaatggtggccagcagggtgaagatcaccacttcaacgatcgagaagatggtgacgccggagaccacggtggtaagggacaacacgttcttgagatcgaaaccgcctgcatcaagaccggtggaagacacaatctgcgtaatctggctgaatacaccgaccacatcaagcagcacccatacgatcgcggaggcaacgacctgaataatcgccacggcgatggacagcatgaacgtcactttggccacggaccaagcatccacgcgggtcagcgacaagctcatgcggcgagccctgggggcgctacggcgaggtgccggacgcacgggagtggcggcacctgaagaaggcaacgtggattcttccggatcgctggacacggagcgtgccacgcggggagcgtgctcagtaccgatcagcggctcgacatgatcgttctgcgtattgccgactgccggcggtatgatccggggctcgttgtcttcgagattctcgctcatcgtttctccttaacaggcttggcggtagcctctgctgtatgcgaggctaccagcttttcaggacgctgctcacgcctcgtccgcgttgttcacattctcgccggattgtgcggtctcggcggtgccgttcgccgcggcatcgccactgtcctcgggctcgtccttctcctcgttacgggcgatggagagaatcgtgtcgcccttgtcaggcttggcgaaggtaacaccctgggtgttgcgcccggtgcgcttgacctcgtccacgttggaacgaatcaccttgccggacttcatgatggccatgacctgatcgtcttcggacaccacgagcgcgccgaccagggcaccacggccctcgaccagttgcacggccttgatgcccaagccgttacggccctgcagacggtattcgctgatggcggtgcgcttggcgaagccctcgttggtcaccacgaacaggtccttgtcggagtcgccagggaccacatccatggccagcaggctgtcgtcgttacggaacttcatgccctgcacgccggcggtctggcggcccatcggacgcagctgctcgtcgtcggcctggaacttgaggctcatgccgagcttggagaccaggatgatgtcatcctcggcgttgcacagcgcggcaccgatgagctcgtcggcgttctcgccattctcgtcggccatgaggcgcacggcgatcaggccgccctggcgcggggaatcgtactcggccagcggggtcttcttgaccttgccggaacgggtggcgagcaccaggtacttggccacctcgtagttcgggatggacagcacggtctggatggtctcgtcgggcgcgaactgcagcaggttggccacgtgctggcccttggagtcgcgcgaaccctcgggcagctcgtaggccttgatgcggtagacgcggcccttgttcgtgaagaacagcagccaattgtgcgtggaggtcaggaagaagtgatccaccacgtcgtcctcgcgcagcttggtgcccttgatacccttgccgccgcggtgctgggcgcggtattcgtcggccttggtgcgcttgatgaagccggagtgggtcacggtgaccaccacgttctcttcggcgatcaggtcctcgacgttcatctcgccggagaacggcaggatcttggtgcggcggtcgtcgccgtacttggccacgatctcgtcgagctcatcgccgatgatcttgcgctggcgttccggcttggcgaggatgtcgatgtagttggcgatcttgcgctgcaattcctcatgctcggccacgatcttgtcgcggttcatgcgggtcagcgtgcgcagctgcatggccagaatggcgtccgcctgcacctggtcgatgtccagcagccccataaggcccgtacgggcggtgtcggtgtcttcggaggcgcggatgagggcgatgacctcgtccagcatgtcgagggccttgagatagccctgcaggatgtggtcgcgctcttcggcctcgcgcttcaggtacgcggtgcggcgggcgattacgtcgagctggtggttcacccagtggcggatgaaggcgtccaggctcagcgtgcgcggcacgccgtcgaccagcgccagcatgttggcgccgaaggtctgctgcagctgggagtgcttgtacaggttgttcaggaccaccttcggcacggcgtcgcgcttcaagaccagcacgaggcgctggccggtgcggccggaggtctcgtcgcgcatgtcggcaatgccctggatcttgccgtcgcgcacggcctcacgaatggagacgacgaggcggtccgggttgacctggtagggcagttcggtgaccaccaggcacatacggccgttgatctcctcagtgttgaccacggcacgcatggtgatcaggccacggccggtgcggtaggcctgttcgatgcccttgtggccgaggatggtggcgccggtggggaagtccggtcccttgatgatgcggatcaggttttccagcagttcctcgcggctggcgtccgggtggtcgagcgcccagtggacgccgtccgccacctcgcgcatgttatgcggtgggatgttggtggccatgccgacggcgatgccggcggaaccgttgacgagcaggttcgggaagcgggccggcagcacggtcggctcctgggtcttgccgtcgtagttgggcacgaagtcgacggtgtccttgtcgatgtcgcgcaccatttccatggccagcggggccatgcggcattcggtgtaacgcatggcggcggccgggtcatcgccgggggagccgaagttgccctggccgtcgacgagcatgttgcgcatcgaccaggactgggccatacgcaccaaggtgtcgtagatggcggaatcgccgtgcgggtggtacttacccatcacgtcgccgaccacgcgggagcacttgttgtagccgcgatcggggcggtagccgccgtcgtacatcgcgtagatcacacggcgatgcacgggcttcatgccgtcgcgcacgtccggcagggcacgctcgacgatcacggagagggcatacgccagataggactcgcgcatctcctgctgcaggtccttgcgctggatgcgttcgccggtgtccatcaggccgtagtcggtggtgtccgcctcctgcgggctcaacggctccatcgagccgtccggcgtgaactgctcgtcgccggtgttgttttcatctgccactgttgttcctttagttgtctaagtccgttgtgtacctccctctgacgagggaggttgggggattccgttacgcatcgatccaacgcacgttcttggcgttgcgctggatgaagaggcggcggggttcgacctcatcgcccatcagcatcgagaaggtctcgtcggccgcggcggcgtcctcgatgtgcacctgcttcagaatgcggtgctcggggtccatggtggtctcccacagctcctggtagctcatctcgcccaaacccttgtagcgctggatgccttcgcccttgggcagctggcgtccgttggccttgccttcggcgagcacgcggtcgcgctcggcgtcggtgtacacgaagtcgtgcgggcccttggtccacttcaggcggtacagcggcggcatggccacgtacacgtagccggcggtgatcatcgggcgcatgtagcggaagaacagcgtcaggttcagggtggcgatatgcgcaccgtccacatcggcatcggccatgatgatgaccttgtggtagcggaccttggagatgtcgaagtcctcgccatagccgccgccgaccgcggtgatcagcgattcgatggtgtcggacttcatcatgcggtccaagctggcacgttcggtgttgaggatcttgcctcgcagcggcaggatggcctgcgtgatcgggttgcggccctggatggcggaaccgcctgcggaatcgccctccacgatgaacagctcgcactcttccgggttggaggactggcagtccttgagcttgtcgggcatgccggcggactcgaagatggacttgcggcgggtgttctcgcgggctttcttggcggccagacgggcgcgggaggcctcgatggccttctggatgatgttcttggcctcgttcgggtgggcgtcgaaccagtcgccgagcttgtcggtcatcacgcgctgcacgaaggtcttggcctcggagttgccgagcttggtcttggtctggccttcgaactgcgggttggtgagcttgacggagatcacggcggtcaggccttcacgcacgtcgtcgccggagaggttctcgtccttgtccttgaggatgcccttgtcacgcgcgtaacggttgaccagcgaggtcagcgcggcgcggaagccctcctcgtgagtgccgccctcggtggtggaaatcgtgttcgcgaaggtgtgcacggcctcggagtaggcggtggtccactgcatggcgagttcggcggagatgccgagcttcaggtcttcggcctcgaagctgatgacgtcctcttccaccggcgtggccttgcgcaccttgaccaggtagtcgacatagtccttgatgccgttgaggtactggtaggtgacggtctggtgctttgcgccgggctcgtccgcggcgtcgccggccacctcgtcgccggcctggtcattctcacgctcgtcggtcaggctgatcttgaggcccttgttcaggaaggccatctgctggaaacgggaacgcagcgtctcgaagtcgtagatggtggtctcgaagatcttcgggtcggcccagaaagtcacggacgtaccggtggactcgccttcggtcatcggctcgccctgcttcaagggcgcggtggggtgctggtcgatgtacgtctgggtccagtggaagccctgacggcgcacttcgatgtccacgcgggtggagagtgcgttgaccacggagatacccacgccgtgcagaccgccggacactgcataaccgccgccgccgaacttgccgccggcgtgcagcttggtcatcacggtctccacaccggagacgccctcgccgggcacctcatcgaccgggatgcctcgaccatcgtccaccacgcggatgccgttgtccggcagaatggtgacctcgatatggctggcgtatccggccagcgcctcgtcgaccgagttatcgacgatctcatagaccaggtggtgcaaaccgcgcgggccggtggaaccgatgtacataccggggcggatacgcacggcctcgagtccttcgagcaccctcagatcggaggcctcataatgctcgggggccatggattcgtcaagttcgccttcggtcaattccgcattgttgatgcgttccgcagccgccttcagctgctcctctttgctggtttcgtctgccaacaggcttccttccgtgactacagggtcaacctccgtcatgaaggtcattcacggaggcgatatggcttacgaggcccgtaaagggctcttctggccatttgaccatactgcatgtgattttactcgtctaacccgacgagcgccatagcgaggcttctgcgaatttgtttggtatcttggctaccgccgccgagcccatttgcgcgtgtatccggcggccggtccggtcacgcgaatctcggcgatggtcaatcctttgagattgcgacggatggtatcggtaagttgggggataaggtaggtcagctgcgtggcccagaccgtggattcggcacggatggtcagtacgccgtccgtgaaatcggcgactgccgaatggctggcgatggcctgccccaccacttggtcccaatggttgcgcaattgcgcaagtttcatattcgccgcccagacgccattgccggcgatggtggtcatcacgctgcccagttcagccggatcgcgccccggtttgccgaagttttcgatggcctcttcacggcggcgtctgtagtccttcaaggtcgccccgcgacgggagagccgctcgaatatttcggccggcagtttggtctcgtccaggttgagttggcgggcgatcggcgagttcatgacactttccgttctacggacgcgctgtccaccgcgggttttccgtcatacttacccaaactctcgttttcccgcgaatcggacaaattgcccagagttggcagtattacggaagcgggttcggccagtgtggccacgtcgatacgatgggccgattcatagtcgggcacatcgccttcagcggccacggtaatcagcacctgatcctgttttctggcgaaatcaagaatctgcgtgcgccggctgtcgtcaagctgggcgaacacatcatcgagaatcacaatcggctgcaatcccaaccggtcacgcacgatttcaaacaatgccattttcaaggccaacgccatcgtccacatctcgccgttcgaagcgaactcgcgggcgggaataccggccaactcaaggttcatgtcatcgcgctgcggaccgataaggttcacgccgcgagccatttcaccggggtagatgcgttgaaaatgctcgctgatctgcggatgtggatcgtcgaacatcagcacttcgtcgaatgaaggcgcatatgtgagagtcacctgctcgccggcaccggccaagtcggcgtaaatcgcggcaaatggctcggcaagcagaccgatcacatgagcgcgcatacgggtcaacgccacaccggcttcgatgaactggccggtccagatttccaaaccgctcagaaccgcatccatcggctgtccgttgttggcattggcattcaattgcttcaacaatgtggcacgctgtttggcgatgcgcgtgaactgttgcaacgtctgcatgtatccgggctcgagcagagccgcagcctgattcatcatgacgcggcgtgctcccggatcgccggacaccaatcgctgatcttcgggagtgaaggaaacgctgggaatcttgccaatgatatcgcgcagatacagcgacgaccccgagttgatgcgggctcggttggcaccacgcgcatgaatcgacgcttcatacgtagtggtttgaccggcatcatcagcgacgttcgcgcggatggtggccgtggtctgcccgcgttcgatcagcggcaacgtgctggacgtgcgatgactcgatccggtggacagcacttcgacggcttccaccagattagttttgcccaagccattcttgccgaacaggatattcacgcctggtacgaaatcgaccactacttgactccatgagcggtagtggtcgagtgcgagacgggagatgtgcattagcgaatcgttggaaattcagggatctcagttgttgaagcgcatcggcacgagcaggtatcggtagtccatggactcgtcggaatcagcttcctgctggccgttgaactcgaccggcttgaccggggtcgtcatcttgatgcgcacgaatggttcggtcacggcggacagaccctccttcaggtaggacgggttgaatgccacggtgatgtcgtcgccgtccatgtcgatgtccagtgtttcgttggcctgggcctcgtcgaccgatccggcggacagcgccacttcctgaccggtgaaggtcatgcgaatcggagcattgcgttcggcgaccaaagccacacggctgatggcgtcgagcagatcctgcttgttgactacggcctgaatcgggtattcgtcggcgaacaggcggtcgaccgccgggaattcaccgtcgatgagctgggaggtggagacgcggccggcgttttcgaagccgagcagcgtcgggctatcggcatcgaaatcaaggcggatgttctggtgctcgtcaagagcacgggccacatccttgagcagggagccgcgaaccagcgtggtggtgtcgacgtccgggttctgcggagtccaagtgaaggtggcgcgggccaaacggaagcgatcggtggaggtcatgacgaccttgtcgccttggaattgcatgcgaacgccggtcagtaccgggcggttttcttcgcgggagacggcaacgcatgcctggttcactgcctgaacgaaagtcggggcatcgacttggccgagcatggccggtaccacaggcagatccgggtactcggtgtcgggcatgagctgcaaggtgaacttcgacttgccggacgtgatggtcagcgtggagccgtcggtgaccaggtacgttttctccgaacgcagcgatttggtgatatcggccagcagcttgccctgaaccagtacggaaccggcttcgtcaacgccggcttcgatgtggtggcgagcggaaatctcgtagttgaaggcggagaattgcagcgttccgtcaatggcttctagcttgacaccagcgagaatcgggttggagggacgtgcgtcgatgactcgggaggtccaggctacggcgtcggccagggctgcagtatcgatttcgactttcatgtgtgattgttcccttcgtcggattggctgagaaatattctagccgttaggtggcgaacttacgtacgatgggtgactggctgttactgtggcgatgatgcttttcacgtaactgagtaagtaatcgtcgtaataaggccggtggatagtgtggataagtaggggtgagccctacaaatgcaacggttcataagtccctgaaaattgtggacaaattctgcatggcttgtggataagtgggcgagttttccacagccagttcgtcgaatttgagttttccacatcgaggtcgcggttatgcacgagttttccacaacaaaacagtgggtaatccacgagttatccgccgagtttacccacatctgtgcacaactgtgtggataacttttttggttttcgtactttcgcacggcgtgttgaaggctgtttttcgtcgaggagaatcgattctggagaccgttttcggcacttttttcgtctcgctcgcccaaacccgcaaaatcggtcctcagaatcgattctctcgtttcatgggttttttgcgtgttccccttcgaaactcccctcagtcgtctgcgacgacagctctcctcacaaaggggagccatgaggaatctgatgtctcgaatccgttgcctcgacgtatccaccagaatccgcctgagcaaccaaaaacggcacttttcggactgattttccgaaaagtgccgtttttcgtctctcagaagcgttgtgtcagttggtgttgctttgcttgaggcgaaccgtgagctccataacgtagttatagatctcctgtttttgctgcattcggtcactgattcgagtgcaggcatgcattactgtggtgtgatcgcgcccgccaaagacctggccaatatccatcaggctcatactggtcatttcgcgagccagatacatggcgatctgacgaggaacagccacgtttttggttcgtgatttaccgacaagatcctcaaacgtcaggtggaagtacttcgccacctgactgatgatgtccgtgggcttgatttccacatcggtggtgaagaagtcctgcaacgtctgctcggccaaggcgcgggtcaccggctgattactcagcgaggccacggccgtaacacgggtaagcgcgccctcaagttcgcgaatgttctcggtgaagcgttcggcgatgaggtccaacacatcgctggggattttcgaaccgttcatcgaggcgatcatacgaagaattgcgattcgggtctccagatccggcggcttgacgtctacggtcaggccggattcgaagcgcgagatgagtcgagcctcgaaacccttcaaattcttgggtgccacatcggaagcaatgacaatacgcttatttgcctgatgcagtgcattgaacgtatggaagaactgatccaaggtggcttccttgccgccgaggaactggatatcgtcaataagcaacacatcaacctgtcggtatcgacggttgaattcagcaatctgaccctggctttggttcgggttttgcagcgcgtcgatgaattcgttcgtgaattcctcagacgtgacgtatcgaacctttagcccgggatccttgaccagtgcatagttgccgatggcgttcagcaagtgggttttgcccaggcccgatccgccatagatacacaacgggttgaaatcctgaccggaaccttcggccacggccagtgcgaccgtacgggcaaaacggttggaatcgccgggcacgaaggaatcaaacgtgaagttcttattgagatgagtctcgggatcgcgattcatcttctgctgaccgaccgggaactgcgactcggtggcgggcatcggttcccgcggtgcggctaccggctttgcaccataggattccttaccgaactcggcgacggtcggagaaatttccgaaggatatggctgcgccggctttgccgccgaaagcggttcgggctcggttttcggcacgaccttgaacgcgggaaacatattttcgccggttaccgtacgcaatgcctgaagcagggaatcgttcaaatcaccctgaatggcttgaagcgtatcgttgttgtccacacacagcacgatggtcgaaccgaagacgccttcaggaacaacgccttccaaccagcctttttctcgtgggctgagcgaagcgctgtgtttgagcaccgtcagcgtgtctgaccagatgtgggcggcctcgattacggggtcgccggaagcgttaaccatggtggccccttctatcggtgtggcgaaatctgtacaacagataatatttactctggtttagacaagttatccaccgtgtcgcgtgttgaaataactggattgtgaataacagacatgtaatttgtggataacttttggccgtgaatggttggtattccgccgattataagagatttgaggcgtgtctcgcaacgtgtcgaaatgtgaaaatactccgtccgttttgacttgagggtaggggtgagagtactttggtatagcttgactcacgtgagggcagcgcgaagcgttgccgaatagacctaggagcaatggattatgaagaggacgttccagccgaacaaccgtcgtcgccacatgaagcacggcttccgcctgcgcatgcgcacccgttctggccgtgcggtgatcaaccgtcgccgtgccaagggccgcaagtccctctccgcctgatcattccgatcagtgccacaggcatagtcgaggtggagcggcttcaaagccatcgtgatttcgtcaccgtgctgaaacgccggcgcaaagcaggtggcaaggatatcgtcgtgcactatttggtgcccgacgaccatcatgatgatgacgaccggacggtgcatcgccgtttgggattagctgtctccaaatcggtaggacatgcggtcacccgtaatacggtgaagcgtaggtttcgtgtattggccagagcccatgaggatctgctgcccgcgcattgcgatatcgttttgcgcgccaagcccagtgccgcgaccgcatcgttcgcttcgctagatcagcagatcgcgaaggcttttgccacagtggcgcataaggtggctgaggcatgacagcttctttcaaggcggtgatgattggtggggtgcgctggtatcaacagcacatctcggcaaacacaccgccttgttgtaagtattatccaacgtgctcgaattatgccattgaggcattggaacagtatggcgcgttcaaagggggagtgctcgccatgctgagattactgcgttgccggccgtggagtcgtgggggaatcgacgatgttccacaacggtattccattttttacagattttcgtggtcgaaggctcatgaagagccccgactgacaccattggccacagcccaaagagaggcccaacgatgaactcaaatgaatttctgcttgatagcgggttttggggatttctatataaaatcctgactcccgttgagtggttgcagacctggatcatgaagatcgtgcatgacttcttcgcgatgctgggcatgagcccgattggtgtctcatgggtgcttgccattatcatcctggtgctggtggtgcaggcttgtatcttcccgctgttctacaagcagatgaagtcgatgcgcaagatgcaggcattggcaccgaagatgcagcgcattcagaacaagtacaaaggtaagacggatcaggcgtccaaggaagccatgagtcgtgaaaccatgaaactgtatcaagacaatgacgccaatccggctggctcctgcttgcctatgctcattcagggcccggtgttcatgtccatgttctatacgctgtcggccattccatacattgccaacggtaaacgcgatgcgttgggcgcgttcgacgtagcaaccgccaagcaattcacccaaaccgatgtgttcggcattgtcagtgtgaccgataacttcacccgcgcatctactgcaggcaaggtggtcatcggtatcttcgtgttcctgatgtgcttctgcttgtggctcattcagtacatcaacatgaagcgcaacatggcagctgcttcgatgaacaagcagaccgagaccatgcagaaggccatgctgtggctcttcccggtgatgtacatcttctcgggtgtttccttcccgttcgccgtgttggtgtactggctgaccaacaacgtttgcaacttgtgccgtacgctgtggcaggtgtatgcattcccgacccctggctctccggctgcggcggacaaggagaagcgtgatcatcgtaatgagaatgctcgccgcgcaaaggccggcctgccctctctggaagaagaagcattggccaaggccaaggaagaggctgagcgtaaggccactcagggctatcagcgtcaacagcccgtgcgtaagcgcaaaaagaagtgacgaccatgtcggtgcgcgttcgatgtttcacgtgaaacattcaacacgcaccgacattactttctctgttcgggggagcagggcttagacttggaattcaaacacgacatgaaggagtagcgtatggcacaggatgacgtgaagtcgatcgatcagctcaacgaagaggctgacatcgccgcggattaccttgaaggcctactggatatcgccgactatgagggcgacattgagatgggcgtgcgtaatgaccgccccaccgtgcaaatcgttgctgatgacgataccgacatcaaacatcttattggccataatggtgaagtcgttgatgctctgcagcaattgactcgtctggctgtacagcagaagaccggcgagcgttctcatctgattgtggatgtcgacggtttcctgaagcgcaagcgtcagcacctccgtgatatcgccctggatgccattgacgcagtgaaggattccggcgagccgtatgatttgaagccgatgaattccttcgaacgtaaagtcgttcacgatgtggttcgggaagaggggctgaagtctcgctcgcacggtgaggagcctcatcgttacgtgacggtgtatctcaagaacaaaatcgaggatgttgccgaagacgacgagcttgatcaggagtaataggtcgacgagtttttgagatgacaaggacgttcaacggatgtcgtctctaaacaaacaagagtgaccgtagggagaatggcgtcgtaatgagcgacgccttttccatgttgattgtttcacgtgaaacatggtgagggagatggctatgacggatcagctgcaggggtcacctgtacttgctgaggtcttgggtgatgcgttgccgaagttggagcgtttccatgccaagattgccgaagagggtgaacctcgtggattaatcggcccccgtgacgtcgatatcatttgggaacggcatattctgaattccgctgcgattgtgccgtacgttcggaatgtgacgaatggtattcgcttcaaaacagttgccgacgtcggcagtggtggtggttttcctggattggtggctgccgcgtgtttgcctgatcatgacttcacgctgattgaaccgatggagcggcgaatcgaatggttgcatgaatgtgttgacctgatgcaactgcagaacgttgagattatccgtggacgctccgatgccgtcatccagcaggtacggaagcgggaaattcatccgttcgctgttgtcacgtgtcgtgcggttgctcctatgaccaaactctctggctggacgttgccgttgctgaaaccgtcaggacagttgatcgcactgaagggacggtctgctcaggctgaaatcgacaaggctggcaaggagattgcaaaattcggtggtcgtcgtccacgcgtcgttgaggcggctgtcggaccggatcttgagcctacccacgtggtgattgtagataagcgatgagtggagtactgattgagttatccacatttccatatgtgcgtaaaagttatccacatttttacgggacgatgtgcagaatgatgaaaacactgatttttcaatgtttttcgtctgcgaatacataatctaacactcaacgtcattcacacttatccacacttatccacattgcatatcgcaattgtggataacgagcatcatgtccatacgaatgagaacactggaacttacgtctgtgcaaggaggagcgatgtccaccaaggatcatcagtcggaacctatagaatcggcttccgaaacgcttcagcgaatattcgatggtcacggttcagtgcttggcagccagatggctgatgaaagctcacgctacgatgtactcaagaaaaccgatttccccaaacctcaacgtacccgtcgtattgccgtggccaaccagaaggggggagtgggtaaaaccacatccacggtaaacaccgctgcggcgctggcgaacaagggcgcgcaggtgttggtcatcgatatggacccgcagggcaatgcctctacggcgttgggtgtatctcatgcatcgggagagccctcggtctatgacgttatcgaggggcgttccgatctgggtgatgttatcacggtctgtcctgattttcccacacttgatgttgtgcctgcatcaatcgatctcagcggtgccgagttggaagtggctgatctgcccaaccgaaacacattgttgaaggaggccttggacctctacctgcgtcaatcagataaacactatgattacgtgttcattgattgcccgcccagcttgggcctcttggtcatcaacgccatgtgtgcagtgaccgagatgctgattcctatccaggctgagtattacgcattggagggtcttggccagctgatcaacacgattggtttggtgcaggagcatttcaatccagtactgctggtgtccaccatgctcgtcacaatgttcgatcgccgaacgctattgagccgtgaagtatataacgaggtcaagggacactatcccagcattgtgctgaataccaccatcccgcgttcagtcaagatctccgaagcgccgagtttctcccaatcggtgattgcctatgatcctcgtggcataggtgccatatcgtatggtgaagcagctttggaaatcgcacagcgttcgcaacaagtccttgacaccattgatgcgaggaggaacaagtaatggcatcaaaatcacgactcggtaagggccttggcgctttgttccccacattgccaggggaggagccagtggcggagcagcccgcaatgattgaggaggattcatctactccggcggccactgctgacataacccccgccaagaaggctactgcccagcaggaatcaaagcctgccgtgcctcagatggtatcgtccagcaaagcagccaagaaagccgccggtaaacgcgcatccatgcccgcattggacaccattactcatcctagcgacctgtttttcggtacggagaaacctcaaaccggtaaggtcgccgcacctcagcagggcggcaagccgtctgcgtctcagacggcacatcgtacatccgtcaccgtcaaagatgtttcacgtgaaacatctcagactgcatcggcggcaaagaccgctgacacagataagaaggacgagctcaagccggtagccggtggttatctggctgaactcaaactgtctgatattgggcccaatgcacatcagcctcgtaccatcttcgacgaggatgagttgaatgagctgtctgcttccattaaggaagttggtgtgctgcaaccgatagtcgtgcgcaagcgtccggcaagccagattgctgcggccaaagccgccaagcacgacgagacggaatccagcacaaatccgtttgccggtcatttggacagcccgtatgagctcattatgggtgaacgtcgttggcgtgcatcccagttggctgggttggagacgattcccgccatcgtcaaaaccactgcggatgatgatatgctccgcgatgcattgctggaaaacctgcaccgtgtggccttgaatccgctggaagaggcggctgcctaccagcagatgattgaagagttcgggttgacacaagtacaactgtccaagtcggtgtccaagtctcgcccgcaaatcgccaataccttgcgactgctgaacctgccggcctctgtgcaaaagagagtggctgccggtgtgctatcgtccggtcatgcgcgtgcgctattgggcctgagcgatccggaggaaatggacaagctggcttctcgtattattgcggaaggtctttctgtacgcagcaccgaagaaatcgtcgccatgaagattgcgtcgggggagcagccgaagaagcccaagacgtccaagaccaatccttgggttggttccgccatccagcagagtttggaaaatcatttcgacaccaaggtgtcgattaagggcagcaccaagcatggtcgcatcgaaatcgtcttctcgtcaccagaggatatggatcgcatcctacagctgctggtgccgagccaaggcgatgccgattccaaatgggtgtaacacgataagaacattcgtgttgtcgccggcatcgtcagtgacaacaccgatgcttagcgttgtcacttggcattgtatcggcttgtcactgtagccggcattattgctgtgcagtgcgttgtacgcgcaagacgttatagcctctgcgtgattcctggcaggggcgtatgcctgcgttgtagcccctgtcgcaatagaaaaccgttgtagatgactttgttttagcttgtcgctagagcgtagtcatctgcatggcctcgttgccgaggccagctccaagactcacacggcttacgccgtcgcttggttcgcgtttcacaggatgccgcgttgcccgacgcgatgcgtcggtccgtcttccgcttcctccgcgcgcgtttaa

SEQ ID NO: 1387 - DNA, 51134 bp, Unknown
  R257_15m  MAG No. k141_3326
ccatatccttgtccgccacgtgttcgtccagacgttcccgccacgggtggcacggaacagccagtcgtcatcacccatgccatccatctgcgccttgatctgcggcatgaggaaccgtggtatcgcgatgttgcgggccttgccgttcttcggggtgccgagcatgctgccgccgtgcccgtcgtcagtccatgtgcggcctatcctggcgcgccgcctgtccacgtccacgtcaccgaccttaagggcaagcgattcgcctatgcggcatcccgtataggcctgccatctgaccagcagaccgtccaccggcttcccgatcttctccgcctcatccgcgagcaactcgacctcgcggaccgagaggaacaccatgtcatcgtcggagacgatcttcggcacggtgaccctgtccacaggattctcaccgatccacccgttcgagacggcgtagtcaaagatgcccttgaggacgactttcatgatattgcggatgcttctcgcgctcagcggcttcgaatcacgtccgtccggcaatgcggccggataaccaccgtccatgagctggccgacccactcctgcagcatgtcagggcgcagctcccgcaacgtcatgccaccccatttgggcaggatgtacaggcgcagctccctcgcataccggcctgcggtgccgggtttcagatcgaccttcgacgcgagccattcgccggccacatcatccaggacacgaagctcctgacgaggatcgcggtagcgtccccgccggatgtcgtcctccatggccgcggcatattcctgcgcttcggcgagcctggcgaactgcttcaccctctgcacacgtctaccgtccttgacgatggtccaatgacaacgccagcgcatcccgactccataacggcttttacgccatttctcaggcacattggccttcatcggatcgcgtgagttagccaaagagcgtttggccgcgcgactcggcggattgccatcatcgtcattcttgagccacagatcatcaatggtcactttcatggcgcttcttcccacatgtttttcacaccggcgctcgcggtatgcgggtggccggggtcattttttataaggaatccgaacgggtataaggctctataagcacgtataaatatgtgatgaggtgatcgcgttatcgtgaacctgcatcatcgtccgatggaagatcgacggagactttcacttgaccatcgcttttttcgatggttgcggaggtgactttcgtctcggatccgaatggatcggtgttcgtcggcagtgccacggtgcctaggacggttccgcttagacggattaccaggacgtctgccgatggtttcacagtcacccagacatgcgattggtcctcgaattggtcgaggatctcgtcaagtccgtccaccggttcgatgggtactgtccttccgatgggcgcgagcaccttcttatgcggcttgatattcgagaacacgactttcgttgagacgtttggccaactctgcggtttcggctcgacgggctttggctttcgtgctttcttcgttggaagctccggcacgttctggcgtggaaggcccatcggatcgtgagcttccggcatttgcagacggagctgccatatgtgtcgatccttgtccttcaccctgtccgggacatgggcgagcatcacggcaccctcgggaggtacctgaccacagtgacgctccatctggtatttgcttatatatccgatttcctcgccgtcgagaaacacccagtacgtggggtatcctgcatacttgcccttccgtatccggccttccatgacataaacccagacccatgcgtcgtatccgtatcttttcaggatccgctggtgatcctcgtctccggatatctccacgccgcactcgatggtctcgacaaccctgccatcgggtcgcgcgttcaccgcagtcggcatctcgtcgccgagataaatgctcttcatgaaggtggaatctttgcgacgcttgtcatggagcgctcgctgtctcgattcgtcgatttcagattgcgtgagcgttctcggactgtacatggattccagtcggcgccagcattcgaaagtccatcgggcatctgacatggcgcggtgctcctcggtggcttgtatgccaagcagccgcatggtctcctgcaggcttaccgatggtgcgtttgggaacttcgccattgccaacgacatcgtatcgatgcaggtcgtgtcaagacaatcgatgccgagtcgtgatgcttccttgttcaatgcggaaacgtcatagctgatgttatggccgatcagcgtgaggttcgagatggctgcgaggaattcggggattacctgttccgcgttcggctgggacagcaaggactcttcggtgattccggtcaagagcgttgccgacgccggcaggtcgcattcgggggagatgagttgctcccattcgcaggtcggcacgttgttccttatcaggattgcgccgatatcgatgacacgtgtcccggaaggggaatttatcgtttccgtgtcgatgacgacggcatcggcgatggcggcgttcattctgaactcggcgaacgaatccagaccgtcatcgcccgcatgcgattctccggacaatccactttccgcaggtacggacgattgtcccttgttcttcttcgatacggcgtaggcgatggccgcaacggcaacgatgactatgaccagcgtcattccactgtcctttctccataagccgtcgtggcacgagaagccaacagcgacttgtaatcctccacaacctgcaccgtcacgccaagctcacacgcgatgagataagagtccccgtcgtacagtcgttcggcggtcgcatattcgacggggcccacgagccataacgcggtctccttgcgggtgcgctgttccgcttttgctccgatgattccgcatccagggtcatggtgtctcgcatgcacgagctcatggcagagcgtgcacatcttctgatggtcaagcagtcgattgtcaacgatgacgagccgcaacgtatcacagtacagtccacacaacccgcgacccaggctgcgttcctccacgcgcacgtccatcgactccgcctccatcagaagcccgtcataactgtctatcggccctcaccgccgttcatctcgatttccttattcggatccctgttggcggccacgtcatagtcttcggggtgcgcggcgatacggtcgatgagatcatcggtgatttgggactcgcgctcgcgagcttcattgcgcgcggctctagcaatgaatttctcggcttcctcaatgagttcatgtggattaataccgaaaacttctgctagctgagctatttgcgttactttgatgtcgcgctcgtttttcagcattctgattagcgttcgctctggtacgccagacttctccgaaagctctttgatggttaatcctgctgcagaacgttctgcagcaattgctttagctgttgcttcattaatgtccatatggacagtataacgactgtaaatttgctaacaactgcccgtttgggcgtgtcgcacttgcatactgcccaaatgggcattagtatgcaaagcatggacagcatgaagtattcggcaacagttgcaaaacgagttgacaaggctctttccagtgcgaaattcagcgtttctgaggcgtcggagaagtctggaatccctcgagtcacattgacaaggaggcttaaatatccagcgtcatcgccattcactgttcgtgaattgcatcaaattgctgaagcgattgggtgtgatgtcagtgagttcttcgtcagagacaaaaaatcataagtcgctgacgcatgaatcgaaaggagaatccgaaatgatgactaccaagaaaacgatggttaccgaaatcgatctttatgagttgacggaagagcagtttcacacgctctgcgaactgattggggaggattgccggaagctggcgcgtcttgatgagaaccctatgcgcgtgtggtattcgccgggagacgattccactgtggtcaggtatacgaagatgctgcagattgagggcaatcagctcggtcgcatcctcggcgtcacgactgccggtacggaggaaccggtttcgtcatggagaaacggtgggatgggtcatctggaagggcccaagtgatgcgtacgtcatcgttggtgctgacttccagacctcgttcgaggaataggaagcttgattcggagccgcgcgagatgtcgccgagttcgtacttgttgccattcgaaagctcgaccctcacatccttggcgtcgaacggattgttgttcgcaacggaatgtctgaggttatgcacctggcgaagctcccactttggaacggacgcctcatcttcctggatggtcgcttggcgttgcagggcgtcagcctgcgactcaagggcacgcacctgatcgcgaagcgttgaaaccgtggcgttcgacgcgtcgagctgctcccgcaacagtttgatgtcttcctcacggtccttgttccgttctttcgaactcttgtgttcgacgacccatccaacgatcgtcacgacgagcgtgagaacaaatgcggcgagttcgacgccgtgctgtgaaaaccaatcagtcatgaaaacgattctaaggagaatccgaaatgagcatcaacattccggccgagacaccggatgaatccatgaacccgatttccgttgaggagttcgaacgcctgcacccggcgatgctgggcgcgataaggaaagccgtccgcgaggaaccagctcgaacggttatcggaacagtgggcgacgacaggaggagccacctgtccagccttgacctgcgaggcatcggcatcgaggtcagacggcagttgtcggcccgcgacatgacgaccgaagtcatgggctcgattctcgagcacatcaatcaggccgcggaccgactaagcacggagatgcaggaactccgttcagaacttatccgagagcacgtcgagacagtaggcggcggatgccatggaggcatccatcgaatcgaatcccttggcgaggagggaaagcccttggcacagggttctcatcctctcgtcgggatcggacgtttcggcggccttcccaaacacggcgctcgccttcgcgaaatcggatccattgctcatattctcacctcccttctttgcgtgggtctgctcattctcccactcggcaggaaggccctcaaacgaaacacgtcggaaaagcaatcggcgcttaccaacgcatgaaaggagcgggtgcgtgatgaatgacaaagaggtgttcgccgcattggcggcggcgttgaagccgatgaacacgacgaaggacatcgcggacaactgcggcatcaaggaaggcaccctggcgtactggcgtagcgcgggcatcggcccgaagttcgtgaaggtgggacggatcgtcatgtatccgaaggagcagatgatcgcctatttcgcgcaacacctgtaccagtgcacggccgaatacgaggaagaggtgggtgcgtgatgactgacaacgactggcgtaccgataccccgtggccggatccatgggaagaaaaggaagacaaatgagcgacatccgcaaagtctgcgtcgaagcgatattcagggaatttgaggacaagggcgacgccatccgtccggcctatgccgacaggtgggacgacatcgaagcaaggcgttcgctcggtcacatcgtcggattcatcgacatcgatgtggtcgacctcgtggacatcgtcatcgacaccatcaacaaggagctgtgatggaatcaatgcctctggccgtaggtcaggcactgctcgacttcgtcgttgcgtctcgcgccgagctccgtagtgtaagcgacgtgaaccgtcacatgacaggatccacgtccgaagtaggcgaagccgggttgggcgttcagacggtcgataccggcctggtcttcgagtatctgcttggagaagaactcgctttcgagcgcgacctctccgaacggcacaacctcgtcgacgtgccgttgcgcaacggtctggtctttgaaacggacgaacacggacacgtctcgtgccatgtcggggcaatcgttgacaaggaagacggtcgaggtttctccatcgtattcgacccgccacttgtggaccgtctggtcggcggtgacggacaacgcccgctggctgatcgagttcgcgtctgcagctatctcgttcgcctttcctgcaaggcggttggcctgctcggcggcacgcttcgattcgacggcgatccggttggcttcctcagccgagccgttcgcctgctccgagagcttgttgccatggcgcgcctggaacaaggcgacacatccggagacaccgccaaccaatcccgtgacggcgccaacgacgccggtgatcgcattgatgtccattccaccgattctacgaacggagacgaacgatgaaagctcttgccctcgtcatcctgcaccagctgctgttcgcagtgtggctactggccatgtgggtgctgtactgcacgccggcctgcacgcacccgatcgaacacctcatcgccgtgccgttcgcggtgctcatccccacggccgtcatcatgcgccgcctgttctccgacccacgcttcatccgatgggtggacgaactcgagcgatgaaagacctgggcggctcctcacacattgcggcatggacgtggttcgtcatgcgcagccatgcctgaaccgcccgcgcgtcaaggaaaagacgttaaaaccagccggacgggtcatcttctctcttctcctcccgcccggccctcgccggggcccgcgaacgaatgcgggcgccatggatcggcgtgttgaggtcacgtcggcggatggatgcgcggttcgaccccacgccccggcacgacatcaatccaaaggaggcaaacgttgccaagcaaaacaccaagcaggccggaaggcgagaagtggttcgaatggccgctcacacccgccagcgtcggcatgacggccgccgaactgatcggcgaactgtatgaaaccatatccacgctcaaccgcgaccggggctggaacctcaccatggtcgcgccggcgcgcttcggcgagatcgtcatcgaccgcgaggccggatgcctgcgcgccaagtgcgcgtggaaggccaaggatccaagccagctcggcccggaaccggccggatacgtgagaggggaatgacatggccataggggagaccgtcatcaccatcgtcggcaacctcaccgcggacccggaactgagaaccaccggccagggcgcgcaggtcgccagcttcaccatcgcaaacaccgcgcgcgtatacaacaagcagaccggccagtacgaggatgggccggcgctgttcatgcgctgctcggcatggcgtgacatggcctcgcattgcgcgcagagccttgcgaagggcatgcgcgtaatcgcgcatggacgcctccaacagcattcctaccaggcacaggacggcaccaacagaaccgtcatggaactgcaggtcgacgagatcggccctagcctacgctacgccaccgcgcaggtcagccgcatcgaccgacggccgcaaggtcccgtctacggcaatcccgccgcgcagacgccgaccgtcaacaccggagcgggcggctggagccaacagccggcccagtccacgcaaccggccgcacctgccgatgatccgtgggccccgccgtcggacgaccagtcatcattcggagacttcggcaaaccggaatccgaaccggagttctaaggagcagcaatgaaagccagcgaacaacaggcgctcatcccgcaggaggccacgcccgacacgctcatcgacctcatcggcaagacccagcaggtcaccaagtccgcggccgtcgtgctcaaggcatgccgcaccgtcatggacacccacaccaagaaggagcacatcgacaagtggggcggcatccacgccatcaccgaagccgtgtacgactgcgcggacctcgcgcagcgcatcctcgacgccggcttggccatggagaacatgtgcgcgaagcccgccacgtcacggcagatgatcctcatcgacgacctgcgccgcagcctcgacatggacgacggcgacgtggaggcgaccgtcgatccggacaccggcgagatcgactgaaccacggaaggagcaagagagatatgtggttcatcatcgacgaccagatggccgacgacaggcgcatccgccgcctgccgctcgccaccgtgggactgtgggtcaagctgtgcgtcatccactccaaaggcgtttcgatgcaggccaaggacccggccgcgtaccccggccacttcgacaagctcgacctcaaggacgccggcggcaccatgaaacagctgcagcagctcatcgactccggcctcatggaggagcacgacggcggatggcgtccggtctacgcggaaggcatctgcagggagccgcgagtgttgaccgaagagcagcgcgaggcgcgccgcaaggccggaagcaagggaggacgccgcaaggcggccaaccagaaagccaagcaaacgtctggcgacttgccagaaaacagccaagcaaacggagagcaaaacagtagcgagacaggtagcaaaccgtctagcaagttgctagaggacagccaagcaaaaacatggcataaaaccgataccgataccgataatccctctccgacccctcccgccggcaaaccgaagcaacccgccacgccggaatccggcttcgaccatttcgccgaaacctatcccggatccgtcggcgcgaaaggccgcaagaccgaagccgaagccagagccctgtacgcggccatcgccggaaaccccgtcgaactcacccgcctccaaaccgcgctccgccgctacaagcacgccgtcaacgacggacaaatccgcagcggccacatcccacggctcaacacatggctccgcgaccaatggaaaacctgggcacccgagccaatctcgccgccgccaagccacaagcacacctggaactgcgaacacgtccaccagctcatggatccgcatgaggacgaatacgaccacaccggaagcctccgcaacggcaacccaagcgaatggtggaaggcatgccaggcgtgcgcagacgaactcaacaaccaagaaaccagcaaggagaagcaatgagcaactaccaaagcaacgaaatcaagctcatcaacacgagcctgatcgacccacacccggacaatccacgcaaaaacatcggcgacgtgaccgacctcgccgccagcatcaaaaccaacggcctcctctcacccctcagtgtcgtacccaacggcagccgctaccgcgtcatcgccggccaccgtcgccttatggcctgcaagcaggccgggaccggagccgtcccatgcttcgtgcttgacctcgacccgttgcagcagctcgaggctatggtcaccgagaactgccagcgcgaacagctcaccacgctcgaggaagccgacgccatccagggcatgctcgacctcggagccaccaccgccagcgtcgcccacaggctcggacgaagcggcgactacgtgcgtgaccgcgccaaggccgccagcatcgacaacgaagtcaggcggacccgcgacgatttcagccagctcaccatcggccagctcgtggccatagcgcgatatgacggccagccggatctgcagaagcgcctcgcgcaggcggccggcacctcgaacttcgactacaccctcagccgcatcgaacgcgacgaccgcgaccggcaatggatcgaatcggtcgccgcgctcctcgtggagtccgacaacggcatcaacctcatccccgacccaccctacagcaacccggaatggcgatacgccggctgcatgttcccatccaccggcacccccgaagaaaccatcgagaaaatccgcgaacagaaccccgcagccgtatccatccacatggagcaggtctccctctggacccgccgcgacaagaccgccgacgccgaaaaggaagcccgacgagccgccgaacaagccgaacgcgacgcccgctggcacgcgctcgaggaatacgccgccgcatccgcagacaagcgcatggcatggctccacgccaacctccacggcgtcaaacgcgcccagctcatcgaaaccacggcccggctcggactcctgcagatcatcgacccggacccgcagggctacacggagccgctggccacatggaacaacgccgcatgcggtggcgaacaattcgccaccatcagcggcatcgaaccgaaacgggcgctcgccgaactccgccaccacctcgacgaacccgactgggcggtctgggcggtgcaaatcctcgccgcacgcatcgaatggttcatcgaccccgaagactggaccagcacgaacaacgtcggccgacgcatccacggctactacctgatcctcgaaagcctcggctatcagcccgccggagacgagatcgagcacctcaaagcgctcgccgacctgatcgccgaagccgaccagcgagacgaggagaacaaccaatgactaggaaacaactcgaaagactcgcccaactcctcaccgacaccgcccagaccgccagcacaatcgaactgcgagcgctcgccggtggcaggacggatgacggcatcgtggcgatggcggcggggctgagggccgactgcacttcttgtttggtgctggtcgacggtctgatgcaggagggggtgcgttgtgagtgagttcgatgattcgaagcgtgccgctttggagcgtcagggatggcattgcctgcggtgtgggacgaatatccatgacccgtcatgctggcctggacgtagtggccatcaccgtcagttgcggcgtgcggcggatccggatgtgaggcacagtccggccaacatcgtcgagctgtgcggttcgggaacgaccggctgccatggctgggtccaccagcatgtgagggaggccgaacgccttgggctgatagtcccgctcggcggggatccgcgcaccaccccggtgcgcgactggcaggggatctggctccgcctcaaccaggacggcaccgcgacccgtctgacagccatggaggtcgccacactcgacatcgacaggagggaaacggaatgaccattgacaagcccgacatgctgctatggatggatgtggagaccacggggctcgacccggaccatgacaggatcctcgaggtggaaatgcgttgcaccgacatgagaggcgtgcggtgcgtcggcggtttccgccgcgtcatcggactggaaggccgcaaggcatccattacggacgggaacatcaaggcgtggcgcatgcactgcgccaacggactgctcgaagacgcgctcgacggcggatatacggaggaggcgacggcgaacgcgctcgaggaatacgtcgacagcctcgcgcaatcgttcaccctccatccggcaggcagcaacccgcagttcgacctcgacttcatcggccgactctgcccgaacctcccgctgcaccaccaccgcatcgacatggccaccctccgcgacagtctcgaagccgccggctgggacgtgaaaccggaaggggagacgcctattgccagcgcccaccgcaccgacgcatgcctcgaccgcgacatccgtcaatacgcgcgcatcatccgccacctctccgatcatccggtccgatacgtcgccacggaagcagcaaggtgatgagcatctcggcagtgatcctcctatgcgccgccatcctgatcggctggatggccaacaggccatgaaccgtaccaacaacgaaaggaaccttggaatgaaacagaccatcaaccgcatctccaaccgcgtcggcgactggttcgccacgctgttcgccatcgccgcgctgctgctcgtgccgcacgccatcatccggacggtcatcggcctcggcctccaccactggatccccatccaatggctcgcactgcacgccgtgctcatcatcctcaccctatgcgtcgcgctcgccgcctacatcattgcggaccgcaccgccgtggaaccgccggaaacatactgaaaggagccatcatggcagaccaggagaccattccgatcggtctggagacgcagaacaaggtggccgaggccatctacctgcgctggtatcgcaacgggcccgccatccacgcccatggaacgagatgcccatggaaggcaaagagccatggaggcgcgtggccaaggacgcccaaggcgaaaacgaaggcgaggagctgcggtgagcgtcaacgttccgctgcataaatggcggtcggccgacccggccatcctgatcggccgccgctgcatcgcccaaaccgatcaggacgtcatcatcgacggacggctcgaactcatccgacatccggacggcactgccagcctccgcttccagggcatcggaaacgacatcatctcccacgatccgaacacatgttccaacagcatgggcgacggcatccgaagcctcgccatctacggaaaggaatgaaatgcaccacacagacaccgtcagaatcgccaccaacccacgcaaatggcgcagacctgcaccctgcccggcatgccgcaagtcccggccgctcatcctgaccctcggcaccatctacaaactccgaacccgcaaaccggtcaacaccatctacggctgcatctgtcccaactgccggcacaaatgcatcctccacgtcgacggtaaaaacctcaaaaaagccatccgcctctggaaccaccacgccagccaccatcaaaggaacgaacaatgagaaacaccatctgcgccacactcaccgccatcaccctcaccctctgcaccgcgctcgcaggatgcggaagcgcggcggaacctgccacgccggcgcatgcggtcaggtccgtcgactcgcagtgctccgccggggccgacgtattcacggaatgcgtcatcactctgaccgacacgaggaaagtggactgtgtcgtttactcgggcttcaagaagggcggcctgtcatgcgactggaatcacgtcagcggagcggacgaggaaccacggtgaaaatcagaatccaggacggcgccatatacatcgcgccagaggacgacgaggaacggcaggcgtgcgaaatcgccgtcaacgccctgctcagatggtcggcggaacacgacaaggaaaaggaacaacaatgaaagacagtgaagcagacatcgccatcggcgtgctcaacaaactcatcgaccaggaactcgaagccgtccgcgccgcgacaagggacggcaatacccccttcggcggctacgcccagacccgacacaacgccttcctctacgccagggacgagatcaggaaggcgctcgccgatgccgtggaggaaagggatgggtcgaatccgttcctgccgcagcgtgacgaattggtcaacggagggcgcgaaatgagcgatgaacagacgaacccgttcgaactgcagtatggcgaactcaccacgagggacatgcatcggtgcgacttctgccgcacgctggtatcaagcccagtttacgaggtcatcgccatcttcaacggacaggcgacaacggcggacgaggtgtgcccggaatgcatgcagcgtttcggtttcaaaccaaccgcggtcatccctttgacgacgtaccggaagctaatggaatcagtaccggtaagggcgctcaaatgagcgggtggagagacagtgccgcatgcctcggctacgatccggagatcttcttccccaaaccgaaggacgtgatggccataaggaaggcgcaggaagtttgcagcggatgcccggtcatcaaacagtgcggcaggttcgccgacgaacacccacgcatcgatggctactcggtgcagggagtgtggggcggcaggctgcgactcggaaagaagaacatatgaatcgcaaaagccaactcgacttcgagactgaatatgtccgcggcgaacccatcccggtctccacggacaagaccatcgcgcagattgcctccgacgcctacgtgcagggcttcatcgcaggacgactcaaaccaccgaccgaaatcgaaatagacgccgccctacgctacctcaacaacaacgcgcttataagacaggacatcacccacataacagtcaaatacgcgctcgccgacatgtgccgggaaatgagatacgccttgacgaaaagaaccatcaactgaaaggaaacacgaaaaaatgagcgatgaaacactcgaaccgccactgccaccgatcgacgcgcgcaccgaagccgtcgccgaacgcctgttcggactcaaatttgcactccgcaaagacgatccgaaacacatccacgacgaatgggagcatgcggccgactggatccacgacggatacctgcgccaagccatcgaagtgctcgccaccgccgaccaagcgcaacccgcgagcgccgacggatccgattatgaggagcggatgcgcgtcgaataccgtgaattggccgctcgtgccggcaggctcacgggcatgctgcagcggtatgcggatggcacgcttgacttcgagcccgcctgtccgatcactctgctgagcaggcagcttgacgtcatggacgaatacgcgctcatcctccgccgccgggcacgcatcgagcgcatcagtcttgtcaggcagcgcatcgacacggccgtcaggggctccaatgagtgacgcggccgaacggatccgcgcatggaacacggaaaccgacaaacacaaaagaaaagcaaaggaacgatgaaccagtgaaaacgaagaaaatcctcgtggacatgatcatgaaatggcaccaagccggatactcaaccgacgaaatcgcgccactggtgccacaaataccgaagcccgaaatccaagccatcatccaacaccgcgaataaacaagaaacccgaccttccggccgggctcctggcatcaccaccagaagactaccacgccggagggaatcgaacaaatggacgaacgaaacaacgaattccaaccaacaccaaagccacagccagcacaaaccagccaaaacaagccagcgctcgccggtgtgtgcctcgtctgcggcggtggatgtgctgtcagcgacaccatgtgcgcgaaatgcgatgggctgatgcgcggctggctgcgggaatatccggcgtggttgggttcgctgcatgagttcctggattcgaccgcgcattacggaggccgccggcctggacgcgtcaaccttccagtcgcgccgacgccgatccgattgccggtgctcgaccacatgcaggaggtcggggacatggcggtctcattgtggcgcagactgtacgcgccatcggcgatgccatggacgaacggccggatccacccgtccctgctggaatgtttgagcgtctgcgccgcatgtccacggttgaaccggcttccggacatcgacatcatctggcatgactgggaatcattggcgcgcacgaccttgtccatcatcgacgtgccgccttccaagcacggcatcggcagatgcccgaacccattgtgcggtgtcgaactgtcggtgcccatcgacgcggtcgaggtcacctgtcccgtatgcggcggcacttaccgcgtggtggacgtgcggctcggcttcctgaaggagtgcatcgcatccggcaaggcgttcacggcaggggaatgcgccgaactcctgcgcgaatgcggattccagtgcagtgtgaacacgatctactcgtggcgcaagcgcggcagactccagccggtcggcaaaaacgcgaaggggcagccgttgtacaggctctctgacgtgcatggacaggtcgtgcggcgtggcgtgatttgacatttttcgaagtgcaaggcacgattgtcagtggattagagggttcaaaccgaagacatgcggtttgaacccttttcgtatccaccttggattctcctaactccttgggttgcgtaacgccgtcctgtccgaacggcataaaggcggcattttcgacgagcgttaagatgccgaaggaggaggcgataccggtgcgtacgaccgacctcaagcatctgaaaagggatatcagacgaattccggatggcaatggtaaattagacaacgctttttggtgcgcaatcggtatcggaatcccgatgataatccaattcgtggtggattctagttcttccggaggtcacggcaactggttgattttggctatcggcgtggtgtcatgcatattggctggcatgtttaagatatttggtaaaggtgagaaagaagaccgcgaacgatatatcgacggcatcatcgagaacattgatgatttctccgtcggcgtgagatgaagttgaatttctccggagtcacccgtgaaaaggaatggcccggaatcgcttccggaccattcgtttatttgtcgttttgtttgcgtggtctgccgccgccgacgcctctgccgggacgttgcgcgttccaccggtcgatggtttcggggagccagccgcgtgtgcggccgatgcgcacgtccggctccggcaggtcgtagactgctgcgttcgcgacgccgagtctttcggcgacctgtttgacgccgaggtattcagtcgtcatcgccgccccgtctgtccatgatgagcgtggcgatgcaccagatgcccgccgcgagtccgaacaatccggcttgccatggttttcccgcgaagccgagcatggcggacagcaggccgcatgtgatgctgcagacggcgaatatggtgcttgttttcatgatggccatgaaataggatggaaccggggttccgggcactaggtctgctcggaaccctttcgtcatctcttatggcgtggtctgcgccgtatcgagatgatgagcgccgccagcgcgatgatgttgctcgccaccgagctgatggcggtcacgatgtccgtccatttcatgctcacctcctttcctgttgacataaactattgtatcaaaaatacataagttatgcaagcgagatagatattacacgccgaaaggagcagaaatgaaagaagccctcgaagagatcgcacatcaactcacacgcatagccgaccaaggagaacaggcgggcatgcaaatcagcaggggtgatgccctggaagcgtggggcctgcgaatctacgaggaggacttcctctcagcgctccgatgtctcggaatcgaagtcacagactgatatcgaatcgatgacgaatgacatcacataagccaaacgttcgcagacaaaacggatcgcgacggaatcagctcgtttccagacacgaagcagcggtcaaaagcggaagaacctgcggaatctgcggaaagccaatcgacctgcgactcaaatatccagatccttggagcttcgtcgtggatgagatcatcccaatcgcaagaggtggaaatccatattcctggacaaacaccgaaccgacacatcgatggtgcaacaccgtcaaaggcacgcatacactcgagtgggcacaacgtgaagtgcgacggctcatggccggtcagctggggcagcaatcaaaaccacccaccggcgtgccgtttcggaaaatcgacatctaggggcgatatcccctcccggtccggaaaacacgtcccccgccgcatagggccgatatctccccggaagcttaaaacgtgacggtttgtaaaacgtgacgggaggtgaagcgtcgtgaaatgccttatctgcgaaaaggaattcaggccgtcagggcgcgggaaaccggctaaatactgttctggcgcatgccgggcgaaagcgtaccgggcaaggaagaacgatggcgagtccttgccgaaaccagcaaaaccaagaacaaaacgaaaggcaaagacgtcagcgactgcggaacgggaacatccggcagacatcgaccgtcacagtttcgaacgcatgatggatggatcccatgaggacacacttcgtgaaatcgtcggcaggctgcgcgaagcgcttcatgattcatcgactccagccagcgcgctgccggcgatcagcagcaagctcgccgaattcgacgaacggatgcgtatggccgaggaatccggcagcctgttcgacgtgaacgacgacgtgacggaggtggcggaggatgtcggagcgtcgattgtctgaaatcgcccagcggctcgtgcagccggaagacgtcacgtcaagcgacttcaaacttatcaacggtgcggcggttaaggccgggattcattacgacctctggcagaaaggttttctctaccttctgttcgcaaaacgctccgacggcaagtatgcatgcggatccggaggagcggtcctgtccagctgcagacagatcggcaagacattcaccgtcggaacttcgatattcatcctgtgcgccgggcgcgccggaacactggtcatctggaccgcgcaccatacgcgcacctccgatgagacgttcgccgatatgtgcgacctaacccgcaatccgaagctttccaaatacgtgcagtccgtgcgccgcgcgaacggacagcaggagatccgtttcaccaatggcagccgcatcatgttcggcgcccgagagaacggtttcggccgaggtctgcactccgccgacatcgaagtgttcgacgaggctcagattctcaccatcaaggcgttggacaacctgattccgatcgtgaacacgagtccgaatccgctgattgtgttcatgggtaatccgccgaagccgggcgatcaatgtgaggctttcgaggagaagcgttcgaccgcgttgtccggcaagtcggatgacatgctttacgtcgagctcggtgcagaccgcgattgcgaccttgatgacaggaccgcgtgggcgaaggcgaatccgtcatatccgaaacgcaccagcgaggaagcaataatgcgcatgcgcaacctcctcgcggaagactcgttcaaacgcgaagcgctcggaatctgggacgaacagacagccgccgaggtcattggtgaggaggcttggcatgcgaccgaggtggccaacccgcaaacggatggattgctttcgttcggcgtggatatgccaccggacaggagtgcattggccatcggactcgcgttcaagcacgacgatggcactgcattcatctccctgcaggaataccgttccactcgcaccgacggagtccaatgggctgttgactggctggctgaacgatggcacaagaccgcgtctgtggtcgtggacgcgcagtcgccggccatgagcatcgtgcctgacctgcagaaacggcatgtgcgtgtaacggtcaccgacacacgccaattaggacaggccacaggccgcgtgctcgacatgattcgagacaagtccatcacccatctgagcgatagggaccagccgcagctggctgccgctgtgaagggcgtcacattgcgcgacatcggccccaatggagcggtcgcgtggaacaagaaaggctccgacgtggagataagcccgctgcaggccgcgacattggcattgcacggggcgttcaccacgaggcgcaagccaggaagaaagcaaagattgaggaggctcacatgacatcgctgctcgctccggtcaccgatttcagcgacctcggcataatctttaatccaccgaccgatatcaaagggcttgacccggcgttgcacgacactttgtcgaatctcgtcaccgtgtggaaccgtaagcgcgcgcgcaattcactgcgctcccggtatgcggatggaaaacatcggctccgcgacatcggcttctccatcccgccgagcatgcggaatctcgaggaggtggtcggctggccagcgaaagcagtcaacgcacacgccgagcgctgcatgttcgatggctttgtcagtccgaacagcagcgacgattccttcgacctgaatccaattctctccgctaaccgctgggacatcgagctgccgatggcgatcagcagcagcatgatccactcgtgcgtcttcatggccgtgtcggagggcgacgagtcggctggggaaccgcctgtgctcaccattccgcacagcgcgcaatggtcgagcgccctgtggaatttccgtacgcgcagtctcaaggcggcgctcaccatcgatgacatcgacgattacgcgcgtcctacgcgattccgcctatggacgcctttccaagctatcacctgccagcttgggcgtgaatggtacgtggacgatgtgtggacgcatggtcttggccgtgtgcctgtggaggtgctgtcttataggccgaccatcgacaggcctttcggcaggtcgatcatcaaccgcgcggtcatgagcatcaccgatgacgcggtgcgcaccgtcctgcgcagcgaggtcagcgccgaattctactcggcaccgcaatggctcctactcggcaccgaccccgattcattcaaggacgatgatggcaatccgattccagtctgggaattcgtcatcggacgattgaacatgattggtaaggacgaggatggcgacgtgccgaagcttgagcagatcacccagcagtccgtgcagccgcatatcgaccagatgcgagagcttgcctgcagattcgccggggagacgaatgtgccggtcagctcgctcggcatcatccaggacaatccatcgagcgcagaggcgatgcatgctgcggagaaggatctggtcatcgactgctcggcagcgaaccgcgtgtatggtgcttcgcttcgtcgtatcgcgcaggacatcatcatgcttcgcgaccatacgaccgaagtgaccgacgagatggcgggcatcaccgcacgatggcgcaatccgtcgctgccgagcgtcatcgacgccggagacgcgatggtcaaactcgtgggggccttcccttggcttgccgacacgaccgtcgcattggaggaagtcggcttcactgacgagcaaatcaccagactcctatcggaaaagcgccgagccgaagcgaaaagcgcattgaacgcgctcgccgggatgaacggaggcgggaacgacaaatcggactccgagccgcaaggaaatcaatcttctgaccaaatcgcagaagacggcggtgagcctcgcacaacgggagatgggccaagcgtggcaacagctgcagggaatggaaccggcacagcagcgtgacatgctgctggaactcgttcccgccatcattgacaaatatgggagcatcagttcgaccgcagcagccgactggtacaagcaaatgcgatcgaaatggttcgacgacaaatacgagccgatactcgccgaccctatacatgacgatttgaccgacatgattcgggcgaaggcaagcatgctgttcaaaggcaacgagcgatatgatccgaacgcctatctctcgtacctgaatcggcttatcgcggtcggagtgcgtaacggcggtcgcagtaccgtcaggtcggcagccaagcttgacaagtatgggccccggttcgcacgcgttccttccggacttcatacctgcgcgttctgtgccatgctcgccggacgcggcttcgtctatgcaagcgccgaaaaggccggaggcttgttcaacaagtaccatgcggcatgcgactgcgagattgtcccatcatgggatgaaaaaccgcgtgtggagggctatcgtcccgacgaattgtacgacgactatctcaaagcgagggatgaggccggaagcgattcggtggacgatatccttcgcgcgatgcgacagcataagggcaaatacgcggatggaatccgtccgggaaccgccatccctgatggttggaagcagcctcatgcgcagaacgaggaacgactgctttcaatgcgaggactcgctggcgtcaccgatcgcgaatggtacatgcgtcaggaaaaggttggagttccgcactccaccgatatgttatatccgcaggaaatcgtgttccttgaacgattccagaatcttgggaaccatgtcgaatggataccaagagacatagaaaaaaggacagcgacaaatgatttccgttggatcgaaacaaacgagctttgcgaattgaagtccttggcaaaagctgattttggcaaaatcgccgatcgtatcaccaaagccgttcgaagcgctaaagagaatcacgatgtcgtcaaggactgtttcgtgatagatcttggccaatcgaaacgtaaagacaagcttgttcaccagttagagaagtacaacgatcgtgagtggaaaatccgcagacttttcattctcgacggtgaaggtttattggaaatcaaattgaaatgaaacaaccgggagcacgcctccgctcattgcgttttatttcaacgccgcagaggacccccggtcttcatatattttagcacattcttggcaggttggcccagtggcgacggcagtggcctgtaaatccacgacattgaaacaacgcgggttcgagtcccgcacctgccactatcccattttttgggcggtcactggctccgtcatgcctggtcaaaaggccacgattgcctcaaacattcggagaaaacacaaggagcgtttcatcatgccgaaatccctcatcatgcgtcttcgtcacatcatgatggtcgcgccaccggccgaacccggcggtgacggacagcagcagggtggcgagccgccggcaggagagaagaccttctcccagagcgatgtcaaccgcatcgtcgaggaccgtctgcgccgcgaacaggccaagtatgccgattacgacgatttgaaagccaaggccgcgaaattcgatgagcaggaggaagcgaacaagagcgaactgcagaaggccaccgaagccaaccgcaagctcgaatcacagctggcggagcagaagcacgccggccttgtcgccaacgcctgcctcaagcacggcatccccgccgaattcgccgacctcgtgaccggcgatgacgaggaaagcatcgacaagacagccgagaaggtcgccaagctcgtcagcacacaggggaagccgccggcatccggcaatggcaggcatccgctcgacggcgagggaaaccagccgggcgggcagggaagcatgagcatcagggagcagatcgcagccgccgaaaagaaaggcgactatcagacctccatgacgctcaaaagcatcatgctcggcacgaagcgccagtaaccaccaatctggaaggaagacatcatgcctggaatcacaggacagggcaacacctacaatctgcccaattacgtcggcgagcttttcgccgcaagccgcgaggacacgccgctactctccgccatcggcggactcaccggcggcatcgccaccacgtccactcttttcgaatggcagggctacgacctgcgcgacccagacgccaaccgccagcgcctcgagggcgccgacgcgccgaagggcgaggaacgcacccgcttccacgccaacaacgtggtcgagatccaccaggaggccgtcgaggtctcctacacgcggcagggtgcgaccggacagcgcaacaccgacaacatgccggtggtacaggtcggcggcaccgccatccccgctgacgagctgagctggcagatccagcagcaactcaagcagatcgcacgcgacgtggaagcctccttcatctccggccattacaacaatccgaccgacaaccagagcgcgcggagcacccgcggcctcctcgaagccatcaccaccaacgtgatgagcaccgagcacaccgccgcccagctgacagcggacgacgtgctcgacctcgcgcagatggcctgggacaatggcggcatccgcgaatccgagacgcgcaccatcgtggtcaactccactctcaagcgcgcactgacccgctgcttcgtcaccgacgcgaagtatcaggagcagacccgcaacgtcggcggcgtgaacctgcagaccatcgagaccgacttcggcctcttcaacatcatgctcgacccgtacatgccgaaggaccagctgctcgtcctgtccctcgaacagctcgccccgcgcttcctcgaaatccccggcaagggtcatttcttcgccgagccgctcgccaagaccggcgcaagcgacaaggtgcagctgtacggcgagatcggcttgcagtacggcgaccagaaggcccacgcgctcctgaccgtcgccggtggctccgcatccaacaccgtgaaggtcgccggcgtgagccttgataagaagaccatgggcgtcaagaccaggggcaccaatacggtgaaggccatcgttgtgcccgacggcgcatccaataaggatgtcgcgtggactgtggaaccgtccgacaattccatcgccaccgtcaaggctgataccgacaagagcgtcggtgtcgtgaccggcgtgaaggctggcaacgccaccgtcaccgcaaccacttccgacggctccaagaaggcatccgtcaaggtcaccgtgaccgactgagaggccagatgatggccgacacagatgatttcgcgagtgtcgacgatcttgaagcctcatggcatgcgctcacggacgaggagaagacgcgcgcgaagaaactcatcgcgtatgcgtccgacctgatccgctcctatcgcagatgggacaaggtcagcaacctcacccgtgagcgcatctgctgcgctgccgttaggcgcgccatggaagccgattccaatggcgcaccatcaggagccagcagcatgagcgagaccgccggaccattccaagccacctacagcttccagaacccaaccggcgacctccgattgtggccgagcgaggagaaggaacttggcggaaggcgatgcctcctcgcgggagccctcgacatgagcaccggaaaggtggtggcaccatgatccacggcgaaaccgtcaaggtgctccgtccaagcatcgccggcatggacgcctacaacactccaatccgcaaatggaccgaggaatcggtaggcaacgtgctggtcggctcgccgacacaggacaatgtcgccacaagcgtcaatccggaaggattgctcgtctccatgtcgctctacttcccacgctcctatcaaggaacgctccgggattgcaaggtgatcgtcaggggaatcgaatatcgagtgattggcgatccggtcgcgctcaacggcggattgacgccaacttcctggaacatgcaggtcaacgtctgccgcgatgacgggagatgaccatgaagggattcaaagtcgacaaggaatggattgaacgcaatgtcctgtccaaccaaacagtccaatccgctttgaacgcgaaggccagacgcatcgcgccgatcgtgaagcgcatcgccctcaaggaaggcgaccgtcattatgccgaatcggtgcgcgtcatgcagggacgacgtcctggaacgaaatcgtcgacgcatctgcgcagaccatatgcccgagtcatcatcggcgacgagcatgcggacgccaaggaatacggcgacggacggatctatccgaagaagggataccttcgccgcgccatagccgaggcgggtggctgattatggcgattccgcttcgcggctcatggccgcaaccgatgccgatcatcatccaatggctgcaagacaaggcggggatcaaggcttcggcggaagtaccggagaatctgcgtgcgaaccttccggccgtcatcgtctctccggcgccgggcggcacgaccgccgatggattcacgcgcggcagagccgtcgacatcgacatcttcgccgctgattggacttccatggacgcgaccataagcaaggtcgaaaccgctctctctcagctgcagggagatggaaaccgatatggctacgtcgactcctcaacgctcacctcattttccgaagtgagtcattcaatgcctgacgtgcgtcgttgtacggcgacgatcacgctcaacaccagaccacaatgatttttcaattaaggaggaaatgatggctgccatcaccgatgtgcccagcattctcaatgacaataacggaaatgtgcgaaagtggggcactcagctgctcgcgatcgccgactattcgaccgcgatgccgaatcctttcttcgacaccgcaaccaacaaaccgaatcagctgcctgagggtttcaaggtgatgggctacatcagcaccgatggcgcgaagatgagtcgcggcatcgagtctgcagacaccagcgctgtgcaggatctggagcctgtgcgctccgacatcaccggccgtacccgcaccctgcagctcaccttcctggagatgaacgcgtgggtcaaggccttggctcatggcctgcctgtctcccagtggccgacaaacaaggatgagggcttcgaattcaccgataaaaaaaccacggaattcccgtattatcgtctgatctggatcggtcaggacggtgtgggtgacgcggcacattaccgcatcgaggccgggtatcgtgtcaaggtcactaatcagggcgacaacaccaagaaccgctccgacgccgagggcgaggaccagaccttcaccttcttccaggatccgaagaccggcaaggtgttctacgagggcgagaagatcgccaagaccactataacgtccaactctcattctgatgtctcccagtctcagctggtgtccgatcaggtgtcttctgacaccgagattgctgactgacgcacaattcttcccgcgtcgaactttgttcctttcgtcggcgcgggatcttctccttttccctctctcacaggtaaaggaacatcttatttttttgaaaggattgaaaaatgaccgacaacaacacgaagcgcaaggtccgctctctcaaggccgtgaaggcgaaattcctggaatcccatccgaagattgaggagtggatccgcttcacggtggatgataggccggatgtgaaggaattccgtattcattccccgatttttcagacgaatgcggagaagatggcttttgtgaaggcgcaggagtccggcgatgaattcgagatggcaaaagcattgctcggtgatcagtgggatgctttcgacagggccggcggctcggtgagcgtcctgctgctcctgctcaacgatgtggccgatgagatgaccgagacggacagcgagggaaaccctacaacgcgatagagcttttggatggtaatggtcacgcggaggaattggaggccgctctatgcgcggtctacgcgccacgtgaccccattcaagagttctggcagcgcaaaatcagtctccgcgcattgcatgcgctgattgtgcacatgccgccagacaacgtcttcttccgggctttggccggtgaaggctggagtgagtcggaatggcttttgcatgatttgggcgacatgctccgtgacatccagctgacgataacccaatgcgccccattcgtggagcatcccctcgagtgggaggatatccgcccgcgcaccagacctcccgcggtcgtggtggctgaatccaaacgcgagcagccttctgccgacagcaaggcattgcacgcgcaggagcggagcgaacttatggcgcttgtcacgggcgatcaatcgaaaaactgaaaagtgaggcggtctcatggctggtacagcagcatggatcgatgtgctcccgaatctgagcgctttcggcacgaagctcaacagcggcgtgacggccgcggccacctccgcaggacggaacgccggcaagaaattctccgacgcaatgaatcaggccgctggccgtgacgtactgtcggagcaggacaagagcctgcagcaggctgagaagaaggccgcgcaggcggtcagccaatgcatatcgcagatcgctaaggcgcgcgacgagcagaagagcgccgtgctgcgcgtgcaggccgccgaaatgaagctcaacgaaaccgtcgcgaaatacggcacagcgtcctcgcagacgatcagcgcgcaggcgcggttgaatgacgcgcgaagcaaggcccgtcagaaggacgaggcgtacaagaacgccgaagagcagatccgcgccgcgcaaaacggcttgaaggaaacgcagacgcagctgacggccgcgcagcagaaggcgaacaccgcaaccggtggcttccgcaatgctttgcagaagtggaagcaggccgccgatttggcgaagtcctccacgagcggcctgtccgaagcgcaatcgcggttcagtgagaccagccgtcgtacgaccgcgcgtttcagcgcaatggccggcgcagtcggcggattcacgtccagcgtcgtcagcaaagccgtttccactttcgcgtcgctcggctcttcgatggtcgacgcttcggattcggcgcagaagttcgccagcaccatgagcttcgccggtgtgagtgacaagaccattcagaagctgacggacagcacgcagaattacgccgacaagaccgtcttcaacctttccgatattcgtaacaccaccgctcagcttgcatcgaacggcgtcaagaattatgacaagctcgccgaagcggcaggtaacctgaccgcggttgctggcggtggcgccgaagcatacaagtcagttgcgatggtgctcacccagaccgccggcgctggcaagctgaccaccgaaaattggaaccagctgtccgacgcgattccgggcgcgtcaggcaaactgcaggcggccatgcggaaaaacggcgcgttcactggcgatttccgtgatgcgatggagaaaggccagattagcgccgaggaattcaacaagacgattctccagcttggcatgaccgacgtggccaagcgggccgctgaatccaccaccacgttcgaaggcgcgatgggcaattgggaggcggccgtccagaaattcggcatgaccgtgctcgacaaggtcaaaccgcagctgactggcgctttgaacacgatgaccgaccgtatcagccagttcaccgactggttcagcggcgcgtgggatggtttggcagcgttcctgtcgaccggcaaggtcaacaaggcgttcgccgaggcgttcaaaatcgacaaaagctcctatgtgggcattgaggacgcctaccagcgtatcaaatgggggtacaccggactggtgaacttcgtcaagaccggcgaattctcatacgagttcaaccgtgccttcgagaacgccgaccgccagacactcatcgacttcaaagacaccctcctcggtattcgcgactccgccagcgaggtgctgaagaaccttcccggattgggtgaattcttcaataccccgaaggatggcgacaagtcgaacttgaacaaggccttgaaagccgccaacgtggcgcttaaaggtctgaagccgctgctcgacctgctcgcatcaatcgagaaggcatggaacggttggtctgctgaacagcagggcaccatcttcgacacggccatctacctgtggctcggcagcaaaggcttcaagatactgaagaacatcttcggtgtcgccaaggatatcggcaaaggcttcagcatcgccggcaagggcatcaagaccgctggcgacgcgctgaaatcgttcggcaagttcctcggtcggttgaaggctccgaaatggctgtccagcttattcatgaaggccccaaaggttgccggattggataaagtgccgactttcgccaaactcaccggcggcactcttggtggcgtcgcggctggagcggctgcctacggtgccgccacgaagaatctgaccggcggtctgccgaaatgggtttggaaaggcctgcagggtgtccaaggcaaggacacatccgacaaggcttacaaggcgtaccagaaatggtatgcggaaaacaattcggtcaagaaccccggaaaattcaccgaatggatgaaaaggaaactggccggagcgaaggggcaggcattcgccggcaacaccggttcggcccaggccacgatgagctccggtcaacgcgatgccggagtcaaggcttggaacggcatcaaaggcgcgttctccgaggcaggacaggcacaggctgacaatacggcagcgcaggtcaaagcccagcaggacactctggccggcatcaagaaagcatggggcgacgccggcgattggatcaacaccaattggtgcgacctgatggccaagatccaatcgaaattcgacagcgcggcccaatgggtcgaggactggttcgggaccacaggacagaagataggcgactttttctccggcatcccatctgccatcggtggatggtttgattccgccggccagtgggtgcaatccaaatggcaagccgtcgttgattggcttggactgacaccaactacgatcattgatttcttcacgggaatccctgatgcgatcagtggtttctttggttccgctggtgattggattcagcagaaatggcaggcactggtctactggctgggcctcactccaacatcgatcatcgacttcttcaccggcatccctgatgatttcaacgatcttttccaatccgcaaaagacaaaatcactagcatcttcggcactgtcggcgattggttcgaccagcatgtcaaagctccgatcaagtctgctttggatgcgatcggcaacacgttcaactccaccaaggattggattaagaccagttgggatcaggtcaaggatgcggccaagagcccggtgaaattcatcgtcgataccgtatacacgcacggcatcaagaaggtttgggattcgattgccggcgcggtcggcttgaagctttcccttccgacggtgaaattctcgaatggcggcatggccggtggcgtcaatcccggctacaatccgggtgtcgattcaatcccggcgatgacttcgccgggcgaggcgtggatggtgccggaatggaccaaggccgtcggcgcggagaacgtctacaggtggaatgcgcttgcccgccatcatggtgtgcgggccgtccgcgatgacatgggccttgatggcgtccaatgcttcgccaaaggtggcattgcctccaagattggcaaggctgctggcaaggcggggtccggagcgaagcaattcatcgatgacctgtccaatacggctcaggcgttcgtcaaaaatcctgtcgaatgggtcacgtcgaagattctcgcaccagtgaaatcgcaggtcgcgggaatcagcggcggccagttcggccagatggttggcagactgccggtaagcgccgctacggcgcttgtcgacaaggtcaagtcgatggcgtccgacttggcatccaagtggaccagcaagagcgaatttggccaataccacggttcggtcggcggtggtgtggaacgctggaggagcctagtcctgcaggtgctcaatgaattagggcagcccgcaagctgggccgacaccgtgctgcgccgcatgaatcaggagtccggcggtaatccgaacgccatcaacaactgggactccaacgccaaggccggtcacccgtcgcaaggcctgatgcagaccattccgggaacattcgcagcctatgcggggccttatctggcgcgtggaatcactgacccactcgccaacatctatgctggtgtgaattacgcactgcaccgttacggcagtctttccgccttgaatcgtgcgggcggctacgcgctcggcggcatcgtcggagacgatagaccgaccctgtacgatcgcggcggcatcctgccacccggacggcacctcgtggccaacgagaccaagcagcccgaactcgtgttgacgcgcgagcagatcctcaaggtcttcggtgctgacgtcaaggacaagggcgataggaccgtcaacctcaatgtcaacatcccggaacgttcggatccgtggagcgacgcgtcaatcctggtgcgcacagcgcgacaccaattgagataaaaggaggccgatgtggcttattttgcggaattgtcggcctccggcttggagccggtgcgcttcgagggttcgggcgatcttgactgcctgtgcatcgcgaaaggcggcatcgagggctggtggtcgactcccgccgcgaaagtcaatgtgacggcgcgcggccagggcgacggtggacacgacgtgagcgaggatgacatctcctacgccagccgcaccgtcaccctgcattggaatgccaacgcttccagccgtgacgcgctgctcgctttgacggacagtgtgcgcagactcgtgcatcgtcaggtcacgatgcgtgtggttgacagcgccgaggacacctattgcagaggtggatacctcacactgacccaacagccgggttacaggtcaggcagcattgccgattcgaccatcacgctcgttttcgagcgtcccgagcgtctgtccacgctggcgcactccggcgaggctcgcgcgtcggtggtgcaggccggaggcctgagctacggcaccggcaatgccggccttgcgtacccgctgtcgtatggcacggtatccgatggcgcgacggtcatgcgtctgccgaaccagggcacttcccgcgcctacccgacctactcgatcaacggcgagtggccgaatggctgcactctgcgcctggcatgtgatgggctgggttcgacccttgccttcaaccgcgcgattcacaccggcacaccggtgctcctggacacacgctcgcgtaccgccaccatgggcggcgtggacgtgacctcgggattatcgcagcgcgggtggatgacgatacccgccggcaaggctttgacggtcaatctctccacgcccggcagcgggtgggtatcgtgcgagtcgcatgacacgtacatctaaacgttttccgattcggaggtacaacacttatgaccacggctttaggcatcaggccggacgcacgatccaatggggtgagtccgcaggtccatcggcatatcatcagcgcccaatggacgagcgacggcatcatacagggtcttgatgtgaccggaggcacaggactcacctacaacgtaggtgccggcacggctctcatccagcccgacggccagcggggggaggccgtgctcgcgtattggcctgggggccagacgccggctgtcgccgctggcaacgctggactttcgcgttatgacgtcatctggatgcgcgcccacgacttggacaagggcgatgccgacaaccaggtcgtgctcggcgtcacgcagggcactcccgccgccgacccggacatcccgataaaccaggtgccgagcgacgcggtgcggttggcggccatgctcgtacccgccggcatgacgcagacaaaatcgtgcagcacggacggcgccgaacgctacgcgatgccctatggcgcctcgcgaggccgtctcgcatgcaatgtgcggaactatgaaggcccggcgaatttctcggacggtggcaaggattatttcgaacaggacactgatttctatctgccgacagaccgtctcgtcgaacttcggtattccgcaatcgcctgcgcctgccgtcacgacaatcccaagaagccgaccgaggacgccacgcagatggcatgctggtacgtcggcttccagatcgacggcaaggacgtgtccggtggcggcggccagttccaggtgtcgcgagcatggcagcccgtccacctcaacgcgctcgtccaattgtccgcggggtggcacacggtacgcacgcgcaaccacagggtcacgtggggtgagaacgtgtatttcatttgccattcggacagcaaggagaactaccctggccgcaccctcgaggtgtgggaccgcggagtgaacgtcggttaaaggaaggatcgatatggcttggcgagcgtatgtcgtggacacgatcagcgggcagatattatgtccgatcgatctgccgaatttcagctggtcggtcagcgtggccgactccagtttctcgaccacgaaatcaaaaggcgcggggcagggcgaggtgagcggactcaaggtgccatggaccgcggtgccagccaattcacccggcgaacgctcacgcctcctcgctcccgaccggcgcagtatcgcgctctgctggacgagtccgttggattccgaggatgcgatcggcacgccgatactctgcggactgataggccagaggaaggacggtccactcgatacggatttcagcctgaccagcctttacgggctcctcggcgatagatacttggtgcgcgagggagtctacggagccgccaatggcggcaccagcacggatgtcatcaacttcagcgatctatccctccgcgccatcgcggccgaggcgggctggctgtgcaccaatgccaagccgggcggcggactgcccatcgactggcactacaggggcgagaagggctcgcaccagcgcgaatatgacagctgggacatccagaatctcaaatgctccgacgtatgggacaagatcgccaacgtggagaacgggcccgacctgcaattgcgcccgaagctatccggcgacacgattcgcttcgactttctcgccggcagcgacgccgatccgaacatcgcgcagaacacgatcatcgaactctcatcctcgccatacggcggcacattggagaacatcacaatagaccacctcggagccgtgaaccgtgtctatgcgagcggctcgggcacggacaaggcgcaattatgccatctgtccgaagacctgagccttgtgaatggaagccacgagccgttcccgctgcgggagatgacctattccgataccgacgccgccgacgccggtctgctccgccagcacgcggacggcatattggccgccaaccggcgtccgctcatgcagatcaaaggcgaactccatgccaacgacatgagcgcggacggcactccactgcatccgctcggcagcttctggcccggcgagacgatgcggttggacatccaaggcttccccagcctcgcggacggtgtgtacgaatgccggctcatgcagatgagcggcgaccagtcggacaaggtgaatctgatattcgacgccatggatgatcccatggcatgacttttggaggtttgcgatgtcttcgcacattgagttgaatccggatgacgacgtgcttggtctgagtctcggcatgaaggccatgcgcctcgccctgagccagaagacccacaggatgggcaccgtgcgcatccccggtacgggcggcacggacgtcatcatcggtgtcggcgcgtcggacggggccaacaggatcgaccaggatggtaatcagatgccgctcgtggatacgagcggcatcgacaaggccgcgcaggatgcgcagcaggccgccgacaaggccatggcgaaggccgacgaggcgatcgccaagggcgagcagatccgccaggacgcgcaggcgggcatcgacgacgcgcgcaagcaggcacaggatgccgcagccaaggccgacaaggtccgaagcgatctgacccggcaggtccaggatgcgaagtccgagatggactccaccgtcaaggccgcccaatcatccgccaacaaggcacagtccgcggcagacgcggcccagaaggcggcggacaaggccaatgcgtccactgtcgatctggacaaatccatcaaggcggtcgatgcgaaggccattgcggcgaaacaggccgcggccgaagcccagtccaaggccgagaacgtcgcatcggacctcgattccgcgaatgcggtcatcgaacagcacacaaccgagctcggcgaactgacgacgaaagtcagcaatgccgtcaagaaatccgacagtgccctgagtgtttccacggaggccaagcagactgccaccgaggcatcgactacggcatcttccgcatacaaggattcgcagaccgctcttacgcagagcaccactgcgacacagaccgcaaccgccgcaaagacaactgccgaatcggcaagcaaaaccgcaagcgattcgcttaagcagtcttccgccgctgtgcagacggccaatcagatcagcacgaccctgaggaccgagtatcagaccaaggcggatgccgataagatctatgcgacccagtcgagtctgaaacagacttcggattccatcaccgcttcggtctcaaagacatatgccacaaaagatgcattgtcctctctccagaacgctgcggataacgccattgaatcctggcggggaaccggtgtcccgacgctgacgaacaagccggcgtcggactggaccacggatgccgataagaggaagcattccggtgatctttattacgacaaatccaccggcaaggcatatcgtttcggttccgacgacggcaggacctacacgtgggagctgaatcaggataccgatgtcaccaaggcattggcggatgcttcaaaggcacagacttccgcgaataatgcccaggcatccgcaacggcagcgaacaccgctgcaggtaaggcccaatcgacggcaaataccgcagtcggcaatgcggccacagcgaagaacgcagccgatgccgcgcaatccagtgcgaacaaggctcagggtgatgtcgataagctgaagatcgatattccggcgacatatgcgaccaagagttctctgacccagaccgcggaatccattacggcggatgtcgagtccgtcaagacaactgcgaatggggccgtgaccgccgcatcgaaggcgcagcagaccgccgatggcatttccgtaaatctggcaaagaactatcagaccaaatcccaggcggatacgatatatgcgaccaaggcgagtctgaaggcgacttcggatagcatttccgctgaagtcaccaaggcacagggaaccgccgatggtgccgtgacagccgcatccaaggcacagcagaccgccgatgccgtaactctgaatctgtcgaagaattaccagaccaaagcgcagaacgatgccttgtacgcaacccagacgagtctgaaggcgacttccgattctcttagcgcgaatatcacggcaaatgcgaagacagcacaaagcgctgtcgataaggcgacgagtctcgaagcgaatctcaacgggttcaagaccaccgtaagtcagacatataccactaagaatgatttcaacaatcttacgattggtggacggaatcttctggttaaatcgaatttcattaggagttggataaatactcaaaatggaagtctgcaattcccagatgcttcagtctcagattcagaacataatggtgatacgtcatctaagaaaccaattgcagtcgatccgaatacaacatatgttttaagtgcatatgattcaatgactgacactgtaaataatactggtcgtatcagtcagtttgattccgaaggtacttttatcaattttgtagttcctggaatatcgcttagggataaaggtcacatcacatttacgactgatggaaatgcagcttctatcttggttggtatttattcttttccaagatatagatggaaactcgaaaaaggcaccaagccaactgattggtctccagccccagaggatcttcaacccgcaggagattacgccaccaacagttctgttacccagacagctaattccatcaaggctgaagtcactgaagtctccaagaccgcaaacagtgcaatgtccaaagccactacagtggaacagacggccaatggacttagcagtaagatcactgaacaggctaagaccctcgatgcgactgtcaagacagccaatgaggcaaagagcaccgctgacagcaataagacagccatcagtcaggtaagcactacagccagtaatgcattgactaaagcctctaccgtggaacagaatctcaacgggttcaagaccacggttgcgaacacataccagccgaaatccggcatgggctcctacgctaccacatcccagctgacgcagacggcgaaccagatccgtggcgaagtgtcggagaaataccagtccaagaacggcatgtcctcctatgccaccaccagcgccctgacgcagaaggcggatgagatcacaggcaaggtgacggaggtcgcgaagaccgcttccggggcgatgagcaaggcatcctcggtggagcagaccgcttcgggtctttcgaccaagatcaccgaacaggccaagaccctcgatgcgactgtcaagaccgcgaacgaggcaaagagcactgccgactcgaacaagcggaccatctcacaggtcgcatccaccgctgacggcgctgtaagccgcgtaagctctctggagcagaatctcaacgggttcaagaccagcgtggcgaagacctaccagaccaagggggactatccgaccaaagccgaggtacagtccaggatcgaccagtcggcctcctcgatcaaatcgacggtcggccagacgtacacgaccctcgccgcgaccgacgcgttgaggaagggcgcgacccgcacgttcccgctctacggcgcgaacggcacggggccgaaatgggtgaagctcggctatctcgtcagcaacggcgacagttcgagcgtcctcctgcgcgtgtactccggcgacgggtacaatggccaggccaggcagaacgcggagttcgagatcttcgtcaaggacggctggcagagtgcgctgtccgccaatgacgcgttcggcgtgagcgtgaaccgcatccgcgacgcggacaacgtgaaggtcaaggtcatggcattcaactcgaccacctgcgacatctgggcgtacctgccatggtcatggtggaacggatattatacgctgcagggtaactacaatgcatggacggacggtccgaacaccggtggcaaccatatacgggatgatgagccgaacggaactgtacagaacatcgcctacgacacgctcagcactcacagctacgtcgaccagactgcaaaatcggtagctctcggcgtcgttcagaattataagggtgcggacgggtcgggtctggccacgaaatccgatattacggtcgcaaagaacagtatcacgagcaccgtcgcaggcacttatgccaccaagagcggcgtcacgcaggagatctcgtcgaagatcacccagaacaacaacagtctggacgtgaagttcgcgacgaagactgaaaaccagatagcacggaatacagccaatacagcaaattccaatgctaccaatgctcagtcgcgcgtcggcacgctggaggactgcatcagtctcacttccgcgggagttcgcgccggccaccagaaaaacggcgtgttcaacggcgtgagcgctttggtgaacactgacggcagtttcgacctgctggacaaggacggcaacctgctcacacgcatcgaccggcacagtttgcaggtggccggtgatgatggcgtcgggtccgggcatttgatcctgtcgcaggacggtcttgacatcaccgtgcagcccacggcgaacaagacggccacctatcacatccggctcggcgcgggcggcatcagcatcaccgcgccagacggggcgcacatcaactgctccgcccggaccggtcttgatctggagacggtgagatacggaaaactgtccatcggctccggcggcttgcagttcaccaacgaccagggctggggcttgggcctctccgccgccggctggagcatgagatgggcggggaaccacacgctcgccaccggtccgacggcgggcaagctctacatcgacggacatgagatcgtcaccaaataaaccgattcacaaaaaggaggaatcatgagcgacgagaagacaaccgaaaccacggtcgaagcggggaaggccgatgcggccggcaccgtgctagacctgcgcccaccaaagaacgggattgtataccagctgctccgcctgggccttgccttcgaccatcgtgacgatggcggggagacatggacggactacacgcgtggcgtgacggccgtgttcaaggaccgttcgtccacggaggtcatgcttgcggatatggacaccaaggattcccgcaccgtgcagctcgccgacctcgaaaaggtcatcgagatcaggacatggcgctctgacggggcgggcgactgatgccgctggagttcttctcgagcgccgagttctggacggcggcgatcgtcgccctcgtcggtggcggaggggtcggtgcgatcatcggtgccgtctccagccgtcgcaaggacaccgccgacatcgccgcccaggcgtgcgacatcctcaccgattcggtcatcaagccattgcgcgagcaggtggacgagcaggaggggcagatcgagcatctggaaaaacagcagcgcaagtacttcgcgctcacggcgtacacccgttcgcttttccactggctgcaggagttctgtgagatcaccgaaccggagttcctcgcccgacatccgaaaccgcatctgccggacgaattgcgtgccgacatcgcgccggagaccttctcccggcgataaccattccaaggccatctccccggaggtggcctttgccatatctaaggaggcaatcatggcggaacacgccaacgaaaaacaaaccaacaatcttcccggactgaccggcgaacgagtgaaagccgtcgttacgattctcgtcacgctcttctcccttgccaatgcgggcttgagcctggccggattcaacccgctcccgttcaccaacgagcaggtgagcgcgaccctcttcgcggtcgtcggcgtgatcggcaccgtgtacggctggtggaagaaccagaacatcacatccgcctcgctcgctggccagcagctcgtggacgcgctcaaaaaggagggcgtggtcaacggcatcagcgccgcgaagagcgcggccctgagcgccgcggcagccgtggccaaaaccactccgaaaattaccggcgactccgccgaatcagccgaatcgacggacacggacaacaccgtggcagactccgcctttgagccgggcggtgacgaccagtgaccggcgcaggcctcgcaagatggcgcggcagtccgaaccactactcggggcgtaacggcttgagcgtggaccacatcaccctgcatatcatggtcggccggttggccggcacggactcgtgcttcatgaatcccagctttcaggccgcttctcattatggcgtcggcggcgacggcagcgtctaccagtgggtggacgaggacgacggctcgtgggccgacgccaactggcaatccgattgcagcggcatcaccatcgagcacgagggcggaatgggcggaatccccgtcaccgacgcggaggccgaggccagcgccagactgtgcgccgacatcgcccgccgatacggctggcagaccctctggcatgatgccagcggcaaccggcacggcaacatcgtcctgcaccgcgaggtgccgggcacggaccactacgggtgtcccgacaggtgcgtcaacgcgctgccggtggacaggatcatcaaaagagcgaacgaattattgggaggagacgacatgtcggcagaagacgtgtggaatttcaatcagaacggtgtcctgatgcgtgaccgcctgcagggcacggacgcggcggcgaacgccacgaagaatgagcttttcaggctttcgcagtgggacaggaacacgcacgcgtcggccttgggcaatctcgtggtcgaacagccggtgcagggcggcgcgaaattaggagatcgggtggccggcatcgatgcgaagaccagccaattggtcacccaggtgacggcgttgaccgaggcggtcaagaccctcgccgaaagcaagggcgccgaccccgaccagatcgccgccgccgtggagaacgcggtgaaggccaagctcgacaagctcaggatcaccgtcacggacggccagtgattaattttcgggcgcgagactcaacctcgctcccgagactcaaactcgcgtggaaaaatttcacgcattcgaatgcctgtggaaattctcacaccccgtttttaagcgagggaaatcgcgcttttgaattcctgttgaaatattttgcgtccacatgcaacatcgcccctctctcagcatgatgctgggggaggggctttttcttcattccgcatacaaaccgcatacaaagaccgtcacgttgcgttccatacagtcataaccaatcacaacttacaggatggcaaaagcgttgaaatgccaacgtttctcaatctccaaacagtctgtcaaactaaacctaaaaaccaccggatataacagaatgtcgcaggttcaaatcctgtcagcccgaccacgaaagccctatttccgcttgggaagtagggcttcttctttttgcttggaagatcattttggggcctgaaatcgtgttaacggtcaaacagctcgtctcttcagcagtggcaccagttcgctcagcgagagcctgccgtcggcgtcgtagcgcaggccgcctcttttgacccagctgcggatggtgctggcgggtaggcggatttcggtctggacacgtgcgccgggcgcgacaggtgatggtagtacgtggatcgcggcagcccggctatcctcaggaggtggtcgagccggtgtccccgccctgcgagcagtcggacgacggcgcttcgcttgcgccgcgtgacttggacgcccgcagggcccggagttttccaggtacgcgaccttcgccttcagataggcgacctgttcggcgagctcctgctcgcgcgccgcggtgaccttcgtctcccagtcgtagcgtctgctgccgttgcctcccatgaccgcctcctcgccgccggacctgtgcagcctgatccagtttctcgcggtatacaccggtatggcaagccgtctggcgagcgtgttcccgccggctcctgtcttgacgggttccagcgcctcgcgccggaacccgtcgtcgtaacgtctccttcgatcctcacgcatacgaaagaaccgcacctccgatcatcgaatctgaatttcttcagtccaacaatcggggtgcggttcagtttccgtgcgggtgcgttccggcgacaccatcagcggcatcgccgcacgaacgggattgtggcccgtcgccgcgtggagcgtgccttccggcaacatcagcctgatctatccgggcagcatcgtcacctaccgaggcgtgataaccaccatcagtggattcacggccacgggtggccgcgtgcatgtcgtcaagagcggcgaaacgctcagcggcatcttcggggccaatggctggcggcacatcgcccggttggacaacctcgccaaccccaacctcatttcccccggccagcggctctgctattgactgcaacattcaccgtggccttcggcaccatgccggaggccgccttcattatctaaggagaaaactatggatattttcaccgcaactactctcgcctctgggcttgcgggtctgatcgtgcccgctgttgtgcaagccttcaagaagtacatccccagcggatacgtcggactcgtatccctcgccgcatccattctgttcggcaccattgccatcgccgccaccggcggattcgacggcacctacacatggggcatcgtcctcgcaggagtggtaggcgtcgcactggccgtgtacacgctcgtcaaccaagccttcgaaggaaagctttccaaaggaaatttgactaaccgatgagataaactgcgaatgatgcacaacatcgtagcgagtcatgtctcaatacctgcggcatgactcgttcactgatctgcagctaaattacagcaaatcagtaaaggagagccgtgagtacgagtaaggcaccagtttttcattcattgccatgcaaattagatgacggcaaaaccagcaatataaggattgcgtttattactggaagcttaccttttgggaaaactgatttaagtgatgaaagtgcccctatgtgtgactcactagccatgtgcctttatttttctatccttatggaccatgctaatgaaacgacttgggatagaattcgtgacttatttgaggcagaaaaattaacgtcaaaaaatagtggcacattaccacttaattggaacgtatcaagtaaggtaactttttccatagtaaaaaacaaaatcgtaatcaacagtcgcgatgtgcccgggaatataaatacggaagttgattacttatttaatagacttacatctgaaataaatgaacggcaaaagtatttcttatctttatcggatactctaggaattcgtctagtaagaaataatgaaaaatacttttcaaccatctgtaggaagaatacagtaagcagcatattggttcacgattcagtacctcccaaaaatctgaatagggtctttgatatttccaaaaactggaaggcggtgcgcgcatttggagatatatatgcttccggtgcacatgagattccaaacgaccatttcattgccatgtactctggccaagatggagaaaatattacaaagaaagtaaaatacagcggagattgtatttttggtcacaaaggtcagacaactattgagcattgcacgcccaaatggttagccgatagtctgcgtgcccaaccaattacttgcaaactcctttgcgaagactgcaatacgaatttttttggcaaacaatttgaagtaaagatgagtcaactattcttcaataagcaaatatacgataatgataaccgtaattttgttgcattatggtgcgtcaagacggccttattcatatctgctgctgcgaatgttccgctaaagcatagctggcttgattcgctgtataataaacaaattccaaatggttttcaaatttttgtcagcgacatgcatgcaaagccaaattgctactatgcgattcctactattttcaatgggcagcgtactgaaaaaggttgtttcttttttcagtttatctgtgacggcatgtgctttatcgtcgttaattcaccggagcgttcaatcccagatgatttttctgccatcccacaaatatatccaaagcctaatcatatatcttacaattctaggcaagcacgagttctcaatggtattcaaattgccaaggattatttctcattcttaactggagaagaagtagactttaaacctacatcgaatctccgcatgtaaattgattttgcctaagagtgattcatcggcgagatgaaaggcgccgcctgagatccaaggcaaataacgacgttcgccaattgggacggcaatagacagtagaagtcagtggtctagcctcatttttgaaggtgaaatgtttcatacagaataggtgttccagcatggatatatggctccgaagtttagccctgtaatatttctgggaatttttgtcatcataatgatatatgttcttccccatgagtagcgctatcgaatcaaaccttagcacccaagccaccgatggctttgatgaagcaactgagcttatcacgttgttgcgtggttctatgacgcgccgtcagcttgccgagtcgttgcgtgtgtccacctcgactgtggagcgctgggagttgggcaaggtggagtgcaagccggcttatgttcctgcgctgcgtgaattgtatttcggcaccacgcatgaagacggcaccgatttccgcaccattgacctgttcgccggcatcggcggcatccgtcgtggttttgcttcggctggcgggcatgcggtgttctcttcggaatggaatgagttctcgacccgcacgtatcgcacgaactatgggttcgccgagcggatggccggagacatcaccaaggtggacgtggatgacattcccgactgcgatgtggtgctcgcgggcttcccgtgccagccgttcagcgtggccggagtatcgaagaaacgcagcctaggccgtgagaccggattccgggacaagacgcaaggcacgctgttcttcgacgtggcgcgcatcatcgcggcgaaacgtccggcggcgttcctattggagaacgtgaagaatctgacctcgcacgaccggggccgcaccttcaaagtcatcctcgatgccctgcagaacgagctgggctacgaggtgcattggaaggtcatcgacggacagcacttcgttcctcagcaccgcgaacgtatctacatcgtcggcttccgctcgcataccgacttcacatgggatgacctcaagctccccgaacataagcccgtgctcgctgacatccttcataaaaacgacggcaccgagccgtatctgccttgggacggcgaccggtacttcgactacgagcacaacaaggtgcaggacaaatacacgctcaccccacgcctgtggcagtacctgcaggactacaaggccaagcacgaggccatgggacacggcttcggctatggcttggtgacgcctgacatggtgtcccgtaccttgtccgcccgctatcacaaggacggttccgagatattggtcgcgcaggaaggtgaacgcccccgccggctcactccgcgcgaatgcgcccgcctcatgggatacccggatgatctgcgcattcccgtctcggacacgcaggcctaccgccagttcggcaactccgtggtcgtaccagccatcgcggagatcgcccgcatcatgcgtccccatatcctcaaggtcatgcaggagaacaaggcccccgaactgatctccgattccgaactggccgacgaggcgatccaaaaggcccgccaactggccgtcgccggcgcaagccacgactgaaacggcacgccgctagaccgttgatgctttggcgttgacattggcatgggtattattgaggtatgcgcgatacccatgtcaacgacgatcagcaatggtacgacacggccgacatccagcaggtccacgacctgttgacccgagccggtgccgaaagcatctgggtcaagcggctggtgcccaacaacaactcgaaacagcagatcttcctaggcaacgatccctccgacctagctttccttcccctcggcacgccgtggtacacggatccgaaatcacagaagaagaaagccgggccgctgctgattcgcattccggttccatggcgatgggttacgcctgacggcgagttcgacgcgccgaacgccaacatgtgcttctacccgcaatatcccgaggtaaggttctccggcttcctgaagggatgcaaggaaggcccgtccgagctgttgagcgagacgaaacgtggccacgaagagggacgctgcttgttcttcggaaccgtgaaggacacgggcgaaggaatgggacatgttgtcgccttggtcgtcggcgctccatcgccggccgcccaatacgtcttgaacatggacacattcgagaaagggcacgtctgcccggtcgtgttccaaggccagagaaagccgggcgaattctccatccttgaggaagctcttctcggcatcatgggcaagaagatcatcccatggcgtctgcgcaacgacggaaccatcgacaagccatacatcgctcccaacgctcccggactgactctggaggcggaactcggcgtgggagagaacgccattcccggcccggacttcgacatctgggagctcaaggccatcaaacaaccatcccttgagcggcgcagcaaccaccgggtcaccttgttcacgccgcagcccgacacgggatggataacgggacaatcccaagccgatttcgtcctgcgctacggacatgtcagcggcaccgacgaaaacggcaatcccgacgagtactacttcacctcgggcgacattaaccgccccggcgaagacaaagagggagcgaaactcaaccttaaactcgtcggcttcaccgatgccaagcacttcgatcccaacgggatgatcgccctatacgacaagcagaccggcgaactcgccgccggatggtcatacctcaagctactggaacactggcagcgcaagcacaaccgcgccgcttacgtgccgtatctcagggaaaaagaagacgggaagaccacggtagaatttggcccactcgttaccctcggcatctccaccagcttcggcctgttcctaaaagccttccaagacggtaaggccatctacgaccccggcgacaaaatcaccctcaaagatggcaaatggacgccccattcccgaagtcaattccgcatcaacctcaacgacatctcggccatctaccaagaagtaaaagaagtggatctgcgagattccgattcttcgcaaaaagaggaatagccatggcaatgataatgtgtcccggttgcggaacaagtatttccgacaaagcgttgtcttgtccgcaatgtggttttgtcggcgacgatccgagtcttccgatttctcaacaagcagtttatgagatggttccaaagttccaagttgagattgatcgttgggatctacaatcgcaatcattggtgggcgagtcattggatatgtccttggagacccggcgtaaaatcttcggcttcctaggcaatctggaacagctccagacgcttgcaccagggctgttccagctcatcaaggaattctccaacaaagatgaagccacattggtggctcatttgcccgaggagatcatgaagatggttgaagaaggaaagctcttcttcaaggaggatgccaacgggaagattatgccgcaagtgttcgacgcgaacgggaagttctataagcaggtgcggcttgactgggagcagatgtcgcctgatgtcatggatgcaatgcggcacttgcagactcaggtggccatcgcaatggtgttgtccgaggtacgcagcctcagggaccaaatcgaaggtattcgagtggacttgcagaatgaccgtctggcactggctgaaggcgcttgggataaactcatgcaagcccgtgtcattgaagattcacggctgcgcgatgcattgatagtacaagccatatcatccgcgaccgatgccaagcgaacattgatgcgtaatttcgcggagaacgtcaaatacctgaaagcccattccaatgagcgtatagacaagaaactgatttctgccgtcacccagcaaaatcaatcgagggctgccgatgcgttcaatgatctggcgcagatcaccaatgctgtacgtgtcgaaggcgctggatatgccatgctcaatcaaaacgaggcgagcatggtatgcctggaacagttccgagaattcatcgacgcgaataaacttaacaagcgagacaccttactggcaattaactcgcatctcccggctgggtcgaagatgcctgacatggttgaccaattcgaggatctggcgctaaggatcacggcgctagacggcgtgtcgcagctagaccgtatccccaaaagattgcttgagccattcagacctgagccggagacgaacgaaagcaacagtgaagaggaggacggcaacaatgttccgcaagaagaatgatccatctcagaacgaggggactgaaaacagtcctcaaagaaagtctgttaacgatgctcaagataccgttgcgccccatggccacgctttcatgcgcaagacaatcaagcgttgcgaaaactgtgatagcgagttggaaagcacgagaaagtccaatttgtgcgaagcatgtgagaaggaacaactgcagaaaaatgtcaagaaaggtgcggcagctgctgctgctatcggcctagcaaaagtggttattccgaaagttgccccatatgccaagaaagccgctccattggtagccaatgcagtaaaaaagatagtgtttagatagcaaaacagtcttccaatgtcgcaaattcagagcggctgcgcaacaatgcgatgctctatggattatggattcagagtgctgagcaatgcccaagaaaaagactcatagtgagttccttgccgatttcggacggctgaatgctcatgctgacaatctggagattgagtcggaatatcaggggtcgaaagcgccagtggatgtgcgttgcctgcgctgcggtcataaatggatgacgatgcccggcatgttgcttcaagggtgcggatgccctcggtgcggtgagaagcagctccggcgtaagaaaacatacaccaatgagaaattcctagagaagcttgccaaggtcaatcctgaggcggagccattaatggaatacacgaagggctctagttacatcgacgttcgatgcaagcgatgcggcacgatatggtcctccaagggatacaacttgttgcagggcaagggatgtccccattgcggtgcgattcggggcgcgaggaacaaccaaggcaagactggtgtcaagacccgtgagcagttctcggccgagctggctgaggcgtcgccggacatcgaggtgcttggcgattatgtgaacgtgcatacgaagatcaaggttcggtgtcgtgtctgcggccacgtttggtcggcggtgccgggtgcgcttttacgaggtcacggctgcccgaggtgcgcccgatccggcaccagcttcatggagcagtttctgctctatgccctcaggcaagcgcttgccggggggatggttctctcacgggacaagacgaccatcggaatggagctggatattctgattccatcgaagcggcttgcggtcaagccgggcgtgtggtttcttcacaaaaggaatgtcaaacgtgacggcgaaaagcggaaaagatgtcatgaggccggcatccggcttgtgaccatatacgatcaatacccgcaagacatggagtctccgttcgatgacgattgcctcacatacccgtttgatttgaactcaggcgaccgttcggcgctcagggatcttgcgattggattgatcaaggatgcgggtggcatctgtgagttcagcgcggatgactgggcgaggattgaggaaatagcgaccgaagaatcacgtgcccagagtcccgatcaatttgtcgagaggttgcatgccattcatcccaatatcgaggtcgtgggcaagtatgtgaatgttaatacgcgggtccgagtgcgttgcaacgtgtgcgggagggtgtgggatgccttgccggcaagtctgctcgcaggtgatggatgccgaacgtgtggcacgaaacgggctcatgaccaattgcgcaagtcccaagacgatttcattgagcaagtcagggaagcgaatcccgacattgaagtgcttggcgaatacgtttcgagacatggcaaagttcacgctcgttgccgtgtctgcggtcacgaatgggatcccgtagcagcgagcctgctcagaggatcaaatcacaaaggatggaaaggaatccatggcaaacttaagctttagagaatttctcatggaagcgctcatcggataaagtcgacacgccgaacgccgttgccaccatgactgccaaatccagtaaa

SEQ ID NO: 1388 - DNA, 22880 bp, Unknown
  R257_15m  MAG No. k141_3373
tcaaaggctgcgatcaaagcgtcccagcagtcgtcagacacgacgatggaacgatcaggcctacgtacataggcgtatggggacaggaccgtctgataggcgcggccctcatccagccatccctttgcgtagccgagacgctcatataccgcaccgggacgagcggggtccatgccgcacagatacgagaggctttcgccgagcatgcagccatcatcgaagggatcgcggtcgtcagaaagcatcggcgcgaaggcatcggattgcagatcaaggcgttctgcgactcctgggcggcagaccacggcgctgagctgatactcagcatccccaccaacgagggcgcgcgcctgctcaacgagaaagccggatacacggtcgtaccgcccgacggatatctcaccatcaaggtatttgacgctcaggaacagcctcttcacattccctacgccgaccagcggacccaggacagaggcactagcatgtgggcgtacaagctcgtagggcaacgcacacagcactttgagattggcgttctcaccgcctcctgaagttccgaagaccataccgtcgatgaatgttcccgacgggtcgcgggagaagacgagtcttccggcttcgtcgctcatgccgttctcccctcggtcagcagcaggtttgccaccacccgttcgcgggcggagagctgtgcatcgacctcccggaaggcatgcgtgtaggcatgcgtggggtggagccaggtgtcggccaggccgcgggtctcgccgcggcgcagggcgcgcacggcgcaggccgggcagagctccaaaatctccgtgtcgcccgggacgcagtagttgcgccagccgttacgggcgaaataagcgtcgcgggcggccgaatcgtagtcgtcccagaacgtgccccagaccaccgtgtggcagccatcgcacaccgtgacgcaatcccaccggctgtccggccattcggactgttcgtagattccaccagccatcacgcaacctcctcacgatcggcatcagacgaaatgccaagaacaaaatcagacgacaagccgaacttgtcatggaagaacagcaaatcccgctgctgccagggagtttcaccattcaactttttacaaacagtcgcagccgatgaccccatggaggcggcaagtttgcgataggaaatcccctgtgcttttagccattccttcatgtcggatgttcctttcgcgtcctgttgtttcttcataactaacaatatagcgtttcttttgacgaaacgcaaatcgatggatacacttgttgttatctattaagaaacacgcataacagaggactaacaatgaccacatcagccccagcaacagccaagaaaaacgtcgacactgaagtgcaatatgcagagtctgtaattgcctggaacgtcaaaatgcttttgactgcacaaaacaaatcacagagtgctcttgccgcttttctaggcatacagcggccgaccatgactaacaaaatgaaggggcgaattgcatggtcagtggcggatttggtcaaatctgccgattttctcggaaccaccgccgaggcactcatggatgattcactgatgtcgcaattaaaaactggatataccgaatcgaccaagcctaagtatggagtgtttgccgagaaaccaggtgctctggtaggtgccggctcccccaggttccttgtcagccccttcaaccccgacgccccggtcgagggtggattctcaggtgcagctaaaggtgccttggccggtttcgtgccgttcggggtcccgtccggctcgggttccccgtccagcccctcgaagcatgacgcgattggggtttccggccggtctcaagcccatgagacacttaagaccatgactaccatcatcatgcacaccactgagggcgatatcaccatcaacctgttcgacgacaaggccccgaacaccgtggccaacttcctgggcctcgccaccggcgagaaggaatgggccgacccgtacaccggtcagccttcccacggcaagttctacaacggtctgaccttccaccgcatcatcaagcagttcatgatccaaggcggctgcccgctcggcaccggcaccggcggccctggttatgagttcgacgatgagatcgatccgagcctgaagttcgacaagccgtatctgctggccatggccaacgctggtctgcgccgtggtatggacggcaaggtccatggcaccaacggctcccagttcttcatcaccaccgtgccgaccccgtggctggacggtcaccacaccatcttcggcgaggtcgccgatgacgactccaagaaggtcgtcgataagctcgaagcactggacaccgatccgatggatcgcccgctcgagccggccataattctgtccgtgaacgtggccgagtaagaccgacacatatacagcaaaggtcctgattggtattccagtcaggaccttttcgtattcttggctccctctctgaggggagctggcgccgcagacgtctgaggggagttccgcaagcccgcgctgctcccctcagtcagcttcgctgacagcccctcccggaggggagccaagcaacggcctacttcatcttgcgcagtcgaggttcggcggattccttggcaccggtgatgcggtacacgtcgaacacgccgtcgatcttgcgcacggcagccagcaacgagttgagatgctgcggatccgccatctcgaagctgaactggctggtggccactcgatcggaacccgtggcgatcgtacccgagatgatattcacgccatgatcggaaagcacgcgcgtcacatccgacagcaggttgcggcggtccaatgcctcgacttgaatcttgaccatgaacagacccttggtgctggtccattcgacctcgaccacacgctcgggctgcttgctcttcaagtcgatcatattctggcaatcggtgcgatgcacggacacaccctggttgcgggtgatgaatccgatgatgtcatcaccgggcaccggcatgcaacaacgggcgagtttgatccacacatcgcccacgcccttgactgataccccggtggagctgctggaagtcttgcgctccacgggcttgagcggcagaacctcctgctcgacctcttcatcgacctcgtcggcacccgcatccttgaccaaatgcgaaatgacgttctgcgtggagacctgaccgtccccgatggccgcgaacacggcgtccgcgttcgggaagttgagatcgtcggccacacccaccaacgcttccggggtcaacagcgtgttgaccggcaggttgcgtttgcgcatcgcccgagtcagctcgtcgcgaccctcctcgatggcctcggtgcggcgttccttggagaaccattgacgaatcttgttgcgcgccttcggactcttgacgaaactcagccagtcgcgcgaaggcccggccgtatcggacttggatgtcagaatctcgacggtgtccccattgtcgagcgtggtgtcaagcggcaccagacgtccgttgacacgtgcgcccatcgtgcgatgacccacttcggtgtgcacggcatacgcgaagtcgacgggcgtggcatgagcgggcagggatacgatcttgcctttcggcgtgaacacgtagacttcggacgagccgagatcctccttgagcgaacccagaaactcgttggagtcgggggtttcgctggtccaatcggcaagctgctgaatccatttgagattgtcggcttcggaaagctcctggttcttctcgtcacgcctgcggtcggacttgtccggcgagctcagggcgcggccggcctggccgttttccttgtatttccagtgcgcggcgatgccgaactcggcgcggcggtgcatgtcccaggtgcgaatctggatttccaccggcttgccaccggggcccaccaccgtggtgtgcagcgactggtacatgttgagcttcggcatggcgatgtagtccttgaaccggccgggaaccgggttccaccgcgcatgcacggcaccaagcgccgcatagcaatcctgaatggtgtcgacgatgatgcgcacaccgaccagatcgtagatgttcgcgaaatcatggccgcgcacgatcatcttctgataaatcgagaagtagtccttcgggcgtccggtgacgtatgccttgatgttctgctcgtcgagatcctcgttgatctccgccagaatctgcttcaggtacacatcgcgctggccggctcggcgagccaccagcaccacgatctcgttgtagatcttcgggtagagcaccttgaagctcagttcctcgagctccgtcttgatggcgttcataccgagtcggttggccaaaggcgcgtacacgtcgagggtttcacgcgccttcttctgggcggacgtggtcttcacatagcgccaggtgcgggcgttgtgtacacggtcggcgagcttgaccaccaaggtgcgcacgtcgcggctcatggccaccacgagtttgcgaatggtttcggcttgggcggagtcgcccacttcaagctggctgagcttggtgacgccatcgaccagaccggccacggtgtcgccgaactcggcacggcattgatccaacgtgtagtcggtgtcctccaccgtatcatgcagcagaccggccgccaccacaatcggccccatgcccagatccgcgagaatctgggaaacggccagcggatggatgatgtatggttcgcccgacttgcgccgttgcgtgcaatgctggatgacggcgcgccggtacgcgcggtcgaggatggataaatcctcaccgggatggtgggacttgcataccttcttgattggatccagcggattgagcggatcggcactgatctcacaacccaacttacgggcggcgtactgctcgccatcaatctctgccatgccagtcacctccctcgtcatgaagttcattgtaaccgcgaaccggagccttgtgcatgcacctgttcgccatcattggttccgcaaccgtcgttgccgtcatcaccttggtcattcaaccggcccaatccggtcaggacgccactcccgtcgaaccgaacccacgttcggcgcgatcggatccgggcagggtttcagccgggatgaaccgggcctcaacataccgctgaatcaccaattgagcgatgcgatcgcccggatggaagacggcggtgcgttccggatcgaggttgatcagcggcaccttgatctcgccacggtagccggcatcaacggtgccaggcgcgttgagcacggtgacgccctgcttggcggccagcccggaacgcggatgcaccaacgccacgtagcccgcaggtagggcgatggccacgccggtgggcaccagtacccgttcaaaaggcttcagcgtcacatcgacggtggtgatgaggtcggcaccggcatcgcccgcgtgggcatagtgcagctgggccggatgttcggggtcgaggctcttgaccaggacctcggtggattcgggctcgttgtaggtctcgtcgaacgccatcaggcggcgcactcctcacacaccggctggccatcctcgtccgtgtaggcgagctggctgcgatgcttgaccaggaagcactgcgagcagatgaactcgtcaccctgcatggggatgacggtcaccgaggaatcctcgttgctcaaatcggcgcccggcagttcgtagtcttcggcgatggcgttctcatcgtcgtcgatgtcgctcgaggcgttctgcgaggacttccccagcgcctgcagcgattcctcgtcctcatccttattgcggggggaatcataatcctgagccatcatggtcctttcgtcgtctttggttcgtaagtcgatatatatagcacggtcagcgccgtactcgcccataggatacacgatttgaaatactcgtaaagttcgacacgtggggcatacttaaaagaagtaatgtctttgcgacggaaagtggtgcgaatatgccagatgatcggcttgaaaaagcccgtttcgtacgcgtgagcaagacgggggacctcgtattctccattggcggcagggaaatggccgtgagcgtggacgacacgctcgaacgggcgattcttgaggccaagcaggtcagaagcgagatgcgacaggccccccagccgcatcagcagtccactttgccgatttcccagatacagtcgctgattcgcgccggtgccgatccggcccgtgtcgcggagaaatatcatctgagcgaaacgctggtacgtcgtttctccatggccgtggagaccgagaaacagtacgccatcgaacaattccttgccgtggcggcacccaaagacagcagggtgcgcaccatcagcgaactggtggaacgcacgctggcctctgctggaatcggcatggaatcagtgacctggaaatccacccggcgcggacttgagccttggcgcatcgtggcgatattcacttccgcgggccgtgagatccatgccgaatggacgtggaatatgcacgacaattccgtgatgagcctgaacaatgccgctcgaaaactgctcggcgaacagaatccggaatcagccacggattccaaactcaagccgacgattcctgaactgcccggcgactccgtacgttccgcgcgtatcgagcgcgctgtgtctgcttgggcggcgcctacgccttcgattccggccgcacggcctgccgcgatccggccctccgtcacttccacaggttccatgcccccggtggacctatccacgtccatctcaccggccacgaaccaggctcatgacgctacggcccccagcccggtctcttcgcagaccgccggacctgtttcgtcatctgccgcaggattgcagcaatcgcctgccacggcaccagagcagggttctgacaatatttcggacgagaccgtacggcgtggccccaatgcacagctggtagccaccgagcaggagcgggcggccgaatccgccgccaccaaacacgaggcaccagccaaaccggccaagcgtaaatcaggacgttcggccgtaccaagctgggacgagattctgttcggagactgaatttccgaatcaggccatatcgatcaggcagggaatatccatttccaatgccgtttgggagccatgcacgctcggcaggtgggtggctttgtctccttgcgtacgcgaatcgacgagggtcacggctcccgctgcctgcacgaccacatcgccgagcatcggccggactcgctcgcagaccggtccaaacaatccgtccgcgatggcctcatccctggtccgcaccaaggctcggtcttgcaggtaatcgcgccaccggcaagctatatcctcaggtcgttcatccgactcggcatacagcatcagcgagcgcggctctcccccgaccagtgacacgcctcgggtgagctgcggttcaacggcgatgtcaatccgctggcccatgtcggtttgcaccatgccgtggtcggccacgatgacgatcagcgtgcctttgggtgcgctgcgtttcaggagcgcgagctgggcgtcgatatgttcgaatgcggccacccagtgttcggaatcccacccgtaattgtggccgactttgtcggcgtcacggatgtacaggtaggtcaggccgggggtgcgtgaggcgcgtgaggcggccagcacacgatcacgtggggtgacgttgccttgatagtcggtgcctcgcaatgcggcttcggtcaatggcgatttggagaacttgggcaaccccgagcttgtgacgcgcacctcttgagccgcaagtttctcgaacaccgtctcctcgcgctgctggtcgagcggatcgaccatgggtggcacaggaatgtgcggattggctggtttgggtgccagcgcgtctttgaactggatgagttggatgagcttatggctggcgggttcgagctgcgtatagcccgccattgcggtcagtcccgggcaggttccggtaccgaatgcggccatggccgccacagtggtgcttggagcgcaggtggcgatgggacgctgattggcgcgttcgttcatcagcgaacgcagatagggcgcgtggccgaggcgcatggcgaggttccagaagcccaggccgtccacgagcaccacgatggccgattcggcgtcgggcagtcccaacgcgcgctggcaggccttgggatcggcgtggaccttggtgggagtcggatgcccaatcgcggcggacaaggcgggcagcacggcggacaggtgcagcgctcccccacgccgatcggccgggacgtcatccccatagcccacagtgggcaccagccgcagcaactcgtccatatccggcgtctcaacactcatagttgcccattcaagtagcacccctccccttggctcagtgcgcagagaacggttatcaataacaaatgttcgctccaacgcacataatcaaacaaacgcacatcgactgaaacgctagaatcacgccattttatcggcaaacatgtgcgattggcgcaccgaaaccagcgcacagttgttatcgagaaccgttctctgcgcactgtttcgcgccctcccgctaatatgggggcgttcgaaagggagtttcatggcatcacaccgcaaaccgtccgcgcaaacctacgatccgcgcacggtcaaggagcatatcgtcgagacgccgctgaacgaggagatgagcaaatccttcctcgagtatgcgtattcggtgatttacgcacgcgcactgcccgatgcgcgcgatggcttgaagccggtgcagcgccgtatcgtctaccagatgggcgagatgaacctgactcccgaccgcccgtatatgaagtccgcccgcgtggtgggcgaggtgatgggcaagctccatccgcacggcgattccgcgatctacgaggccatggtgcgtttggcacagccgttcgcgatgcgtctgccgctggtagatggccacggcaacttcggctcgctggatgacggccctgcggcctcccgttacaccgaggccaggcttggcccggcggccctcggcatgaacgcggatatcgacgaggacaccgtcgacttcacgccgaactatgacaacaagctcaaggaaccgaccgtgctgccggccgccatcccaaatctgctggtcaacggcggctcgggcatcgccgtgggcatggccacgaacctggccacccacaatctgggcgaggtggtgaacgccgccaagttcctcatggcgcattcggacgccaccctggaacaactgatgcgttacgtgcccggccccgactggcccaccggcggcactatcatcggccgcgatggcatccgtgaggcctatgccaacggccgtggcacgctcaccacgcgcgccgccacgcatgtcgaacatgtcacggcccgcaagcaggccatcgtgatcaccgagctgccgtacatggtgggcccggagaaggtgatcgagcgtatttccgacggcgtgaagaaccgcaagctggaggggatttccggcgcgttcgatctgaccgatcgtcataacggcacgcgtatcgtcatcgagatcaagaccggtttcgacccgcatgcggtgctggtgcagctgttcaagcacacgccgttgcaggacaattttgccatgaacaacgtggcgctggtggagggccgcccgcacacgatgggcctgaaggagatgcttcaggtgtgggttgaccaccgccgtgtggtgattcgccgccgcagtgaatatcgcaagaagaaggcgttggagcgcctgcacctggtcgagggcctgctgctggccatgctggacatcgacgaggtgatccaggtaatccgcacctcagatgatgcggatgctgcgaaaagccgtttgatggttgtgttcgacctggacgaggtccaggcccagtacatcctcgacctgcgtctgcgccgtctgaccaagatgaaccgcatcgaacttgaggccgaacgcgatgacctgaagaagcgcatcgaggagctgacccgcattctggcctccgccgaagcgctcgaccaggtggtcaccgacgagatggacgaggcggtcgccaagtggggctcgccgcgtcgcaccgtgctgctggacgccgacccggatggcacgctgacgccggtcgtggcgcagggcgccggggcttcgggcgtgtccaagtccgcactcgaagcagtgaaggccgccaccacgatttcctccgccgaagccgatgtggccgcagccgcagccgccgccaagaagaccggcgagcggtccgcgctgaccggagccttgaagatcgaagacgagccgtgcgtggtgatgatgagcgccaccggtttgattgcccgtaccacgccaagcgcgatggacgtgttcaatgtacggtccacatccgatgaacgtctgcgagatgatcagatcaccacaatcttcgagacctccacgcgcgccacgtacgggctggtcacgtcggccggccgcctggtgctcgcgcatgtggttgatttgccggcgctacctgcttctgccacgttgtcgctgaagggtggggtccaagccgacgaactgatcggcatgaccgaatccaccgatccgattcgtggcgagcgcgtgattacggcgatcgccatggagcagccgacgtccggcaaggccagtgccgaggacgagagcgaggatggtgccgccgaggccaagccgttgccgtcgctggctatcggtacccgtaacggtgtcatcaagcgttggaaccgtgaggcacccaccaccatggattcctggcccgtcattgatctgaaagatggcgacgaagtggtattcgccgccgtggccgaggatgacgaccgtctggtgttcatctcctccgattcctcgttactgacctttgaggcgaagaacgtgcgcccgcagggtcgcaccgcgggcggtatggccggcatcaagctggccgagggcgcccgtgtggcggcattcaacgtggttcccgccggcaaggtggcatggacctatgaggagggcgagaacggtttgacttccggctccggcgcggtggtgctcaccgtggccggcgactccgatgcactacccggcaccgaaaacggcgccgccaaggtcaccccgctggaaatgtaccccaccaagggccgcgctaccggtggcgtacgctcccagcgcttcctcaagggccagaacacgctgattcttgcctgggttggtctctacccgttgcatgcctccacatccgcaggctccccggtcgagcttcccaagcccgatatgcgccgagacggctccggagtggacctcgcctcccccatcgccttcattgcgtaacctcaattaagctccttctgatgggccgagccgtaaagcaaacacccccagtggggtgtttgtaggcgaggagcgaacgatagtgagccaaacacatagagaagagaccctaaacccgacctacactaagcatcaaggaggtggcgatgagactactggttgccgtatccaatgagccgttggcccgcgccattcgtggtgcgctgcttgcctgtcgtcatgaggtgtccttggcaagcaccggcagtatcgcgctcgccgcggtcaccaaggagctatttgacgcagtgattctcgatgaatccctgctcggcatctccaccgagcaactcatcgaatcccttcacaatgcccgtgcctccgtcaagattctgctgctgacttcgacgccactcagcaaaaccatcggcgaaggcagccgctggcgagcgctgcctgacgagtacgccccgatcgaagagacgccctacagctccttcagcgcggattcacacgcaaacaactcagatgccgaagccgaacagtgcacggacaatgctgccgctagcgcacgagctaatgtacgacacccggatgccgtactgagcaaaccattctccgatggcgaactgctctcatacgtcggctcgcttgccaccgactcccccaccatgatcattcgtggcaatctcacgttggataccacgaatcgcaaagcctactatgcatccacacacaccgcaatttcactgtcccgtctggaatacagtttgcttgaagcactggtcaaggctgatggccagtttgtcaacaccagcgaattggtcaagctcgtcggtggcccattcttcgagcaacaagggctcctcaggaacgccctctacacactggataagaagctcacccacgccggcctcatcatgacccaacgcggctccaactaccgcattcgatagctgggctcaatcagtacagccgcatgccttggggaactggggtgaagccggactggtggaggatgcgggcgaaggggtgacgggcgttgaggggttcgccattgatgtcgctgaacgtcacggaaccggtgccattgcgtttgagagcgtaggccagttctgtggcggccttgcgcatttgttcgtcggaatcattggcggcgggttcatggccgatcgattgatcgaacgccgtcaagtgcttggctttggcagccgcgtatagtagcgcaccttgcgcattgagcacgaccgtggctccgatacggcgtgccggtttacccgcaccggcaggcgcgtccggccacgcgatggcggagccactgagatttgcggggtcgagcacactcaatgccaccacggactggccgcgatgctctgacggatgacgcaacgcatccacggtgtcgcgctcggcaaattgggccgcgccgaaaccacggacgaacatgcctcgtaccagtcgaccatgctcctccatgcgctgcaatatcggatacaacgctgagtagccacccgggatattttccttgtcgatcaccggctgcgcgatgacgccatacctgtccagcaacgtctcgaccagtgcgagcgcctgctcggtctgatcagtgtcttcggcttcagcttgcccgattacggcagaccacaaacctcctagcgtcatatccgtagtggctcggtgaatcggagcgacacgcccacgacgacgtgatgtagtggatttacgcgggcttgctgcgcctgcggttaatgcacgtaccggcgcgaagctggaattggtgaccttaccttgccagaccaagctccacaaggcatccttgaactgctgttcgctccactcttgcggaatgatttcaccggtgtttggattgatgtccggctccgcggtctcattccacacacgtttggcggcatccaccagttgacgggcatggaacgctccccctgagtccagtgcggtcagaatcgcttccggcatggtggcgtctgaagcgttcgatgtcgtaccatgttccacaccgctgagcaatattgaatccgccggatagaaagcaacctcaccggggtccatcgcactggttcccccggtttttgagccgacccagaccacatcgccgctggtcagcaactcatccagcaatgcaggttggtagtctcgtactcgtgcggggaataccgccgactcccagagtgcagtgggcagtgctatgccctccagctgctcgataacgcgcatgagcccgtcggcaccttcatatcgttcgccgccgaccggcccgataccttgtcggtcgataagaaacatctggaacgcctctggttctactggcttgactgctttacgcgccttggccaatgagcgagaccgaatgcggcggaatacgtccttatggagccactgttggccttgcttgtcatcatctacaaagtggccttgcagcaactcgcctttggcagccagtacatccaaagtatgcacggcatccgtagcatcgaggtgcagatcggccatgagctgatcggcggtgaaaggaccatgggttttggcgtaacgggtcacgcgaccagtcacatcatcgtcggcaagttcattccagaaagtgcgctccaccagttcctgttcgacttcgcgaatcacgtccgggttgagcacttgtgccatgtcggtggtgccgagcaagcgttcgagcacgtgcggatcgagagacaacagttgcgcgctgcgctcggcctgaggttggtcatactggtacatcaccacgccgacgaagccaaagagaatgttctcggcaaaaggcgatggcggctcggtctccacgtccttcacggtaatggtgccggcttgcaatccggtcatcacctcgttcagggcgggcatgtcgtatacgtcttgcaaacattcgcgcgcggtttccagcagcagcgggaagttcttgaccatacgtgcggcttgcaggagctgtgcggcgcgcagtcgctgctgccataggggcacgcgacggcccgggtcggatcgcggcatgaacagtgatcgggcggcgcattcgcggaatcgtgcggcgaatagcacggactcgcccacttgacgttctacatctgctttgaggtcttctgggtcgaaaaggaacaggtcttgagcaggaatatgtccgtcaccgtccggtagctgaatgacgataccgtcatcggcggcatatacctgcccatcgaaaccgtagcgttggcgcagtctgcggctgatggccatggaccacggttcgtgaacgcggcggccgaaggggcttaacagtacgatgcgccagccgccgtcttcatcgcgggtccgttccacgatgagggtttggtcgctgggaactgtgccggtgatggcttgttgctcggagagtaggcgggccaggttggtgatagcgttggggtctaggccgtctcggtggagacgggtgaggattgttgggatgaaggttgggacagctggaccttctgcggcagaactccccccagtccgcttcacgtctaatccggcggcgatttctcgggtgaagcgggctatggtacggctgaaaccgtagtcacggccagcgccttcaccgtgccagaacggcagacgggcggtgcggcccggagccggagtcacgaccacacgatcacgggtgatttcctgaatctgccatgtggaggtgccgagcgtaatgacatcgcccacgcgcgattcgtagaccatctcctcatccaactcgccgacgcgacgctggcctttgccggcgtccgcctcaggcaggaccacggtgtacagccctcgatcgggaatcgtaccgccagaggtaacggccactttctgcgaaccgggacgggcggaaatcaggccattatcccgattccataccagtcgcggccggaaggccgagaattcctcgctgttgtattcgccggacatcatgccgattacggcatcgaacatgtcacgtggcagttcggcaaacggcgcagcacggagcaccgtggcataccagtcatcagcgttcaaatcgtgcatcgaggcagcggccacggtctgctgggcgagaatatcgagcggattgcgcggcacggccaatggttctatatcgccggcaatcatggcttccagacttgcggccccagtgacgatttgctgacgggtgagcgggtagaacaatgcgtgagagacgccaccgacctgatgatcggcacggcctacacgctgcaatccggaggagaccgacaacggtgtatcgacttgaatcatcaagtcgaccgagcccatatcaatgcctagctccaaactggaggtggccaccacgcagcgcaattcaccacgcttgagccgttcctcaatcattttgcgacggtctttggagaccgacccatgatgagccatggcgatgacatcatcgccctcatgcgagccgacaagcatggtggtggaaccgaccacagcatcgtaatgtgtggagaacccttcgcggccttccggagagcccggatcccgcacagtgtcgggattggtgccatgccgggtctgcgcatagagatcattgaggcgcgcggtgagcttttcggccacaccacgcgaattgacgaacaccaatgtggtgcggtgcgcgagaatctcatccaaaatactgcgttccaccacgggccagatggaaccggaggtacggtcgcccgccgctccaaccaacgcggaggaatcgaacgcatcactcgcatcagaatcgtccccagaagtggaagaaacatctctatcatccaccggcacaatgcccctgcgttcggcaagtcgctgcatggccggcgtgacaccgctgatatgcggagcggaccgttcagcctccacgccaccgacacgctgcttggcattcacggactgcaaatcacgcatgttttccaacggctcaatcatgcgcagatccattgcaggccgcccaccgggattcacgatggtaaccggttgtccgccgcccaggaatcgcgccgcctcttcaggcggattcaccgtagcggatagaccaatgcgctgcatatgaaggtcactgaggccagcatcgatggcggtatcactgccctcatcagcatccgcatcgattgcatctcgcttgcgcgattccgcgacaaggttctccagccgttccagacttaccgccagatgtgcgccgcgcttggtgcccgccactgcatgaatctcatcgacgatcaccgtatcgacagtgccgagaatccgccctgccttcgaagtgagcaacagatacaacgattctggcgtggtaacgaggatatccggtggatgggaggctatgcgccgccgctcctgtgcggtggtgtcgcctgaacgagtggcgaccgcgatcttcggcacgggcagcccttgcgcctcgcattgtgcggcaatgccctccaaaggctgttctaggttcttggccacatcggccgcgagcgcctttaacggcgagatatacagcacacgcacaccggcacgccgcgtgcgtggcacggtcatcagccggtcaatggccgagagaaacgcagccaatgttttgccggagccggtaggtgcgatgaccaagacattacgaccggaatggattgccggccatgcctgagcctgtgcctcggtcggctgaccgaaggcatgctcgaaccacaccttggtgggttcggaaaacaggctcagggtttcgtacatatgtacgattataggtcagctgaagtaggcgatgacttcttcggcggtgccgtaggcgctttgggcaccaagcttggtggccgcataggcggagacataggagccgatttgcgcggattgcagcagcgtatggccagcggccaagccagccagcacagttcccatgaacgagtcgccgcaaccggtggtgtccaccgcattgacttgcgcggcggatacgcgatgccaacgtccgttctcgatcaccaccgaccccgacgcaccaagcgtcactatcgcccggtcgaatccgtaatcggtgaatcgttcggcgacctcataccagtcgagtgattccacatcgccgtccggcagacccagtaactgagccacttcatgctggttgaccagcagaatatccgtggcttccaccagttcgtgaggcagctcgtccataaatggcgagtcgttgagcagcacggtcacgccagcgtcatgcgcggtctgtgcggcggcgataacggtggagatcgggctctccaaacacagtcccaataccgcgcattcggcgatggtcgtgcgatgtgattgcacatagccggcacttgccttggcattggaacccggcgaatagacgatggtattctcgccctcagcgctcacggtgattaccgtggtgccactggggccttcaacgtgcaggatatcggcggtgtcgacgccggcctcatccagcttgcctaataggaagtccgcgttggagtcctcgcccaccgcgcccagcaactggacattgacaccgaggcgagcagcggcagacgcctgattcgcgcctttgccgcccggcaacactttcatggcaccaccattgacggtttcgcctggcttgggcagtcgtttggtggtcacggtgtaatcggcgttcatcgagccgaccacgattaccgagcccggcgcatccttcagcgcttccaatcgttcccgtacgggctcgggcatctgtttatgttcttcttcacttatcaccatgggctccaagcatagtaggcggcgggcccaaatgcgcgcatgatcagccgcgcaacttacgaagacgctcgtgcatggccaccatcagcaccaagagcaccagcaaataccacgggtagagactgattgtcacatattgcgcgatgatgccgaacagtggcggcatgagcagtgagcccacataggcacaggccatctgcacgccgacgacggcctgcgatttgtcttcgccgaagtaggccggcgtcgagtggatgacgcacggataaatcggcgcgcacccgaagccgatgaccaccagcccaacgaccacgccaaggtggtgaggcaatggcacgaacatggtgaggatgccggcgagcaccagcacttggccgaggcgaatcatgaccgggtccttgaatcgcatggtcagaaagccggaaagcgcacgccccacggtgatgcctacatagaataggctggcccagctggcggcggtgatcttgtcgatgccgctgtgcatcaccatgtagctggaggcccacagacccgccgtggattcgatggcgcagtagcagaagaacatcacgaggatttccttggcaccgcgaatggcgagcacgccggccacgccgagcggtttgcgttcagcaacagacgccccttcagcattaccacatccctcggcattgccgtcagatgatgcggcaccatcggtcgattcgccgcccccagtcgtgccacgtttcttccacagcggcaggctcagcaccaggatgacggtcagcatcacctgcaggatcgcgatgtaccgatagccccacggccagccttggccttgagacagcgcatagcccatgatgtaggggccgaccgatgcgccgacgccccacatgcagtgcagccagctcatatgccggctttcgtagtgaatggctacgtagttattgagcgccgcatccacgccacccgcgccaaggccgtacggtatggcgatggccaacagcacccagtaattcggggcaacggagaaacctaccaaggccgccgcagtcaacgccaccgaaacggcggtgaccttgcctgccccgaatttcaatgtcattcggtccgaaagcagcgccgagacaatcgtgaacatggaaatcaccgcggagatgccgccagcccacgccaccggcacgttcagatcctggctcatggtgggccatgcggacccgagtagcgaatccggcaaccccagactgataaacgccacatagatgacggcaagcaacagactggccatgttccatctcccattcacagtacggcaccggttgtgataacgatgtcatcagtctatcgaatggcgcttcagcaacacgcaaacatcacagtttggagtcctgcccgcagtacaccggcgtggaatcggctacgtcgcgcgggtcaaagccgatgatgtcgtagttgtccttgagataatcggtggcggtgcactcgatgaaatcctgatgatataccgcagcaccctctgacgaaatagctgtcccccaaagacggactgaggggagagaaatacgcgtagcccgctaccacccgaggcctctccccccagtcagcttcgccgacagccccctcatcagagggagcttgagataggacggtcaggtatcgatcttggagcggtcgaaatcgtcggcgttgtcgacgatgaactgcttgcgcggcggcacgtcgtcgcccatcagcaggctgaagatctcggatgcctgggcggcgtcctccatgcggatgcggcgcagcatacgcgtgcgcgggtccatggtggtgtccgccagctggtcggcatccatctcgcccagacccttgtatcgctggatgtcgtcgttgtaaccgatgtgcttcttgtcgaggtcggccagtttgccggccagctcgtcatcggaatacgtgtagatgtattcgcccttgtgcgagccggtcaacgcgatgcggtgcagcggcggtactgcggcatacacgtagccgtgttcgataagcggccgcatgtaccggtagaacagcgtcagcaacaggatacggatgtgcgcgccgtccacatcggcatcggtcatcatgatgatcttgtggtagcgcgactgtccgatgtcaaagctctggccggagccggcgcccaccacctggatgatggccgcgcattccttgttggagagcatctgcgtaatcgacgccttctgcacgttcagaatcttgcctcgaatcggcagcagcgcttggaaaccggcgttgcgggcggccttggcggtaccgagtgcggaatcaccctcgacgatgaacagttcggccacgtcgtcattgcccggctggcagtcggagagtttggccggcatcgaggcggattcgagcgcgttcttgcggcgcgtgacctccttggccttgcgcgactggatgcgtgcgtgcatttcgccgacgatcttctccagcacgcggccggattgttccttgtatccgcgtttggagccggtgatcatctcgccgaattgcttgtcggtgagccgggtgacgatcggcttgacctgcgcggtgccaagcacgtccttggtctggccttggaactgaggttcggccacgcgtgcggtgaccacggccacgagtccggcttggatgtcgtcgcgctccaccttcatggcggagtccttcatgttcaccttgagcttgcgggcgttgtcttccaccgccttgcgaatctgcttggtgatggcgttcatgaaaccgtccacgtgagtaccgccgccgggcgtctccacgatgttcacgaagctcatgattgtggtgtcgtagccgttgacccatcgcagggcgatgtccacgccgcaggtgcgttcgatttcctgggcgtgcagttcaccgccttcgcccacggtctgggtctcctccttataggtgccctcgccttggatgcgccagatgtcggagatcggctcgcctttggataggaagtcgacgaagtccttgacgccgccggtgtgcaggaattccacgacgcgcgggtgcgcgggctgctcgccgaacgcgccatcgacgacctggtcgccggccgtcagcgagaagtcctcctcggacaggctcccggtactgtcggcttgagcctcggtggagtcgtcgaagagttcggcatcgttggacgagacgtccaaagccggggcctggtcttgcgcaggttcgactgcgtcggcatcaatggcttcggcggtgtcagtcgccgtttccggtacgttttcgtcaacaatggtgattttgagtccgggcaccaggaagctggtctggcgcacgcggtcgatgagctgttcgtatgagaattcggcggttttgttgaaaatctccggatcataccagtagcgaatacgggtaccagtggttttgggagataccttgccgatgatttccagctcggtgggtcggttcttgcgagtgcgcttgaacggggaatcgggagacggattggccgggtcggcatccgtgtatacgccagggtgaccttggtggaaggtcatgtggtgcgtcttgccgtcacgatccacttcgacgtccagtcgggagctcagggcattgaccacggaggagcccacgccgtgcaggccaccgacggcgttataagacgagttgccgaacttggcaccggcatgcagtttggtcagtacgacctccacgccggacaggccggttttcggttccttatccaccggaatgcctcggccattgtccgcgacttccacggaaccgtcggtgtgcagggtgaccacgatatcgttgcagaagccggccaaggcctcatccacggagttatcgatgatctcccacaggcagtgcataagaccctgcgagtcggtggtgccgatgtacatgcccggacgcttgcgcaccgcatccaagccctcaagaacagctaggtccttggcgccgtattcttctttgggcatacagtcctatttttctcttcaaatgcttggctcccctcacagaggggagccagatgatcattgatccaggaagtcgcgcagggtctgcgaacgggacgggtggcgcagcttggacatggtcttggactcgatctgacggatgcgttcacgggtcacgccatacacacggccgatgtcgtccagcgtcttcggctggccgtcttcaaggccatagcgcatcttgatgacgccggcctcacgcggagacagggtttccagcacctgcttgaactgttcctgcagcagggagaaggccacggcgtcggacggagcgatggcgtcggtatcctcaatgaggtcgccgaactcggaatcgccatcctcgccaagcggggtgtgcagggaaatcggttcgcggccgtacttctgcacttcctgcaccttctcaaccggcatgtccagctcgcgggccagctcgtccggcgtaggttcacgccccagatcctgcagcatctggcgctgtacacgggacagcttgttaatcacttcaaccatgtgcacaggcacgcgaatggtgcgggcctgatcagccatggcacgggtgatggcctgacgaatccaccacgtggcgtaggtggagaacttgaagcccttcttccaatcgaacttctcgacggcacgaatcagaccaaggttgccttcctggatcaaatcaaggaagagcatgccacgacccgtgtaacgcttggcgagcgagaccacaagtcgcaggttggcttccagcagatggtccttagccttcttgccgtcggcggcggcccacttgagttcacgcttgcgcttgaactccatgccttcactttcggtgtcgagcaggtgctgggcgtacaggccggcctcgatgcgctcggacaggtcaacttcctgttcggcgttca

SEQ ID NO: 1389 - DNA, 32615 bp, Unknown
  R257_15m  MAG No. k141_3975
acgacccacttttgggcgaagatgtagacgatgaggatcggggccatggccatcaggtagctggagaaggccatcgggtagttggtggcgaactgcgagctgaagacgtactgggcgagcgggatggtctggttcgactggtcggtcaggatgatcaacggcaggaggaagtcgttccaggcccacagtgcggtcaggatggcgatggtggcgttaatcgggctcatcagcgggaagatgatggtccagaaaatgcgccacgtggatgcgccatcgattcgggccgcctcttccagcgaaaccggaatcgaacggatgaagccagtggcgatgaacaggttcgtgcccaggccgagcaccgtgtacaggatgatcaggccgacctggttgtccaggtgcagggagcccatctgcttcgcaatcggcagcatgacgaccgggaacggcacgaacatggcggcgatgaagaagtagtacaggaagcggaagaagcgcttatccatgttgcgggccacagcgtaggccacgaaggtgttggtcagcaaggtgagcaccacggcggccaccgtgatgatcgcggagttgagcgcggccttcgggtagttgaccttggcggaggcgtcggcgaagttatgccactgccacgaggtgggcagagcgaaggtgccggcttcggccggggtcttcagcgcggtgacgatggtgaagtagagcgggatcagaatggtcaggctcagcacggccacggcggcggtcagccaccagttgatcttgtggtccctgcggaacttggcgggcttgccggacttggacggggtaactgttgcagtagtcatttcttatcctcccctaaatcagatctgttcctggctgcgggagatgcgcagctgtacgaaggcgatgatcgccagcacgatgaagaagagcacggcgtttgcggtctggtaggcgtactcgccaccggtcaggccacccttccagatgaggtaggtgacggtttcggtggaggagttcggaccgccctcggtcaaggcgacgacctgatcgaaggtgccgagcgcgttcttcatggacagcacgaggttgatggtgaagaacggtccgatcagcgggaatgtgatcttccagaacttctgccaggcgttgacgccgtcgatggcggcggcctcgtagatttcgtcgtcgatggtctgcaggccggcgaggtagatgagtaccgagtaggcgatgccctgccagacggcgaggaagacgattgggatccagctgagttgctcattggtcaacagcgaggtggacagccacttgatgcccagcgccttgccgagctcgggcagcgggttcatgaagatgtacttgaacacgtagccgatgaccagcacggagagggtgtaggggatgaagaagacggctcggaagccattcttgaaggcgatcttcgagttcagcagcaccgacaggaacagggcgatcacattaatcagcaccgtgatgagaatggcgatgaggaacgtgaacaggtaggcgtggcccacgcggttgtcttggaagagggcgatgtagttcttcaggccgatgaacttgtaatcgccgtagccctgcgagttggtgaaggaatactttacgccgtcaagaaatggcaggtacaggaagaaggcgaaaatgatagccgccggaaccaccatccagtagtaggcggggtccaccttgcgggtggagaaggcggagaccttcttcttggccggtttcttggcagcggtcttggttgcggttgcgtgtgacatgatgttctcctctcctaccgatcactcgaaggtcctggcttggaccttgtcccattcggtctgcatctggttcaggaagcgatcggtgttgccggaggccaccatggtctgcaggtagccgccgatgttgatggacgaaggaatgtagtggtcgcagaagtcggccagtcggttttcctcgaagaacgggcgcacggtttccagcgcatcgttgccgaagtaggtgtccttcagcggcgtgatggcggactgggcgtcggcgtaggcgtcaagctgatccttctgcatgaggaactcgacgagcttcatcgcttccttggggtgcttggtgttcgcaccgatggtgagcatcacgtcgtcgccggcggtgaggatctgctcgctggcgtcatcggtggccggcatctgggcgaaaccaagttcgatatcggggttgatcagcaggatctgcgggatggcgtaggtgccgagcgggatgatcgcggccttgccttgggcgaagttctgcgtgccctgctggtaggtgacgccggtgtccgcagtggagtaggtgaagagctcggattccttctcgactgcggtcttccacagttcctggaacgtggtcttgccttgcttgagctcggtgtacttcgattcgggaaccagcgtgccggccagggaggcgagcggtgcctgggtggtccaggcgtcggccacggaaccctgcagcgggttgatgccggcgtccttgaaggtgttgagcatatcggtgaactcgctccaggtggtcggcggattctccgggtcaaggccaaccttgcggaacagagccttgttgtagatgtagccggaggcgttacccgcgaagggcaggccatacaggcgcttcttggaggaatcggtggtctgcaccagattcttggcgatctgcaccatgccggggttgagggtgtccacaatgggttcatcggtgaagtcgtagaacacaccggaggcggcgaagttgccgaagctgatgtcgccgttgaaggtgatcacgtccggcacacgattcttgacgaaacgggtgcgcagatcggtctgggcgttggcggagttgttgatgttgaccttgatggtcgggttctgcttctcaaagtcggcgaccatggacttgaactggtcggcggcctcggacttgaactggaagaaatccagcgtgacggtgcctgcggtgctggagccgcagcctgccaggccgaacccgacggcgatcgcgcacatcacggcggcggtgcgcacggccagacgcttcagtctaggcgttgcatgtggggaatcggacagcataattgttgactcctttatctttcttttcctccggcttcggtgccggcggttcttccactttccaaggtaacggttcggccatttcattcccagcgccagcgagcccacttgcgcaagcaacaaaaagcgcggtattttgtgattaacgcaataaatacagcgaagggggcttgcatgtctgatgtcaacgcgattccacagtggttttccggatccgagcatacgcatcgcgtggcggcggcaattgcccaatacgggccgatagcccgcactacgttggcacagatgctgggactgagccaaggggccttgtcccgcatcaccagcgatctgatctacgccggggtgatcgaggagcttccggccgaggccggcccgtcaggcaagctgcccgagcgattcacgccaagggaaagttcggatcgtcgcggacgcccgcagacttcgctggtgttgtgttcgaacgcacgcaccttcattggtgtcaaggttcatgggatgtcgattgtggccgctgcggtgaacgcgcatggcgaggtggtgtccggccggcacgaggtgccgatcggggcggatcagtcggctgagtatgtggtgtcggccatcacgcggctggtgcgcgaatgttccgccgatatcgcctcttccggactgccctcccccactgcggtgggcgttgcggtaggtgggcatgtggtcgacgattcgattgtgacgttcgcgccgttcctgcattgggacggggccacggacttggggacgatggtcacagaggcgaccggcctgccgtgcggggtgttcaatgatatcgattctctgctggtggatgcctcctggttcgggccgggtgtcggcgtggatatgttcgccgtggtgaccatcggcgtgggtgttggttattcgctggccgtgaacggcaagccagtgcagtacccggataagagctatggtctggtgggccacgtgcttatcgatccggaggggccgcgctgcaccagcggacatatcggctgttcacaatgcttgactgacgattcgatcgccgaacagtactctgcgattgtgggtcgcgcggtcagttttgaggactttgcgcgcgatgccaagggacgtgtgccgcaggccacgcagttggtgaaccggacgtgtttccggttgggttcgctggtggctacggtggcgaacatcgcgatgcccggacatgtgatgattgccggggagtccgcgtttttggccaagctcggcaccgattcgctgcgcgatggcattcgtttctaccgtcacagccagacccagccggtcaagttcacgattatggaccacgactggcagctctgggccaaagccgccgccagtcgcgtaatcgtgaagcatattgggtaggccgttcttggctcccctcagagagggaagccaagaacgttgcttcgccacagttactccgccacgaccagcaattacggacttgcctatcggcaaggctcaatcccaccttcgctcagctgtcgcttcgctcaggccgtggctactgacagcctactaggctgtcagcttaacgccacagccttgagcaatactgcctgctgggggtggagggacgggggacggatgccgtaacgctgcagggcttcgccggtcaggactacgccttcctcgttccaccagccgagagtgctctggccgttggccagaccggtcaaatccaagctcgggtcgagcgggctgacgcggtaggtgcgctcggggtcaagtccgggcaggtgcacgggcgcggccggataggtctggctggtggtcagctgggtgaagcggtagatggcggcgtcgcggttcggcatcaccatgccatccaagcgcacggccggatcgttggagtcggcgtgcacgcaggtgtcgatggcgaaccagtcgcggtgcttcttgaattcggccacccacacggccagcttggcgagcgcctcgtccggctccttcaacaggttccattcgatgcccatgtggccgaagaacgccatggccatgcgcagttcctggctggtggcgcgctgggtggagtgtgcggggctggcgcccacgtgctcgcccatcatcgccggcggcaccagcagcgaggtgtagcgctggatgtccgcgcgctcgaccgggtccacgcagtcggagacccagatacggtcagcgtgctctaggatgccgaggtccacgcggccaccgccggaggagcagctttcgatctcaaggcccggatgtgcggtcttgaggcccttgaagatgttgtagacggcgagggtctgcgcgtgcacggccgggcggccggagcggcgggaaccgggctcggtgacgagcttgttgtggtcccacttgatgtagtcgataccaagctcgccgacaagctggtccatgcagccgtagatgtagtcgaacgcatccggattggtcagatcgagcacctgctgagtgcggccctgcagcggcagtcggccggtggtgggcgaaagaatccaatcggggtggttgcgggccacgtcggaatcggggttgaccatttccggctcgaaccacaagccgaattccatacccttggcgtgcacgtagtcggcgagcgccttcagggacttcggaccatcgggccagacgtcctgcgcaatctgccagtcaccgaggccggaggtgtcgtcgcggcgggagccgaaccagccgtcgtccaccacgaatcgttccacgccggagtcggcggccttgtcggcgagcgccttcagcgtatcgaagttgtggtcgaagtacacggcttcccatgtgttgaggatcaccggacggccgtgcgagaacaggcgcgggtgcagggagcgcacgtaggagtggaagcgggcggcgatctcgttgagaccatcgccataggagccgaacagccacggggtgtcgtaggagttctggccttcgccagggccagcgagcgtcacttcgccgtcgaacaggagttcgccgccgccgatcacgccggttgtgtagggcagacgttcggcggacagcacggagttgccgctccagcccacgtgcaccgaataggcgtcgccatgctcgaagctgaaaccgggcacgccggcggtcaggagcagggatgcgtcgaagtcagggcggccggcgagctgcggcttttcgaaacggccgacggtcagcggctggcgctgcggactgcgttcacgtagatggtgaccggtggtggtgaggatttcgccggcggattcgggcagcgggaagccgagctcgatcttgccgatctcgagcggggctccggcgtctgcaccgaacaggttggttacggtggccttctgacgggccaggccgccggggagcagttcgaggtgccactcgacttccacgccctgctcctcatcgcgcgcggtgactatgacgccgggcacgcggaccggaccggtggcacgggcatggccggccacatcggtgtagctttcgccggacacggcatcgagggtggcttccagcacgccgccggcctcgatattggtcacggtgaacttggggaagagctcgacgccggcgcggcgcagcaccacgcgctgctcgccgatccagctttcggcctgggtgggcaggatagacggccaggcggtgtcgtcgagcgcgccggacacgcgctgcggcttcagggcgtcataggcggccagcagggtgtcgggcttggccagcgggcggccccagtggacgatgtgcggcaggtcgctgccggcaaacaccagaccgatcgccacattggcggcgggctgggtcaggtagacggcggtgagtgcggtgccgtcagcggcggcgccggtgaaagtggaggtgttctcggccatattgtctccttcgacgtgtgtggatttgcattgcactactggtttcgatggtagaagaaatggaatatgttgccttggtgccgcgtgttggttgcgtgaggtaagtaatgcgtccgtgtctatcgccgctgggcgaagaaatcagtcaggatggactgacactcgccttccagcacgccgccgtgcacttcaggactatggccgatatgcggatcgcgcggaatatcccaaatcgaaccgcatgcaccgagcttgggatcccaggcaccgaacgcgatggtgccgatatgggtctggatgcaggcacccgcgcacatcgggcacggctcaagtgtgacggccagcgtgcaatcggcgagattccaagcgcccaaggcttgggccgcctgacgcatggcgatgatttcggcgtgggcaagcgggtcgccatcagcctcacgcgtgttgtatccgcgcccgacaatctggccggccgcatccagcaccaccgcaccaaccggtacgtcaccagcggctgcggcctgaccggccagttccagtgcgcagcgcatcgcctcgtcatattccataccaacgagtgtatgcctttttctcatatcgtctcatgatgtgcataatcggccgcaatcttaacgttttcttcatggttcccatatacttttggtggagaaaaaatacgagaaggcggcaacatggcggtatttgagctcatcctatgcatcattgcggcggtggtggtgagctcgtttgccagtcgcttcgtgccgaaggtttccacaccgctggtccagattgtgctgggcgtgctggttacgtatctgccgtttttcccggatgcaaagctcgacccggaactgttcatggtgctgtttatcgcgccgctgctgtatctggaagcgcacgaaatcgataagtcggcgttgctgaaaacgctggatctgagcctatcgctggctatcggactggctatcgtcacgatggcggcggtcggattcactttgcatgccgtctggccgtccatcaccttagcctcagccttagcactcggcgcggcactcggcccgaccgatgcggtggccgtcagctccctaggtaaagaagcctcgctgacgcagcgtcagcgcagcgtgctgaaaggcgaatcactcttcaatgacgcttccggcatcgtcggcttccagttcgctctggccgccgccttcactggcgaattcgccgtggggcaggccgccggcgaattcgtgatctccttctttggcggcaccttatttggcctggtgatagcagcagcggccaactggctattcgagaccgtgcgatccctcggttgggaaaccaccaccacacgtattctgatggaactgttcctgcccttcctgctgtatttgggcgcggaggaattcaatgtgtccggcattctgtcggtggtggccgctggcctgttcatccgattcgaccgtaccggcgtggggccgaatgtggcacgtacgaatatcgtttccacttcagtatggggtgtgctgagtttctcgctcaacggtgcggtgttcattctgctgggcatgcagctgccgcgcgccatgagggccagctggtctgacccgtatatcagcaataccgtgctgatcggcattattctgctggtcactctggtggtaatcgcgcttcgattcttctggattgcggccatgctgcgcgttgcgcgagatacaatcaccggccagcgccgcaaaatgacacccgaacgctggcgctcggccgcagtgatgacctttggcggccccaagggaaccatcacgctgtcattgatgtttaccatcccgtattacattgccggcggtgcgccgttcccgatgcgtgacgagctgattttcattgcgtcaggcgtgattatcgtgaccttgctgctggccaacttcctgttaccgctattggccccgaaccgtggcaaggatcccagcgcggaaatgattccggtgaccatcgatgtgttacgcgccacggtggaggaattgaccggacgcatcacgccagagaatcgccgtgcgattctgatggtaatcgaccaatacaccaagcgcatcggacgattgcagcagcgcatcggcgataccgatcctcagggattcgagcaattgcagatcgaagcgctgcattgggaaaaggaattcgtgcgcgaccgacttgccgacaccaaggcgcatccggcggcggatacggccacgcaagagctgaacgtcgaagcctgcgagcgcatgcttgaccagattatgaatacgctgcgtcacacttccactgatccgacttcggggcatgcggtatcgcagattcgcggtcgcttacgcatgttccagcggcagatgagcaattacgccaaacgcacggtgtccaagattcgccataccacaccattggtgagcgaggatcagattttcgcgcgcacccgcgaactgcaggtcgaggcgattcatcatgttatcggccggcttattgacgagatgggccaggatacgtacaacaccgagcattgttcggcgctgttgctggattatcgtcgcgctgaggcttcattgcaggcacgtccgaatatgagcggcactacggaaaccatcacgcaggtcgaggacgtaaagcgcgagagctacggtatcgaactcggtgtggttcaggacatgtacgaagccggcgacatcaaccgagcccaagcccgctccctgaggcgcaacatctacgttatgcaggtcgatgccgattccggcatctagtttccttggctcccttctctgaggggagccaagttggggattgctatttccgcatgattctcttcagtatgtgcagtagtgcttgcagtgctcacttcgctcatgggagaacagtctatgaccgcgccggccacaagcgccctcgatgtccgattgctgtgacggccgcgccaattccagtgatggcggctgactacagcacgccagaggtaatgtcgttgtcgagcagccactggcgcaaatcggcgaactcctcaagactcacattgtgatccagaccgtggtagctcttggttttcagccacgtatgctcttccaaccaagcggcggtggcgaacagttcgtatttcgggattacgccatcgttcttgccgtacgtatagaacacggggatatcgtaatcggccaggcgagagtcggcgggggccgtgccgggcacctgaccgggtgtgttgaagccggacagggagacgacggcccggtaccgctcggggttgatgcgcaacaaatgcacggcgaccagtccaccttgcgaaaacccaagcggcaccacgtcacggtcggcgggaatgttgtcggccacccatcggtcgactgctgtggcggcggcatacgcgtcgtagtcacgatcatcgccgataggcagggcatcgtgaaaccacgcgtagttgccggggtcgggactgccttcacgggccggcgcgagtgtcagcggcccgcgcaatgccacgaagtcgttatatggagcgatgaggcgcatgatgtccgccatgtcttcttcgctggatccccatccatgcaggcacaggaacagcggatgcgtggcatgctggtcgaagccgccgcgcgaggtgacgctgtgttccacggtgagtggctcgccaaaacgtccaggcacagtggtggattcgcggccgatcagaggctggctggcattcgcttctttgctcataccaatccaatatagaggtcttgcgcgctgtgcggaaaacgatggaccatgatttcagtcacattgggtaatccgcgccgaatcgccttgggactttccaggggataccggcaatctgtcaggcattaccgctgtttgcggctgcggtgtctgtggctgcggtgattgtctcaagttcgccgccccactgctgctgcagtgcggtcatcttgctgccctcgccgaacaccatccagcgtttgccgttcagcaatcgccaatcacctttcgtttgctcattatcagcgtattggctcagcagttcggaaatcttgctttcgataggtgcccggctgatggctgcggacgattccgattcaaaggacacgaaggccactctcggatcagtgcacatctgtacggtggtgatgcctggcaaaccgcccgtatcaagcccctgccatccttctttgcacgcgccggcagcttgttctatgccttgctccatctgtgcggtatcttcgacgggtgccttgtcgttcgactgctgaatcagtccttccgggaacaatacgcccatggccacgccgataaccaagcaaactatggcgcacaccagtgcgatgatgccgcccgcgcccactcccccgtgagtggcgtaccgaggcatagtgactcgcgcagcgatgaccagaatcagggtgatgctgataagcaccgccgccgtcaacgcaatgtatcgtcctggcactgccgtcataaaggaaatggcgtaaggcgcgatttcatgaaccgccgaggtggccgataccacgacggctagcagtccgctgacaacggcaagtctgcggcacaatatcgacgttgggctgctggcttttgtagcggcgaatcgccggccggcattccgcctggatgggcgtcgattctgtgcacgacgtgagctgcgcgaatcgtcatactgaccatcgccgaagaaatcgtagtcctcatcgttgcgggccatcggtgccccccttcctgccgattacacagccagtgtaccgctatggcttgggaatggcggtcattcgggggaatgattcagggcaaaaaagaaccccggcggttgcccgccggggagagaaaggagagagaagaagaaagggggttcaattgtcgggaactgctgcggctcctgatcagctttccgctgacatcatttatataaccactgctttctgggtctacctctaagtttctctgagaaaaacctgagaatacttgcgattgatggaccgcggaagcgtgaggagcctctcacgtttccgcccaaggcgctagacttgaaggcagtatttatttgcccaaggagtttttcacatgctgctgtccgatcgcgatattctcgccgcacagtccgcaggtcatatctcacttgatccgtggacccccgaaatggtgcagcccgcttccatcgacgtgcgattggatcggtacttccgtttgttcaataaccacgcctacacctatgtcgatccggcggaaaaccagggcgcgctcaccgaacagttcgaggtggatcccgacgaaccgtggattttgcaccccggcgagttcgcactgggttccacgtgggaatacgtcaagttggacccgtccattgccgcccgcttggaaggcaagagctcactgggtcgattgggtattctgacccattcgactgcgggcttcattgaccccggtttcgaggggcatattacgcttgagctgtctaatgtgtcgacgctgccggtcaaactatggcctggcatgaaaatcggccagatgtgcttcttccagctgagctcgcccgctgagcacccttatggctccaagggcaccggctcgcattatcagggccagcggggtccgacgccgagccgttcctacgagaatttctaccgcgcgcacatcgacgactgagcgttgcgacgtaccattcggccggcggatgccggccatttgcttaatcccaaggagatgtcatgaccaacagcgatggtgggttccagttcgacttccagcagcacgaaaagccggtcaggccaacggttcctccgattcccgggcaagagacggcagcatatggcgcgcagccagcgacacaagccacaccggctctgcagttcccgcagtctgtgcagtctgtgcagccgacgcaatttgcacagcccacacagcccatcgatccggccatgacgcaaccgttctcgccgcaattcccggctgcggttgccgcacaagcaccacagccggcggcagccacgcagccagtagtatccgaaacaccaatcgccgctgcgcccggccagcagcaatacgtttgggatcagacgacgcaaagcttccgcccggtggaaccgacagcgccggtgacgccagccgcaccagcggcaccggcgacatcgcctgtttcggcagcttcaaacgccgcgacacaagcgttccagcccagtcaggccgagcagcctgcggtagatgccgaggcaacacaagcattccggcctgatcaggtcatggcaacacagcttttcgaagctcaggccatgccgaatgccgaaaccgcggccacacaggcattccagcctaattcagctgcggccacacaggcatacggcgcatcatccaccgtatccggtgagaccgttgccatgcctgcaacgcaagtagcgtctgccgatgatgctgcagccacacaggtgttccaaccggccgccctggccgcttcggcacaggctcagcctgctgtgatgcctccctccattccgttggctcaggtctccgatgaggacgattccgatggcgccgagcctcgtcacggcggtagcggcaaaaagaacaccctcaaaatcgtcggcattgccgtagcggtagtcgccgtgatagcgctggttgtcgccggcctgctctggtggcattccaacagcagtaaggcgagccaagccgtggcactggccgagtgcaaggtagcggccaagcagtacacgaatgcgcagaagaagctcaccaccgccatatccaatggccaaaccagcgcgcaaacatccaccagcgatgtggccgatgccaatacgctcaccacgctgaatcaggcgttgcaagacgccgacaatccgaccgacaccgccaagtgcgattccagcctcaacgccactgagctgaagtctcacactaaagagctgcagaatgatgccagcgacatggctgacaagacggatgccatcaacaatgcgatcaaggccgttaatacttcaaaggcgacggccgataccgacacactgaaatcgaacctgagctcggctatttcgcaggcgcagggcacactggatagttccgcgggcagtgtggccgatgagaacacccgcaccgcgctgcaaaacgccatcaccgaggccaatacggtgatgaacgggaccagtccgtccgaatccgacgtcaacaatgcgatttctagactgcagaaggccgagtccgacatcaccgcctcgatgcaggccaagcagcaggcagatgccgccaagcaagctcaggaagaggctcagcggaaggccgaccaagaggcacagcagaaggccaagcagcaggcgcagcagaagtctcaagacgggtccacctctactgacggcaccgacggcagcaacaactgaggtctgcagcgttctcccgtttcccatggggcggtaacttccccatggggcggttagcgcattttcctttttcgcggaataatgccgttttcagcgaccgccccatgaggaaatcaccgccccatgggataatcaccgccccatgggataatcaccgccccatgaggagccgtttggatatagcagtgggccgggccctgaataccagagcccggcccactgctatatgcccacaatcagggctattgcgatggcttaacgcttggctatcgcgcgtagcacaatcttgcgtagctcggaggcaatcagcacgattgcggccaggcagatgcattccacccaagccatcgggctcaatgccacggtgccgaacggaccgttaaggaacggcacgtaaatcaccacgagctgcagcgccacggacaaaccaatcgcaccccatagccacttgttggagaacagacccacgaatgcggactgcagatgcgaacgggaggccagcgcgttgaacagctgggcaaacaccagaatcgtgaagcccatcgtacgggcctcggtcatctgcgcttcatggccgatggcatccaccgagcggtcggtgaacaagccgccggataggtgcatgtccataccaatcagcgtgacgatggccataatgacgccgacgaagatgatgtcgccccacatggaggcgtcaatcacgcggtccgtcaccttacgcggtttacgacccatcacatcgtcggtctgcgggtccacgcccatagccaacgccggcgcggcatcggtcagcaggttgatccacagcaactgtgtggcgagcagcggcacggtgacgcccacggtttccggctggcggatgccgaggaagccagcaaacaccacaccgaggaacacggtgaacacctcacccacattggaactcagcaggtagcgcaggaacttgcggatgttgtcgaagatcacgcgaccctcgcgtacggcggccacaatggtggagaagttgtcgtccgccagaatcatcttggcgctctgcttggtcacttcggtgccggtgatgcccatggccacgccgatgtccgcggacttgactgccggggcgtcgttcacaccgtcgccggtcatggccacgatgttgccttgacgctgcaaggattcgacgatcttgagcttgtgctcgggggccacgcgcgcgtacacggacacttcggacgtggccttgtcgagtgcggcctcatcgggcagctggtcgagctggtcgccggtcagggccttgccgtccttggcgatgatgccaagatcggaggctatgcgggcggcggtcagcgggtggtcgccggtgatcatcaccgtgcggatgccggcacgatgggcctcggtcacggagtcgcgcacctcagtacgcggcggatcgataatgccgaccatgccattccagatgagatcggtttcgatggcttcggcctgatcggcgatgtcggacacctggcctgcggcgttgacgcttacaccgggcacatcagccaaagaactggtttccagcggacggcaggcctcgccaagcgtacggtaggcctcggaggagagacgttcgacggtggcgagaatcgactggcgatcgccttcggtgagcttacggacctgaccacccacgcggatgcgcgtgcagtagctcaacagcacgtcgggcgcgcccttggcgaacacggtgagcttgtctgaatcggtgctgtccttggcgatgatggacatgcgcttgcgttcggaggtgaacggaatctcgccaacgcgcgtgtatcgcgtgatcttgcgatcggccttgaccttgcgtgcggccacgatcagcgagacttcggtgggatcgcccacaatctcccaacggccgttctcctcgcgtagttcgccgtcgttcgcgagcgtgccggccacaagcgtggcgacgacttcatcggccacaatctgggcctgctcggattcaggactgacgccaccggtcataaccatgcggccttccggcgcgtaaccagtgccggtgatctgcactgcgccggacggggtgaccacgcgctccacggtcatctcgttgcgggtcagcgtaccggtcttatccgagcagatcacggaagcggagcccaaggtctccaccgaatgcagtttcttgacgatggcgttgtgcgcggccatacgctgcacaccaagcgccagcaccacggtcaggatggcggccaagccttccggcacggcggccacggcaagcgagacggccaacagcaaggaatcaatcacgtcatggacgtcgtcgaagccttccagcacggcgagcgccaccagcaccacgacggcgatgacgcacaccgcgatgccgaggatcttggagacgtaatccatctccttttgcagcggggttttctcatcttcggtggcggagagcatgtcggcgatcttgccgacctgcgtgttcataccggtgccggtcacgattgcgcggccggtgccttgcgtcacggaagtgccgttgaagatcatgttggcacggtcgcccagcgccttggcttcggtgagtgtgtccggcttcttaccgaccggcacggattcgccggtcagggaagcctcggcgatgcgcaggctggccgcgttgaccagtcggccatcggcggagactgagtcgccttccgcaaggacgatgatgtcgccggggaccacgtcggcggtgttgatgcgcatgactttgccgccgcgcagcaccgaggtctgcggggccgtcatttgggcgagcgcctcgaccgcggcctccgccttggcctcctgcatgtagccgagcacggcattgacgatcagaatcaaaatgatcacgatggcgtcgaacggcagcacttcaccgccttccgcgccgggctgcgcattggccttttcgatgaaccatgcgatcaccgagatgatggtggccgcgatcagcaggtagaccagcgggtcctggaactgggccaggaatttcttccatttcggtacgggcggggcggtggcgagctcattcgggccgaatttggccagtcgacgcttggcttcttcctcgctcaggccctgggatgggtcgacattcagggctttggccacgtcgtcggcactggtcagacttggatcagcttcccccaatagcgcttcctgcgcgcgcacttcttccgattccacgacctcgttcgttgcggtcgcggacactgcggattgatctttgagatcatccataatgttctccttggtattgccgcggagtagtcagccttgcggccgctgccgggttttctctcccggctggacgcacaggactgcgcggttatggacaccggcgcaactgctgccgatgcatacgattgctattattccataactgcgtggcgcacttggcgcacagcgtaatagcgttttgcctagaacaggcgacgcaatcaggcttcagccaaatcaggccaacactgcacgcattcgacgatgtgcgcatagaagccgttgccagcggtttccgcattggccagggacaggccgtggctgccttcggggaacaggtgtgcttcgatgctcacgccggcggcccagcaggcctggatgagcattagcgtattctccacgggctcggcttcgcggtcggaggtcatggcgtagccgccaccaggcaaaatcaggatggccgggcgtatgcggtccggttccatctcctcgctgttgtcggccacatagccaaagaatcgcgcctcgttgccgtcaatgccagcgatggtttgttggattattgcatgccatacatcatacgcgcagagaatagttctcgataagaaccactcaccatatgcggtcttgcccgtatctccaaaccgaataacgcttacagcgaatcgtgaagaacgtatgccgcactacggttacagagcattcgacagctcgacatataacttaagaatcgtgagaatcaaagcaattcataacctaggaatagtgagttttacggcattatataacttaggaatcgtgatataatagctcataaatccttgaaaatactaggaatatgagcttaacatgtataagagaaaaatatacgaccatctacggcgatggaaagcagcgagcaagggtactactgcgttaatgattgaaggagcccgccgcgtcggcaaaagcaccgtcgccgaggaattcgcgaagaacgaataccgctcatacatccttatcgactggcagaaggctccgcaggcggtacgagactcgttccgcaacaatctggatcatttggacaggctgttcatggacctttccgtctattacggcgtacgcctgcatgagcgtgacaccctctttattttcgacgaagtacagctcttcccctttgcccgcagcgcggttaaacaactcgttgcggatggtcgatatgacttcatggagactggctccctgatctccattaagaagaatgtcgaaaacatcttgattccctccgaggaagaatcggtgagcatgtttcccatggattttgaggaatttctatgggccagaggagaagaactactcgccgatgcgatacggcaatcttttgcggacaggcgagcaatgtctccgctgctggacaacaaggcggaacgcctgttccgtgaatacatgctggtgggaggtatgccgcaggccgtagagcgttatctgggaacatccgatatgggcaatgtcgatcgagtgaaacgccaaattttgcacctgtacgctcaggacataaagaaatacggcggagattcgaaagaacgggtcaaacgtatcttcgatgaaattccagggcaactttccaagcatgaaaagaagttcacactgtcgtctttaggcgaaaacgcacgcgaacgtgaatatggcgatgctttcttctggttggatgaatcgttcctgatcaaccgctgcatgaatgccacggatccgcatgtgggcctgcgcctacaccaagaggactccacgatgaaatgctatatgggagacaccggcttgttagtaacgcaagtgtttgccgaccgcgcatacacgtcgaatgagttgtaccgcgatatcctgttcggcaagctggaagtgaatgaaggcatgctggtggagaatgtcgttgcgcagcagctccgggcctcaggccatcgcctgttcttctattcccgatattcccgtcaggcgaaggaccgcatggaaattgattttctccttatcggggagtattcaaatgccgccatgaaggccagggtctgccccgtggaggtcaaatcgacaaagagatacaaaacctcatcgctcgataagttcaagaataaattcgacagccgggtcggcatgcaatatgtgctgcatcctagaccaatgcgcgttgaaggagaccgcctatatctgccgttgtatatggcgcattgcttgtgatgattctagaacgtatcgcagagaatgattctcaataagaaaagcgtgaggattacgatgcctcaatcgcacatgcagagcgtcatatcagtgagatcccgccgttgcggaccatgtttgattgtgcggaaaagttcggatgcctcacacttttcttgacgggaattatttactgtgaggcattgcgcaggttggcggccatggcgcggtcgcgcaagcctttggtgagcttgagaccgagggttacggcgatcaggactatcgtgcaggcgatccacagcgttcgaccgctgaagttgctgatggtccagccaccaatcagcggcgccagcgcaatcgataccgaccacactacgttgtagacgccctggtacgtgccgcgtgccgacgcgggtgccatggcggcaaccgtagtggtggcgatagggaatgtgcccagctcacccagcgtccacagcactacggcaagcgcgaatccgccccaggaatgggccgcggcctgcaccgcatagccgatgacggttacggcgaggcccatcaccagcacgcgtgaattgcccatgcgcgagaacagtttcatcgcgggaatctgcagcaggcacaacataccgccattgatggtgagcagcaccgaatactcgcccagccctagaccaaggtccgtcatggcaatgggcaggccggaggtgctttggaagtacacaaggaagtagccgaacatcagcagggagaagccgaggaatggcgtatcagtgagcacgcgccgccaattgcgagacatggagcccttggcactggcagccggtgcggcatccgagtgattcggcccctcgacgccggcgaattccgcatgcgtaacactgcgttcgtcttcatggcgcaccgcacttggcaccgatacagtaatccccaaatgccgcacctcgcggaagaacgcaatcagcaatatcgtgacggctatcatcaccgccgcttcaacgtagaacatcagcgaatacgagatcttgaccagctggttggccacaatcggcccaatcgcgtacccaaaattaatcgcccacgattgcagtacgtacgcacgttgctgacgttcggcgggcaccacatccgcgatatacgcggcgatgaccgggctgggcagtgaggcgaacgcaccatagacaaacagggccgcgcctaaagccacggggtcagtgagcacggaaacgaccagcagggcagccgctgcgccgatttcgccgatgataatcatggattggcggccgaatctgtcggacaaggtaccgccgaacaggcagccgatgattgcgccgaagccgtacatggccacgactgtgcccaccacaccctcatcgaggcgcagcgcggaaaccaaatatatcgacaagaatgaggtcacgaagcgacccatccacagaatcagaatcgccaaccataatccccaatacagcagggacagtccgaatatcatgcgctgcttcttcactctcaataccttaccggctaccgacggcggaatagccgcgttttggcgcggggtgctgggacaatagcacctatggctatcaaaaaaggaccgaccaaggggtcgggtggcaagcatcgcaacaaactgaagggttacggccccactcccaaagccgaggaccgcgtctatcacaaggcgtataaggccaagaaagcggccgaacgtcggcagatggccgacccgcgtctggcagcccgccgtcgagtggacaagttcgcttcggcggatacttcggatctggtgtacggccgtaattccgtgctggaagcactgcgcgtaggcgtaccttcttccacgctgtacatcatgtctcgtattgaacatgacgatcgtactcgcgaaatcgtgaaaatcgctggtatgaacggcctgcacatgctggaggccgatcgtctggagatggatcgtatcgcccgctccggcaaccatcagggcgtgattctgaaggtcgatccgttccagtactcctcgctgaacgagctggccgatcgtgctgagaagaaggccaaggcaatggaggccgcgaattcggcggccgcccgtattgctgcgcgaccgctgttcattgcattggacggcgtgaccgatccgcagaacctgggcgccgtgattcgttcggcggccgcattcggtgccaatggtgtgattctgccggaacgccgttccgcttcagtgaacgccgccgcttggaaggtgtctgccggtgcggccgcgcatatgccggtggcgcgcgtggtgaacctgactaaggcacttgagggcttgaaggagcgtggatactacgttgtcggccttgacggtggcggcgataagctcgtcggcgagactggctttgaatccgatccgctcgttgtagtgctcggttcggaaggcagcggtttgggccgactggtgcgcgaaacctgcgacgcgattgccggcatcccgatcagctcgtctgttgagtcgctgaacgcttcagtggcggcgggtatcagcctgtacgcggtgtccaacgcacggcgcaaggctgcggcggagtgattgtcgcttgaggccgtaataggttgtacacacaaagaagcccctctatttgaggggcttctttgtgtgatgggctcacctacagacagtccaccggattgtccgcttaatgactccacactgccgcatccggatcgtcatcggggttgtagccgtcgtcgtccgggtcgctgtaggtggattcgtcgtcaatgacgccggaatcggcctcttcgttaagttcggcgagtgccttggaatcaaggttgtagctcggcagaacgttgtcgatgtagctggtcacggcctcgcccatcggcacgtcgtggccggccttctccgccaggaaccagcgatggtcaagcacctcatggaagaactgagcaggctcgatctgggagcgatattcgcgcggaatcatacgcacggtcggctcgaacacctcgcgcatccaatcggtggccacgatttccagatcctcgccctcacgccacgtggaggcacggtaggcgtcaaggtcgttgagcagacgacgggcctggttctcctgcacgtcaaggccggtgaggcgcagcagcttgcggttggcgtagccggcgtccaccacgcgcgggcggaccagcacacgcttgccgtcctcggcggtcttcatttccagctcgtccacgtcgaagcccagctcgttgagcttgttgacgcgctgctcgatcttccacatttcgtccgggttgaacttgtcggtgtcggtcagagcgctccacagcgagtggtagcggtcgaccaggcggttgcccacctcgatctcatccacgtcgccgggcagtagcttgccggacgccaaatccataagttcgccgatgatgttggtgcgggccaagtcgatatcgtattcgcgctggccgtcggtgagctggacttgcaggtcaccggtctcggcgtccaccaggaaggcggagaaagcgtcggcgtcgcgcaggaacaggacgttcgacagggacacatcgccccagtagaagccggccaggtgcaggcgcaccagcagcacggcgagggcgtcgatcagtcgttcggcggtgtccgggcgcaggttgcgggcgaacagcgcacggtacggcagtgagaacttcaagtgccgggtgaccagaatcgcctccagcggctccccttcacgggtgtgacggccggtgaccacggcgatcggggtcacagttggcagttcgagcttctgcagtcgacgcaggatctcgtactctcgctcggccacctggcgcgtgatctccttcatggcgtacacctcgtcgcccacgtgcacgaatcgcacgacgtggcgggagatgcctcgcggcaggttggccagcaggtcctcaggccaggtggccaagggcttgtgccagggcagcgtgaacatctttgggttcgagctggcggcggtgattttcagtgcttgcggttccgctgaatcggcgtgttcgtcttcggctttgacagacgtggccttcagcgcacgcggatccatctggggcaattcgttcaactccatgtgttcgattttacgtgtcgttcgcgatgtgtgctccttggccacgacttcggcgcgttatgtttacgggaaaacaccgtttggtctctccctcagaccgtctagaaggcaaaagaaaagccccgcagctatgcagggcttttccaacgaggccataagagaggaagagaataacctcgtttaatggttgacgaagcgattagacctcgccaagtatctattagttcagacgcagctcagtcgacggagcgaacaggtgcatcttggccgggtcgatcttgatcttgacggtcgcgccaaccttcggcagcgcacgcggattcacacgaatcgtggtgagcttgttctggtcggacatgacctgggaggcctcggcggcggagccatcggtgacgatgttgccgtagatgtagccatcggagcccagatcctcgacgttcacaaccttcagggagaaggcgttcgggtcgtcagccggggccaggccagcgtcctcaggacggaagccgaccacgatctggccgttgtcttcggcggtgagcttgttaacggcctcagccggcaggtccacggtgtcctcaccgatcttcgccttgccgttgaccaccgggtgggtgttcaggttcatcgacggggagccgatgaagccggcgacgaagacgttggccggacgatcatacagctcggtcggagcaccgacctgctgcaggataccgagcttgatgacggcgatgcgatcgcccatcgtcagggcctcggtctgatcgtgggtcacgtacagggtggtgacacccagctggcgctgcagggcagcgatctgggtacgggtctggacacggagcttggcgtccaagttggacagcggctcatccatgaggaagaccttcggctcacggacgattgcacgacccatggccacacgctgacgctgaccaccggacagagccttcggcttacgatcgaggtactcggtcaggtcgaggatctcagcggccttctcgacgcgcttgcggatctcttccttcggagtgccggcgatcttcagagcgaagcccatattgtcggccacggtcatgtgcgggtacagggcgtagttctggaacaccattgcgatgtcgcggtccttcggctgcatcgtggtgacatccttgccaccaatgaggatgcggcccttgttgacctcctccaggccggcgagcatacgaagggtcgtagacttaccacagccagaagggccaacgaggacgaggaactcgccatccttgatatcaagattcagatcatccacggagggcttatcgttgcccgggtagatacgagtgacgtggtcgaaaacgacttctgccataattactaatcctttcagaggcaggtacgtgcctcacgatccgttgtaaagggatttgttctttactgcgcttccgccctcgccaccgacgtacaactttgctttcggaaactgcaagcttcagcgtttacttttttccggttcagtgaaggttctcttcgttgagccgagaactactatacacggaccgtggaccaaggcaagtggcgtgtctgaaaatgtagttaactttatgggcgtttctgggggtgttgtgtggttcggcccatgacacgcctgtttctcgaacgtgcgaaccggcacgcccggcgtagagcaggcctgctcttcccgaactgacggattccatcagtcgccgactaatgcaacacagactcgaaggtgacgccgttgcgggcggctttgcgctcggccttgcgctcctcggcgttttcgatgcgctggatgcgcagctggcgccagtcctcgcgcatgtcgcggaaacggtcggccagcgttacgtcatcgttctcggcatcgtcatcagtaccgctgccatcggccttaccgaacgtgccatcggccaccttggtgatgcccagcttgagcagtccgagcaactcacgcaacgtttccggtactggctcatcgccctcatcggcggacttggtcaggccctcgatgcggcgacgaagcgcgtcggcgtcctcgggatcgatcttgagcccggcgatcagcgactgacgcatggtctcgtaatcgaggttggcaaagaaattcagctgttgcagcgtcatgaagcccttgagctcggggaatcggtggacgatgtattcctcgcggtcgtcggcggcgcgggtccagtcgcgggtgagctgcggatcccagttggcggtaatcgatccctcgcgcatgcggtagtggtacagcgccttgggcagacggaccacgcgcgtggcctcgccgatcacgttgcagatacgggagagatcctcgattttgcgccccaccgggaaggagaatccggtgccctgataggtggaggcgggtgccaggaaggcccagaaatagccgtcgatctcagccttgacctgctttttgatggcctcgaccggggtcaggatctgcacctcggtgaagtcgttgtggcgatagttggacagcagcggcttgttgttctcggagatggtgtcgaactggaacatcacgaggtcggcgtcatactcgcgcatggcgttcaggcagtcctccaccaacgtgggggccacggtgtcgtcggaatcggcgaagtatatgtacgcaccggtggccccggcgatgccggtgttgcgggcgtcggacaggccgccgttgggcttgtgaatcacgcgtatgcgcgggtcgcgggcggcccaggcgtcgcacatggccgggcaattgtcgggcgagccgtcgtcgaccagcagaatctccagattggcgtacgtctgcgcagcaacggacgccacgcattcgtcgaggaacttctcgaccttatacaccggaataatgatgctgaccaacggatcctgttccatatctccagcgtagcgccgccgtgcgaacgcggctggaatccggccgatatcagggacatcaggataagatgcttggagaagacgcgacaggaaggtgcggtcatgcgcgatatcagggttggagtggtcgaggacgatcccgcctcctgccaacgggtgcttgactatctcaatcagtaccgcagcgaaaccggtacggaattcacgatttccgtattcgacgatggtgagcaaatcgtcgagaaatatacgccgatgtacgacattctgtttctggacatcgagatgcagcacatggacggcatggcggcggcccggcgcatccgcgagcgcgacaacactgtggttatcgtgttcatcaccgccgccccgcagtacgcgatcaacgggtacgaagtgcaggcgctctcctatctgctcaagccggtgccgtacttcgcattccgccaggagctgaaacggtcgatcgatatggtgcgtcggcgtggcagcgagtcgctgctcatcgaggccggcgggcggcagatgcgcgtggagctggcggatgtgctgtatctcgagtcgattcggcacacgatcatcgtgcatacgttgagcggcaaactctcggtgtccggcacgctcaaggatttcgaggagcgactggccgatcaggacttcttccgttccaactcctgctatctggtgaatctgcggcatgtggtgggcgtcgaggggcaggactgcgtgatgtcgaacgaggagctgctgcgggtgagccggccgcgcaagaaggcgttcctgaccgcgctggcgaactacatgggcgcggcgtgatgagcaccaccatcaccaatgcgctgccggacatcccgcgcctgtacaccggcatctgcgaatggctggcctgcgtggtctatctgctggtcatctaccggcgcgtgccgctgcggcgcacgattgcggtcgggcttatcggactgccggcgatgatcgctatccagtatttcgacggcgtgatgcccatctggttctgggtcatcggtatgctgcttgcgttcgccggcatgtgggcgattatcttgttcggcgcgggcaccggcaagcgcgagggcatgtatattgcggcgcgcgcgttcgtgctggccgaactggtcgcctcgttgcactggcagttggtgatgttcctgaacttgggcgagaacctcgagcgggcgcagttgttctcactgctgttactggcggtcacgtacgccgtctgcttcacggtggcgtggctaatcgaacgcggcaattttgccaatgatgcgccgaccgtcgccacagcgcagctggcaatcggtacgggagccatcaccatcgtgacgttcgccatgagcaacctgagctttgtgtccaccaatacgccgttctccggcacagtgggccaggaggtgttctatatccgcacgttggtggatttctgcgggttcgcgattctgtacgcgcagcaggagcaggcgcggcgcatggaggcgagcgccgagctgacgtccatcaacgctcagctggaaagccagcatcaggagtatctggcgtccaaggagaatatcgagtcgatcgggcggcttgcgcatgatctgaagcatcagattgcggcgttgcgcgcggaggtggacccggagcatgcggcggccggcttcgagcagctggaggcttcggtggcgcaggtcagcgcccagcagcattccggcaatccggtgctggacgtgattctgaccaccaaaatgcgcacgtgcgcggatcgcggcattacgctgaccgccgtggcggacggcaagctgctggagggcatgtcgtcgatggatatcgcctcgctgttcggcaacgcgctggacaacgcgatcgaggcgaccagcaaactgcccgacccgcagcagcggctgattcggctcgcgctgtacgggcaggggcagttcacggtgattcgcgtggaaaactactacgattccgcgctcaagaaggattcgaccggcgcgctgcgcaccaccaagcgtgattcgtcgcggcacgggttcggcgtgaagtcaatccggcacatcgccatgcagtacggcggcgaagtgacgattcgcaccgaggaccactggtttgtgctgacggtgctgctgccgaggtgaatcagaagtcccagtcgtcgtcatcggtttcttcggctttgcccatcacgtaggaggagccggagccggagaagaagtcgtggttttcgtcggcgttcgggctcagggcggccaggatcgcggggttcacatcgcaaatctcagccgggaacaaagccgggtaaccgaggttcatcagcgccttgttgccgttgtagcgcaggaacttctcgacgtcatcggtcaggcccacgcgatcgtacagcgactgggtgtactccacctcgttgtcgtacagctcgttgagcaggtcgtatgtgtagtcctgcagatccaggcgctcggcatcgctcagctgggcgatgcccttctggtacttgtagccgatgtagtagccgtggacggcctcatcgcggataatcagacgaatcacgtcagcggtgttcgtcagcttggcgtgcgcggagaagtacatcggcagatagaagccggagtagaagaggaacgattcgagcagggtggaggccaccttgcgcttgtacgggttgtcgccctcgtagtagtcgagtacgatttccgccttcttctgcagaaactcgttgttctcgctccagtcgaatgcggcatcgatctgttcggtggagcacagggtggagaagatggacgagtagcttttggcgtgcacggattccatgaaggcgatgttggtgtacacggcctcctcgtgcggggtgagcgcgtccggaatcagggagacggcgccgaccgtaccctggatggtgtcaagcagggtcaggccggtgaacacgtgcatggtgagcgtgtgctcgtcctcggtcatcttctgccagctggggatgtcgttagagacggggactttttcgggcagccagaagttgccggtcaggcggtcccagacctcaaggtctttctcgtcttcgaggcggttccagttgattgcggagacgcggtcgatgagtttcagcggtttgcgcggaatggaaatcggtgccatggggattcctttgcattactcgtcttgggagttgtcggcgggcttgttttcgaactcctccggcgcggtcagccggagcagtgccttataaatcattggtgacattgcaggttccttagagtggcctctggttgttcgatgtgtgcggagaccgccgtctgaggccgaaggcgtacgaaggtacgtcgagtgccgaagaaaggcggtatacgctccatcgaacgatcagagcatgcagctgacgcagccttggacctcagtgccttccagggcttgctggcggatgcggatgtagtagagggttttgatgcccttgcgccaagcgtagatctgagccttgttgaggtcgcgggtggtggcggtgtccgggaagaacagcgtcagcgacagtccctgatccacgtgctgggtggcctcggcgtacgtgtcgacgatggccttccagccaatctcgtaggcgtccttatagtactcaaggttgtcgttggtcatgtaggcggccgggtagtacacgcgcccgatcttgccttccttgcgaatctcgatcttggaggcgatcgggtgaatcgagctcgtggaatggttgatgtacgagatcgagccggtgggcggcacggcctgcaggttctggttgtaaatgccatccttcaggatcgcgtcgcgcaacgtctcccaatcggacacggtcggaatctcgatgccgtacttggcgaacagctcacgaaccttggcggtacgcggttccagcgaacggcggccatcggtgtacttgtcaaagtaattgccttggccggccggcttggcgtagtcggacgtagcgaagctcttgaacggatggccgtgttccacggcgagcgcgtgcgaggcgcggtaggcatggtaggccacggtcatgaagtacatgtcggtgaagtcgaggccttcttcggagccgtagcgaatgccttcgcgggccaggaagccgtgcaggttcatctggccgaggccgatagcgtgaccttcctcattggcgcggcgaatcgagggcactgcgtcgatgctcgtgtgttcggccaccgaggtgagcgcgcggattgcggtttccacggtgtgcgccagtccgccgtccatggccttggcgatgttcagcgaacctaagttgcaggagatatcgcggcccacgtgcgcataggtgagatcctcgttgtatgcgctcggctcctgcacctgcaggatttcggagcacaggttagacatggtcacgcggccttcaatcgggttcgcgcggttgaccgtgtcctcaaacacgatgtatgggtagccggactcgaactgcagctccgcgatggtggtgaagaacttgcgggcgtcgatgtaggtctttcggatgcgatcgtcggccaccatctcgtcgtagtgctcgctgacggagatgtccgcgaacgacttgccgtatacgcgctccacatcgtaggggctgaacagcgccatctgcgccttctgcttggccagctcgaaggtgatgtccggaatcaccacgccgagtgccagcgacttgatgcggattttctcgtccgcgttctctcgcttggtatccaagaagcgcagaatatccgggtggtgggcgttgaggtacaccgcgcctgcgccctgacgtgcgccgagctggttggcgtaggagaaggaatcctccagcagcttcatgaccgggatcacgccgctggactggttctcgatgcgcttgatcggggcgccgagctcacgcaagttgctcagcagcagggcgacgccgccgccgcgcttggaaagctggagggccgcgttgatgccgcgcgaaatcgactccatgttgtcttcgatgcgcaccaggaagcagctgaccggctcaccgcgctgggccttgccgaggttcaggaaggtcggggtggcgggctggaatcggccggcgagcatttcgtcggcgtattcggtggcctgcgcttcgttgccggcggcgagttccaaggccactgccgcacaacgctgcgggaagttttcaaggtagagacggccgtcgaatgttttgagggcgtaggacgtatagaacttgaaagcgccgaggaaggtgccgaattcaaagccggcggactcgacgtgctcgtagaagcggtcgaggaattcagcggagtactgggcaaagacgtcggggttgtagtactggttgctgatgaggtagtcgagacgctcggcggtggagtcgaaccgcatgctgttggcggccacatggccggtcacgtattcgcgctcggcggccttgtccttatcgaactggatcttgccgtcggcgtcatagagattgagcatcgcgttgagcgcgtggtaatcgtgcgccggatcatactgttctgccgaggtgtcggtggtgttgtcgagcgacagttcggtgttggtgaggtcggtcattggagtccttattgctgttgagcgaagaagcggacgaggccgttgcggacggcagctatgtcctctggcgtgcccatgagttcgtagcggtataggtaggggacgtggcatttggcggcgatgatgtcgccggcggcacagtaggcctcgccgaagttggtgttgcctgaggcgatgacgccgcgaatccactcgcggttggctggatcgttgaggaagcgtttgacctgaatcggcactgctttcgtgaccacgccgccgccataggtgggcaccatgatgacgtacggttcgcggacgttcagcgccgggtcggcggcccgcaacgggatgcgatagacgttgatgccttcgtcctgcaaacgg

SEQ ID NO: 1390 - DNA, 4007 bp, Unknown
  R257_15m  MAG No. k141_4109
caagaagggcaccccgtacgccccgggcgccaacccggagaacggcatggactcgcacggcatgctgccgtccatgttctccgtcggcaagatcgactacaacgacgccctcgacggcatctcgctgaccaacaccatcacccccgatggcctgggccgcgatgaagccgagcgcatcggcaacctggtcggcatcctggacgcgggcaacggccacggcctctaccacgcgaacatcaacgttctgcgccgcgagaccatggaggacgccgtcgagcaccccgaaaagtacccgcacctgaccgtgcgcgtctccggctacgcggtgaacttcgtcaagctcaccaaggagcagcagctcgacgtcatctcccgtaccttccaccaaggtgccgtcgtcgactgatgaccaaccccgcgaaccgcggcaatgactaactgaaggggtggggcacggctccaccccttccttattttccacagactttcgcatcatttggaacaggaggacaactatgcccgcaacacccacgttccgcaccacgaccaggcatatgctcaaggaatcgaagacctatgcctcgcagactttgatgggcggcctttccggctttgaatccccaatcggactcgaccgacgtgaccgcctttccgccctgaaatccggcgatatcggcttcgtccactcttgggacatcaacacctccgtggatggaccgggcacccgcatgaccgtgttcatgtccggctgcccgctgcgctgccagtactgccagaacccggacacttggaagatgcgcgacggcaagcccgtctaccttgacgccatgatcaagaaggtcgatcgttacaaggacctgttcaaggccacgcatggcggtatcaccttctccggcggcgaatccatgatgcagcccgccttcgtctcgcgtgtgttccatgccgccaaggagatgggcgtgcacacctgcctcgatacgtccggcttcctcaacacgagctacaccgacgagatgctcgaggacatcgacctgtgtctgctcgacgtcaaatccggcgacgaggagacctatcacaaggtcaccggcggcaccttgcagcccaccatcgattttggccagcgactggccaaggccggcaagaagatctgggtacgatttgtgctcgtgccgggcctgaccgactccgaagagaacgtcgaaaacgtggcgaagatctgcgagtccttcggtgatgccgtcgaacacatcgacgtgctgggattccaccagcttggccgcccgaagtggcacgaactgcgcatcccatacccgctggagaaccagaagggacccaacgccgccacccgttcgcgggtggccaaccagttcaaggaccacggcttcaccgtgttttaaattgcagggccgaaccgcgcgtaaataccacgattcggcccgttcgcccataccctagagatatggccgacatctacgcatttcctatgggagcgtccaacgatggacgccccgtacgccctcagggtgtgccggatgaagtatgggcagctgtcgaatccgtcagcaccatgaagcgcatccatgacgtgcgctatcgggagattcccgtgccttccaccttggccgattatggtatcggcgtggaattcgaagcgggagagcgtgccctcggcgatgccttttccgccggtcttggcaacgatgccgaatcacgaatcgccacaggctggatcatgatgctttatgctcatgagctgcgcattgaccgggattccaactggcgttgcgtggcgttcgcgcggctgccgctggaaaccgccgaaaacgattctctgacccccggcatgtactgggatgacatgtgcgactatttcgacggcatcgagccggattcggtatccggcacagtcaccgtgacccaaaacacggcttttggttcgatggccggctccaccagcgccgggtgtgagattcgcgtctcatggaccccgcttgacgggaccggaccggacggtactatggacgccggcgcacaaatccgctcgtgggccgcattcatcagatccaccatccgttttgaggaggatgacgccagttgagtgacgtccgtgacaccgaaccccgactgctgaaagagcctcgcgggggagtgcccgatgtcacttcgacgctggatggctatcatcgagcctgcgatgcgctggccgaggcgacgggctcgctggccgccgacgccgaacgggcgtccggattccgctatggacatgaggattggctgattcagttcaaacgtgaaggtgcgggcatcgccttgcttgatcccgtcgccctgacacgggccggagctgactggaatgaattcaatgacgccgtgggcgatgctacatggattctgcatgattctctgatggacttgcccggattcgccgaaatcggactcaaacccaaggccttgttcgacacggaaatagcggcgcgattgctcggcctgcaccgcttcggtctggccgccgtcaccgaacactacctcggcatcacgctggccaaagagcattccgccgccgattggtcctaccgtccgctgccgcgcgactggcgcaactatgcggcgctcgacgtggaggtgcttatcgaactcgaaaccttgatgcgtcgtgacctgaaagccgcaggcaaggacgagtgggccgctgaagagttttctcacgctttggttgcgggccttgccccgcgcaaacctcatccgattccttggctgcgtatctcgcgcatcacccagctgagtcgtgatccgaggggcttggccatcgccaaatccctatgggaggagcgcgaccggctcgcccggcgatacgacatcgctcccagcctgttattgaccgattcgtcaatcatcgaggccgcgaccaacaagccgcacaatgccgcccaattccgcgcactccgatccctgaacgagcgtgtgcgcattcataccggcaccgagcaggacaaaatgttcgagcggtacgcgccgattcagcgtacggtcaagccgaaggtctggaagcaggccatcgaccgcgccatggccctgaagcccacccaatggcctaccatgcccgcccccgaacaggacgaaaacggtgtggtgaacgcgccccgatccatgcgactgtggcaacagcgccatccggagcgttatgaccgtctgcagcgggtacggcgtgtgatcaaccgcatcgccgaagacacccgcacgccggccgagatgatcatcaagccacagatcctacgcaacctgtgctgggtggaagacccggtggaagtggacgtcgagacgttcctgatcgagcagggcgcaagaaactggcaggtgaaactcattgcaccgtccgtaagtggcgttatcatgtagaggttgccttacggcagaactgtaagaaataacgacttttgaggagtcattagcgtgaagatcagcgttcgtaacctcgagcccaccaaggtgaagctcaccgtcactgttgaaccggaagagctcaacccgtatctggatgcggcccgtaaggaaatcgccaagcaggtgaacgttcccggcttccgtaagggccacgttcccggcaagatcatcgaccagcgcatcggtttcgccgccgtcgccggtgaggccgtgaacgacgcggtcccggagctgtactccaaggccctggatgagaagaagattcgtccgatggctcagccggagttcgacgtgcaggatgttccgcagtccgccaacgacgagaccaagctgaagttcaccgccaccgtcgagcgtcgtcctgacatcgaactgccggaaatcgacggtcttgagatcgccatctccaagccggaagtcaaggatgaggacgtcgacaagcgcctcgagaccctgcgtcagcgcttcggcaccttggtcggcgtggaccgcccggccgccaagggcgacttcgccaacatcgacctgactgctgagattgacggcgagaccgtcgactcccagga

SEQ ID NO: 1391 - DNA, 17164 bp, Unknown
  R257_15m  MAG No. k141_4351
cagcacatgctgcgaatccggggcccaccagaaaccgtcgtaacggtccatctcctcgccggccacgaactcggccagaccgattttccacgtgttttcggccggattgccgtcctcatcctccacgctcacgccgtagaccgcggtgatgcggtcacccagctcgccgccgatatcgaccagcatcaggtagctgcccgtggtgtacagcacatgctcgccatccggggcgatgcgcgggttcagcaccggcgtgtacatcgccgggtcctcatcgagccattcgccggccagttcgcgggtgtgcggctcgggtgcgccggtctcgtcattccaatcgatgtcggtcaggaacaggcggccgttgatggtgaacacgatgcgattgccgtcatcgtctgcggagtagccgacgatgccggtgccgccttcgcgcgcacgctcgcggcgggccttctcctcggccggcacgtcctcgctgtcggcggttgcgccaagcagttcgcgcggatcggccagcttggtctcatggtgttcgccggactcgtcgaaccagcttagccacagtgcggtcaccagatcctcggggccgtcggagcgcaggaacagggcccgcgagccgtcgcccacggtctgtgcggagcgcggtgcgccgcagccgaaccgcagcgtgcgcgccctgaggcgtgggaaatgcttgattgcgtcattgacatcattggtttcgctcatactcacaacctacgcgcctgtgcggtcagcggcgtgaggcttgtcctaagatgggaaccatgcaggtgacgatgatcgacgagaacaagtacgccgaaacgatggccgacgtggtgctgcccgcgctcgagcaatgccgcgaggagggctggttcgatccgtccgccgccgaacgttcggccggggtcgagccgctgtccggcattatggacaccggcggccgctcgggccagctgcactacctgtgctatgacgccgccaggttcgacgcgatccgcgaacaaggcgccaccgccgtcttccgcggggccatcgtcatcagccacggcttcaccgagttcgccgagaagtacgacgaactggtctggtacttcctgctcgccggctattcggtgtgcgtgctcgaacatcgcggccacggcaagtccgcgcgcgacgtggacgatcattgcatggtgtggattgatgactggcagcgctacgtggccgatctggccggcttcgccgaaaccatcggccagcagtacgcagccggcatgccgctgaacctgttctgccattcgatgggcggcggcattggcgcggccgtgttggagcgataccccaccctgtttgacaaagcggtgctctccgccccgatggtcgcccccgccaccggcatgccgctgggcgtggcccgtgtgctggtcggcgcgctgtgcggactcggcttcggcaagaagcgtgtgttcgggcagtcggacttcacgccggagttctcgatggaaggcaacgagggcgcttccgaggcgcgtgaacgctggtacttcaagctgcgttgcgagaaccgcgaataccagacctactgcgcggcgttcgaatgggtgcgccaggcgttgaagctcaaccgggccatactgaatccgtccgcctgcgccgaagtggagacgccggtgctgctcttccagtccggacgcgacatctgggtactcaataagccgcagaatcacttcgtccaactggtcaaggacggcggcggcgaggcgaacatcgtgcgcttccccgaatcgcgccacgaaatcttctccatgcccaacagcacctacaagccctacctcgaaaagatcctcggcttctacgacgatcccatgatcgccagcgccgcgtactgatgtagctcttcattcattgttcaccgtgcggtcaccttgtggcccggcccgctttagatggcgggagagccatggaattatgggcataatgtcttctctccgccgccgcgccgccgcggttgcggccgcggcatgtgccggcgtgctcgcgttgaccggttgcacggcgttcaataattccgatgacggcacagcggacggcaacggcacgtccgccaccacgcagaccttccagccgtccggcggcaaaccgaccgccaccctgagcattgcctccggctccgagaacaaggaagtcgccactgccatccagaaagcggccgaccaatccaacgtagccgtgacgatgcactacatgggttcgctggagattatgaacgcgctcaaggccggcggccagaattacgacgccgtctggcccgcttcttcgatgtggatttcgatgggagacgccaagcacatcgtcaaagacgcggccagcacctccaccacgccgatcgtgttcggcatcgccaaatccaaggccgtcaaactcggctgggctgacgactccggcgccaccaagcccgtctccaccgcggacatcctcgccgcggtcagcgacggcaaactcacgttctcgatgacctccgccacccagtcgaactccggcgcctccgcctacctggccttcatgacagcgctgcgtggtggcgatggcccgttgactgaagccgatctggccgacgaccaactgaagacctcggtcaccaagttgctgtccggcgtggaccgttcctccggctcgtcggactggcttaaagacatggtcgtggccaatcccgaccgcttcgacgcgatggtcaactacgaatcgctggtcatccaggccgacaaggccttggacaaggacggccacgacccgctgctcaccgtctacccgtccgacggcatcgccgtctccgattcgccgttcggctacgtggatcgcggccagaaactgaagtccgcgttcgattccttctccaaagcgctcggctccaaagacgccaaactcgagttcgagcgcgccggccgccgcaccgggctcggcggcacactcgcctacgccacggacagtcaggtcaagcagtccttccgcgccgagtggggcgtgaatacggacgcctccgcgctgaaaaccatcccgctacccgccgccacggtgatcgacagcgcgctcaacgtctaccagaccgcgctcaggaaacccagctggaccatttgggtggtcgattactccggttcgatgtctggagagggcaagaacggcgtggtcaaaggcctgaacgcggcgctcgacccggaccaggccaagaagtcgtacatcgagcccgccagcggcgacgtgaacattctcatcccgtttgaaaccgaggcccaccgcccggtcaaggccactggcacaagcaccagcgacctgctgcatgaggccgatgccaccgatgccagcggcggcaccgatatctatgaaggcctgctgagcgcgctcgacgagctgcccagcgagtcggaagcctcgcaatacaccaccgccatcgtgctcatgaccgacggccgctccaactccgatcatcaggacgaattcgaaagcgcctataagtcgcgtggccgtgatctgccgatcttctccatcatgttcggcgacgccgatcccagccagctgaagtctctcgccaccctgagcaacgccaaggtattcgacggccgctccggcgacctcgccgccgtcttccgccaagtcaagggcttcaactgatgctccaggtaatctgtggattcgttgtcggactgctgctcgccgggctcggcttcgggctggccggcggcggagtgcccggcctgatcgtggccgtggtgctggccgcactcgggtatatcgccgcctccacgctcaccgagccggagcgacgcatcggcaaaatgctggtttccgccctgcccaacggtcagaaggccgccgatacgatcgacgcggcgaacgctcgactcaactcaatcgccatgctcaccaagcaagtacgtgacccagccgtcaaagccgaagccaatgacttcatcgccgctaccaaagatttagtgcaatacgtgacccgagacacctccgcctacccgacgttgcgccactacatcaccgtgtacggcgagcagaccgagaaactgttgcgctcctacgtggacgtggaaagttccggcgcacgcgatcagatagccacggcacgaatcgaaaccatcgaggcgctgcaagtgctcgaacagaccgccgccggcgaactcagccgggcggtaagcgccaagacgttgggcattacggccgactccgacgccatccaacggttggcccgcatggatggatacgacgacgtcgcaccttcgcctgtgccttcctcggctgccgatgaaggacggcatgcacccagtcagggtccggctcaccagtcggaccagaaaacggacgcacaatgaaactctccaaatcaaaaatcatcggactgatcgccctgcttgcggtagtgggcgtggtctgcggcacgctggtgtggcggcaatcgcaaccagcgccggccgaaccgaccgaacaggtgagcatcaccggctacctgggcggcgaaaaaatcggcctgttcgatgacgccaagttcaaggcgcttgccgccaagcaaggcatcgccatcgactatcgcaaggccggatcgctggccatgatggatgcggaccggaaaggcatggattacctgttcccctcctcgcgcgcggccgtcgaatacggcaatgcgaaaggcgtcaaggccacccaaagcgacatcgtcttcaactcaccgattgtgctgtacacgcacaaggccgtggcggacgggctcgtgaacggcggacttatgaccaaggacgattcgggcgcgtaccacatggatatggccaaagccgtggacgcgatggtcgccaacacaacctgggccgacgtcggatacacggcaggctacgggcagttccgcatcgactcgaccgatccggtgaagtcgaactcaggcaacgaatacgcggcgctgctcgccacggtgctcaatggcgggcagccggccacggtcgattcggtggcgcgcgacggcaagaccatcgcctccatcttcgccaaatccggttggatggagacctcttccgaggattcgttcaaccagttcctgaccttgggcgtgggctccaagccgatgatggtgggctacgaatcacagctgcttgatttggccgtgaaccaaccggatgcgttcaagcagatcaaggacgacgtggtcatcgtctacccgacgccgaccgtgtggagcacccacacgctgatggccttggacgagaaaggcggcacactgctgaacctgttgaaaacaccggcggtgcagaagctggcgtgggagcgccacggcttccgcgcggccaacttcgccggcaccgattcgatcagccgattcggcgtgcccggcacgctcgaccagatccccgccgtatccgaactgcccaacaacgacgccatgcaacaactcatcgccaccctccaatccacgcaataactcttttgccagcccccaatcggtgtttttattaaccccctctgacgagctgagtcgtatagcaaacagcccagtgggctgtttgtagacgaaggcgagcgagagcgagcaaataagaaatcggctgtaagccgtccttaattgcgttcgggctcccggcaaagccgggtgggggagagacccaaacataactatcaaaaaaggaaccagaatgccccaaaacatcaccctcgcagacctcaccaaaagctccgcaacccccatcaccaacccgttactcaacaccaaccaagccgcccccaacaccaccctcgtccccaccgccgccgaagcccaagccgccgcggccctgaccccggaccagcagatcgccaaattgcccgaagccgaccaggccacggtcaaccagatggccggccagatcgacttcactcgcgacggcatcgaatccagctacggcaaggacgcccagcgcgccacctccaccttcgccgacgaaatcctctccgacacccgctccaaagacaccggcgaggcgggcgaactactgaacaccatgctggtcaccattgacgaggctgacctcggcggcttccgcaccattccgatcatcggccaggtggccgtcagcgtggataagctgcgccgccgctatcagaaagtcgacgcgcaaatcgacgaaatcatcgtgcgtctcgaatccgcgcaagccaaactcgtggccgacatctccatgtacgacacgatgtacacgcagaacgcccagcaataccgcgagctgaaaatgaccgtactggccggcaagaaggcgctcgccgacttcaacgccaaccagctgccagcgctggaggccgaggccgccgccagtggcgacgccatgcaggcgcaagtgctgaaggacttcaagtccaagctcgaccgttttgccaagcgactcgacgacctcgaccgcatcagcgtggtcaccttgcagaccgcgccgcagatcaaaatcatccagaacgcggaccagaccatcgtggacaagatcgacaccaccatctccaccacgattccggtgtggaagagccagatggtgatcgcgctgggcctgtccaaccagcgcaaggccctcgacctgcagaacaaggccgacgatgtgaccaacaagctgctggcgcgtaacgcggccgccctgcacaagggtgcggtggacgcggaaaaggccaaccagcgttccgtggtggaaatcgacacgctggagaagatcaacgccgaactcatcgccaccctgaaggagaccgtgcagatccagaaggaaggcaaggccaaccgcgaggccgcccaggtcaagatgcgccaaatcgagtccgacctcaaaaacgccttgctcgaaaacgcccggcagatgtgagccgttcgcgcgccagcatgctcccgttggcagaggtatatgagtacgcctactggtgtgcgtatatatgctcccgctggcgggagctggcagccgtaagactggctaagggtggtcacggcgctcggctcggccggctttaccggcaaccattccccgccgcaatttctctgtgggcataatcccggaatgattgccgcgctcgggaattgggtgaagtgaaggttaaaggttgagagcccgggagggttccggaaccggccacgataaccgctgctagccccgcgatacgggttggcggccggcatccaagccgattctctcctaatcaaggagtaccgattatggcaatgtttccggctttgatgaatgacacgatgttctcggatctgttcgatgatccgttctttgagggttggcgcaacacggacaacacgatgagtgccgcaatgcctgccaacatgatgaccaccgatgtgcgcgagaccgacaagggttacgacgtcgacatcgatatgcctggctttaagaaggaagatatcaaccttgagctcaacaacggctatctgaccgtgtccgcctcgcgttgcagcgagcatgaggacaaggctccggccgctgagggcgaggcttccgacagcaagtgcgcttgcgcgtccgactcgggcaagtggctgcgtcgcgaacgctacatgggctcctgctcgcgtagtttctacgttggcgaggacgtgaaggagtccgacatccacgccagctaccggaacggcacgctgtgcatccaggttccgaagatgcaggcccagccgcaagtcgagtccaagcaccaaatcgcgattgagggctgacgatacttgattcgtcccgaagtcccgcttcgagtagctttgccccctctgacgagggagctcccgcgaagcgggtgggggagagatacatcgtaaccaaaccatgcttcccacgccgcctgccctacgctttcaacgccgactaacctgacagacggcgggaaacatagccaatgcaaatgccgggtagggatttaccctacccggcattttgctgtttcaatcaccgaaccccaccctgttcgcgcgccggtcgtgtgccgttctgcagctgtacacatccgatgagtagaatgccttcgaaacgaggcaagagaggcggacatatggcgaacggcgcacagaacgcaagcggcacgccggccccggcggcaagccgttccggcggccacgtcgtatccgcgcgcgccacgaccatcggcctgatggcgatcctgctgtggagcttcatggccggcaccgtgcgcatcgtctccgaaaacttcggtgccacgcttggttcggccctgatctacacggtcggcggcatcctgctgctgatgttccggcgtccggccccgattcgcgagttccccaagaaatacttgattatcggcggcctgttgttcgtattttacgaatcgtcgatatccctctcgctgggtctggcctctaccgacgcatcctcggtggaagtgagcctggtcaactatctgtggcccacgatgatggtgctgctgtcggcgggcgtatcccatcgcaagcacgcggtcgtcaaggtgctgccgggcgcgattgtggccactgccggcgtggtgctggcggtcggcggtaattccgggctcgactggcatgcggccgtgcagcatatcgccgccaaccctttgccctatgcgctggcgttcgcgggcgcgctcgcttggtcggtgtacgcggtgttcacgccagccatgagtcatggggtggacggcacttcattgttcttcccctgcgtggccgtggcgttgtggattatccacttcgcgtccgggcaggggtggccggccgagccgccgagtctggtcgcatggctgtttgtgttgattgccgcggcggcgattggcggcggttatgcctgctggggctatggcattctgcatgggtctatggagcggctggctattgcgtcctatgccacgccggtgctgtccaccggggccggtgcggtgctgctgggtttggcgctgtcgctgccgttttggtgtggcgcgctgctggtggccgccggatcggtgctcaattacttggtcagtgcgcgcaaatagcggggtggctttgctcatggggcggtaataatcccatggggcggtaaaaccctcatggggcggtatcccaaaatggctttattctgccgtttcacaatttcttcaaaccgccccatgggtaaattaccgccccatgggtaaattaccgcccgatgggcagcagcaacttactcgccgcggcgctcggacgggcggcgaatcgggtcaagcagcgtattcggatcggagatgccgaacatgctgcgcccgccggtggattcagggtgcttggcgagaacggccagcgaaatcgcccccggaatcataatgatcaccgaaagggccgccaatccccagttcacgaagaatccgagccccagtacgatggccaccacaaccaccaccgtgacgataatcgtcaacagtgctcgacgtgggttggtttccctggtccaagaggtgctggctgcgggttttgctgttgaactggccgcggcgtttgtggctgttgtgccatcagccgtgccggtcgtgggccttgccgccgcgctcgtcgcggggtcagtaggggcgtcagacacgttatcggcgacattgccggtcgctgctggacgttgttcgtttgcgtgagtcatatccaccaacatattccctgcttccggctaaagctgggacaagcctgcgcaccgctaatccagcgccgacactggccttgagctgcggcgtccaggccggatgtgaacaggagctgaacggagtctggggaaaccatgagaactcgcgacaatttttgtgaaattgggtgacgctctatgaatcgcgcgctagtattgcgtgagcttacaagacgaggagcctggagcgcggggacgaaggatgaagaactccgtttggaagacgttcatggaattgtcgctggtccgcggaatcgtgccgtggaccgtgttcggactgaccgcgatcgcggcaatcatactgattgttgggctggcattgagcaagaagcgcggcccggcagcagacggcctggcgccggacggcgaatcgtcggcccaatcgcccgtcgacccagataaccagccggccaaccagcctacgaacgcggctgctacggcgtcatccgcagcttcgacggaagagacgtttatttcccatggcctgcgtacgccgcaacgtcgtcacttgcatccgctggccgccgcgctggccgccgccgtgctcgccggcgcgggcggactactggccacatggctgatgtccgacgtgttcatggtgttcggcgtatcgttgggctggccggtgatcctcaccgtcgcgggaggcttcgcgggcctcggcttcgtgctggccgccgccgtgacgttacggggggcccgtcgcgcgctggccgtcgtgctggtgccgctggtgctggcgtccaccgcgctcggcgtggactcgatctacggcgaataccagaccatcggcagtctcgtcggctatacgccataccccccgctcggttcggtcaccgtgcgcaaagcctcgatgagcgtcggcgagtggcgcgacaaggcgcgcaaggacgctctgccatccatgcccgactcgggcagggtgttcgtcgtcagcatcccgaacaccgaatccaagttcaaggcgcgcaaggcgatggtctacctgccgcccgccgcgctgtccgaccgcccgccggccctgccggtgatggagctgctcgccggtcagccgggcagtcccggtcgcctcatcgacgccggcaacatcgccgccacgatgaacgcttacgccgtcgaacatgacgggctggcgccgatcgtgctcgcacccgaccagaacggttcggccatgcacaacagcctgtgcgccgacaccacccgaggcaacgccgaaacctacctcaccaaagacgtggtgaactgggccagggcgacgctgccggtagccaagtcggcccgtatgtgggcgatgggcggattctcgcaaggcggcacctgcaccacgcagctggtgccgcgtcaccccgacatctacggtgcgatgctgccggtggatggtgagctcgagccgaccgacggcagcgtcgagacgatggtccggcgatatttcgccggcgaccgcaaggcctacgacgggcaggtgccggtcaacgccatcgccgccaccggcacggccggccaggcgctgttcgccggcgccggcaaaggggatcggaagtcggtcgccaacatgcgcaccatcgccgcggccgcgcgcgcggccggcatgcagaccaccgaactggtcgtgcccggcgccgaccatgactggcatgcggtgcaggcggtctggaaccccggtctcgactggttcggcgcgcgaaccgggctgggcgaaatgacgaaatcgttggaggaatacccacaagtggaggtgttgcaatgagcgaagaacaacagcatgggaacgcgcggccggcggccatgccgcagacgcggcggcccctgcgggacgcggaaccctcgcggacgaagcccgccacgacctcccgcgccaccaaaccgcatacggcaaggtccagccatgcggcggaaagctggcgtgaactggccggtgacgtgcggcagtgggcggacgatcaccggttggccgtcaccgccacggcgacgctggtggcgctgaatctggcggcgtggctggtggccgcgatggccggattcgcgtttccgctgcggctcagcaccagcatggccgcattcaacgccggcaaactcatctgctcgctgttcctggcgcgcggcgtcatccaactcatggtcgacgccgtcctgtggctcgtcatgctgtcgatagccgaaccatggctcggccgtgtgcgcaccgtcgtcaccgcgctcgcctgcgcggccggcggcgtgctggcgggcctgaccctgtgcgcggcggccggatggatgttccaggactccctgttcgtctcccgcatgcggttcgcattgagcccgctggtgttgccggtcggcgcgctcatggcggccagcgcgttctgcagccacctatggcgcaggcgcatccgactcgtcggctatgtggcgatcctggtcacgttgctctacagcggcaaccccagcggctactgcatactcgccgccgcgctgatcggccatgccgccggccgtgtgatggccggtccgcccgcgcacgtcgaagccgaatggcactggctgcgcagcacctccttcgaggcgcggcgcatattcgcggccatcgccgtggtactggccctggggccggtcatcgccatcacctcccataaccatgcgggcccgctcagcacgatcggcctgctcatgagcccggtttccgtcgacgatggcatgctggccaaatgcctggccggtgacacgcacggcggctgcttcctgcagttcgatctgctgcgggcctcgatgcccggcgcggtgttgcgctcgttgctgcccaccgccgtgaccctggtgctggcgtggggcctgtatcgcggacgtcggttcgcggccatctgcaccgtggccatcaacctgttcacggtggccatcgccgtcgcctactatctggtcgtgccgctgagcttcgcgccggacggcatggcctccctgctgcagcacggcgcgatcgtggcctgcgtggcgaacgtcctgcccccgctgctgttcgccatcgccctgctggcggcgatgaaacacttcccgatccgcatcggctggtgcaggctggtcggcggcatcggcgccatcgtgctggcctggctggcgtgcgccgccatatacctgatatacggcatcgcccaacccgccaccttctcgccacgcgctacggcctcgtcgctgctggccgagctgccgggacgcttcctgcccatcggcttcctgagccatatgaagctgtcgttcgtgccgcgcactccgatggcctcgatcatgtaccaaggcgtcggcctggtgttctggatcgtggtgctggccgtggtgatccactggatgggcgacgtgagcgaatcgaacgagcgagcccgggcgcgcgccgaacgtctggtcgaaaccggcggcgaatcgatgagcttcatgaccacgtgggaaggcaacagctactggctgtcccccacgggcagatcggccgtggcgtatcgcgtgctcaacggcatcgccctgacctgcaccggaccgttcggcgatccggcggaatggatggacgatctgaacggtttcgcccagcactgtgcggaacgttcgctgtcgccggtgttctacggcgtgcatcgggaacagcgcgacgcgttgctggaagccggctggaactccatcgaggtcggcagcgaaatggtggtcgacccgcgcggctggaagacgaccggcaagaaatggcaggacgtgcgcaccgccatcaacaaggccaagcgcgacggcgtgaccgacgtgcagtccaccttcctggaagcgtcgcttgacgtgcgcgagcagatcgaggacatctccgaggaatgggcgcaactcaaggcgttgccggagatgaggttcacgctcggcggcgtcgaggagctccgcgacccgcgtgtgcggctgctgtacgccgtcgacgcggacgggcgcgtgttgggcgtcaccagttggctgccgacctggcgcgaagggcgcatcgtcggctggacgttggatttcatgcgccatcgcaccgacagccccaacggcatcatggagttcctgatcgcgcgcatggccgagcggctgcgtgacgagggcgaagccgatcccacgcacgccgtggagttcatgagcctgtccgcggcgcccctggccggcatgaatcccgatcgggacaacgccggggaggacggggcaccggccagcgaaggcacgcaggtgctccagcacgcactgcagatcgtggccgactggatggaacccgcctacggcttccactcgttgttcaacttcaaacgcaaattccagcccaccgaggcgccggtctacgtgtgctacccggacccggcggcgttgccgcagatcgggctcgcggtggtgcgcgcctacgtgcccagcgtgacgcccgccgaagtggccggcatgctcagcacgctgcggtcgtgaaggtgtgcacacgggtacgcaggttagccgattcgagcctgagacggggtatctgctttcagagaggtacatttggccccttgcggacaactaactgccttcaaagaggtgcctgaactctgaaatctcgagtatgagcgttgcaatgacaacgtttgtactcggggtttcccgtattcggtgcctctttgaacgaagatagcattctgcagaagcccgaatgtacctctttgaacggagaaagcctgacaaggagggcgcggcaagcgctatctccgtttcgaggggctgatttggtctctcccggaggtctactcccgtttcgaggggctgatgccgaagtattcacgctccaaaatcggcggaatggcgttggcgcggatgggtttttacatgcggtctagcggccgaccagccccttgaaacgggagtagacctccggcgggggtcaaatcagcccctcgaaagcggttttgccggtgcagaggtgtcgttgactgcatcgcgagccgcctcgacgtagtaacgtggggcgtatgagcgaacgtaacgaacacaatgacggaaatacgcaaaccgcatacttcgccggcggctgcttctggggtctggagcgctacttccagaacgtcgacggcgtcacggacaccacggtcggctacgcgcaatccaccgtcgaatcgccgacctacgagcaggtatgcgcgggcggcaccgatgcggccgaaaccgtgaaagtcgagtttgacccggcgcaggtcagcctgcggacgctgacattgctgttcctggaggtcatcgacccgttctccgtggaccagcagggcgaggaccgcggccggcagtaccgcaccggcatgttctacacggacgagacgcagcgcgccgtgtatgtggcggctctggagcagctggtcgaccaccagccgcagcgcccggccgtactggtcgaaccgctgcgcaacttctacccggccgaggcacaccatcaggactatctggtgaacaaccccggcggctactgccatgtaccgatcgccgcaatcgcgaacgtaaaacgccgtcaaaagtacgtggaacgcatctgggatctgacgcttgagcagttcgcggtcacgcagaacgccgctaccgagcgcccgttcgtcaacgagtatgacgaggagtttgagcccggcatctacgtggacatcgtcagtggcgaaccgctgttctcgtcgcaagacaagttcgattccggctgcggctggcccgcgttctcccgcccgattgccggtgacttgctgaccgagcatgaggaccaccgcattccgggccgcgaccgcatcgaagtgcgcacgtcggacacacagattcacttgggccacgtgttcaccgacggcccggccgaccgcggtggcctgcgctactgcatgaattccgccgccctgcgcttcgtgccgcgctcgcgcatggccgaggaaggctacggcgactggattgcggttgtggatggggatgatcaggcatgagcatggagaatatcgcgggcgctcgcaagcccgccaagcgtgaggatgagcacacggtcgccggcgagcatcgcatgatgcgccgtgcggaccgcgaggtgaccgatcccgagcggatcgccgcgatcatcgccgcctgcgacatcgttgaagtggcctatgcggatgccgagggcctgactatcgtgccgctgaatttcggctttgattacgacgaggcgactggcaagctgacgctctggttccactccgcgccgcgcggccgcaagctcgacgcgattcgcgccgccgccggtggccgactgcccgtggctttcaccatgcagaccgactgcgaggtggtggcgggccgcaccacgtgcaattggggtgaggcgttcaagtcgatcgtcggcaatggcacggcgtcactggtcgaggatctggatgaatgccgccacggcttgcagacgctgatggcgcagcaggcgcatatgccgaatgtggaattcactgatgcgcaggtccgcagcgtcacggtgtggaagattgagtccgactacttcaccaccaaagtccgcaccaaacccgtgcccgcacacatgcatcagcgttagccggggatagcgcgccacctccccactggcgggaggcagcgcgcagcgccggtggatggcccacgtccggacccgatagacttgccgccatggcagcagtgacagtggtaattaccagctacaatcagggcccgttgattcacgaggcagtcgagtcgtcattggccccagacggttcgtccggaacggatcatcatcgtgaacgatgggtccgatgaccacgcatccgtcgagatgctgaacgccactctcgacgattgccggcacggggcgatggatgcgaatggtgtggccatcgacctcatcggccaggcaaacgccggtccttccgccgcgcgcaaccgtggcatcgccgccgccgaaacgccgttcgtagtggtgttggatggcgatgaccgtttgcggccggccttcattgagcgcacgttgtcgatgttgtccgccgacaaaacgatggtcgccgcatccggctggctgcagactttcggtgtcctggaatcagtggtccagccgactggtggcaatgccgccgcgttcgtgtcgcataattgctgcccggccacgtgcatgattcgccgtgtcgcgtgggagtgctgcggcggctacgacgagtcgatgcgcggcggcttcgaggactgggacttcttcctgtcgttgttggagtgcggattgacggtggaaaacgatatctgcggtgctggggttactggcggtactgagcatgtcggaggttttgggagtgcctgggatacagagaatcccgcaaaagacgcggcccatatcggcatcgcccccgagccgctgatcgagtaccgcacggccccggcctcctcaaacatgaccagcatgaccaagcgcctcgatctcatgcgcttcctgatcgccaagcaccgcgatctctacgccgcgcacatcgccgacgccatcctcggcgttgaagccatctccatgagccgcttaaccatgtgggaatcgttgatgtgcggtgaca

SEQ ID NO: 1392 - DNA, 12428 bp, Unknown
  R257_15m  MAG No. k141_4835
cctcgctgatcagccggcagccggtctcggtgccttggcccacatgcgcgccgggatgaatattgatatacacctcctgtccggcctcgcggatggcggtcagcagctcgatgtcctcggccaacgcctcgatcgcgaatgtgcgcttggcctcatccttgccggccagattgtagacgtacggcgcatggacgaccaacggcccatagccctcagccttcagacgcgcaccgaacgccgccgcgccggccgggtcgagcgccttcgaacgcttgccgtacggggaacgcgggaagaacgcgaacgcggtaccgccctcctcatgggaacgttccagcagcgcattccatccgccggccgtcgacagatgcgatccgatatacagttccatcattccaaactcctcgtgttccactcgctgttcgtgttaccgctatcatatggtaggcggcatcgagcgccgcccgcacaaccgacacgagacacaactgttcacccgaccaaaggagacccgagcatggcggcagccggcacacccaaggacgataccggccttgaacggaagatggagtcgcgtcacctgacgatgatctccctgggcggcgtgatcggcaccggcctgttcgtcagctccggctatacgattcaccaggccggtccgctgggcgcgattctcgcctatgcggtcggctccctgctcgtctattgcgtgatggtctcgctcggcgaactgtccgtggccatgccgtacgccggaagcttccatatgtacgcgaaacggttcatcggccccggcaccgcgttcaccatcgccatcctgtattggctgaactgggcggtggcgctcgcctccgaattcacggccgcagggctgttgatgcagcgatggttcccgcattcgccgtcctgggtgtggtcggccgtgttcattgtggtggtgttcgcgctcaacatcatgtccgtgcggctgtacggcgaggcggaattctggttcgcgtcaatcaaggtgttcgccatcatcgcgttcattgtgatcggcctgctggcgatcttcggcgccataccgattgccggtcatgattccgcgccgttgctgggcaacttcgtggctgacggctggttcccaagcggtatcgcgccgattttctcgactctgctgaccgtggtgttcgcgttctccggcaccgaagtggtgggcgtggcggccggcgaaaccaaggatccctcgcgtgcgattcccaaggccgtgcacaccacggtgctgcgcctggcgattttcttcatcggctcgattctggtgatggcggccttgatcccctggcatcaggccggcgtggatacgagcccgttcgtgctggtgttccagtcaatcggtatgccgttcgccggcgacatcatgaacttcgtggtgttgacggctgtgctttccgccgcgaactccggcctgtacgtgtgttcgcgcatggtgtggtcgctggccaaggagcggctgattcccgaacgttttgctaggacgaatttccgtggtgtgccggtgtgggccgtgctgttcagcatggcgggctcactgctggcgttgctgtcttccgtgatcgccgcctcgaccgtgtatctggtgttggtcgccgtgtcaggtttggcgacgctggtggtgtggttctccgtatgcgtgtgccatatccgtttccggcgcaaatgggcgcgggatgggcacagcgccgatgagctcggctatcgtgcgcccggtttcccggtgctgccgtggctggccatcgtgatgtgcatcggcgcgctggtgctcgtggtgctcgatgagacgcaacgttcgaccctgtattgcatgattccgttcgtcgcctgctgttatgcggcctattacgccctcgaacggcagctcaaacgcgaaaagaatgcctaactcggtttcgaggggctgattcggcgttcgccggaggtctacttgcgtttcaaggggctgatgcccaagtagacaaggctctgaaatggcgtcatgtcgttgccacatagctgtttatacttgcggttcggcgtttgaacagccccttgaaagccaagtagatgtccccaccggacgaaatcagcccctcgaagccgagaaaccattgatggccgattatgttgtgcccagtgacgcgcctggttctatgctcgaactggtacaataattggagtttgttttttgcaaaggggcattgttatgtacaaggtgttggtgtcgttcgcagacagctaatgcgcgttgactcgtcgcgctaagccgtggtcgccgtttgggcccacggcacttctgttgtgccatttcccacgcacttggtcgaaggctggcgatgggccctgattaagcgcgtcttcctatacgcgatcatactcggtgcaatggtgaacatcgcctgcgtagccagtatcaccggcgcgcagatcatgttggccacccgtggcgccaacgcggtcatgatcggactgctcggcacggcaatgggcgtgagtactttggtcggctcgctgttggccaacaagctagtcgatatggttcccacagggaaactgattgcgggcgcgctggcgttgttcgtggtcagccagatgccactgctattcctgcacagctacgcggccattctgatctgccagattctggccgtcctgccgttccccgcgttgaacgctggtctgctgggctttctctacggcaagacacccgacaacatgcaggggcgggcttctgccgtatttgaaaccacggtcggcatactgggcgcagcatgcccggcgatggtcggctggctgttgcaacagccagatctcggtttcacggcggtgatggccgtagccgtggtctgttccgtagcgggattggccgtatcgttggccggcccgctgcgcagcattccgaatcccgaccagtggtcggaggttttcctgtaacgccaagcagcggagcgccggtttatatcaggtcgtacggcatctgacgcttgaccagccagaagatgccgaggccgatgaacaccagcagattgaatccgccactatgccaccacgccacggcgatcagcgtcgccatgcgcgccacatagaacgccacgcgaagccacccttcgcgcggccgggtctctatcgtcatgtgcgtgaagctgccgccgaacgtgcagccgccgcgcaaccatggcaccacgccctcgaagaggatgagcgccgctaggaagaggatcgaaccggtccagtcaaacggttccatcgactgccatgagccgttggagcccgagggcaggttcgattggacgatcatgacgaacagatgcgtcggcatcacggcgaacccgatcagcgtcatgtcgatgatgaacgtgatcagccgcctcatgaagccgggtgtggtggtcggcgtcgtatcggcgacccgcgccggaatcaggcgcagcgagaacatggccagcgcgaacccgatcagcgcgccggtcgtgttccacaggagatcgtccacgtcgaacagacggtaggcgcacgggaacacgcccatgaggccggtcagctgcatcgtctccagaaacagcgacgtggcgaatgacagtactgcggtaaccggcagcggccaacgccatatgcggcccatgatgaagcccaacggcaggaagaacacgatattaaacgcgatttgcagtacggcggtgagaccatcggtacggatgtcaccgatgaactgcaatggattgagctgtggcgtcagatggtgcgcggcgcaataggctgccgcatcggccggcatcggatacagtgtgaagcacagcaggccgagcaggtacagcaccgtgccatacgccactatggccgacgacagtcggatgcgattgtcgcggtgatacagcaacgccagcaccggcacggtcagcagcatggacacaaacggccacaatgccatcgcgaatgcaaacggttcggaaaagttcttaagaaatcccatcttcaatgctccctgcttcggcccgctccgttcggtttcggaccttgactctcgacttctgattccaaggtacggaacatgacggcacgcgggtatcagccatgagagcgaaatcattgggatgaaagacgattcgtctcattcgcatggatgaggaagatgcaccagttaccattgacgccgacgaggatggcgtggtcggcgccgtgaccgcgcagatgagcgagcgtacgtcgttcatcgtgttggaccagattacttccgccaccgctatgctgtttacggcccagcgcatcgccgccgaagcccatcgccgcggcatccgcattttggttgatggcgcgcacgctcccgcccaactggccgatccggccggcggactgcagtccgattggtgggtcggcaattttcataagttcccgtgtgcgccgcgtggcacggcattgctggtgattccgcccgaaggcggtcaggatggtcaggatttgtggccactgatcgactcgtggggtttcgctgacccgttcccggagcgattcgatgagcaaggcacccaggatttatgcggtccgatcgccgcgcccgagtccctgcgcgagatcgagcgactgtggggctgtgatgccgtgcgccggtacatgtccgatcttgccgattacgcggagcgtcgggtatccgaggcggccagcgcggtcggcggcgaactgtacctgcgcctcaccgcccacgcctacgtcaccgccgacgccatagaccgcttcgccgaacaatctatcccaaccatcgtcggatggctgcgtaagcgaatcgcatgttgcgtggtgccttaactatggatgattaaggcgccaatgcaacattcatgaagccatgtctttgaacagtgagcaacgcgcggcgactatccgcgaatttcaggagaacatgagccggctgggtctgaccgccgaacggcggcagggattttggcgtcagcggcaacagagtggagcaaatcatcaccctcaagtcgggcgtgctggagtatccgtggattatccgcgcctatctgctgagcagagctgagacacagggcgtggaactcacgccgttcatggcgttacgcggaaatccgcacgattattggttcctcgacggcgactttatcgaccgaggcgaaatcgattaaaaccgattgataatcggctatttatacgcgagaggcgccgtcaatcgcctcgcgcatagaggccatcgctctccgtgcaggtggcgatgcgtgtgtagtattccgtcttgtcctcatggtcgatacgtgcgccgcaatgctgctgcaccgcaagacttgccggattggttttgtggacactcaggtaagcctccttgatgccgagctcgcgggccttggcaagcgtgagcttgagcccggcggtcgcgtagccgtgaccgcggtattcgcgggcgacaccgtagccgatgtggcccggaccgttgcgcaggaagtcggtgagccggtgacgcaggttgaagatgcccacatagtcgccctcatcgttgacgagaatgtatttggtggctggcacccagccgtccggcaggccgacgccaagcgactcatcacgcaaccctcgcatatatgcggcgaaccgttcacgattcatgccggccgctgggttctcgaatcccgtctcctccgccgggaatttcgcgaacaagtcaaacgcgcgttcctggtccgccagccatgtctcaatcagccgcattggtcacactcctcctgttgacacagcagaccacactactactgtgctcggccaacggccgcaagccttatctagagtgtgtttacagataggcagcaagtgtctgccaatgcgtttatcgcaggatataccaggttactttccccgatacacggcagcgacgccgaagacaaattgtatgatgaacaatcccagcaggaagatcagagctcctggccggtacgtgcggtagaagtcgaccatatccggctgcgccaaaggcgctgccatgatatacaccagcgcagcgaacacggcgccgagcgcggaaacaaccaagaacgcgcctacggcaaaacgcagcaggccacgatccgaggtcctccggcgcaggccacggcatcctacgaagacggataccgagaccagcaggtagaacagcagcccgtacgtgggcagcatgtcgataatcagcagatcgttcatggcatatcctttcgtggcgcaatcccattcaacctgcgcatggccaaaagcgcaacatcgtgtcaagtaatcgcatgatagcaggtttcgtccggctgcgaccgtggccacgatgagcggcatgggacatgatgacatgaccggggctgcggcgcggtcgatccgtatcgcccgtattggacaatgatccgttcgccctggatgcgatgtgcgcgatgatctcggccgtttccaaggacttttatgtaatgcgggggcacgggttcgcccgcggtggcgatcgagcattgccataacccgcataccaggccggatgcgctggtgtcggatcctaaggaatctgttggtgtcgctgcagctcattgccattcccactgaagagatgattggcgaaaacgatactcactacctattcattaggcttcagctcgtgttcgagcacaagtttcatcttgctgttatccatcaaccatgcgtgtaggtctcggtccaggatcatcgccagagcgaagcacgcctgcgtcgcattctccaatgcaatccgtcgattctcacccggcagaggtatgccgttgacaagcggctcatggtgagcgacccgattacgcagggcatgcactgtttttacgatatccagcgcgtactttctcgtccagcgttcttccactgcacgggcatactggcacccattggagaatgtcttatcgagtcctttgcgtcataaatcgttctcataatctgcacggcgctggtctggccacttcgtgtggattgttccgccgtcttccaagagattgcgccaaaatccgaatgtcaatgacgctatgagatggccatgcgtatgattttttcgctggtgcggggtgagatggttccacgcttcacgaatctggtcatcgaattgtagccctgccatataccagtcttcagtgccattctgctccagagcgaggagggagagttgccggtccatgcggttgcgcagagcgacctcgaggatggcgatgttgcccatacaggcgctggccatgtcgtgatcccacaggtacagctctagcgctgggcatgaacgtctttgagcctcataattgtaggtggcaagccgttcatcggtaatgcacgcgcgcagcgccttctcccgcggacttcctttccttggagtccgtgagaggaaatcagttgttgaatttgaccgtcggctcatggctcattatgatgtatcaagaattcccccaaagggcctctccggacggtcttcgactcagccgtgatgcactgggggtttctttttatctggataatcggggcttggttggtctgggctcttcttcaggacaatcgcatatgtttcgggagtgctcagctttcagacgaggcatccgaagaaatgccattccgaggaatcggcatcatggatgatgatcagcgtgccgccctcgttggttatctccttatgaggccggtcgtagagcgcatcgagctgtgttcccaggttcaatcgcagggtcgcatccgcttccttgattatgcggatgttctcctggggcagttggccactggagtaatccctgccgtccagaatggtgccgtcgacttgttctgggtcagcggcgaccttcacgtaccggtatccgtccccatgaaagctttcctcgtccttgctgacgattgcccgcgcatcctcggaaaatgagatcgagaacgtctgcgacagattcgaaaccggactatagccctagtatcgagtccatccgaaccatactcccgccactaccaacgccgcgatgcccaaagcgatgatcgttccggcccggccaccggcggaaggttcacctttccatacgcggtttcccatcgtcggcctcctagccttagccgtagggtctgctagatcaaagtgtgtattactgattagcgtgaggtcgccgccactacgtgagcggtcgaaaacctcatgccacccggcaaatccgagaagcggtcggagaactattcgaagccgtcagctaatccagtgttgaacgtacgcgacgacacccagaaacgctcctatacccgctccgaggaagacgaatccccatcccaaccagtcagcaaatcgattgaccggggatttcgcaaagccctccatcaccgaattcgttccagtcgagccctcccctgattcatggttgtcctcctcggcatccctacataaaacccgttagtccaattcaactatatctgtttttcgccagctacaggagagaatcgactataactgatttccatgcgcttcttcagagaagacaagtctgttggacactttgatggactaaaggccagaacacaatggcgctagatgggacaaaaggtacattggtcctatggctaagcgcaaacataccggcactgttgttattgcaatactggtcgctattctgctggcggtgggcgtttccggctggctgttctggcagtcggtacaacgggtgatcggcgaggcgcagcaggcgggcgaatatgcggctgaagcacagcaatccgtcgggcagggcgacttcaagcaggcgcttgagcagatggacagcgctggcagtcacatcgtcgcggcgcgagacgaaacccagggcatgctatggcaggccgccgaatacgtgccgtattacggttcggacgtgaaggcggtgcgcggcatgctggatgcggccgccgacgccgcgaccaacgccctgcccaaaatcgacagtgccgcgcagggcacgttggtggacttcaatatcgaagagctgctgtccggcatgaacttctccgacggcacgctttccattcccaaaatcgcttccatcaagcaggacctgtccgacgccggtgcggtcttgaagcgcgtcaagacgtcgatttatgcgctgccgcaaccccgcacggaacagatcaccgaaatggtcaaccagggcaagcaggtagtggaccaaatcgatgagactttcgacaccttgaacaccatcgtcgagaagattccgggctgacgtcggtttgttcttgtcaggcgtaccattcgggccggcgcagtttcaggaatggtcgctgtttgcgcgctgctgcggtttgtgtgagatcgatgtcggtgataatcaactgttcatggtcatcagtctcgctgacgacgttgccgtacgggtccaccaccactgattggccggcgaacgccacatcgccctccttgccgacccggttgcacatggcgatggccacctggttctgcatgacctggacgcgaatctcccacaggaacatctccaatggttcggcgctgatgttcgcagtcgggatgatgaccagatcggcaccgcgcaatgcgcatgtacggatgctttccggcatgtgacggtcgaagcagatgacgatgccgatcttgccgaacggggtctcgaacacgtggaatccgtcttgggagggcgcataatagtcgcattcatagaagcgttctgcttgcaggatgtgcaccatggtcgagatgccgctgatatggccttgttcgttgatccatagcgaagcgtcgtagttgtggccgtcctgggctttgaggtacaggttcggtgaaacgtacatgccgtgttgcagggccttgttctgtaatgcggcgatgtgacggtcggtcaggtccatgagatatcgcgacgcatcgcggttctcatactgggggaagaacggggagaactgtatctcagggaagaacaacagatcggcaccggcctcgccggcctgatcgtagtaggccaaggccctatcggcgttttcgtcgatattgtcggtcatcgccatctgcgccatcgccagtctcatatcgtttccccatctttgagccgcaaatccacccgcacatgccaattgctgcccctgacgacatacgtcaatctcatagatgctcatcacaacccgacggagacactttttccatacgccactcgccatacggcacctgatacggccatgcatcggctgcttttttcgaattactttccttaaacaagaaacgcgccgcacgctggaatatattttgagccccgagtacattaaccgttcacaagatcaatattgcaacggcgcatacggccgctaccacacgctcaaaaagcccggaaaaccgccaatccgagccggtctacaatcgccatacaacggcacgcaatcaccataggaggctgacagacatgtccaagaacacatcaaaacaaacaacattcgatttactgtcgggtttctggctttcggtcttctgtggagcagcggcctgtacgtggtggccaccgtgctgctccccagctgttcaaggacatcggcgtcgctaacccggatgcggcagtcggcacgttgaactcggtcaccgccatcgtgggcctggtttccaacctcgtgttcggcaacctctccgaccacacgcgttccaagatgggacgccgcaccccgtggatcatgccgagtgtcacgggcatgtacctgtacgcgggcatcgccggcttcggctatggcgtgtactcggccatcgaccaggcactcaacgtcgacgtgttgccgaacaaggaagaggccgacaaggacctcggcatcctcagcttggccaccacgctcggccaagcagtcggccccaccatcacctccgtggtcaagaccacgaccggcacctacacgccggcgttcgccatctccatcgtcatggccgtgtgcgctgccgtgttcgtgctgcgtatccagaaggtgaagtagccgctgcgagtgcctatctccgtttcaaggggctgattttgactttgcggaacatctacttccgtttcaaggggctgatgccaaagtagccactggttaaaaacggcggaatagtgatagaacaatgccatttctatctgcgttccgccagttgaacagccccttgaaacggaagtagacctccggcaaacgccaaatcagccccttgaagctgattttgactcagcatcatgcagcgcagctatatcctcagtgcgggtatactattccgggccgtcacgacgacgcctatggaacgcacgcatggcaaagagagaaacatgagtcagcccgacaccgacacggcggcacagtcgccgtcctcgcagcaggaaccgcagattcagacggatggccgtcaaaaccagccggaacaggtgaaccaaccagcgcaaatcagccagtccgagtcgccacatgacggcaaaggcgagcacgcgctgcataccaacctgaagcgcggcatggaatcccgccacctgcagatgatctcgttgggcggcgtgatcggcaccggcctgttcctgagctccggatacaccatccagcaggcgggccccatcggcaccattctggcgtatggcatcggcgcgctgatcgtctacctggtcatgctcacgctcggcgaactgtccgtggccatgccggtgactggctccttccatgtgtatgccgagaagttcatcggccctggcaccggcttcgtgatcgcgatccagtactggctcacatggacggtggcgctcggttccgagttcaccgccgccgggctgctcatgcagcgctggttcccgaacagtcccacatgggcgtggagcgcggcgtgcatcacactcatcttcaccctgaacgccttgtcggtgcgtttcttcgccgaggcggagttctggttcgcctccatcaaggtgttcgccatctgcgcgttcatcgtcatcggatcgctcgccatcttcggcgtcatcccggtcgccggctaccaacatgccccgatgttcggcaatctcatcaaggacggcgtcttccccaacggcttcatgccggtgttcgccacgattctgaccgtcaacttcgcgttctccggcaccgaactcatcggcgtgaccgccggtgagacgagggacccgcaaaccgccgtgccgaaagccatccacaccaccctgtggcgtctggtgctcttcttcatcggctcgatcaccgtgatgtgcgcgctgattccgtggcgcaaggccggcgtgggcgaaagcccgttcgtgctcgtgttcaacggcataggcatcccctatgcgggagacatcatgaacttcgtggtgctcacggccgtgctttccgcctcgaattccggcctgtacgcctccacgcgcatggtgtggtcgatgggcaacgaaggcatgattccgcgctggttcgccaaaacgaaccgtcgcggcgtgccgatgctcgccttgtgcgccgcg

SEQ ID NO: 1393 - DNA, 25031 bp, Unknown
  R257_15m  MAG No. k141_4971
taccatgtgcaggtcaccgggtttgtgagcaagtcgcgtacgttcggcgcggacgagttcgagctgtcccgccagttcatgtcctgctgcattctcgacatgaccccattcgggttcatagccagctccggcaaggccggcaccccgcacaatcacgactgggtcaccgtcgacgccgtcatcaagcagggcgtctacggctccgccggccacgagcgccaaggccttatactgcaggtccggtcggtcagcaaagccgcagccgccccgaccggctacttctactggcagtaaatgacgcgtctcccgaaatggaaagcactgcgctgcgccatgactcgccccatatcggcagaaatcccgcgttacaacgaaaggtacgcgggggctctgcctttatagggctcaaaactggcagaaatcccgcgcaggcctcgttgaaacgcgggatttctgccagttgattcaaatcatgtgacaacatgcgggcatctgatttgctttaataacgataatgaatatcatttgttaacagaaaggggcagaacgtcatgagcatcgagcaaaccgcgaccactcggcgcgtgacgcgaccccgactcctcatcacccaggtcctggcggaactatcccgattcgccacggcccaggaaatcaccgacatcctgcgcgagcgcggcacgcgcatcggcacggccaccgcctaccgcaatgtgcagatgatggcctcccaaggcgagctcgacgtaatccacgtcaacggcgaggccctctaccgcgagtgctcggaccagcatcaccaccatcacatcgtatgccacgaatgcgggcggaccatcgaaatcgagattcccggacttgagcagtggatcgacaaagccaccaagtagttgaagtaccagaccatcgcccacgaactggagattttcgacctgtgccccaagtgtgcggcgaagcatgccatcgaaccgcctctcagcgtcggcacctcaccaaaggatggaccactgacgacgccagacgatactggccgtcggcgctcgaccaaataatggcgcagtcccgacgctactggccttcagcatcggtgcccttccaatccttggcgcaatagcgacgatataagctccactcgcatcgttagattgccaacgcttggcgcagcaccgacgccagacacgctcatcgtcgtcgttccaccaatatttggattggtaccgccaccacctataccaggcgtcggcactcggccaacaatcggcccgttaccgacacaaaactgcatgaggtctcattgctcttaatagcagcaatgggcctgataatcactttcacccactttcgccgctgccgtctgccgccctacagtcgcagacgaacaaacgctgaaaggaacaacaatgactatcaagaccatcgatgagcatgcttacgagatcgttaccgaagagggcaccttcgccgtctgcaaggacacgctggccaagttcgacgccaccaagcacgagcacggcgtggccgcctgtggccgctgcggctgctgcttcaccggcgactgctgcgacgacaccggctgcgagcacaaccacaccgaagagtgcgggggcaaggcttgcctgcacgcttgccacgagaaccgcgaaggccacgagtgcgccttctgccaccttgccttcgacaccaacgagaagtgccacgatgagatcctggccgacctcaaggaactcaaggccgagctggctgtctgagttttaggtttccgatttctcctgcggattgactcctctcagggaggggagccagattccgacacgaaccaccgcgcttaccgtatgatgtctacgggcgcggtggttttgtttttctcgatgatggcgcagatttgctcgggcgcctccttgcagccgcgccggacccatagccagataatcgatgagacggcggagaccagaatttccagcgcataggcgcgcggaatgccgccgtagctcagctcggcacccacacgggccgcctgcccaagcagcatctgcttcaacacatccttgacccggtcatacatctgcatatcgttgcccgaacgggacagtgcgtcgaagaacgcatactcacgcttgacatagcgcaacgcctcggcttcgtgttccagtcctacaatctggtggccaacctcacggccaaggagaacgtggagctcgcctccgaaatcatgaaagacgcgcaggaaccgacccaagcgcttatcgacgtggggcttcaggaccgtatcaacaacttccccgcgcagctttcgggcggcggacagcggcgcccggccatcgcccgagcggtggccacgaacccgaagattctgctgtgcgacgagccgactggcgctctggactacaacaccggcaagcaggtgctgcagattctgcaggatcagagccgtaagaagggtacgaccgtggtcattgtgacgcacaattccgccatcgcgccgattgccgaccgcgtgatccacatgcatgacgcgcgcgtcaaatcgatcgaagtgaacgagcacccgatggatatcaaggatctggagtggtaagcagtatgaccgatctcaatgatttcaccgaaacgaccaaccttacgcccgcgaccgactccgcagccgattccgccgcaaattcagcaaacgactcctataccgcgcccggcagaacgccccacgcgcacaaggccaagcgcaaccgccgacgcaacgggtcattccataagcgcatgctatggaaagacacccgcgtcaccatggccaaatccaagggttgattcgcctccatcgtgagcctgatgacgcttggctcctttgcgctcgtaggcctgttcgtcaccggcccggacatgcaaataaccggcaccgacttctttaatcagaacaatctcgctgacataaccgtcatcagcgattatggcctgaccaaagctgacgaaaacattattcgcagcgcgtcgaagtggccaaggcgatgaggggcggggccgtctccgagtccgcgccgatctactacgaggagatgtcgaaagtggccggcaaggagaacgacaaacagtcgattaccctgatcgccactgatgacgcctacaatttcggcgactacatcaccctgcgttcgcgcaccgggcacaagccgcaggtgctcaccgaccgtggtgcgatcatctccgaacgtatggcggggatgatggacgccaaggtaggcgacacgattaccgtcaccgattcgagcggtaccgagcgcaaggtgcgcgtggacggcatcaccgaaatgcatatcgggcatttcatgttcatgacttcgggtggctataagcacgtgttcggcgaacagtaccagtcgaacgcctatatggtgaggctcaagaaccatgagacctccaatgtggagtcgcgtagcgtcaagctcataaagttggacggcgcgaagggcattgtgcagaacacgacttcgaagaaacaggtggccacaatcgtcgacttgccggatcagatcatggaagtgctgattctcgcggctgagctgctggccgtggtgatcctctacaatctgacgaatctcaacgtctccgaacgtatccgcgaactgccgaccatcaaggtgctcggcggactcggcgtgctggtctaccggcggttgaagacggtcgacatgctcggcgccctgaagtcggtggaatagcagcggaatagcaaatgggatcggctttgaagccgatcccattcaattattcgctcactgctttctgagccttctgcgctttctgctccttttggcaatcagggcatagtccgaagacctccagggtgtgggattcgacggtgaagccgtggccgtcggccactttgcgcagccaagcctcgctgggcgggtcgatttccacggttttgccgcaccgcttgcacaccaagtggtggtgatgtccgtcgtcgccgcataggcggaacagctgctggccgtccaggcggatcgtgtcggcggcaccggcatcggccaaggcgttgagctggcggtacacggtggccaagccgattttcgagccttcgtcctccagcctgcggtgcaggtcctgagcggagatgaactcctcacagtcggccaaggcggcgcgaatcgcgtccttctgcttggtctggcgttcgatatgttcaaccatcgataaggtcacgccttctttttcaggtcgtcccagcagccggtggcctcaaggtcagcaaccgtggcatcagggttgtcggtgagcacggtgatgtggcccatcttgcggtcgtggcgcacttcggccttgccgtagtcgtgcacattccactccgggtgggtggcgatcagcgcgcgcgtcggctccacatgctggccgagtacgttgaccatcacggccggcgagagcagcttgggcttgggcatgggccagccggcgatgccgcggatgtgggcgtcgaactggtccatcgagcaggcctcgatggtgtagtggccggagttgtgcgggcgcggggcgagctcgttgacgatgacctgatcgtccttggtgatgaacagttcgatggccagcgtgccagccagttcgaagcccttggccaagcgaatcgccagttcatgcgcttcgcgagccacatgttcggacacttcggcgggggcgatggtcatgtgcaggatgttgttgcggtgctcgttacgcacgatggggaaggtgacgaagtccttgccgttgccggagaccaggatcgaagcctcgaatgcgaagtcgacgaagccttccaggatgctcggcgggaagccgccaccacggtcggaacgggagcggatcttctccaagtcggcgtcggaacgcagcacgagctgaccgtggccgtcgtagccgccggacacggtcttcagcacggccggataatgaatatcatccaatgcggcgtcaagctcatcgaagttgttgacggcgcgccacggtgcggtggcggtgccgtggtcgttgatgaactgcttctcgtgcacgcggtgctgggtcacgcgcagcaggtcggtgccctgcggggtggcggtgatgccgcgcacctcgtcgatggcatcggcgtccacgttctcgaactcgtaggtgagcacgtcggactgcacggccagatcatggatggcggttttgtcatcgtattcggcggtgatctggaagtcggccacctgaccggtcgggcagttcggcgtcgggtcaagcacgccgacgcggaagcccatgtagcgggcggacaaagccatcatgcggccgagctggccgccgccgatgatgccgatggtcgatcccggcatcagcatcgaaacacgaccgcctgtttcctcagacaagctgggcattggattcagccaccttttctttcagttcgttacggtaatcctcaagcttgtcggccagttcgggctcgaaggcggagagcatctgcacggcgagcaggccggcgttggtggcaccggagttgccgacggcggtggtggccaccggaatgccgccgggcatctgcacgatggacagcagcgaatcccagccggacagggcgtgggagcgcacgggcacgccgattacgggcagtgtggtctgcgcggcgatcatgcccggcaggtgggcggcaccgccggcaccggcgataatgaccttcaggccattggcgcgggcgttgtgcgcgaactcggccatgagctcgggcgtgcggtgcgcggagatgacctgcttgtggtaggcgacgccgaactggtcgagaatatcgcaggcgcgcttcatggtctcccagtcgctggccgatcccatgaccactgcgacttcgggcttggattcatttgccattatcatttactccctagttattgagaataaggcccactgtacgcttgggcgcttacttcggcaacgccttgcggttttccccgggtccgccccgcagacccgctcccccggcccgtgaagccgggctcctacaatgcgatgacgatcttgccgaacatgtcgccggcgatcattctggcgaacgcctcgggggcggcgtccaacccgctgaccacggaatcgatcaccggatgcaggtcggcgtgctccacgaagcgcagcaatcgtgcgaaatcctcgcgcgaacccatggtgcagccctgcacgcggatgtcctggaagaacaaccgggtcagttcggcaccgggctggtcgccggtggtggcgccgcagatggcgatggtgccgccggggcgcacggatttcattgaatggctccaggtagccgcacccacggattcgatcaccgcatcgaccttgcgcggcaaccgcgcaccggtctccagcgcggcctgcgcgccgagtttcagcgctttggcgcgcttgtccgcgtcgcgtgaggtgacgaacacctccagaccggcggcatgggcgagctggatggccgcagtggacacgccgccgcccgcgccctgaatgagcacggagtcgcccggcttgatgccggcggcatcgaacaacagcgagtaggcggtcagccagctggtgccgagtgcggccgcctcagccgtggtgaggtttgcgggcttggcgaacacgttggcggacggcacggcagttttctcggccatcgtgccggggtatttctcggagaggatcgtacggcgctcgcccggggccacgcccgccccatcggtgccgacgaacgtgtacagcaccacttcgctgccggccttgagcccatgcttgccggggatgtcctcgtccagaatgcccacggcatcggtgcccaggatcatcggcgtctgttcggcggcgagacccacaccctgtagcgaccagacgtcgtgatggtttacggtcaccgcgcgcaccgaaacggtcgaccagaacgggcggacctggggttcgggctgctcgcccaccgccaacgcggcaagcggatcgtcatggttgacggtggatgcgtatacggccttcattgcgcgctccttggtatcaaaaggaattaccgcattcattgtcccacatcgcgcagcgaacgaatcacccatttacggagatgttgggggcattgattcgtcatgtggacctcggacaatgccgggcgttagcattcaacttcggaaagactagcgaagggagattcgagggtatgcgcaacgcgtcaggaaacggatttgattcaagcgattccttcgccgtctccggtgccgccgagggggccgcgcgccttcacgacatccccccgagcattaccccttcccatggcgacgactcccatctgctgagccgcattgccagcccggccgatgtcaaggcccttgctcccgacgagctcgccgaactgtgccgcgagattcgcgccacactgctggcatatggccaccaacacggcggtcatatcggctccaatctgggcatggtggaggccacggtggccctgcatcgcgtattcgactcgccgtgcgaccgtatcgtgttcgacgtgtcccaccaaagctacgtgcataagatgctcacgggccgcgccgacgcctatctggacccggaccgtttcagcgaggtgactggcttcaccaaccccgacgaaagcgaacacgaccagttcgtgctcgggcacaccggcacttcgatctccttggcctgcggcctggcgaaaacccgcgacatggaggggccgggcagcggcatcggcaatgtgatcgccgtgatcggcgacggttcgctgagttcgggcgtggcgttcgaggggctgaacaacgcggccgagcaaggcggcaacctcatcatcgtgttcaacgacaacgagatgtcgatcgccggcgatttcggcggcatgtacggtccgctcgcccgcctgcgcgcgtccggcggcaccgcccagccgaatctgttcaacgcgtttggcttggattatcggtatgtggcggccggcaacgatgtttccgctctggtcgcggctttcgaggaagtgcgcaatatcgaccatccggtggtggtccatatccacacgctgaagggcgcgggatacgacggcgccgatcacgtggccggcgcaccctcggcctcggccggtaacgtccatgagctggatccggcagtctcccccaccggcgtgcaccccaccgataacgtgaaccacagcgagccgtggcattcggatcactgcaacctgtccgatcacgaaccgcatgaaggccagtgcgaggcctcgcattggcagaatccggatgccgcaatcggcaagccggacgatccgcgcaagcattacggcaaaatggcgatggccgcgctcgaaccgcgtttcgccgccgagccaggactcgtggtcatctctcccgccacgccgggctcgaacggcatcacccatgagttccgagagcgcgcgggcgcacattatgtagacacgggcatcaccgaatcgcatgccgtggcgtacgctgccggcatcgcacgggcgggtggcacgccggtggtggccaccacggcgtccttcttccagcgcgcgtacgaccagttcttccaggagatgagcctgaaccgttcgcgagtcacggtacttgattttctgggcggcttgtccggttcggacaatacgcattccggcgcatatgacgtgacgatgttctccaatattccaggggttacgatgctggtgccgacttcggctcgcgactatctggctgatttggcatgggctaccgcgccggccggttcggcggacgcccctgctggtccggcggtgattcgggtgccgggcgaggcgattctggcggcggaacgggatgcgacgctgctgccggtgacgggtgggcagattgctgaccgcccccagtcagcttcgctgccagcctccgccagctccgccagcgggggcatatctgccgcaacagtccgcgggaccgttagcgtaacggctcagcatgccggtgcgcgtcacatgctggattggcgggtcaatcagacgggctcgcaagtcgcgatcatcggactgggcaatgcgtatccgttggcggagcagacggccgccgcattgtctgacgattatggcatcacggcaacggttatcgacccgcgccagtgcacgtcgctggattcagacgtactggagtcgttgcgtgatggacaccagcaggtcatcacccttgaagacgggcagcttgaaggcggctggggcgagaaagtgaccgcatactatgcgaatcatcatgtctcggacggcagccgtaatcctcgtgtgctgaacttcggcgcagccaaggaatttaccgaccgcgtgtcgctgggcgaactgaacgaacgttatggactaacggtggagcaggtgacagaggcgatcactcgttgtttttgatggcgtctagggccgggattttaacggctttattggccgggccgaagccgaatagcaagccgatcagcgtggaaaacagcacggcgaacaggaacagccaccacggaatcaccgaataacgggtcacattctcgccaccaactatcgcctgccagagtatggtccagatagatgttccgccaccggtaccgtcgccggagcccccgccggcaccgctgaccataccgccagacatgccgccgctcatgccgcccgcatacaacgcgccgacaacgttgatgcccagcgatatcagtccgctcagcacgcagccgatcaatccgccgaagaatccgatcgcgccggcctccgcaagaaacatgacgcgaatgtcacgaacgtagcagccaagcgccttcataatgccgatctcgcgcgtgcgctcggttacggacataaccattgtgttggcgatgccgatggccgcaaccaacagcgaaaccgcaccgataccgcccagaatcagctgaatcgcgcgcgactgttcttccaacgacttacgcatgtcttcataggaggaggtctcgtagcccaacgctttgatctgtgattcgacttcgggcacggacttgaggtcggcggccttgaccagcacttgatcataggcggtggcttttttggcggcggctggatcgactttggcggccagttccttcaacgcctgcaaatccatgaccagaccgtcggaggtggcatagcccttgttgtagtcgcccgccacaatgccggaagcccgcacatcgagggtgacgttttccgactgacccgcggcgctgccgcttgcgccgcccgcgccgccaccgccgcccgcgccgcctgtgccgccgccaccgccgccgtacatgttcatgctgtactggtcgccctgataattggtgccggtggtcagactgatttgcgtggcgagcgggtcgaagaacggatcttcgtcctgatcttcctcgcactggccggtggcctggttaaacgtgcatgaggaatactgaccgccacgtgtgctggtgcgttgttcgccgttcttcagggtgtccatgaaaccataggcgaaccattcgccggcaagcacctggtcttttttgaccggtttctcgccaccgacgagcttgtagcccatctggtcgaactgggtcatgtcgatgcccatgatctgcacgtaatcatagatgtaacggccgcccgcgcctgctctggccgtcacgttataagggaagttcatcatcggcgtcacgccggatacgccgctcatcgcgcggaaggattccacggccttgtcgtcgagcttggtatcgcccatcttggacgagccgccatcgtccatcggaccggcataaccgttggtgtacacggtgacgatggacagatcgcccatcgatttgagcatcttctcgttctgctcgttaatgccttggcccaaagagaccatgagcacaatcgagcagcagccgacgataacgcccagcacggtcagaatcgtacgggatttacgccgccataggttttgtctgcagagccgcagtatgtcgccgaatcgcatggtcgggcctttcaggccttgtgggatgagccggctggtgcgactgatgaggctggggtgactggtgtgataggagcggtgtctgccgcagcaccatccgtcacgccggtatcggtcttatcatccttgccttcggaccaatcatcccagtcctcatcaatatcgttcttcttggccttctgcttgcgcctgcgacgcacgagcagcacaatcaccacgataatgaccacggcgatcacgacgatgaccacatacaccagcaccggcaatccctgattggcgttctggtccatgttcggatcggccatgccggaatcatccatcggctgcatatcggttacgggtatggtgagcgggaattccttggtcttggtctgtccgtcggaatcctcgtacgtgactttgagcgtggtcttcagctcgcctgacgcgtgcggtgtgaaggcgtaaccaatcgtgccggtgacgccggaagccacattgcccacgtactgggttttcatcgtggcatcgaaaccttcgccctccatcgtggcctcgacgttggcgatatcgcctttgcccttgttcacatattccatcgtgaccgtgttttcctggccggcgatcacctggtcgggcactacgggatcactgatttcgaaccggtcaggctgactgatcggcacggaaatcttgacgtcagactggcttgaggagcgggcgctggcgtccacatactcgtatcggaagttcacggtcacggactgggcaccgcttttcgcggaggcgagcgcctgcatcggcacgctttgcgtcatggcgtaaccggcccacagcgcgtcgacgtagaacgtgttcgtgcctcccgcgatggcgaagctctcgccgccgtccacggtgacgaccatgttcgtcaccgccacctgccccttgttctggaaggtgaagtcgagattgaatttggatccggcggccacggaatcacctccatacgcgaagttggtgatgatgatgttgggcaccggtccggcgatcggcgcggaatcgccgtcgcttccctgagacgtactgttcgtgccgcttgtgccgtctgtgccgtcgaccgcgtacgcctgatgcggaagggagatgacggcaagtgccagtgacagcgtggagagcaacgcgacgatgatggcgatggtgtggtgggagaggtgcttcatcggtcagttccttgggttctatgggcggacggcgtggacggtgtagttggtgtggttggggcggacggcgtggacggaacagttgggcgggaaaggtcggtgttgagccgatcgctggtgatgcggccatcgagcaaggtgacaatgcggtcggcgtatgaggccatctgcggatcgtgtgtgaccagcacgatggtctggttgaagtcatgggcgaatgcgcagatcatcgtcatgacctcggttttggttttggagtcaaggttgccggtcggctcatcggcgaacaccacctcgggcttggtcacaaacgcccgggcgatgccgacgcgctgctgttggccgcccgacatctggcgcgggtaatggctgagacgatgtcccagaccgacccttgtgagcacgccacgcgccgcacgttcgcgctgttccttgggcacgccgcggaacatcagtggcattgccacgttttcgagcgcggtcagattgggcagcaggttgtacgactggaatacgaagccgagatgcttctggcggaaggccgccagctcacgctcgtcgagcctgctgacgggcacaccgccgatgcgcacgccgccgcgcgtcggtttttccatgccggccaactggttgagcagcgtggatttgccggagccggactcgccgaaaatgcagcagatctggccttgcgggatactgagattgacacggtcaagcgccaccaccgtctcatcctcgacggggtattccttgcgtaggtttcttacctcgatgattgctcgcggcacgggcccttcttccttcgttcgtcgccattggcggacgcgcgatagctggttattatccagcacatctcaagtcagagtatagccgttatgcaggagccgcaccccttaagggtgttcccggatggtgatgatgagcatgtgacttctaatctcaaggtcgacagttcaggctccagacggacccagaccggcataatactcaaaagcccctggcccccacagacgatgagggaccaagggtttattgcatcgtgaccccggacgggctcgaaccgtcgaccttgagattagaagtcacatgctctatccagctgagctacggggccaaactcgtgtaagtctagccgtaggggtgtaaaacacctcggcgtaacgtcggcttgcaccggtaccatcggcgatatggggacaacggagagcaacgtagatcacgccgcatcgggccagaccgtcgcaggcgatagtggtgagctcactttcacatacgcacagggtcgttttgccagtgaaggcagggattgggaaagcccggttgtgaccaacatggctgcatccgtctctgccgatgccggcaatgccctcgccggcagcatcatcaacaccggcgccaacaacactttgaccagcaccaccgaatcgtcgcttgccaccctgctgtccgaccaatgcccgttcgttatcaaggccaccattttcgagggcaatggcaaaaacgccattcgcgaacgtcacacattcaccggctcggtgctgcgccagctcgaccaagccagcgccctgctgaacggcatcaacgaatccggccaacacccggccatagccctgcgcgaagcattggtcaacgcactggaacatcgcgattacacgtactccggccccacactgatcaatatcttcgattcccgcttggagatcgtctcgctcggcggcctgaccgatggtttggaaatcaacgatctgctcaacggcgtatgccagccacgcaccccgcgtttggctgaattgttcgccgatttgggcctctgcgagaactgcggtaccggtattcaacgcattatggacgcctacgcgcagagcgcggtcagtccgcaactgcgcgtgggccccacttcggtggcgatggtgctgcccatcccggtatcggccgaggccgcatccttgcatcggaccgataccgatgcttccgccgcgcccagcaccactgacgaggcgcagcgcgccaaaatgtactcattccccacgattcagcgcatgacggataacgccgcagatgctttggccggcgcacgcatcatcggctgcgcgccattgcagacgctgattctcggcagcggattcggcgagcgcccggacggtgacgaccaggtcagtacccgcccgctcgatacggcgacgctggaaccgtcgcctcaaacgttggagcagttcacgctcaatttcctcgcgttccgcggcgtgaagctcagccgtaaaaccatgcagaaagcgcttggcctgaacaaggatcagatgacgcagctcttggaccagctggagttgagcggcaagatcgaacgtcatacgcacgccaagtccactacgtattcgctggcacatgcctcaggacggtaacgaccagagcggcaacaaagcggcaacgaccagagcaatacagcccaaggcacgataaagcagcagctcagttctcgaatacgcgatcgcgaatcatgcgaccggattcgtcgagcgcggtggagaaacggccgtagtcggacagaatcacgcccatgtacagcatgtccacgagcgcggtatcggccacacgcgagaaaatcgcattgccatagatcgtgtgcgagtcacgacccgtcagcaacgtcacgtcggcccagctggccagcggcgcgccgatggcattggttatggcgatggttttcgcgccatgcgatttcgccaatcgcaacgctttgaccgtatccgccgaactgcccgaatgggagaaggcgacggccacagcgccgtggggcaggtgcccggcaccgatctgctgcaggtaagcgtcggtattgagacggcatgtcagtcccaggtagccgagcttggtgaacagatccatcgccggtgtcaacgagttctccacgccgaaaatatcgatgaactccgattcggcgagtagggcgaccgccttgcgataggccttggggtccaacgcactgtgcagctcatcgatcagcgccttcgcgacataggccgctttgccgggaatctcatcttcgccatcccacggattcagatcgaatccagccaacggattgaaggtcactttgtgctcggcggacggatggcgcaacacgtaccgcagttcacggtaaccgccgaaaccgagcttgcgggcgaaacgaatcaccgtcggctggctgacgtgggcgatgtcggccatctggccgacggtcaggtcggccgcctcctcgatatgatcccgaatatactgggccacggcgcgctccgccggacgcagcgacggatacacgtggtcgatgcgctcacgtattcccaccgaggattgcacagccgcgctcctagtcgtccgtattttccattcctgtttcgagggtaccggctgtataccggcgaacagtcgacttggattgaccgcaacatgaacggtgagcgaactcttccgtttacctttccgctccattccctctacaatcaaaaccatggtgcggattagcgtgggaagccccacccatcacacaagcgggcggctgtacggcgtgttcttcgaggacatcaaccatggtgcggatggcgggctgaacgccaacatggtgaacaactacagttttgacggcgtctatctcgaccatcacacgtggcgtatggccggcgccgaacgatggcgtacacaggccgattccctgcgtttctgggatttcatcaactgttccgccgccagcctcggcagtgagatacgcgggattcacggccagcgggtgaccaccgactgccccgccccaccaattcacgcacatagccgatacgctcgcatcacgtccgatgttccttccgaaaccggccctgcatatctggaaaacctcggctataacggaggcggcgacaacgggggcgagcccgcgttctccatcgtcgccgaccacacctattccgtcagtctcgcggtacgtccggttcatgggcgggccaagctgtccgtcggcgtggtcgataggtacggtctgcctctcaccagcaccactcgattgtcgtatatcgtggacgcagatccgcttgacgatacggaagagaccggtctgaggcaggacgatggtgccaatgcgcaggattccggcgtttcgatcagtccggattcgtcggatggtgccatcgccatcggccgtgacggctggtaccggttcaacgccgacgtaaccggcctgaacaccgattacggcaagctgcgtatcaccattgacgccggcgaacgcaccacgttcgatctggatctggtgcagttcatggatgcggactattggggcgcgggcgacccgaaatggcgttacggcaagctgcgccgcgatctggtggaaaccattcaggcgttgcatccagcgtttctgcgattccccggcggctgcatcgtcgaaggtgtgacgcccggcaatgaatatcgctggaaggataccgtcggctccctggccgcgcgacgccaacagtattcgatgtggtcgttcaagatgccggatggttccagctattcgcagagctatcagatcggcttctacgagtatttctgcctgtgcgaggacctcaaggccaagccgctgcccactctgttcgccggcatcgcatgccagtcgcccggccgcgatccgcgccacatggatatcaattcggccactttccgcaacaatgtgattcaggactacctggacctcatcgaattcgcgaatggcgatccggagtccagctcgtgggccgcggtccggcgtgatatgggccatccagaaccgttcggtctggacatgatcggcgtgggcaacgaaaacttcggggctgactacgtggccaagtttgacatgatcagcgaggccattcacgaacgatacccggatatgctgtgtgtgatgagcgccggactgttccccttccagccgacgatgaaacgcagctgggaccatgcgcgagcgttggccgcaaccgattccggggcacatgattccgccaccggtgacgcgattatcgtcgacgaacattcttaccactcccccgaatggtttgcataccaagcgtcacgattcgacgcttacccgcgttgcggcgccggcgtctatttcggcgaatattcagccaacggctattttgccggccaaccgcagaccgaacagggcgcgaacacgtggaagtcggcactcggcgaggccgcgttcctgaccggttgcgagcgcaattccgacgtggtgcgcatgacctcctatgcaccgctgctcgcgcatatcccggctaaggggtgggcgcagaatcttatcgaactcaatccggcgcatgtgaaccccacggtgaattatgaggtggagcggctgttttccacgcatctgggcgacacgacatatgccgtgtccatcgagcagaccgcgtcacgccccgccaaacatctgtatgtcagtgccaccgggcatgacggggatgacgcctgccgttacatcaaaatcgtcaatacctccgattccccggtggatgtgacgttggaaatcgcgcgcggactggccgggctgggcgcctcgccatcgcgaccggtgcgtttggaggtgacgacgttaagcgccagtccgacggcgaaaaccactatcggataccgcggcgaggcttcgggggcgattgtgccggaacgtcgggcttacacattgccgtcgccgtcttcattgctggcgatgaagatcaagccgtacagcgtcacgctggtggcttcgcgctgattgacatcggccattaggccgattcctttgccgttagaatcaccctcaaggatgagggggaatcgtgcagattcagggaataataggggctatcccccatagcgaatacaagcacgggagggcaggatggaaaccacggcggccagaagaccgccggccaacgatgaaggagtatgcggtatgtttatcaatctgttccgcaggcagcgccctgcgctcgcccggctggcccgcaactccaacgcctatcgtcagccgatggttgcggccgtatcatcgtccgcagtcggcgtatccagcatcacctctgcagccaacacagccaccacagccggcgtatccacgctggatgccaccatcggccgcatccacgacatcccgcagtcggccatgagccgactgaccggctcccccaccgtatacgcgcggtagactggcccaacccacaacggcggctcagagactcggctcgatgatccagctcaaggtcagcaatacggccaaaaacagaacgttgacggcggagtagacggccagataccggcctttcttgtgcgggtattggcgcacgacgttcttgtaagaaataagcgaggccatcgaggcgatgagcgtacccatgccgcccaaattggtgccaatgatcagatcgcgccattggtcgcagaagccggagagcagaatcgtggtgggcacgttgctgatgacctggctggagccgaccgccacttccagcggatggccgccgaccagcgagcgcgccagttcgtagaattcgggcacgcgcttcatgttgccgatgaagatgaagaacatgcagaaggtgagcggcagtccccaatccacgtatttgaatacgcgccgatcggtgaacaggaacacgacgaccacgatcacgcacatcacccacaggggaatcacgtcggagacggccagtaggcagacgatgaacagcagcgagtagacgatggtgcgccagccgccataaccggcgccgtagccggtgatacgaatctcgtcgggctggtgtttgttgcgctcgggagccagcacgccggtttcgaggtcgcccaggtcgccgaccggtttgccgccaaacaccacggaaatcacgatgaccagcaacacggccgccgtgccggaatacggtgccatgatgccgaggaattccatggtcggcatgccggtcagggctttgagatacaggttgtgcgcgttgccgatcggggtgagcatactgcccacgttcgcgccaatggtcatcagcgtgaccacgaggatggtcttatcctcttgcccagccatgatgagcacggccaccgcgaacggcacaaacgtgaccagcgcaacgtcattggtgatgaacatcgcggaaaagaacgtcaaagcgacaagcgtaatgaccagtccgcgcatggtgctgaccttctccagcaatcgcgaaccgacgatgcggaacacgccgatacgctggaatccgcacaccacaatcatcaggcagatgagctggctgatggtgctggcgtgaatgtagcttttgtaatcggcgtccggcggcacaatgaaacacgaaatcagggcgagtattgcggcgacgatgagaatcgtctcatttttggctacattgatcagccagcgtcgcatccattcctccgtgaataacccaatatcgcagccgttctattctacgcgcagaccggcataaggtacgtagtcgcgttgcgctggcggacatgagtttttggaccggtgccgcacatcagccgcgctcgtttttttatttggacaaggaaacattgagtttgcatgccttccatacaatgaactgccgcgcaatgctgtgcccgtatatacggctgcatcattgtgtggcaggccagacacgaataccgtacgtggctggctcataccaatggaacatagtttcattcgaggaagaggagcgatgaagttgcgtattaccccagtattcccggtcaaacgtttcgccgccgtgtctgcacagaacgtgaagaacgtgcagttcgattacacgaacatgcccacgtacaacacgatcaccaagtagcgcgcactgccgcactgatcggcggcacttgccgcatacatgaatggccggtgtgctgcggattccttaccaagaatccgcagcacacccgccattatgatatatgccgcaatacaggggggcaatcagccctgcaccttaccgccttgcgcgctacggtatccgaagttcatcatctcgctgttgtaggcgaccacgccacggccgaccgccggcagaacgatcatgccaccatcgccatgatgcgcggcgacttcgtccaaagtggccgtcgcggcatcctcgacgttctcgccggcgaaacgcacacgatccgacacctgatgggcggcgaccaccttgatgaacgcctcgccgatgccggtgcaggacaccgccaccgtggactggttggcgaacgtgccgcaaccgggcagcggcgaatcgcctacacgaccgtgcatctggttggtgatgccgccagtggacgtgccggcggcgatattgccttcggcatcgcgcgccacggcgccgatggtgccatgcttctcccactcatcgccaccggactgagcctcggccaaagactgacgacgctgttcggtgatgaagtactcgttgctttcggtcgcgacgccccaatcggcgatctcggcatcggtcgggtccgcgaacagcacatgcttggtctgctctttgacggcacgcgccgcatcgatcgggttcttcacggtgcttacgccggtgaccgcaccgacctcgccatcgccggtcatcaggcaggcgtccatctgggcgatgccatcgctggtcagggcggcaccacggccggcgttgaattcgggagcgtcttccatgacgtggatggcggcgaccacagcctcatgcgccggtgctccggattccaacaactggtatccggcatcgagggcgcgctgcagatcaagttcggcctgggcgatgcgttcaggcgtgctgtgcttgccacgactgcccgctccggcgtgaacgacaagcgtgatgccggtttcgctgcccgccagttcagtagtcaccggcgaaatggaggatgtggtcatatcgtgtccctttctggagtcagatggatgtgctgacgccaacgtatcgttgctcccgcatgtatgatacccgttgatggccgcgaccggttccgtatttcgcatcatcggctcgcgatggcatgactcgttactgcgccacctcgccactacgccagaggcaatgcgatgccggctcgatcggccagatcacgcaacgaccacgtggtctgccccgctcgcccgacaacgctatgcgcatgccacagcgaactgatgatggcttcctcgcttattcattcgtcgaatgcacccatcgatgtgggtatgcagccatcaaaaaactcgacaaccgcaatgagccagtcacttggctacatctgtgctatcgtctcgccaatgattcgaatgccggtatcaatgtcagcagcatccgggcgcacaaagttgagacgaatatgggaatcatccatttcgtcaacgtcgaacacgctgcccggcatgaacgtaacgccttgggaacggcaggattccaatacatccagagagcgcacgccgtccggtaaggaaacccaaatatagtagccgcctgcaggcacggtccaatacacttcatccggcgcataccgctccaatgctgcgattgctgcatctcgtcgaatgcggtaagtcttgatcaaaccgcgcaaatgttcggcgatgcggccttctttaagcagttccagacagatgcgctgcgatgacgtgctcgtatgctggtcgaccatgcgccgcagagccgccagccggttaatcacatgcgggtcggccacaacccatcccgtgcgcaggcccgaagtgacggttttcgagaacgtcgacaaatacatcacgtatcccgcattttccatgcctttgagcggtatggggcgatgtgcgtcggatgatcccccgccgtaccacaaatcgccgtaagcatcgtcttccacgatcagacactgatagcgccgcgccacgtcgatgagttcgctgcgtcgttcgggcggcagcgtggtaccggtagggttttggaacgtcgggacggtgtagatgagcttgggccggaatcgcgcgcaatagccgtccaacaggtctgtacgcataccgtgctcgtccactggaacgccgatgatgcgcgcatccgccgaacggaaggtctgcaatgccgggaagaacgtggattgttcgaccagcacgcagtcgccggggttgatgaacgcgcgcacgatgaggtcgatgccctgctcggagccggagagcaccatcacgttgcggacgccgcattgtacgcctcgtgtgcgcatatgttcggcaagcagcgcacgcaactcttcgaatccctcgataggtgattccggttggccgtcgaattcccgcgattcgaacgcctcgatgctcaccttgcgcagcagatcgtccgggatatccgccgggttcggcgaaccggtggcgaagtcaataatggtgtcgccgcgctgcgcccgctcggccgaggcgatgtcatggtaggtaaaccggttggaataatcagagaacaacaccgaccatggcggacgcacgacggttggctccgggccctgaaccgagcggctttcacgaatcgtatggaccgccgcagagctgctgccctggtccgtcgtcaagaaaccagtggaggtagcacgttctacgtcgccggaagaggaggcttgcgatgttcccatttctgccgacgatcgtgttgttcgcgttatcgcattcccgaagtcactgtttgacgtgtgcggtgttcggcttgcggaggcagccggcagcacgaacgtgcctttgccgactttggaggcgataagaccttcgtccttgagctgctgatacgcctgcaacaccgtggtgcgattgacttcgagacgcgaggacagctcgcgttcgggaggcaggcggtagccctcggccatcgcgccggagacgatctgttcacgcagcccggcggccagctgccggtacatcggcaccttgctgcgtcgattcagctcaagctgcatagcagatcgtctccttgattcgtcagtcggataccagtctagcggcagacgaatcgactacagcgacaggaagagctcgtggatgcgggtatcgtccgtgagttccgggtggaaggcggtggccaggatattgccttgacgcaagcccaccacgtggccatcgacttcggtttcgaccgtggcctcagggccgaccgacaccacgtacggtccgcggataaataccagtgggaagtccgtgatacgctgcggatcatccgctgcaccaaaatcggcggtggcctggaaactaccgagctgacgaccataggcgttgcggcgtacgacggcgtcgagcgcgccaaagtagacattgtcgtcattgtcgagctttttagccagcagaatcatgccggcgcaagtgccgaataccggtttgcctgccttgatgtgggcggcgatcggctcgaacagtccggtcgaatgcaggagcttgccctgtgtagtggattcgccgccaggcagaatcacgcggtcgatggattcatcgaaatcctcggccgcgcgcagcagtttccacggcgcaccgagcttgtccagcaccgccgcatgttcggcgaatgcgccttgtacggccaggatgccggtcacgccgtgcttgacgttttcgacgtccgcggactcttctttggaaatatattcaacagctacaaccatgttgtcctctccggcttcgactcccgtcactcgccgcgagcggccatgatggtctgaatctcgtcctcgttgatgccgaccatggcttcgccgaggttttcggacagcttggcgagcagatcggcgtcctgccagttggcggtggccttgacgatggcggcggcgcgcttggccgggtcgccggacttgaagatgccggagcccacgaacacgccttcggcaccgagctccatcatcagggcggcgtcggccggggtggccacgccaccggcggcgaagttcacgacgggcagacggccgttgtcgtgcacgtacttggccaggtcgtagggcacggccagctgcttggcggcctcgtagacctcgtcgtcgcgcaaggccacgagctcgcggatctgcttgttcatggtgcgcatgtgacgcacggcctgaatcacgtcgccggtgccgggctcgcccttggtacgaatcatggcagcaccctcggcgatgcggcgcagcgcctcgcccaggttcttcgcgccgcacacgaacggcacgtcgaactggttcttgtcgatgtggtacacgtcgtcggccggggaaagcacttcggattcgtcgatgtagtcgatgtcgatggcctgcagaatgcgggcctcggcgatgtggccgatgcgcaccttggccatgaccggaatggagacagcttcctgaatgcccttgatcatggccggatcgctcatacgggagacgccgccggcggcacgaatgtcagcggggatgcgctccagcgccatcaccgcgcacgcgccggcatcctgcgcgattttcgcctgttcgggcgtggtgacgtccatgatcacgccacccttgagcatctgggccagattacggttgagttccgcacgattctgcgtcatgagtttcccttcgttcgacgctgcttggtatcgcgcttcattattgaacggattggattggccccacccaaaccagtccaatttggatggggccaatccgcaacttctgcacccatccaatccggcaaccggttgtatggccttatgcatccggcacgtattcgaagatgcgcgcaatcagtgggaggtattagccgacggtgttgccgtagatttgggcttggaggtctttacgggcggtttccatgcgggtgatctggccgaggagggttatcttctcttcgccgtcgggcagctgggccatgcggcgtttggccaaaccgatctggcgcatgaagcccatgtccaacaatcgggtgagaagctcagtggcgtagcgctgctcctccggcgtggcaggacgcagctgtactgcggcggcaccgccattcacgcca

SEQ ID NO: 1394 - DNA, 2509 bp, Unknown
  R257_15m  MAG No. k141_5103
ctgcaaatcgccgtgacattgtcattgccgtcggcatcgagcgcggactgcatcagcctatccgcggagatttgcggattgccgtacacgtccgccgcgtttgcctcgaaaatggaaaacgtcggcaagtgagagtttggctcgccatctgcgtaatgtcggtaatgacttgagtatgtacttgcgttcctgcgtaatatcgtgccaatactgctgcacatgctcttcgttgacgatattaccggagaaagccgcgtaatcggcttgtgcgcccaaggcaagcaacgtttcacaggaaatatccatctggcttgcgatggagaccgcctgttcgctgcgcgtgccttgaatgtcgagtccgctttgtcgagcgagcgccgccacggattgccatcctgccgccactcgctgttgcgcgctgccgtgttttcttgaccgtgccaatgcgatcgctttgatggcgagcaggaggccgcatacgatgagcagcgtccacagggggcttccgtagatgactacttttcttgtgattctgccgaaatgctgccagaagaggttgattgacgtttcgtcagccatgcttccgccgattgaggacttgcctttggcttgggtgtcgtcgcgcagcgggtcggtgaggggtactggaggttggcgtaccagggtttgcgggttcggcggggtgaggttctggttttcgtcggggactttggtttccttcggtgtcggatagaacgccacccagccgtagccgtccagtttgatttccacccatgcggtcacgtcgttgccggtgaattcggtgacggtgttttttccttgtttttcggtgcggttttcgctgatttcaccttcgtcgtcttttggtaggaatccaagcaccacacggctgggaagtcctaggctgcgtgccatgagcgccattgcggaggcgtattgttcactgtctccgaccatggccgttccggcgagcaactggtcgatacggtagttgccgtggccagcggtagacgggtaatcgccgcttaagccgtgcgagaaccagcctgattccttgagtttttcggcgagggcctgggctgcttcgccgcctttggattggccgccggcgatggctgtggcgagtttgtccacacagtcgggcacgtcttcggcttttggctggctgatagaggctgcgttgactttcgcgatctgtttgtcggtggggacttccggcatgatgccggtttccgtgtaggtgaggccttcggacgtgcgtgaggggtagatggccgacatggtgtcgctgttgtaatagaacgagtcggcgtttccgctattgtcgaagctcacgctggatgcggctccggccatgggcagccagtagtcgctcaggcctttgtccactgtgaatgttgcggtgaatttcttgccttcggcgttgttggcgatggaggtgccgacgcgatggtaattggaggagtctgatgacatggtggaatcggacagattccatacattgccgtcgaaacggtccatgaccgctaatcgcacgcttgaaccggcaggcaggttttcgacggtgaggagcacgtcgtccttgctgtttttgatatatgaacgcatgccgctcaacgggctggtgtaattgtatgggctgagtggtgggtcataatggtcacgcagaatggtacggtcctgaccgatgacaagacatcctccgatcgcaagcgcgacggaaactaccacgattaccacggaactgatccaacgtcccaattccagcaatttccaacgtgcgctgatccaaaacacgagcgcgagcgccattgcgatgccgacgaacatgcggtagtagccggaagatgagccgagcaatgcacagatcgcaagattggcgatgacaggaatgatggcaatcatggtgaatcggccatctttcgttactgcgaaaatgccggtgagcagcgcgaaccacaggcagatggtccatacggcaagcagacagccgtccgcggtgccggttggaggctcgactgacaggatgaatttgaaggagccaagcatctgcatccaaccttgcgtaagtgtgcgcagggttggaacgaagtgtgtgatggtggtgtcgttgaggaacagaaccgggccgacaaccagttgcgcgacggccatgaacagcatctgccaccagaggcggagcgcgggaaccgtgcctgcgagcgccacgagggatccgatggtggtggctggaatggcggcgagggcccaggatgcggctgatccgtagacgtcgatgaggttgctggctgcggtgagggtgagtagggctgctatgagcaggcttgcgtattgtgagacgcgtggtcggtgtaggtaggggagggcttgcgatttgcggtctcgtgacatccagatgacggagtgtgcggagtcggcccatgcgcctgttccggttactgttcccgtaaaggtgccggtgaaggtgccggtgaattcggtggcgtgaacggcgccggtcacgccggta

SEQ ID NO: 1395 - DNA, 14769 bp, Unknown
  R257_15m  MAG No. k141_5475
cccagcaacgacttcagctactacgatcagatgctggacaccgccatcctcctcaacgtgattccgaagcgttacgagcgtctcgccttcgataaccaggaggacacgctcttcgccatggcccgcggctaccagggcgacaagggcgacgtgaccgccctgccgatgaagaagtggttcaccaccaactaccactatctggtgcccgaagtcgagtcggccgcggagatcaagctcaactccaccaagccgttcgacgagttcaacgaggccaaggcgctgggcatcgacaccaagcccgtgttcatcggcccgtacacgttcctgaagctcgcccgcaccccggaagccaccgaactcgagctcgacaagggcctggtcaacgccgtggccgccgtctacgccgaagtgctcgacaagttcaacgaactcggcgccgcatgggtccagctcgatgagccgtacctcgtgctcgacaaggagccgggcgatgtggagctcttcaagaccctgtacaccaagatcctgtccgccaagggcaacgccaaggtgctgctcaacacctacttcggccacatcgccgacgtgtacgagaccgtcaacctgctcggcttcgacggcatcggactggacctcaacgaaggccgtgaagagaacctcgaagccgtcgccaagtatggcgtggcctccaacaccgccatcttcgccggcgtgatcaacggccgcaacatctggcgcaacaactacgccacctccctcggcctggtcgacgccctgaagcaggtcaccgccaacgtggccgtctccaccgcatcctccctgctgcacgtgccgttcagcactgaaggcgagaccggcatctcgtccgaagacctcaagcacttcgcgttcgccgtggaaaagctgaccgagctcaaggaagtcgccgctctggccgacgccaccgaggacgagaagaaggcatccgccgccctcgccgccaaccaggccctgttcgacggcacccgcgtggccgccgacccggccgtcgccgagcgcatcggcaagctgtccgacgccgactacgtgcgccagcctgcccgcgaggagcgtcaggccctgcagcgcgaggccctcggcctgccgctgctgccgaccaccaccatcggctccttcccccagaccaaggagattcgcgccgagcgcgccaagctgcgcaagggcgaggtcaccaaggaagcctacgacgagttcatcaaggcccagatcgacgccgtcatcaagaagcaggaggagatcggcctcgacgtgctggtccacggcgagttcgagcgtaacgacatggtcgaatacttcggccagaacctcaacggcttcctgttcaccaagaacgcttgggttcagtcctacggcacccgttgcgtcaagcctccgatcgtctggggtgacgtgtcccgcgccaacccgatcaccgtggaatggtctgcgtacgcccagtccaagaccgaccacgtgatgaagggcatgctcaccggcccggtgaccatcctcaactggtcctggccgcgcgaggacatcacccacgaggagcagaccaagcagctcgccctcgccatccgcgacgaagtgctcgatctcgaggccgccggcatcaaggtcatccagatcgatgaggccgccctgcgtgagaagctgccgctgcgcaagtccgactggcacgtcaagtacctcgactgggccgttccggccttccgtctggtgcactccgccgtcaagccgaccacccagatccacacccacatgtgctactccgagttcaacgacatcatccgcgacatcgacgcgatggatgccgacgtgatctccttcgaagcctcccgtggcgatctggtggtgctcgacgccattcatgacgcgcacttcgagaccgaggccggcccgggcgtctacgacatccactccccgcgtattccttccgagaaggagatcgaggatcgtatctacgagatccttgacaagatggacgtcaagaaggtgtggatcaaccccgactgcggtctgaagacccgtggtaacgccgagacctggccgagcctggagaacctggtcgccgccgccaaggccgtgcgcgccaagctcgacaagtagcggaaatcaccgagctccctctgtatgagggagctcgggtttatgtaaggaaatcagcatgcattccccgatgttcacccttgaggtctttcccccgaagcgcaacgctcccgtggacaccatctatgacaccctcgacggactcgaagggctgaaccccgacttcatctccgtgacctacggtcacggcacccattccgaccgcaccgccaccgcgcgcattgctcatacgatcagcaaggagtacggcattcccgcagtcgcgcatctgaccgcgttgtattccgacaaggcgaaaatcgacgaggccctcgacatgttcgagcaggccggcgtgagcgccgtactcgcattgcgcggcgactacatcgacggcgagcagctggtaggcgagttcaaccacgccagcgacctcgtgtcatacatccgctccgtgaagccgggcctcaaagtgttcggcgcctgctacccggaaggccactaccaggctgactcgctggaccaggacatcgaaaaccttaagatcaaggtcgatgccggcgtcactcacctgatctcccaactgttctacgacaacgaggacttctatcgcttcctcgacaaggcgcgcgccgccggcatcaccgtgccgatcgaggcgggcatcatgccggtgcgtggtgccaagtccgtgcgtcgcatggccgaacgcaacgcctcgcgtatcccggacaagctcaacaccctgctgaacaagtgggaggacgacatccagtccctgcgtgccgccggcatcctctacgcttccgagcagatcgccgacctcgtggcccacggcgtggacggcgtccacctgtattcgatgaaccaccccgccaccacgcgccgtatctggcgcaatacggaaccgttgttcctcggtacgcaaggttgacgcatatcgcggcgcggcgcatctccatgcgtcgcgccgcacgttaatctgctggcgaaacccagagttcccccagcggccgatggatatcatgaacgtgcaagccaaccaaagcgatggaaggaagtccgttatgtgcactggtgtccgtttctccgatgatgagggcaacacctatttcggccgtaatctcgactggagtttctcatatggggagaccatcctggtcactccgcgcggctaccactatgacacggtgttcggtgcgggcggcaaggcgaagccgaacgcggtgatcggcgtgggcgtggtcatggccgataggccgatgtatttcgactgcgccaatgaacatggtctggccatcgccggcttgaatttccccggctacgcctcgttcgtccacgaaccggtcgaaggcacggaaaacgtcgccacgttcgaatttccgctgtgggtggcgcgtaatttcgactccgtcgacgaggtcgagaaggcgctcaggaacgtgacgctcgtctcccagatcgtgccgggacagcaggagtctctgctgcactggttcatcggcgacggcaagcgcagcatcgtcgtcgagcagatggccgatggcatgcacgtgcatcatgatgacgttgatgtgctgaccaatcagccgacgttcgacttccatatggaaaatctgcgcaactacatgtgcgtcagcaacgagatggccgaaccgacttcatggggcaaggcctccttgaccgcctggggtgcgggtgtgggcatgcatggcatcccgggcgacgtgagttccccgtcgcgcttcgttcgtgtggcctacaccaacgcgcattacccgcagcagaacgatgaagccgccaatgtgtctcgcctgttccacaccctcggctccgtgcagatggtggacggcatggcgaagatgggcgacggccagttcgaacgcacgctgttcaccagcggatattcgtccaagaccaacacctattacatgaacacctatgatgaccccgccatccgttcctacgccatggccgattacgatatggattcctcggagctcatcagcgtcgcccgatgactccttcccggctcatgccccattcggagggcatgagcgtatatagtggaatcttatggaatcgtcgatgttcaaacccagctccatggatctcatcagggcaggtctgcaagacctcgacaaggcccgcaccttgttcgaccagctcaagacggacgacattcccgatgagcgatgcgccgaactgctgagcatgctggcccacgcctgcgaccccgatatggcattgagcaatttcgtggatatcgtcaacgcgatgcaatccagccagcgcgatctgaaacacgtcatccccgacaacgacgccctgaagcgtctggtcacggtgctcggcgtctccgacgcgatgggcaagttcatgcgcttcaagccgcagcttgtggaggccgcagcagtcgacaactgcaacagccatctgttcaatcacgcgcaacgccgtgcacgtctgctcaaggcggtcggcgcggacccggacgaaccggccatgcccgtcgcctccaaggatctggccgaagcggccacggccttgcgttccagctaccggaaccaactggccgccatcatcgcccaggatgccgtggcggacgacccggcctccatccaaccgaccatcagccgcgaactgtccgacctcgcggacgcggcgctcgaaggcgcgctggccatcgcccgccacgaaaccgagggcagcgagcacgtgcgcttcaccatcatcggcatgggcaaactcggcgcacaggaactgaactacgtctccgacgtggacctcatctacgtggtcgaaccggccgacaaggacgtggaccatcagacgctgatccgcgtgggcaccaagatgggcaccatgctgcagcgtgtctgccagtccgccatcatgggcgtggccgagcagccgctgtggcagatcgacggcggcctgcgcccggaaggcaaggacggcgcgctggtgcgcgtgctctcctcgcacaagaactactacgagcagtgggccgagaactgggagttccaggcgttgctcaaggcccgcccggtggctggcgaccccgacctcggccgggcctacatggatatgactcggccgttcgtgtggagcgcgtccaagcgtaagaacttcgtctacgactgccagaaaatgcgcaagcgcgtggaagatctgattcccgcacctctgaaggatcgcgaaatcaagctcggccgcggtggtctgcgcgatgtggaattcaccgtgcagatgcttcagcttgtgcacggccgtaccgatgaatcgctgcgcaccagcaacacgctcgactcgctgcagcgcctgtccgaaggcggctacgtttcgcgcaaacaggccgtgcgcatgtcccaggactaccgcttcgagcgcgtgatggagcatcgccagcagatctggtccctgaagcgcacgcacctgttcccggacctcggccgggcctcggtcggaggcctcgaaaagaagcgcgacatcgacgtggatgagctcaaccagaaccaggagctgcgtcgcctcgcccgcgcattcggcctgcacccggaagaactcgtcgacaaatacgacgacacccgtcgcgaagtacgccacctgcacctcgacatctactatcgcccgatgctgccggtcaacgcccagatggagaacgaccagatcgtgctgagcgtcgaggccgcacaggaacgattcgaatccatcggcttcggcgacccggacgccgccatccgccacgtgcaggcgctcactgccggcgtggggcgcgcggccaaaatcaaccgcatcatcctgcccgccgtcttgcagtggctgggcgagggccagaacccggacatgggcctgctcaactggcgcaagctggaggagaacttcggcaccgaatccggctacctcggcttcctgcgcgactccacctccgctgcccagcgtctgtgccacatcctgtccaactcgcgattcctgggcgacgcgctcaacaagtcggtcgaatcgatcagttggctcggtgatgacggcaatctgcaggcccgcacgcgcgaggcattggatgtgcagaccggctcggcgctggaacgtttcggctcgaacatcaacgagttcgccacctccatgcgcgccatgcgccgccacgaaatcgaacgcatcggcctgtcttggatgagcggtgtgatcagcgactccgacagtctcaaggccatgaccgacgtgtatgacgcgatcatcgacgcctcactgacctgggccgtgcgccaccagatcgccgcgttcggcgtcgaaaccgcgccggccggcatcaccgtcatcgccatgggccgttacggcgggcgcgaagtgaacttcagctccgatgcggatgccattctcatctaccgtccggccgacgatgccgacgacggccaagccaacgccttcgccaagaaggtcgtggaagacctgcgcaacatcctgcaaggcccgacgacgctggaacccaagatcgaactcgacctggacctgcgcccggaaggcaagaacggcccgctcgtgcgctcctacgcctcctgcgaggaatactacgaatcctgggcctcgacctgggagcgccaggcgctgctgcgcgcccggtacgcggccggcgacgccgaactggcgcgggacttcctgatcaacatcgccgacccgttgcgctacccgaccacggagctgaccgaggccgaattgcagaacatccgcaagctcaaggcccgtatggaggccgagcgtctgccgcgcggcgtgcgtcgagaacgtcatctgaagctcggcaagggcggtctgtctgacgtggaatggaccgtgcaactcatgcagctccagcacgccggcgatatcaaagatctgcgcgtcaacggcacattggaggcattggacgtgctggaggccaagaagctcatcagcgctatcgatgcgattcagctgcgcaaggcatggacgttgtgcaccgcggcccgcaacggcaactatctgtggagcgggcgcgccaaccaggccgatattctgcctgatgacatctagtcgctgggcggcatcgccgtctacctcggctacggcgcccaccgcggccagcatttcgagaacgacctgctggccgtgatgcgcaaatgccgtgacgtatgccagcgcctgttctacgggcaggccgaagacgaggcgactgcggcaaccaccgccacggcctccgccgcaacgcagcagccgcaaaccgcgcctcgcccgcgtatgcacgtgatcgcaccgcgactggagcggaaccgacgccgcgcgcagcgatagacctttcttgtattgcgttcactacgttcattaggtcgattcatcgttcattaggtcggtccgccgccgcataccttgttggaatggcggcattccaacaacagatacgagggtgcagtgacctaatgaacgtcaaatcgacctaatgaatgagctctggcgttccaaagcagatatcagctatacagacacagcatattcgttggattttcaggtgaacactcggtgaatgcggctgtccgaaaaatggcgtaagttatattaggtcacacaagggtggccacctgaaaaccacgagcgaaaaggtgagccttgtctgaagaaacgccaatggtcggcaaaagcgtcgtaacgctggacggcctgtctacaaaccagattctcgacctgctgcataaggccgaatacatcgattcccaccgcaaagaggttgcccatacctgcgatgggcgagtgctggccacgctgttctacgagccctccacccgtacgcgcctgagctttgagacggcaatgctgcgtctcggcggcaaggtcatcggattcgccggcgcgcagctggcctccgtgaccaagggcgaatccatcgccgacacgttgaagaccgtgtccaactacgtggacgtggtcgccatccgtcacccgaaggagggtgccgcgctggtggcctcccgcgccgcatccgtgccggtgatcaacgccggcgacggcggccacatgcatcccacgcagacgctggccgacctggccacgctgcagtcgcgcttcggccgcatcaccgaccggaccgtgggactgtgcggcgatttgaccttcggccgcaccgtgcactccctgatcgagaccttgtgccgcttcggcaacgtgcgcttcgtgcttatcagcccggacgagctcaagaccccgcagtacgtgatcgaccgcatcaacgccaccgacaactgctcctacgtggaagtgcgcgacctggcctccgtgatcggcgacctcgacgtgctgtacatgacccgcgtgcagaaggaacgcttcttcaacgaagacgactacctgcgcctgcgcgacacctacattctcgacgaagaaaagctgcagctcgccaagccatccatggccgtacttcacccgctgccgcgcgtcaacgaaatctccgtggacgtggacgatgacccgcgtgccgcctacttcgaacaggtcaagaacggcatgctcgtgcgcatggccctcgaaagcaccgtggtgggcgacgaactacccggatacgaaccgctcaaccccaaggaggttcaggcctgatggaagtcaccagcattcagaacggcatcatcatcgaccatgtgccggccggaacctcgctgaaggttctcgaatacctgaaaatcgacccggccaaaaccaagcttgcgctcatcatgaacgccaactccaagcgttacggctccaaggacatcatcaaaatcgaggatgacaaggacatcgacctcgacgtgctcggcttcgtggcctgccaggccaccgtagacgtggtgcgcggcggcaagatcgtcgaaaagaagcagccgaacctgcccgagcacatcgtcggcgtgatctcctgcgtgaacccgcgctgcgtgaccaccaccgagcccggcatcaagcagatgttccacctcgtgcactccgaacggctcgaataccgctgcgactactgcgacgaggaagccaaactgtgagcatcaccctacgcaacatcaaggtctggaacaccggcgaagtcatcgacctcgtggtgcccgggaccgctgccgcctacttcgccgacacctccgccgtggctgacggtgccgatatcgacgccaccggactgaccgtggcccccggtttcgaagacccgcacgtccacttccgcgatcccggccagacctacaaggaatctatggtctccggctgccgcgcgtccgcatccggcggatacacgaacgtgctcatcatgccgaacacgttgccggcactggatgggcagaccgtgtctgacctggaagcggccggtgcgaaagaggttctggatgccggcttcgacaacgtcatcgacttcctgcagcagtacgatactgcgcacgatgttcaattgccggttcgttacgatctgtgcgtgtgcgcgtccaaggatcgcgccggtcatgaggcaagcgacgttgccgactggctcaggtacgtgcccggattcgaggacgacgccaagacgccggccatgctcacgcaccccatcaccgcaattagcgacgacggttccgctgtgacgccggagatcctggaccaggtgctggagaacgtcaaggcctccgacctgtacctaatcgagcattgcgagcatcacgatacaggtgccgtgaacgaaggcccggtctcgcgcgaacttggcgtgcccggcattccggaagacaccgagctcaagatcgtggcccgcgatatagaagcggcccgccgcactggtgtccacgtacacttccagcatgtgagcactgccatctcgttcgaggcgattcgcaaggccaaggccgaaggattgccaatcacctgcgagaccgcgccgcactatctggcgttgagcgacgaggcgctgctcaagtacggcacgctcgccaagatgaatccgccgctgcgctccgaagcggaccgcaaagccaccatcgcggccatcgccgacggcaccgtggatctgctggccaccgaccatgcgccgcacacgttggcagagaaggaactcggcttccttgaggcgcccaacggcatcatcggactggaatgcgcgtacggcgtgtgccacaaggtgctcgtcgacggcggcttcatttccgatgagcgtctgatcgagctcatgtccgtgggacccgccgaactcatggggcatgtgccaaccgacgtggccgcgctggtcgaggactacgccgaacccgcgcccactggggatgatccggatggcgtgattgcgggggagagcgacgctcagccgcagcgtgaaggcgtcaaccgactgctcgacctgagccgcgtggatgacgccgacaatgtcgacctcgtggtgctcaacaccgctgaggaatggaccgtggaccccgaacagttccactccaaggctcgtaacaccccgttcggcggctggcaggtcaccggacgccccctcgccacgatcatcggctcccagctgatgttcagccgtctgtagataacacaaggagcagcatggatcgcctgatcgaagcgattgacaacactcagaaccccagcgtcgtgggccttgaccccaccgaggcgctggtgccgccgcaggtcgtggcgagctttgccgacgaggtgcgtgactcggtcgaatccccggaggaaatcgaatccgcgcagctggccgtcgcctacttcgaatacaaccgcacgatcatcgacgccatcgccgacatcgtgcccgccgtcaaaccgcagatcgccatgtacgaggcgctcggccccgccggcgtggacatctacacgatgacctgtgaatacgcggcccagcagggcctctacgtgctcggcgacatcaaacgcggcgacatcggctccactgcagccgcctacgcccaccacctgaacggcgtgggcgacttcgacccgtggcatgaggatgcggtgaccgtcaacccgtatctcggcaccgacggcatcaccccgttcgtcgaggccgccgccgaagccgacaaggacatcttcgtgctcgtgcgcacctccaacccgtcctccagcgaactgcagatgctcgacctggccgacggcacgaaggtctacgagcatgtggccgatctcgtggaaggctggggcgccgagaccatcggcagccacggctactcccgcgtgggtgcggtggtcggtgccacccaccccgaggaaggcaaggcgttgcgcgcgcgcatgccgcacacgttcttcctcgtgccgggctacggtgcgcagggcggcacggccgcggacgtggccggcatgttcgacaagcagggcagcggcgccatcgtcaactcgtcgcgcggcatcatcggcgcatggaagaagagcggcaagtactccgaatccatgaccgccgacgaggcgctggaccttgtggcgagcagcgcgcgccaggcggcgctcgacatgcgcgataatctgcgggttgccgtatataggtaggtagattgtccggctgtgggctatacgtgagtgtgggctggaaaccggagccgagtgtgtttaactacccctcagtcaacctgcggttgacagctcccctgatagggggggagcttgatgtgctgaataggaatgaaatgacaactttcacccccacccatgatgtggttgcggaggcgactgcggccggattcttcccgccgcgccacaacgtcgaaatcacgcaggttacggaactgaccgaccgcgtgatgcgactgacgttccacgacccgttcatcgcctcccacgccaagcccgcccagttcgtcaacctgttcacgcacgacgacttcatgctcatgccgcgtccgttcggcgtcagcgaagtcgacggcgacgaagtcagcgtgatcttcgccgtcgtgggccacggcaccgaacagttggcaggactgcaagacggcgacaccgtcgacgtgctcggcccgctcggccgcggcttcaacctcaaggaagacgccaactacattctcgtcggcggcggactcggcgtgcccccgctaatctacgccgcgcaaaagctcgccgaacacgacgcctcctttgccaccgccgtattcggctaccgcaacgaccacttcgctgaggaatacgtctcccggtacgcggactggtcgtggagcatcgacgacgccgaaggcaacgtggtcgacctgctcaacaaactcgaacaaggcgacgacctgaaggcctacgatcgcaagccgatcatcttgtcctgcggaccgctgcctatgatgaaggccgtggccgcttgggccgccgaacgcggcatccccgcgcagctgagcatggaacagcgcatgggctgcggctacggcacctgcgtgctgtgcaccatcgacaccgtggacggccggctcaaggtctgctccgacggacccgtgttcacccgcgaacagctcggatggggggagtgacgatgagcgcaaacaaccagtccgcgcagggcagcgacaaccacatcaacctgtacgagccccacgtgtggaagcaccacaccaaggtggccggtctggaatggaagaacccggtcggcaccgcctccggcaccttccagtacgccgccgtccgctggttctacgacgtcagccagctcggcgccgtatgcaccaagggcgcctcgcccgtgccgtgggagggcaacccctcgccgcgcaccgccgaatcgccggccgcgaacatcaacgctgtgggcctgcagaaccccggcatcgaccattacttggccgaagacctgcccaagctcaaggccgcgggcgcgttcgtcatctccaatgtcgccggacattgcgatgacgattacgcggcggtcgtggaaaagctcgccgactccgacgcggacatgctggaaatcaacgtcagctgcccgaacgtttccgccggcggcatgagcgtgggcaccgacccggtggccctcgccaatcttatggaccggctgcgcccgatgaccgacaagccgatgatcgtcaaactcacgccgaacgtcaccgacatcaccgtgccggcgcgcgcggccgtggaacacggcgccgacgcgttgagcatgatcaacacgctcaaaggcatgcgcatcaacattcgcaccggccagccgatcatcgccaacgtcaccggcggcgtatccggcccggccgtgctgccggtcggcctggcagccgtctatcgggtgcgcaccgcactgccggagattccgatcatcggactcggcggcatcgacagtggtgagaaggcgctcgaatacctgtacgccggcgcgaacgccgtcgaagtgggtgcggccgcgctcttcgacccggtggccccgctgcgcgtcgcccgcgaacttgacgacctgctggacagccgtcccgaactcgctgctaaactggccgcaggacagacttggaggtaaggaacatcatggcagaaacactcgcacatcgcttcactgaattcctgttggaatccaacgcgctgaagttcggcgacttcacgctgaagtccggccgcaagagcccgtacttcatcaacgccggcgccttcgacgacggcaagaagatcgccgcgctcggcgcgttctacgccgaaaagattagccacgccatcgtgcacaacacgattccccgcaacatcgacaccgtgttcggccccgcctacaagggcattccgctggccgtgtccaccgcgatcgcgctgaccgccggccacaacatgaccgtcggatacaccttcgaccgcaaggagaagaaggaccacggcgacggcggctggatggtcggcaccccgctgaccgacggcatgaaggtgctgctcgtggacgacgtgatgaccgccggcaccgccgtgcgcgaagtcatccccaagctcaaggccgaggcgaacgtcgaggtcgtgggtctcgtgctctccgtggaccgcatggagaagaccaaggactccgacctgtccgccgtgaaggccgtggaagccgaattcggcttcccggtgctctccatcgccaacgtgcgcgagatcttcgacgccgccgccaagatgaagaaccccgacggcaccccgttgctcagccacgatatccagcagcgcgccgccgcctaccttgaggaatacggcgcctgattgtcttcaatctaaaaccaaaagcgggcttgcgagcccgctttttttattacgttccatgaacagcagtaccatattaaggcaaaagctttggcaaggagcgtgctatgaactggttagttggtatagggctgtttgtgctcgtgggggtatgcagttacttcggcatcgagcatcatctggacagtaaagcgaacaagttgtcgcaaggtaatgaagaagaccgccgagatgctgccgaattacgtgatatcgccgccaaaatcgatcacggcaagtattacccgatgctgtaacaggcaatctgggcctaaattgatgctatctccgtttcgaggggctgatgtcgtggtttccagagatctacttccgtttcgaggggctgatgcccaagtagaagcagcatgaaaatggcggaatgacgttggggtgatgccgctcatactcgggatatgacggatgaacagccccttgaaacggagatagatgtctccagaaggccaaatcagccccttgaaggcgagatagggttttaaactc

SEQ ID NO: 1396 - DNA, 6001 bp, Unknown
  R257_15m  MAG No. k141_5726
aactgttccatctcactccccctcgcttacgagaatgcgacgcgcacccagcgcttcgatcaacggctcgtcatgagtgaccatgatgacggaacagcccgcgtcgcgcgcgcccgctatcagcctgaccatttccgtccatgtggtgaaatcctgaccgaacgtcggctcatccatcaccaacaccttcggcgccgcggcaagcatggacgccacggaaaggcgacgcttctcgccgccagataacgtgaatggattggctggggcgaaccgtttgaggttcagccgttctagcatcatatcggcgatggcgtaggcctcgtcatcggttttccccatggatttaggaccgactgccacttcgtcgcgcacgctggacgtgacgaactgatgttccggctcttggaacaccatgccgattcgcccaagaagatccctgcttttccatgtgaagacgttgttctccctatgtgcgggaaccatgctttcatccatacttacccgaccggaaatcggcttgagcaagccagccaaagtcaaagcgagcgtggattttcccacgccgtttttgccggtcagggcggtaatctcgccggcatggaacgcgaggttcacacgctcgccaagcgcgaattcacgtccgaagctgagatcctcggttcgcagaacaacatttcccgacgattgattggattcgggaatatggctttcgacggtgcgccccggaacccaggcaccaccttttgtcaataccggcgccatgctgccaaacacttcttccggagtgccgtcggcgatgactccgctgacatgcgaatcggattccggcttgccaagcacaatgacacgatccaccaaatcaagccatacgtcgatatgatgctccaccaccaccaaggtttcatgggttcggtcaagcacaccacgtaccgcatcatgcacttccttgacgccttccggatcaaggttggcggtcggctcgtcaagcaacagcagcccgggatgcatggcgagtacgccagccaaagccagacgttgacgctgcccgccagaaagcctgcgtgtggagcgatcgagtttcatatagccaagtccaacaatgtcgagtgaggaacggaccctgctccaaatcgcatcttttggcagattcagattttcacagccaaaagcggtatcgtctcccacacgttccagaatcgtctgtgcatcgggatcctgcaataccaatcctgatcgcccacgcgaatggcgggcatccgttccgtcgatcagcagctcaccttcgagttcaccttcatcatcaccgccgagcacgccggcaagaccggccatcaacgtcgattttccggcaccggaagcacccaacagcaacacacgctcccccggctgtatggtgaagtccacatgccttaacgcaaaatccttacgtgaggcatgccgccatccccaatcgcgcgcgaccaccccggctgcggaaaacggttttcctgcatcagtacccatgaatcgttctttcattccttttgcatttgacattcgcaaggcgaacacgcatcaaaaaaagtcccgtatccactcaccgcgaatgcgatacgggacttcacaaacgaatcgtcagaccagttcctgcgtgcggccggattcgaaacggtcaagcacgccggttttggcgatggccccctgtaggaaatacatcaccatcccggcgagcactgcaccggaaatgatggaggtgcctaggtagatgctggcacgcaccgtgctccaggccgggttggtgatccagtagtacagaccgcagccgatacctgcgagggcgccggcaatggtggtggacagcaggtcccacttcctgtaggcgaagactgcgaagccgatttccgcaccaaagccctgcatgatgccgacgatcagcgagccaccgacaccccactggttgcccatggtgagctcaagcgcggcggcaagggtttccgcgaacaacgcggcaccaggtttgcgcacgataatggccgccaaaggacctgcgaacagccaaaaggcgttaagcaatccttcaaaaccaggggtcaccgctccgaagagagccagtggtgcggtacagacaatgtcccagccccagaagatcacaccggacgcaacggcaatgatggcagccacgacaatatcgactacacgccacttgttgttgtgcttgcgcactacggaagactgcttttcttcaatcataggatatgtgcctttctctctttgacaaggcacgggaatggagagacgtccgtgcgccggcattacccggtatacgttcattcggtcgaagcaatcgcttcctctcagccatacggcccccgtgtctgcgtttgatactacacaaggcacaagattttcacaagggccgtttcattttcgcttcgtttctggtatggaatacgctcggttttttgcaatggcctgtcttcgcgggtttccctcccatactgaatgcagtacgggaacacggttccatagagttttacaggggcctgcgcatcaacgattcagctaggttcctgaatgtctcgccaatatcgtcggcacgtaatgagccatcctcattcagcacggccggacgtccggcctcaccagtctccctcaattccggttccaacggaagctgagctagcaaaggaacgtcatagccgaggctttcggtcagctgttccgacacgcgcgcgccgccgccttcgccgaaaatccgcagacgttcacccttgtgctcgtaatagctcatgttttccacaacaccacgcactttcatcggcacctgcagcgccaccaggccggagcggaccgcgatgtcggatgcggatggctgcggcgtggtgaccaccaccagttccgcgttcggcaaggcctgggccacggaaatcgccatatcgccggtgcctggagccaagtcaagcagaagcacgtcgggctcaccccaccacacgtctgaaaggaactgttcgagcgaacgctgcagtctcggccctctccaaaggatcgcgcgatcggcgcccgcaaacatgccgatggaaatcaatttcgttccccaagcggtgacgggcatgagcatgccattcagattggtgggttgcgcgtgcacgccgaacagtcgcggcagcgagaatccatagatgtcggcatcaatggcggccgtatcataaccgagcgccgcgaaagtggcggcaagattcgcggtgacggacgatttgccgacaccgcccttgccggatgctatggcgaaaatacgggttttgatgcccggcttgttgaagggattctgcttgcgctcggctttgagaccggcaacgagttgggtgagcttgtcttgactcatagatccgacttcgatgcgcggcagcagcgttgcatccgggtaggatgccaccgctccgttgatctggttggtgatggtctgcgataatgggcagccttctaccgtcagttcgacctccacacgaacctcataggtgttcgccttaccttccaccggtatcgcgtcgatggctgcgatcatgcccagatcagtcacagatcgacccagttccgggtcgattactttgctgagtcgctcatagatgcgcgcttcgatggtgcgctcgtcggtcatggttcctcctttagccgcgtaccagactagcgtctggaggcgcggcatgccagagctttcttgcgattacgttgccagtttgacgtgccggtgtcacaccgttccgttttccagcagtattttgaactggtcctcgtttagcatgggaacgcctaattcctctgctttggcggctttggcaccggcgttttcgccaatgaccacccaatcggttttcttgctgacggatcctgaggcttttccaccgcgggagataatcgcttctttggcggagtcacgcgagaagtcaatcaacgaaccggtgacaaccactgttttgccttcaagcgtctgcggtagtgtactgatttcaacctgctccgcaccgactccagcagccttccatgcttccaacaccgtgccgcgccaatcgcctggttccttggccgatgcgaaccacgtgaccaccgattccgcgatttccggaccgatgccgtctatctgtgacagttcgtccacactggcacgttcgatggcgtcaagcgatccgagcgtattggcgataacacgtgccgtaggaggaccgagtcgcctgatggacagagccacaagcacacgccataagtcggcgtggcgtgccttgtcaatttcgtcaagcattttccttgtgttttccgcggggcgtatatataccggctgcacgctggatgctccggaacgcgacaccttggtttcctctcggaccaccatggcatcctcaggcacatcagatccgggatattccgcggactcatcgacttcgtccttacgctttctcgccactgtcggagtcgtccaaaacgccggaacctgatgccacaggcctgatccgccgatacgtttgcgcgtttttttcggtttaccgttcttgccgacggtttcatggatttcgatgattggcgcttctcgccatacgcgaacatcctgcaaatcggaggatgtcagcgagaacaggccggcctcgctggacaacaccggcgtttgccgggccggcagctccagcccttccaccggctcgtacggttctggctcctgccccggtgccaccacgatttccgtgatgttcggcgcgtaggtcgccaccgaatcggggcgatcctcttccggattcgtcaacgcgatggccgattggtcacccagatgttcgatatcgaacgcctttctggacgccaggttgatgatgcgttcggttaactgcgccgggcaggactccacgttcgggcagcggatgtccttgtccccctctttagctggagcgagttgtgtcccgcagctcgggcaatgcgaaggcatcacgaaacggtgcagctggtcctcacgtccttccctacgttccaatactggacctacaagttcgggaatcacatcgcctgccttgcgcaccacaacggtatcgccgataagcacgcctttacgttccacctcgaacggattgtgcaaagtggttctcgataccgttgaacccgcaacatatacgggcttcagaatggctaccggtgtcacgcggccggtacgccccacttgcacggtgatgtcaagcaactccgtgttgacttcctcgggcggatacttgtaggcgatggcccaacgtggcgcacgcgaggtcgcgcccagcgaccgctgcaaccccagatcgtccactttcacgacgatgccgtcgagcgcatgctcgatgtcaccgcgatgctcgccgtagtagtcgatcatgtcgaggatttggctgaatgtggtgacttcacggttgtgcggagagaccggtatgccccacttcttgtatagctcgtacgcctcggattggttgctgacgatatcgtgaccattgccgcgtttggcaccccattggagcgtgccgataccgtgcgcgtagaaactaagccttctggtggaggtgatgcgcgggtctttctgacgcaggcttcctgcggccgcgttgcgcggattggcgaaaggcgcgcgtcccgcatcctcgctttctctgttgagcgtgttgaaatcatcccatctcatgaaaacctcgccgcggatctccacgaattcaggaacatcctcctctggtccggcaagattctgcggaatggtggagatggtgcgcacattgagtgtgatatcttcgccagtcacaccgtcgcctctggtcaggccctgttcaagcacgccattacggtagatgagattgagcgcaagcccgtcaatcttcacttcgcaggtcattggcaggggcttcgtatccgaccaatcaaggcctcggatgacactgtcataccattcgcgtaattcctcaagcgaaaagacatcgtcaagactcatcatgcgtgacggatgacgcactgatgcgaaatcattggagaa

SEQ ID NO: 1397 - DNA, 21733 bp, Unknown
  R257_15m  MAG No. k141_6758
accgggcaggatgccggccacatggtcgggctggtcgggcagaccggcgtcacgcgcggcgagctgttcgtcggtggggcgcacgccgccgggcagtgccgggatggcgggcgcgttcggatcccacaggtagacgtggccgagctcatacagggacacgttttcgatgccgcggcggatgttgcgctgcacggtggtggccagggtcggcagaatctcgcgacgcaggtacggacggtcgccgtagagcgggttggcgatctcgacgctgaccttcttggtggcttccgggtcgaagccgaaggccttgtaatcgtcgtcgcccacgaacgggtagctcagcgattcgaccatgccgaactcggcgagctcgtccgccacgcgacggcgacgctgctggtccggggtcaggcccaccagaccctcgaccggtgccggcggcacggtgatcggaatctggtcgtagccgaccagtcgggcgatttcctcgaccaggtcgcacggctcgttcaagtccggacgccagctcggcgcggttacggcgaactcgccgttgccgccgccggccaccgtgcagccaatgtcggtcaggatgtcggagatgcggttgatgtccacgtcgaggccggccacgcgggccacttcggaggccttgaagtggatgaccttggcgcgcggcgtgttgttcacgtcgttcgggtgttcgctgggctcgccgttgccgtacttggccatgagctcagcggccatctgggtggcggcgggctgcagcgcggtgtcgacgccacgttcgaagcggcgggaggcctcggatggaatcttgtggcgacgggccgaacgggcgatggtcacctgatcgaagtgcgctgcctccagaagaatattcttggtgtcagcggtcacttcgccatacaggccgcccatcacaccggcaaggccgaggatgcgcgagccgcgttcgccgttcggcgaatcggtgataagcagatcttcgacgctcaggtcatgttccttgccgtccagggtggtgagtttctcaccctcgttggcgcggcgcacgacaatcgggccttcgagcttgtcgaggtcgtaggcgtgcatcggctggccgaggtcaagcatcacgtagttggtcacgtccacggccaaggagatggagcgcatgccggcgcgaatcaggcggcggcgcatccagttgggcgtgtgggcgttgggattgaagtccttgacgatacgcgcgtagtagcggtcgcaaccgggcacgccgtgaatcggattgttatcgtcgatttcaacatcgatgtccaccggggtgccgggctggtagtcagcaggttccggggccttctcgttcagtgccacggccggatcggtgtaggcggcaccggtggagtggtggtattcgcgggccacgccacggtaggacagcgtgtagccacggtccggggtgatgttgatctcaagcagaggctggtcgaggtgcagcaggtgcatggcgtcctgaccaggcttcagagcctcatattcagcctcggagaagccgtactgacgcagcagaatgatgccattgtggttgtcgcccagacccagctcacgttcggaggcacacatgccgttggagatgtggccgtaggtcttgcgcggctcgatcttgaagtcgccgggcagcacggcaccgggcagggtgacgacgaccttttcgccggccttcatgttgggcgcgccgcagatgatgccgcgcggcaccttgttgccgtcttcgtcggtctcgttccactcgtcgccgcagtccacgtggcaccagttgatggtcttgccgttcttctgcggttcgggggtggcgtcgaccacgtagccgaccacaatcgggccggtcacctgggaggagtggatctcctcttcctcaagacccaccttgacaaggtccttggcgagctgttcgtaggtcaggccttcgggaacctcgacatggtccttgagccaatcgatatcgatcataggcatggctgaatcactcccccatcacaaactgttcggcgaaacgcacgtcaccttcgaccaggtcgtgcatgtcgttgatgtcgctgcgcagcaggagcgtgcgctccatgccgacgccgaaggcgaaaccggtgtagacgtccgggtcgatgccggcggacttcagcacgttcgggttcaccatgccgcagccgccccactcgagccagccggggccgcccttcttgtcggggaaccacaggtcgagctcggcgctcggctcggtgaacgggaagtagctcgggcgcaggcgcgtcttggcttcagggccgaacatggcgacggcgagcttgtccagcacgcccttcaggtcggccatggtcaggtgcttgtcgacggcgagggcttcgcactggtggaacaccggagtatgggtggcgtccagctcatcggtgcggaacacacggccgggggacgcgatgtacagcggcacgccacgggtcaggagggcacggacctgatcggaggaggtctgcgtacgcaccaccatgttggagccgacgaaaccggcggcgtccttggcttgattgcccttgacgtagaaggtgtcctgcatctggcgggccggatggtccgggccgaagttcagggagtcgaagttgtaccattcggcttcgatttccggaccggaggagatctgccagcccatggagatgaagaagtcctcgacgtcttccatcagcttgggcagcgggtgacgggcgcccagaggcttgcggttcaccggcagcgtcatgtccacggtttcagcggcgagtgcggccttctcggcggcttccttgagctcgacctccttggggccataggcacggccgaagtcggcgcgcagcttgcccatgagcttgccggcttccttcttctggtcgacgggcagggagccaatggccttgctggccttggtcatcgccgaatcggcacctgcgtacgttgtcttgatggccttgagctcctccaggttggaggcgttctggattttctcgatgcccttggcaacctcagcggtcacctggtcggcgtcgaacaccatttgttctgccacgagaaccctttcgtctgatgttttctcagcgtttcacagcgtttttaccggtttcacattctttcaacatgacccgacatagacagcgacatcaacatcaccgcggccgaggtgccaaggttcagcgattcggccttgccgtacagcgggatggagacgatgcggccgcagcgtgtgaggatgtccggttccaagccacgcgcctcattgccgaacagcacggctttcggagcctcgaccgccgccttgtccgccagtactgcgggcaggctttccggcttgcgttcttcggtgccgtatacgtcggcggcccagacgcccatattatggtcgcctgtccaggtgaagaattcgtcggtgctcatggcgagtaccggcagatggaacagggagcctgcggtggagcggatgaccttggggttcagcacgtccacgcagtcgtccacgaagattacggcgtcgcagccggccgcatcggccgcacggatcacggtgccggcgttgcccgggtcgcgcacctgccagaaggcggcgatctgcgggccccggccgttcttgccaagttcgacgtcatcggcaccggcgtgcatggactcggcattgccgacggccacgatgccctgggcgtccggactgatgcggtgcatcacgtcgccggtgcagtagtgcacataaatcgtggcatcctgcgaggtttcgacgatcttctccaacgtggaggagatgatacgcggatgttccaacgcctgcgaaacctccacatagaggtcctgcaccacgtccggccgccaagtgacggcctcgcgcacggattgcgggccttcgataagaaaacggcccgaacgttcgcggcctttggcgcgggtcagatcggcgatgcggcgaacgcggtcggatttcggattatcaagaatctgggcgttgatgggcatagccactaccctactgccgggtcattacgtcagtcgtggctcgctcccgctggcggaggcatcgtaagcctttcagacaccttgaaaggcactgtgccagtctgtcgcctttcagacaccttgaaaggcgaagtgccaattcccggtgccgatggctacgcctatggaggccagcgggacagccagacagatgacgtagaagatccagtcgataggcttcagacgcgagatacgggcttgggagcgtggggcgctggagccgaagccgcgcgcttccatggcggtggcaagtttggtggcgcgccggatggagagcaccagcagtccgaacgcttgggagagggcacgggcgatggcgttaccgtcgccaaggccgcgcgaacgctgggacaagccaagtgcgcgccaatcttcctgcagcagcgtaaacatgcgcaatccagccaacccgccgtatacgaatcgcggtgagaagtgcagaatctcaaccaaaccgtccgccaaatcagtgggatcgaggcccagggccaggatcacgccgggtacggcaatggccgccaccctgatagccgtggcgatggccagattaacggatccctcgctgatcacaatccagccgccctgccacaggatctcgcccgaggtacggccgtagagaaacacggagataaaactgccggcggcggcgatccataccggccaggtcttacggcatacggtccacggagccacgccaccaatccacagcagcacgaattcgatgccgagcgccgtggatgcggataccacatccagactgatgaacatcggaacgcacagcaacagcgcaccgatgatgcggctgaccgcgttgatgcgcgctatgaaccatgagggcgatgaggctttgaccggctccacgcgcgtttcctgcgggctgacggttaccacgtcactcatgcctcgcctcctcgaacatcacgcgtcgtgcgcccagcgcatccaccagcgcctcatcgtgcgtcaccatgaccacgcacgagccttggtcgcggatggcggcgatcagcttgaccatttcattccacgtactgaaatcctgtccgaatgtcggttcgtccatcaccaacactttgggtgcggcggccagcatggaggccacggacagtcgccgcttctccccgccagacaaggtatacgggttggctttggcgaagcgcgtgagattcatctgctcaagcatgcggtcggcggtccgataagcctcgtcttggctctgccccatcgacttggggccgatggcgacttcgtcacgcacgaaattggcagcgaactggtgttcgggctcctggaacaccatgccgatacggcccagcagttccttgcttttccagtcaatcggctcacgcccggcatgcgcgggcttgaggttgtcggcgatgagcaccttgccggcgataggctcgagcagcccggccaaggtcagggccaaggtcgatttgcccgcgccgttcggacccatcagagccgttacttcgccgggatagaaatccagattgatgccaacgccaagagcggtcccacggccaaagcttaagttttcggtgctgagcaccggcgcatcgtgcgcaggctcccgcttcggcgagtaatcgggaatcgcacggcccggcacccacgcgccaccggcggccaatacgtcgcccatctcggcgaacacctcgtccggcttgccgtcggcaatgaccgcgcccgtgggcgaacttgcatcgggtcggccgagcacgatcacgcgatcgaccagatcgagccatacatcgatatgatgttcgaccacaaccatggtctgcccggtggcctcgatgacctttttgaccgcgtcatgcacttcgaccacgccttcggggtcgaggttggcggtcggttcgtccaacaacagcagaccgggcttcatagccagcacgccggccaacgcgagacgttggcgctgaccgccggacagatggcgggtggaccgatccagttcgagtccgccgagtcccaccatatccaatgattcgcgcactcgctgccgaatctcctcgcgcggcacgttgaggttttcgcagccgaaggccgcgtcatcgcctagtcgttcaagaatgatctgcgagtccgggtcctgaagcaccagtcccacgcggcctcgcgcctcgcgcgcatcgacgccatcgatggtgagcgagccctcctgctcgccttcctcatcgccgccaagtacgcctgcgagaccggccatcatcgtgcttttgcccgcccccgaagcaccgagcagcaacacacgttcacctggccggatggtgaaatcgacggcacgcaacgcgaagtccttacgcgtggcgtgccgccatccccagccgctggcctctaccgcagccggattaacctgcatcagacgcgcgccttgctgcggccggattcaaagcgttccagagcgccggtggcggcgagcgcacgagacaagtaccagaccaccacgccggcgatcacgacgccggagatgatggagccaaccagataccaagtgacgcgcaggccgttccagcccgggttggtggcccagtagtaggcccagcagcccacgccggcgagcgcaccggacaggatggtggtgccgatgttccacttcttccaagcgaagacggcgaaggcgatttcggcacccagaccctggatgatgccgacgatcagcgagccgccgacaccccactggttgcccagcgtaagctcgaggaaggcggcgagggtttcggcgaacagtgcggcaccgggcttgcgcacgatgattgcggcgagcgggccggcgaacagccagaatccgttgagcagaccctcgaaaccgggggtcacgccttcgaacagggccagcggggcggagcagacaatgtcccagccccagaaaatgacgccggatgcgacggcgatgattgcggcgacgacgatatcgacgacgcgccacttgtaattggctttggccacagcttcagtcatgaatgtgcctttcttctgctcgtacgcaggccgaacatacatggatatatgtacgcacatgatgcacatgttcgtggccacgcgcgggttggttcaggcacgggtgggtaagagcgacatttccgtgcgccggcattatccggtcacgttccatcggtcgagactatgaatctcctctcagccgcctaacggcagctcccgtgtcaactccccgactataaagcaagccgccgtcaaaggcaatagccacatccgtgacctaccggacggcggctcgccaccattaccgatgcggttcggttacttgccgagcttgtccagcagcaaagcctcggtgatcacgttgttcttgaggccgggcagggagatggactcattggggctgtgggcgttggccttcgggtcttcggggccggtgaccagcacctgagcgttggggaaaatgcgctgcagttcggggatgaacggaatggagccgccctcgcccttgttgatgggctcaacgccgaaggcctcggtcatggcttccagcgcgtctttggtggccacggcggtcgggtccatggcccagcccatgccgttttcgccgcgttcgacagtgaccttggcaccgaacggcgcgtgggattcgaggaatgcagccagtgcttcctgcgcttcttcagggcgctgggtgggcgcggtgcgcagcgacagacggaagcgggtctccggggcgatcacgttgaaggatccctcgaccgggtgggcgtcgaagccgatcacggtcacggacggcttggtccacaggcgtgaggccagcgaaccggtgccggcgaactcgtaaccggccaccacgccggaatcctcgcgcacggtggtttcgtcaaggtcgcgttgcaaaccgccgattggctcttccgcggccacgccgggcacggccagatcgccgttctcgtcgtacatggaagcgatgagcatggcggccaacgtgttggagtcgagaatcgggccgccgtactgaccggagtgcaccgggtgctcaaggccctgcacggtcacgtccacgcaggtgttgccgcgcagcgaggtggtcaaagaaggaatgtccgccgaccagttgccggaatcggccacgataatcacgtcggcggcgaattcgtcgcggtgagcctcgatgaagggaatgaagcttggcgagcccatctcctcttcgccttcgatgaacactttgatattgacgttgaggtcgtcgcccaaagccttcagcgcaccggagtggatggcgatgccgccgccgtcatcggcggagccacggccgtaaaggcggccgtcgatttcggtggccacgaacgggtcggtgttccactcggccgggtccggaacaggctgcacatcgtgatgggcgtagagcagcacggtgggggcgtccggagaaacgatatgcgagccgatgacctcccatgcgcccggagtgccgtcggcattggaagcctggaccaccttggcatccacacccacgaggcgcagttcgtctgccacgaattcagcggagcgcttcatatgttcggcggtgatgcccttggcggaaatcgactgcagcgcaaccttttcggccagcaccttgacgatgcggttccaatcggtttcgacgcgcgaacgaatctcgtcagcggtgagcgttgccatgatggtcctcctttatatgtgtgtgagcggcgtcattgcaatggctgcgccagtatataagtgtctgaacgtcaccgtaacctcaaagcatgacatggaatccgtttaggaaaaaagaagaggcccaagttcccgttgagcaggccccgaagaagaccgccgatccttctgagaaaaaaggccgtcctaccccgaagatgaagcaggctcaggccgccggtatccgtccgctggttccggtggaccgcaaggccagcgccaaggccgccaaagcccgtctgcgtgagaaggagaacgccgagtacgaggcgatgcagaagggcgatatcaaccacatgcccaaggcggaacgcctgccttggcgtatctacatccgtgattatgtggatgcccgtttcaaccttggcgaatggttcatcccggtggccttcgcgattctgatcgtctccatgttcgtcacttctttgatgcagaaccagtgggcttccatcatcatgatggcgcttatgtacggttacctgattgccgtgatcatcgacgtatggctgatgtggcgcaagctcaaggccaagctcatcgccaagtacggcgaacagtccgtgtccaagggctcccgctccttctcctacgcttggagccgttcgattcagatgcgtcgttggaggcttcccaagccgcgttacccgaagcgcggtcactggccggcagactgatgtccatatatactctggctcccctcgttgaggggctgagccgtaaagaaaacagtccagtggactgtttttaggcgaagtggcggcgatagccgcatatggctccctagcatgggagccatacttatatgcaccaaggaggcaatcatgagcgaacagtttgatctggtcatcatcggggccggccccggcggctattccacagccctgcgcgccgccgaactcggcatgaaagtggcactcgtcgagcgtgacgccaccgtgggcggcacctgtctcaaccgtggctgcatcccctccaaggcgctcatcaccgccacccacaccatcgacaccgtgcaccgtgcggccgaactcggcgtcaacgcctcggtgaatggcatcgacttcggcacgctgcgcgactatcgcctgcgcgtggtcaagacgatggtgggaggactggccggactgctggcccatcgcggcatcaccgtgttccgagccaatgccgcgttccatgcggatgagatcgctccagcaacttccaaccacatcgtccacctcgttccctcccccgaccaaagcgacatcctcacctatcacaaggccgatgtccccgaacccagcggccccacgatggacctcacggccacgaacatcgtcatcgccaccggtgccaagccacacccattgcccggtaacccgttcgccggcgccctcatcgactccacacaggcgctggaagtcaacgaatttccctcttcggcggtgattatcggcgccggggccatcgcccttgaattcgcctcgatgtggaacgccgccggttcgaaggtgaccctgctgattcgcaaggaccgcgtgctctcagcctgggaccggagagccggcaccacgctgacccgtgagctcaaacgtcatggcgtgaacatcatcacccgcgccagcgtcacccatgtggacaccggcgcgaaccttggtgccaccgtgcactacacgcgcgaaggccaggacggcgaacagagcgtttggggcgaaatcgcccttgtcgccatcgggcgtgacccgatcaccgacccagcatggggcgtgacgattgatgaccacggacatgtcgccacggatgcgtacggtcgcaccgacaaaccgggcgtatgggcggtgggcgacgtgacggccggtcacgcactggcgcatcgtgcttttgagcaaggcatcgtcatcgcggagaccatcgccggactcaatcccaagccggtggacgaagccgctgtgccgcagatcgtgttctccttccccgaagcggcgtcggtcgggctcaccgtcgaacaggcgcaggcgagagaggacctcgtcgaaatcaaggagaccaactatccgatgctggcgaacgcgcgcatgctgatgagcggcacggccggctcattgaccatcgtctccggctgcgacgcggccaacccggacaccccgcgcgtgctcggcgtgcacatggtctccccgatggcctccgacatcatcgccgaagccgaacagctggtcggcaaccatgtgccgctcgccgacgcagcccgcctcgttcacccgcatcccacattcagtgaaacgctcggcgaggcgctgctcaaggccgacggacgaccgttgcacacacgctgagaccaaccagcacaagcaaattcggaccagcgcacctgataagatattgcccagtgtgtttcgtcccaacaaaggaagaagtgatggcggaaaaggacgcgaagccgaagaagcagagcacaatcaagcagatcatccagatctacaagtacacggctaaggaagacaaggccctgccgtggcttgaggccggtgctttcctgctgcctgtagtcgtgatgatcatcatcggtctgattgtcaagtggacctggctgacctggatcttcaccatgattaccgccatcatgctcggcattctgctggccaccatgatgctcacccgccgcgcggatgcagtcggctacaagcagattgatggcaagcctggtgccgccatcggcgtgctgagcaacatgcagaaagccggctttgacttcccgcaggaaccggtgtggatcgacccgaagaccaaggatgccatctggcgcggcacttcgatgaacggcatctacctgatcggcgaaggcgaatacggtcgcgtcatgaaggcgatggatcgtcaggaacgcgatatcaagggcgtcaccgccggctcctccattccgatataccgcatcgccgtgggccacggccccaagcaggtgccgctgaccaagctgcgtagcacggtgatcaagtccaagagctatgagcccacgcaccacaagaacgcactgatcgccaagattcatccgcgccgtcgcttcctgctgaccaaggccgagatggaaacgctgaacgatcgtcttcgcacgctgcaggccaagaagggctatgccatccccaagggcatggatccgaaccgcccgcagaagatctcccgccgcgcgatgcgcggtcgctgatcggcagcacacaaccaaatcgcacagaagccccggaatccgttcaatcggttccggggcttcgtcatatgtctcataatcgcgtccacttacatccacctacgccacctgtcaatacccactgtccacgttgcggacatctctacctactcccccgatagtctccgtttccattctgtaatgatgtttcgttgaaataacgcgcctgcgcgattgtcggccacagtcacgaaacattctcgtaacccaagtttcgagccggcgaaacgcgctattttacgatatataccgtcatatctcatacgaaaggagcggtcccgtgaccgaactcaagtccaaggaagacgtcgaggcccttatcaacaaggaaggcatcgagtatgtctccgtccgtttcaccgatcttatcggcgttcagcagcacttcaccgtgccggctagcgaattcctgaaggacgctttcaccgacggcatgccgttcgatggttcctccgttcagggcttccaggccatcaacgagtccgacatgaagctggtcccggacgttgagacctctttcgttgacccgttccgcaagcacaagacccttgacgtggccttctccatcgtcgacccgctgaccgacgagccgtactcccgcgacccgcgtcaggtcgccggcaaggccgaggcctacctgaagtccaccggcatcgccgacaccgcatccttcgctcctgaggccgagttcttcatcttcgacaaggtgcgtttcgagaactccatgcagcgctccttctacgaggtcgactccatcgaagctccgtggaactccggcgttgactccgaagaggacggcactccgaacatcggtttcaagaatcgcgtcaagaagggctacttcccggttccgccgattgaccacacccaggatctgcgcgacgatatggtcgccaacctgcagaaggtcggtctgatcctcgagcgttcccaccacgaggtcgccggcgctggccagcaggagatcaactaccgcttcaacaccctgcagcacgcaggcgatgacctgatgaagtacaagtacgtcgtccacgagaccgccgctctggccggcaaggctgcgaccttcatgccgaagccgatcgccgacgacaacggcactggtatgcactgccaccagtccctgtggaaggacggcaagccgctgttctacgacgagaagggctacgctggtctgtccgatctggctcgctggtacatcggcggtctgatcaagcactcctcctccgtgctggccttcaccaacccgtccctgaactcctaccaccgtctggtcccgggcttcgaggctccggtcaacctggtgtactccgctcgtaaccgttctgccgccatccgtattccgctggccggcacctccccggctgccaagcgcatcgagttccgcgctccggatccgtcctgcaacccgttcctggccttctccgctcagctgatggctggcctggacggcatcctgaaccacatcgagcctccggagccggtcgacaaggacctctacgagctgccgccggaagagcacgctggcatcaagcaggtgccaagctccctggccgaggctatggacgccctggaagaggaccacgacttcctcaccgccggcgacgtgttcaccgacgacctgcttgagacctggattggtctcaagcgcgacgagatcgaccaggctcgcctggccccgaccccgctcgagtacgagctctacttccacatctgagtttgagagcttagccacgttggaattcccattgctcttccctcgtgggagtctaatgggagtcattcagcgtaactagaaagaacctcgtgaaattcgtttcacgaggttcttttttgtatgttgcgttgtgtgttatgcgatgtgtgttgctcctggaatattccaggggcgggccgctacttagtctcccaacgctccttgagtacataggcggcgactttgggctgacggtcgcgagtgaagacgcccttcttgttgccgtcgacgcgcatgataccttcatcggtttggaagtcgcagaggttcccatacctgctcgcccaccactgcctcgaacatgtcgaacacttcgtgctgcatggtgaggtactcacactggtattcctctcactccactgcacgcttggcagcttgtgcgcaccggcatcggtgtccgcaccgtattcggtgaacagaaacggcttgttgggttcggtgttcatccattggttcatcccgttgatgaaggccttcttggctccgatgagctgatacccatcttgcacataccagccgtaataccggttcaggcagatgacatccgcgaactgatggcacttgtctttgcctccggcggccatcagcagattggtgtaggtcagcgggcgatgctgcggatcgagcgtgcgcgcgtaatcgaatatctccttgaaatacggcacggccgcctcggatgccgagtcgttggcggcgtcgatgaaattccaagcgccggaggcccccggcattcttttcgtcgaaggggacaattcagaacacaactgccgacacaatcgtcagggaggccagcgagaacagcgtgcttacaagcacgaagccgaccgcatactcgggcatgttgttcttgcgaccggtgaacatggcaatggtggtcatggtcggcagtccggcgatgaccgtgatcatcagcaccatgtcatgggtgatcggcagttgcggcaatgcgccggtcagcgcggtcagtagcgcgtagaaggcgagcgggaatgcgatcatcttggcgactaggccagcatagagttcgtagcgtttgaggacgccccaccacttggtcagcgcgaacaggccgcccaagtagattagcgacatcggcgtggccatattgccgatggtgtgcagcggcttcaggatgatgtccggcaccttgacgccgagcagaatcagaatcagggcgagcatcacgccgacgaaggcgggattgacgaatcgtttaagcaggccgaggacgcgggtgcctggcgaggggcggacgacggccggagaaccaccgtttgcggcattgctcgccgaaccagcattgcccaccgaaccggcgccgttcaccgaaccgttcacgaccgcacctcgcgcgccaatcgcgttgccgtcagtcgcttcgtcgaccggctcgcacagccatacgccgtacgtccagagcagcgtctggtcgatgatcgacatcagcgccacgtaaatcgcgccgttctgcggccaaagtgccataatcaacggaatgccgatgaatccggcgttgccgaaaataagcgacgcctgaaatacatggctacgcgaacctttgagccgcaacagttcggcgaccagccagaacaccaggatgagcagcgcgtacatcacggcggtcagcagcatcacgccccagttggcggcaagctgcgcgcggtccgcgccgtcgacggcgttcgagaacacaagcacggggatgagcacgttgagcagcagcgagcacatgccgtccaacgccgtctgaccatagaaccggagcctcacacatccgtatccgaccatcagcatgatcagaaatccgactaactggccaatcatgacgccgaactgccccatgcacactcctctcgtttgctctcccgcgatttcctgtcactggttcatataggcagccatctggacaggctcggcggcacacgcatcagtatgttcgataccaccacatgccaatccacttctcgttcaaccgttccccgtgctaatgcgccgcctgccaccccgtgttgccggtgctgcgcgagcaccgctacgtgtattgcattccggtggccctcgggcgcaacgtgtgggtcggcgcgaacgtgtcgattctgtcgggagtgaccatcggcgacaattgcgtgattggcgccggtccggtcgtgacacattccatccccgccaactccgtcacctacggcgcgccctgcgaggtcgtgcgtgaaatcggcgacaaggaccgcgagtatttctacaaaaatcgcaagctcgacgtgtgggagtgagctttcgcgctactgctctttgagcttaaaacgctcactgaattggcggtcgcgccagtagtagacgtcgtcgcgttcgttgatttcgcgaattaccttgcacgggctgccataggcgaccgtgttggcggggatgtccttggtgaccagcgagttggcgccaatgaccgcgttgtccccgatggtgaccccgggcagcacggtgacattcgcgccgatccagacgttctcgccgatgtggactggcaacgaatactgggcaccctgatagcgcaggtccggacgcacgggatggccggtggctacaagcgtgacgttggggccgatcatggtgtgggatccgatgaagatctcaccatcgtccaccagcgtcaggttgaagttggcgtaacagcgctcgccccaataagtattgcagccccagttcgcatacaccgggcattcgaggtacagaccctcccccgccgcgccgaagaacgcctgcatgagttcggtacggcgcttcgggttggtcagcggcgtggcgttgagttcgagctggagatcacgctgggcggcctgcagatcaaaaaagccgtccacatcatccggcaggtagacctcgccagagaacataagcgccattttctcgcgcgtcgcatcatcgataatcggcttggcgatcggcttgtcttcggtcatcattggctcctgttcggcgttttggcgattgtgtcggtcgaactattctgtcacagactcgttttcgacacccagcatcgagcgcagccagtcaaggattcagatgtgcgattggcaccgtgcgggcctcacacttttcttattgagaacgattcgccgtgcagtcaagccctccatccacccaaaaaggactcgcttttggccgcgtcgtcgcggtaggccttgccgaactcgtcaatgagcccatggaattcctgcaaatccttgacactgaggttcgtatccagcaccacgggcgaataggccctgtggaatgccggatagccggccggcacgtcgaatccaaggaaggcgaacagccgccgcgcgtaggtatcggccacgaatgtgcggcgcgagaacacgtacagcatcagatcgtcggccgtctcgccgccaataccaaataatccaagcaactcggcccgtaattcggcatcggaaatagccgcggcaccctcgggcgcggccccgcaacgctccacataccaccaactcagcgactgtacggtcttggatttgttgacataaaagcctgacggtcgaatcagttcctgcaaacgctccggctccatggccaccagcttatggggttcgagcacaccctccgcgttcaacgccgcaagcgaacgattcacattgccccacgccgtattctgcgtcagcaccgcgcccaccataatctcgaacgtggtctccgccggccaccatccggtcgggccgagtgcgtcagccatggtgcggtacagcaattcgatgcgctccggcacaggccacttgtgtgcctggttggctttcatacgtttcatattctgcattcaggctccgtattagccatccgccattcatttattaggtcgattatgcgttcattaggtcacttgtgatgaacactgccttcaagaatggcttcattccaatgctcattatctcatgctaagcagggcaccgacctaatgaacgcataatcgacctaatgaacgcaacggtaaggaaaaactacagagattcagcgagatatgctcggtccacctggtctggaagtcgaaaatcttgatgacatctaccgcaattcgtgcaggattcgccgcatgaacgggatggtgaccacgaatgtcagcacgtcggacaccgattgggccatttccacgccgagcacgccgaacatcatcggcagaatcagtacgatcggtgccaaaaacagaccttgtcggcacagggccaggaaggaggcgatgccggtgcggcccatggtctgggtcatcatattgcccatcatgttgaagccgttgagaatcaccgtgcagcattggatgtgcagcgcggccacacccaccgcgaccacggccgggtcggagcggaagatctcgaccagttgcggtgcgaacacccacagcaacaccgccaacaccacgagcacgcaggtggcgagccgcacgcagaaccagtacccttctttgacgcgcgcgaacaggccggcaccgtagttgtagccgcacaccggttggaaaccttggccgaggccgacgatcaccgagttggcgcccagcataatgcgcatcacaatggccatgccggcgatggccgcatcgccgaacggattggcggcaatgttcacgcaggtcacggaaatcgaaccggcgccttggcggatcagcgagggcaggccaccgccggccacttcgcgcatgagcagcacatccggcctgcaattgcgcagggacagtttcatcacgccgaatttgcggctcattgtggtcagaatcgtgaagctcaccgtctggcagatggcggtggccaggccggcaccaaaaattccgaggtgcagcacgaagataaacaacggcgcgagcaggaaattcagcaatgcgcccgaaaccagcccgatcatgccgaacgccgattgcccttggtatcgcagtagtccgttgagcgcgaacgacccgcatacacagggtgcggcgaccaacaacggcgtcaggtattgcacggcgtatggggcgatcgtcgaggtcgatcccagcatgacgaccagcggccgcagggtcagcaatccgattgtggcaatcaccaaaccagagagcaccgcacccgcgaagcccacggccagtagtcgggaggcgcgctcattgttctgtttgccgagttcgcggctcatcgagttgcccgcgccgttgccgaagaagaagccgagcgcctgcatcacggtcatgatggagaacgcgatgccgatggcgccggactgcgcggtgccaagctggccaataaagaacgtgtccgtgagattgtaggcagtggtcaccagattggagatgacggccggcaagcacagtttgagaatcagcggcttgaccggctgcccggtcatctgccgatatttcgcgtccgcgcttgcgcgtctaatgccatgaatctgcaccatggacggctatcctactcgcgcagggtcctatgcaaaggcgcgttaccgccatacgagtcagcgcagataccgcccggtgatgctgttcggattggccgcgatttgttccggcgttccggtggcgacgatgcgtccgccgctttcgccgccgcccggacccatgtcgatgatccagtccgcattggcgatcacgtcaaggtcatgttcgatgaccacgactgttgcgccgctcgccacaagccggtcgaacacgcccagcagcacacgcacgtcgaacgggtgcagaccgatggtcggctcatcgaacacgaataccgcgtccgattgggccttgcccatttcgctggcgagtttcagccgctgggcttcgccgcccgaaagcgccggcgtcggttcgccgagcgtcaagtagccgaggcccaagtcgtgcagggtggtcagacgtgcgtgaaccttcttgaggtcgctggtcacggccagcgcctggtccacgctcattgccatgagttgaggcaggctcagggaaatgttgccgccaccctgatccgtcgcctcactcaatttttccttggcagctttgcgcttatccgggaccttcatcttcgccgctttgcccttagccgctttaacggcacgccgaatcgcgccggcttcgggcgcataccgggatccgccgcaatccgggcattcgatggtaacgtccggcaggaactgcacgtcgagtgagatcgaaccggtgccgtcgcacgtggggcaacgcagtcggccggtgttgtatgagaaatcgccagccttccagccgcccgccttggcaccgtccgcgcgggcgaaggcgcggcgcaattcgtcgtgaatatcggcataggtggccacggtggaacgcacgtttgcgccaatcggcgtggcgtcgatgagattcgcgcgactgatgcccgcggtctcaagctcgcgcacgtgttccggcaacagctcccccgccgcctgcgctttgagtgcgggaatcagcgattcgagcaccatcgtggttttaccggagccggagacgcctgtcaccgccacgagccggccgcgcggaatatcaacgtccagcggcttgaccgtatgcaactggctggttgtcatgcggatgtggccaaggtcgaacacctgcggttccgccacgcgctcacgaatacgcgcgtttgcctgatctgacaggaacggtgcaatgcggctgcctggattcgccgccacctcgccgaccgtcccttgcgcgatcacatgccctccttcggcgccggcaaccggtcccatttcgataagatggtcggcggccttgagcacgcgcacgtcatggtccacgaccaccacggaattgccgtccgccaccaagtcatgcatcacgccgagcagcccatccacgttcgagggatgcaggccaatggacggctcgtcgagcacatacagcacgccggtggtgcggttgcgcacggcacgggcgagctgcacacgctggcgttcaccggttgaaagcgtggcaccggcgcggtcaagcgccagatagccgaggcccagatccaacagtcggcgggccacgtccaggaatgattcgcagatgttggtggccatcgtccgcatgtcggcaggcagggattccggcactccgcgcacccaatccaccgccgcatccaaggtcatcgcgctggcttcggcaaggttcagcccgcgcacgtgcggagcccgggcggcgacgctcagtcgggtacctccgcagtcggtgcatgggccttccttgaggaaccgggccacgcgcttcaggcctttctcgtccttggctttggcgagcgcgttctccaccgtgtatacggcgttgaagtaggtgaagtcgagttcggcgaaatcgtcgcctttcttcggcttgtaaagaatatgctttttgacggccggcccgttgaatacaatgtcacgctcttcgggcgtgagctcgctgaacggcacattggtgcgcacgcccatcgcgccgcacacctgcttcatgaggtcccacatgagcgaaccccatggcagcaccgcaccgtcgtcgatacttttcgactcatccggcaccagggccgcacggttcacttcgcgcacaatgccggttccggagcaggtcgggcaggcgccggccgagttgaaggcgagcgattcggcgccgggcgcgtggaattccttgccacagctgacgcaagtaatgggcagtccggccgccacgttcagcgtcggttcgttgcgcgccccgcaatgcgggcacacgtgcgaggcgacgcgggagaacaggagccgcagactgttgagcagttcggtcatcgtaccgaacgtcgagcggatgccaggcaccgtgggccgctggtgcagggccagcgcggccggcacatgcagcacttcgtccacttgggcgcggctggcctgggtcaggcgacggcgcgtgtacgtggacagcgcttccaggtaacgccgcgaaccttccgcatacagcacgccaagcgccagcgagctctttcccgaaccggagacgccggccacgcccaccagttcgcccagcggaatgtcgatgtcgatgttcttcaggttatgcacgcgcgccccgcgcacttcgatcg

SEQ ID NO: 1398 - DNA, 8755 bp, Unknown
  R257_15m  MAG No. k141_6862
gtcgatgtagtcgcgggaggcttcgaagatcgtggtcggcttcttggcgaggaagtcgtaggtgaagccgccaggcgtcacctcctcgcccacggaggcgagcagctggttgcgcagacggatgttgccgaacgtgccgcgcaccatgatctcgtggttgcctcggcgagaaccgtaagagttgaagttcttcggctccacgccgcgctcggtcaggtacttgccggccgggctggaggccttgaacgcgcctgccggggagatgtggtcggtggtgaccgagtcgcccaggagggccagcacacgggcgccgtggatatcggcgaccgggtccggcgtggccttcatgccgtcgaagaaggtctgcttgcgcacataggtggatttgtcgttccacgcgaacagctcgccttccggcacgtcgaggcccttccagcggtggtcgccgtcgaacacggaggcgtagtccttgaggaacatctcgcggctcacgctgccgtcgaccacggcggcgacctcggcattggtgggccagatgtccttcaagtacacatcgttgccgtccgcgtcggtgccgagcggctgggtctcgaagtcgaagtccatcgtgccggcgagcgcgtaggcgatgaccagcggcggggaggccaggtagttcatcttgacgtccgggctgatgcggccttcgaagttgcggttgccggaaagcacggcggtgacggtcaggtcgttggcgttgatcgcctcggaaatctcgggcagcagcgggccggagttgccgatgcaggtggcgcagccgaagccgacgagctggtagccgagtgcatcgaggtcgtcctgcagccccgcggccttcaggtagtcggccacgacctgcgagccgggagccagcgaggtcttgacccagggcttgggcttaaggcccttggcatgtgcgttgcgggcgatcaggccggcggcgatcatcacggacggagtggaggtgttggtgcatgaggtgatcgaggcgatggccacgtcgccgttttcgatgtcgaaatcgccacggaagtcggtggacacggccaccggatccttgacggtcttctcggtctcgtaggcgagggcggtcttctcgaacatgctcttggcttcggacagcagaatgcggtcctgcgggcgcttcgggccagcgatggacggcaccacggtaccgaggtcgagttcctcgtattcggagtactgcggttccacgtaatccgggtcggaagcgtcgccccacagcttgttggccttggcgtaggcttcgaccagggcgacctgctcttcggagcggccggtcaggcgcaggtagtcgagcgtgacattgtcaatcgggaagatgccgcaggtggagccgaactcggggcccatgttgccgatggtggcgcggttggccagcggcacggaggcgatgccttcgccgtagaattccacgaacttaccgaccacgccgtgcttgcggagcatgtcggtgatggtcaggaccacatcggtggcggtaacgccctccgggatggagccggtgagcttgaagccgaccacgcgcggcacgagcatggagatcggctggccgagcatggcggcctcggcttcaatgccgccgacgccccagccgagcacgcccagaccgttttcggtggtggtgtgcgagtcggtgcccacgcaggagtcgaggtaggcgagcgtgttgccgttggcctcggccttgctcatgaccaccttggccaagtattcgatgttgacctggtggataatgccggttcccggcggcaccacgcggaagttcttgaatgcctgctgaccccagcgcaggaactggtagcgttcaccgttgcgctggtattcgatgtccatgttttgctggaccgcgtcggcgatgccgtacttgtcgatctgcacggagtggtcgatgaccatatcggactggacctgcgggttgatgacctccgggtcgccgccgaggtccttgaccgcgtcacgcatggtggcgaggtccacgatgcagggcacgccggtgaagtcctgcatgatcacgcgggacggcgtgaactggatttcgtggctgggttcggcgttcggatcccagtcgagcagggtcttgacgtgctcgtcggtgatgttggcaccgtcgatgttgcgcaccagattctcgaccagtaccttcagcgagtacggcagatgatcgatgccgtcgagattggcgatgttgtagtaatcgaagtccttgccggctgccttgagggtagccagctggtcgtcgcgtaaggacatgcttcctccgaaatcatgaatcggcttatgatgccgctgattatccgctacacatggtacgggcacgttaccgaggctctggcgtgtcggcttgaagtatgagacaatcgcgccgccgtctcaatgccgacgcgagagcttgcccgtcagtccgcgcacgaacggcgccagccacaggcacagcgcgaagatcagcgcggaaccggccaacgcgatcagcgtggccaccatcgtggcgccggtcggcagaatcagggcgaagaagttcgccacgaacgggacgaacgcgccgatcacgcccgccgccgcgaacaccgccaccagcacgccacgccaaccgttgagtggtctggccacgcgggccagcacgaacacgcccatcgcgaacaggatgatggcgctggtggcgcgcagggcggacaggtccgcggcatcgccggtcacgttccagcccatgaccggcggcagcacccaagcggccagcagcaccgacagcgcggtggcgatgccgcccggcagcgcgaacgtgaccacgcgcttgaggaaccccggcatgtagcggcgcgtgttcggcgcgagcgccaggatgaacgcgggcatgccgatggtgagagcgccgatatacgtgatatggcgcggcaggtatgggtatgggatttgcgtcatcactacgccgagcgagatcagcgcggagtacacggttttgacgaggaacaggctggccacgcgctccatattggccatgacctgacggccccgcgccacgacgtccggcaggtgcgagaacttggaatccaccagcaccacctgggccacggccttggtggcgggcgccgcattgcccatggcgatgccgaggtccgcctccttgatggcgagcgcgtcgttgacgccgtcgccggtcatggcaaccacgtggttctgcgtgtgcaacgcctgcacgatggccttcttctggtcaggcagcacgcggccgagcacatcgacgttttcgagcacgcgggccagttcgttcacgtcctcgggcagttcgcgcgcgtccatcgccaccggctcatggtcgcctgtcagtttcactctgcgggcgatggcacccacggtcactggattgtcaccggaaatcacacgacagcgcacaccctgctcacggaaccaagcgagcgtccgctcggcgtcctcgcgaatcttctcagagcacaacaccaacgccaccggctcagcctgcacatccagttgcgggccgtccgagacattggctccctcaactgcgtccctcagtccgcttcgcggactgaggggagctgtagaccgcgcaaccagcaacacacggttgccgtcattggcatactcgttaacctgctgcaacaccgacgaatagtcaccctcaagcgcagaaataatcacctccggcgctcccatgtaccaggtctcgccggatttacgcaccgcactccatttgcgcgccgaagagaacgggacacgagactcaaccgcacctgccccatatccttgggccttgagcccggcgagtacggcttggccggtgccgttgggctgctcttcgttgcagcagtcgtagagggcctgcgtggctgcctgttccgcagccgcattggcggaatcgagcatcacgagccggttgaaggcgataccgccatcggtgatcgtgccggttttatcgaggttcagcgcgtccacgcgagccagtgtctccacggattcaagctcctgcaccagcgtattgtgacgggcgagacgcatggcggccaccgcgaagttcagcgaagtcagcagcaccaagccttcgggaatcatgcctactacgccggcgaccgcggaaaccacggcttgccgccattcgccggtggagagtgccgtgccccaaccgccgaccgtatgaatctgcgaaagaatcagcagaatgcacagcggtaccacgaggaaggtcatgaatttcagaatcgtgttgatgcccttgttcaggtcggacacggttttcttgtataccttggcctgcgcggtgagcgtggcggcgtaggaatggctgccgaccgcattgaccttgaccaatgccatgccggagaccgcggtggcgccggaatacacctgctcccccaccttgtggcgcacggtacgagattcgccggtgagcatggattcgtcgagttccagtccccaggtctggatgatctgcccgtcggccggcacctgttcgccggcacggatccacagcaggtcgtcgagcacgatctcgttgtggggcacctccacgtccctgccgtcacgatgcacgaggaattcggaggccacaaggatggaaagcttatccaacgtgcgcttggccctgagttcggtgacgatgccgatgcccgtgttgatgatgatgacgaaaccgaacaccgcgtccctccaggaaccggtgatcagcaccagtaccatcgcggcgaagatgatgccgttgaacagcgtgaatacgttggctcgcacgatatcttgaaccgaacgcgaggtggaggttttcaccgcattcgattggccactttcgatacgctgcaccacttctttggaggtaagaccggttgctccgatctcaggcatttccacggctgttgttgcactcatattccccagcctaccgcgtcttgtttcgcaatccgctaaggctcagggatgattcagggtgctttctcagcttcaagggcctgattcggctcaggaaacggtgactttgatctcgcgttcgtggggttcgtcgcgcgtgatggtgagcacggcgtcagtaatagtcattggcttggtatcggcagtgtcgccagaatcggcactgttggtgttgaggtgaaggatgacggcgtacagcagttcatcttcgggcgcatgctttggatcaatgagagcgactggaataccggcttcacgcgcattggtcaacgtctggttccagctctcccggttggcgtcggtaacgtcgatgccgctgataaccacgattttgaccgcgcgagctacgaaatcggcaacaccctgctgtgcggtggccgcattcttgtcgacgccagtatgagcatccatactatcggcaccgttttcgctggtagtgccggcgtcagaagattcggtttcaccggatacaccatcagttgcgtttgccgagcttgcggatgtttcgagcgaggcatagtagacattgagtttgtcatcagacagcgcattgatggcggacttgtctgcggcggtgtcagtcgaccccacaaagccgactgtgacatccgtgggatgtgtggaatcgtgggcgacttccggcatgctgtcttgggtatcgccgaccgccctaccggccggcgtgcaggcggccagggacaacacagccgccatgcaggccagcaatccgagaattcgtcgtgtcatatgctcacctgtcagcgggtaaacagggccaccgtctcaacatggtgggtcatcgggtagatgtcgaaggcacggatgtctttgagctcgtagccttcgccgatgagtgtcgcggtgtcgcgtgcgaggctggtgggatcacaggcgatgtagaccacgctggatgcgccggccgcggcaatctggcggcagaccttggcacgagcaccggcacgcggcggatcaagcactacgacattcggcttggccagatgcgccggcacatggtccagcgtgcgcgagacgtcacccgcgcgggcgtccacgtcgttcaggttcatggcgcgcagattgcgctgggcgttcttgacggccacacgcgcgccttcaacgctgagcatgcgggtgcgttcaccggtcattgtggccagcggcagggtgaacaggccggaaccggaatacaaatcccagattacggcgtccgccgctgactgcagctgcccgttgaccaggttgatcacgtgcgtaccgagggcgatcggcgcttggcgatgcacttgccagaaaccgttggcgtcaacctgatagtcgaaggtcgtgccgttgatggtcacctgttcggtgagcagctgggagccggcgcgcagttcgccgtccacaagtacggcgtaattgtcgcctgctgccgcggtatcgacgatctcgccgcgcggttcgggcacggaaagacgaatctgggagccgggttcaaagccgccttcccacacgtgttcgcgcttggcgacgtccagcagcgtgcgcgtggcaagcggcatggtgtcgatggccacgcggttgtgtgtgccgcgccggcgcatggatggcatgccgttgtcgtcggcaatcatttcgatgcgggtacgccaattgaggccgccggctgccttgtcgccgggcatgcgctcgatgggaacggccacgtcgatatggccgagtcggctcatctgttcggagacggtgatggccttccacttgagctggccgggcaaagagacgtgcacgagatccgcgccgcccactcccccgcccatcgccaagggaccggcaagtggccatgccggggtgactcggtcttcggacggctcgagaacctcgacgacttcgccggtccagaaccggtcgtcccggtcgtggggctcgtcaagttcgactcgcacgagttcgtcgggcaaggcgaagcggacgaacaccacacgaccgtcgatatgggccacgcagcggccttggtcggcgtatcgttcgatacgaacttcagcttgcatcatcgtcctttccgattgcgctcggttcgagttcggcatcaacagcgacttcagtctgtgtcttcttagccgcgaccttatgccggtgcatcggcgtggcaataatgaggtaactcacccaaatcgccaatgcccagaacggaatgcccatgagcaggcgggtcacgccgagtgcagccacatggttggtcagatacagcggcacctgcaccaccagccgcagcaggaacagaccgacccacaggccggtgacaatcatataggcgcgtttcagggccttgtcgtccatccagtcatggaaccatgccttgaaatgctcggtgggcaggctacggatgaattcgacgaccaaacccagtccgggcacgcgcgcaatcagcgacacggcaagcaacgcggcatagccagcattggtaatgaatccgaagatgtagtaattgcgggcctcatgagtctgccatgcccaaatcaggcagatgcctaccgccaccagaccagagaccgcgcccattaccgactggcgctgaatcagtcgcacaataacctgcaataccgccaacacggccgaaaccgcaatggtgagattcagattgctcgtggccacgaacagtacgacgaacaccacgccaggcagcatggattcgatgacgccacgcgggccaccgatggcgtcgatgacggagaaatcctcgccttcattgccggcgtcggctagagcggacaggccggtgcgtttgttgtctgccaagtctcttcctataaatcagcgaacttcggagaacatcgggccgcgagacagcgtggtcttcacttcggtctgctggtcctggctcagcggacccttcggcttgttgtccggaatgtccttgaagtgttccttgccgttctcctcgccggcttcggccgcggccttggcggccttacgctcagcgggggcgaccggcggatgcatcgggatcagatcgcgcggcgccaaaggctcctcgccacgctcgacgacgatgtcggcgaagaacttgttcagcgcctcggtctccgggctgtccggatcgatagcagccttgccggagaagatgccacgcagcatccagcgcgggccgtccacaccaacgatgcgcgtgttcacggttttgccgcccttgacattgaccggcagcttcagttcggtgccgaacacaccgtccacttcagaagcggccttgttggcttcaagcaggtcaccgcgaacgtcatcccacagtcccagggtcttgggtgcggcaaaggcttcgatctccaggctggaggagccgaaggtgatggtggaaccaagcacttgctgggtggcgcggttggccttgatgcgcagctggatgccctggaggaagggcaggtagtaggcgccgagatccagataatcgtcataatcgggcacgtcctcatcgttgacatcccacgggcctcgctcttcgccgcggccctggtattcgctggccggctcggcgagcacggtctccgcgctctcggcctttgcggcagcgttcgcttctgcggcggccaccttgtcctcatcgacaggctcaacggccggctcggcttccttcttgctcttcttcttgccgaatccgaacagtcccataattcctcgtttcatgtaacggttgcaaccttgctaacactagcactcaggcttagagaaagctgagcatcgcggccgccggtgtccggttcgattcgtagggaggccacaatagtatggccgcatgaccatcaccattaccacgtctaacgtcaac

SEQ ID NO: 1399 - DNA, 11220 bp, Unknown
  R257_15m  MAG No. k141_6871
atccgccaatggcgccgacaatgccagcaatgccagcaatgctgaacattccgatgacatgcccaccgtgccgattcccgcacgcaaggctgccacgacgttcgacaccccctccaagcgtgagcgcatcgaggtcaagccgccgatcacccgattcatacgtcgtgccatcacccgcgtgttcggcgtatggtcacacatctccactcaggtggtgcgccaatggggctggtatccgcgagtggaaccctatgtgggttatggcaccggtgattactcgcgtctgatctgccgcacggtatacgcccccaagcatgcgcaatccggcgaactgatccgcggcatccgcggcatgcttgccgtatccgcgccgcgcacccacgtgcaggccagcattgatgacacgccgctcaacaccgtgcagatcggcgtctccgaggtctatgacaaggtggaccgcacgcgcgatctcggcagcgaatacgccatctccgattccgccggatacctcgacctcgtggccgagcatcgtctggtgcccggcatccatcgcgtctcctacagcgtggccaaccgcaaacccgtgagcgccaacctgtacaccatccccgccagtgccaaagtcggcatcatctccgatgtggacgacaccatcatgatcacgcaggccccggtgccatggaaggccgcgtacaacctgctgttcctcgaccccaagaagaaagcctccgtgccgggcatgagcgtgctgttcacccgcatcgccgacttgttccccggcgcaccgttcttctatctttcgacatcgccctggaatgtggagagttcgattcgcaacttcatcactgaccatggttttcccgaaggcccgctgctgctgcgcgacctcgacccgaggcccaagaccttcgtgcccaccggcccccagcacaaacttgagtttgccgaacaacttatggccgacttcccggacatgaagttcattctggtgggcgatgacgggcagaaggacccgaccacgtacgccaccatcgcccgcagatatcccggacgtgtactggcgatcgtcattcgtgagttgagcccgcgcgaatcaaccggattggcgtcggtgacgggactcacctcgacccagccgactccggtaaccgatgtaccagtattcaccggcaccaccggctcgaacattctgaagaccatgctgccgtatctgaagacggtgttgcgataagcgcggcgtgatgaacgccgaatgcgtcccggtgtggtgcctcgcctataatcgcgtggtatgactgacgagagcacaaacgccgcggccgcgatgccgccttacgccaagcgcgagccgaagcgccgcgaattccacggtgacgttttcgaagacgattacgagtggatgcgagacaaagactccgatgatgtgcgcagctacgtagctgccgaaaaccagtactgcgagcgtcgcatggcgcatctggcggatttccggcatacgttgtttgaagagctgaaatcgcatgtggaagagaccgatatgtctgttcccacgcgcatcaacgattactggtacttcacccgcacgcagcagggcaaacagtatggcgtgcaatgccgcatccccgtgcgcgatgccgatgactgggacccgccggtcgtggatccgcaaggcgcgcccggctccatgcccggtgaacaggtcgtttttgatgcgaacaaggaatccgaggggcatgacttcttccggctcggcggcttggatctgagcaaggacggccgttggatgctgtacggcgtggatgttgcgggagacgaacgatatgatttccgcatccgcgaccttgccgggctggagaccggggagccggtcagcgaactgcccgaacagttcaccggcattggcagcgcatgcttcacgccggacggccaatgggtgttctgggtggaattggacgattcctggcggccgctcgccgtgtggcggcatcgtgttggcacggcggtcgaatcggatgtgtgcgtgtaccgagaaaccgatgaacggttctgggtgggcgtcggcatcagttttgatgagcgcaatatcgtgatcggcaccggttccaaaaccaccaccgaagtgctgatgctgccggtggccacgcctgaaggcgaattccaagccttcattccacgtcagaacgatattgaatatgatgtgagctttgcctgttttgaaggcgcgggggagaacggtgcggatgtgccactcgccgtggtctaccacaacgccgccaatccgaatttcgaaatcgacgtcattgacatgcgtggccatgagccgccgtaccgactcggcgaaggcgtgtgcatcgccgccgggtcgccgtacggctgtgaacatggtgagccggataagccgattaccgaggcatacttcaacgccgccaatccggcgatattgcagggtgcccacggtctgggcatcgaaggcatcgcgttgcatcgcaactttgtgtccctgagctaccgtgccgacggccagccgcacgtggcatacatgaccaagagcgcggctgccgccgacttcctggccggacggccgtggcggtttacggaactgctgccgcctgccctggaggacgactgggacatggtcgccgccgatcgcgaaaacttcaccggcgatcatggcgaaatcttgtggaccgaagatgaggcccccacggatcacacgtcatcttccgatggtgccagcgacgaccacctgcccggtgagacccggcgcttgtacaccatcggcgtcggcggcaacccctcggatgaggcgccgcgcatgcgctactcgttcgccagctacacccgcccgggcgagctgcacgaaatcgatcccgccaccggcgaagatgcgctgctgaaacgagccaccgtgctgggcgacttcaatccacgcgattacatggaacgccgtgtgtggattaccgcgcgcgacggcgaacgcattcctgtttccctcgtctggcaccgcgattgcccggcgcaggattcgccgatgttcattaccggatatggtgcatacgagatttcctccgatccggggttctcggtctctcgtctgagcatgttggatcgcggtgtgctgtacgccgtgccgcacattcgtggcggcggcgaaatgggacgcgcctggtatgaacaggggcgcagactgaacaagaagcattcctttgaggacttcgtggacgccacgcgcgcgctgcagaaggcgcatttggctgatgcttggcgcaccgtggccaacggcggatccgctggcggcctgctgatgggcgcgattgccaatatggcacccgaatgctacgccggtgttgaggcggatgtgccgttcgtggacgcgttgacctccattcttgacccggacttgccgttgaccgtcaccgaatgggacgaatggggagacccgttgcatgaccctgaggtgtatcagtacatgaagtcgtacacgccatacgagaatgtgccggtcaccgtgctcgagggcggcgacgacgaggctgccggtgacggcagtgctgatggggctgccgccggcgcgctcgccgccgcgcaattcccgagaatcttcattaccacctcgatgaacgacacccgcgtgctgtacgtcgagccgctcaaatggctggcccgtctgcagtccgccggcgtggatgcggtggccaagattgaggtcgaggccggtcacggcggcctatccgggcgttacaagcaatgggaagaggtttcctatgagaacgcttggtgcatggatgtgatggggctcgctcattaggtcattctgtcgttcattaggtcggtgtcctcttctatgtgagactgaaatgccgccatttcagtccctgaaatgaacccacaccgacctaatgaacactaaaatgacctaatgaatgtctcgacacgatacgcatgttggttgtgtccactagctgagcgggttcgggccggcaggtggtcgcgcgagtaggctccttgaactatggcaaagacatataaaatcgccgttattcccggcgacggtattggcaaggaagtcactccgtgggctcagaaggctttggaaaaggccgctgaaggcgtagctgacttcgagtacgagaacttcgatctgggtgccgagcgttatctgcgcgatggtgcgatcctgcccgaggacgaagaggagcgcatcaaggccaacgacgcgattctgctcggcgccgtgggcgatccgcgcatcaaggccggcattctggaacgcggcctgttgctcaagctgcgcttcgacctcgaccagtacgtgaacctgcgtccctccaagctgtacaagggcgtcacctcgccgctcgccaaccccggcgacatcgacttcgtggtggtgcgtgaaggcaccgaaggtctgtactgcggcgccggcggcgcggtgcgccgcaacaccccgcaggaggtggccaccgaggtgtccatcaacaccgcatacggtgtggagcgtgtggtgcgttacgccttcaagctcgctatgaagcgcaagaagcacgtcaccctggtgcacaagaagaacgtgctcgtcaacgccggtgatatgtggcaacgcatcgtcgacaaggtcggcgaggaataccctgaggtcacccacgactaccagcacatcgatgcggccaccatcttcctggtctccgacccgagccgtttcgatgtgattctcaccgacaacctcttcggcgacattctgaccgatgaggccggctccgtggtgggcggcgtgggctactccgcctccggctgcatcaacgcctccgacgagttcccgtccatgttcgagccgattcacggttccgctccggacatcgccggtcagaacaaggccaacccgaccgccgccgtcctctccgccgccatgctgctcgagcatctcggctttgatgatgcggccaagaagattcacaccgccgtcgaagcggacatcgaggagctcggctccaccgtgcgctccaccgaccaggtcggcaaggacattctggcccgcatgtgatgtcccacttggctcccctccagaggggagccaagtttatactgagttgcatgcaaatgcgacatggggaatgcaaaaccgttggcggcaaactagtcgccgtgaccgtatccgtcgatgatgacggcaccgcacagtcatgccatatcagcggtgatttctttattgaatcagtttcggatgccgaatctcatgctttgttgcgtgacttggaacaggctctaattagtgatgattcattgcggtccgtattggacgctcaccctagttgccaaattatcggcacagatgaagttgccatcaaaaccgcatatagccgagccgtaagcagcaacttgcccccgctggtgggggctcccgcgcagcgggtgggggtggtcagccccgatgcgccgaacaccccggcatccatcaatacacaaaccaagcagcccgacaaaagctctgaataccgggagcgctggaacgccctcagacctcaactcaccgtgatccacgaccatccgcgtactccggacgagcaaatggccattgacgagacctgggcgcgtgaagtcgcagcaggaacacgacagccgaccatacggttctgggagtgggcgggcccggctgtggtcatcggccgtttccaatcggcccaggacgaggtgaatctggacattgccgagcagctcggtttcgacgtggtgcgccgttgcacgggtggtggcgcgatgtttatcgaaccgggcaacaccattacctattctctgtatgcaccgctcgatttcgttcagggcgtaagcatcgaagaatcctaccggctctgtgactggtggctggtcgaagcgctgcgcgaacttggcttggatgtgcggttcgcgggcctcaatgatatcgcctcgcagtacggcaagatcgggggagcggcgcaacggcgcttccccgtaggctcaggcggcgcggtgctgcaccatgtgaccatggcatatgacatcgatgcggccaagatgagccgtgtgctcaacaccagtcgcgagaagatgtcagacaaagcggtgaaatcagcggtcaaacgcgtggacccgatgaaaagccagacgggtctcagccgcgaacacatcgtcgaacaccttattgactggtttgcggcgtgatttcaccgatggccgtatacgattttgccggtggccgtgcgtggttttgtcatgggcgagcgcggtaaccgcgacagtgccgtttttcgcggtaacacattcgtcagcatgtcgtacggctatcggatcgcgccacacatgaagtgacgaatgatggcatgcttctgacgaaacctgtggggcgcgttacaatatgacggatggccgacgacggtcgtaggacaataaggatggtgcgatgagcttggaaacgccaaacgcttttgctgacgaggagaacatcctgctgcatacggcattgttcaagcaggtatcgccagccgaagccgaggagctgctgccgcatttgaagcgtgcgaccttcgataagggcgactatatcttctccgaaggcgataccgatcagcgcatgtatctactggagcaggggcgcgtcaagctgattcgcacttcttccgatgaccgcgtgcagctgctgtccatccacgcgccgggcgaagtgcttggcgagattccggtattcgaccctcatggtggcccgcgcaccgcgtccgcggtgtccatgagccatggcacgcgcgtggtctggctggagcatgatgccctgttcgcatggcttgatgagcatccgcgtgtggccatcgacatgttgcaggtcatggccaaccgccagcgcggcaacaacgaacgcatctccgacttggtattcatggatgtgccggcgcgtctggccaagacattgctcaacttgggctcacgtttcggcgagccggtggaacagggcctcaaagtgccgcatgacctgactcaggaagagctggcccaactggtgggctccagtcgtgagaccgtgaacaaggcgttgatggacttttccaaccgcggatggatcgcacgtgacggtcgatcgatcatcatcttccagccaggcatgttgattcgacgctcgcggcgctgaccgttcggctgacttccagccaatgttacgatagtgcggttcttgtgatgatatgttcacgggagctgaccgcgagcccggttggtagggcaccccatttagaatggggcccatgcccaaaaagaagtccctcactctccaacgtgtgcttgttctcctcttggcctatatcatgcttgccgtctgcggtggcgtggcggccagcgtgttgtttgtaccgggtgtggtcggtgccaataaagccgccaaagcggtgattccgtcgctcaaggtagaaaacgtggacttcgacgtgaccggtctgccccagaagtcgacgatgtacgcgcgagacggttccaccgttatcgcgacgttctacaaccaaaaccgtatcgtcgtgccgctgaagaagatttccaaaaccatgcagcaggcagtggtggcgcgcgaggaccgtcgattctggactcacgccggcgtcgacgtgcaaggcgtgatgcgtgcgttcgtgcagacctacctcgtcaaaggctcccagcagggtggttcgtcgctgacccagcagtacgtcaagaacgtgctgctcatgcaggcgatcgaggacgacgacccgatcgcccagtaccatgccaccgaagacaccgtcgcccgtaagattcgcgagatgctgatctccgtgcagatggagaagaagtattccaaggccgagattctgcagggctatctgaacatcgcccagttcggcaacaacctgtatggcgtggaaaccgcagcccagcgctacttcagcgtgtccgccgccgatttgaacgtggtgcagtccgccaccatcgcggctatcaccaagaacccgagccagtacgatccgctggtcgaggagaaccagaaggaaagcgagaaccagcgcaacatcgtgctcaagctgatgctgcaggaggggtacatcacccagaagcagtacaccgaagccgtgaacacgccgctgaaggacacgctgaaggtgcaggccgtgaacgtcggctgccaggacaccggcgactacgcatacttctgtgatttcgtggtgcatcgcatccagaactccgaagaattcggcaagactcgtgcggagcgtaacaagctgctgcaggagggtggcctgaagatcgtcaccacgttggatgtggaagcgaattccacgatgatggagaccgcgcgtaataccattccaccggacgatcccagcggcatggaaatagccatggccgcagtcaaaccgggaaccggcgaggtgctgagctttggcctgaatcgttactatgacgccactccggcagccgcgaacgatccgaccaagtcgggccagaactatgccgtcgatctggtggacggcggcggctccggttggaccattggttcgtcttggaagccgatcaacctgattgcgtggatggaggcgggtcattcgatcaacgacaacctacagaccaccacgacgtaccccacgaccgacttcgcctgcaacaactacaagggcggtgccgattcgtggaacgtgtcgaacgccatgggcgccggcacggtgaacccggaaagcccgttcctcggtctggtgcgatcgcacaacaccacccaggcctccatgggcgccatcctcaaactgtgcaaggtggcggacaccgcgaccaaactgggataccatgacgccgccacgggtgagaccatcgacaaaacccaggtgtatacaccatccatgatgatcggctcggtgaatgtgtccccgctgaccatggcgagcatcttcgccgtatacgcctcgaatggtgtgcaatgcaacccgattgccatcagcaaggtgaccgataaggacggcaacgatctcaaggttccatccgcgaactgccatcaggcggtggataaggacatcatccaaacactcgcttataccctgaaccaaggtacggtgcggccggatggtgccggttggtcattcagattggctgacgggcgtaagtcgtttggtaagaccggtaccagtgaggatcttgcggtgtccggtggatcgttcattcctaatcagattgcggcgttcgctgtggtcggcgatgcacagaacccgtacaccaaccgtatttccaacattgccatcaacggccggtacaacagctattgggatggttcgacaatcgcagctccggccgttaccaacttcttcaatagctacatttccaagaagaaaataccgattgacaacgattacggccagcccgtctcgaagtacaccacgactggcaagtacctgggcattggcggacgaacgttcagcgtgccgcagaccactacgaatggcaacagccaatcgcagacgaccaccaatggtcaatcccagtcgcagtctcagtcgcagaacactgggcaaaacaacacccaaacccagggcaccaattcagagcggtcgaatgatggccagtgattggtgattggcgtttgacatttggtgattgcaggccggctgagtctacgtaacatagtcgactgcgatacccaaattacgtagtttgcgggcgttacctgtttcaggtgacgcccgttttacaatacttaatgacaacgccagcgcgttcatcgaatattcgccatgaacgcgcattggaaaggggaacgatgagcaacgacgatctgacgcatgagaattttgattttcgtggattcgacgtgccggatctcaaagcggtgacgctggcttcgtcttcggacggcgaacagtccaagcagccgaagaccaagcacgaggatgcatcgaggaaccgtaggcacggtaagaagaagtcaaaatccgacgcacggtccaagaagcgggccggcgcgggcaagacgagcgaatcgtttgatgattatgaggattatgaggaaagggaagctgtgagcaaggcagataagaaagccagcaaggaccgtccgggactgtttgcgccaatgacgctgcgcgaagtgaccgtgcgtaatcgtatttggttgccgccgatgtgcacgtattcgtcgttcgcctgcgatggtaggcccacgccgttccactaccagcattacgtgtctcgtgcgttcggcggattcggcatggtgatcgtcgaatccaccgccgtggctcctgaagggcgtatcacgccgtgcgatctgggcctgtgggaagacgggcagattgatgcttggcgctggatcgtggacggtattcgcgaggcgggtgcggtgcctgccatccagctcaaccatgcggggcgtaaggcttcgaccggttgcttcgccgttggttacgacggtcagagtgtgccggaggaggcgggcggctggcccaccatggcaccgtctgaaatcgcgttcggcgggctgcgtacgccgcgcgcgctgtccgtggatgagattcatggtctggtcggtgcgttcgccgcggcggcgggccgtgcggtggccgccggcttccaggctattcagattcatgctgcgcatggctatctgatttctcagttccttgacccgctgagcaatgagcgtgatgacgaatatggtggcgatttgaccggtcgctctcgtttcctggtcgaggttgtggatgccgtgcgcggggccgtccccgagggcgtgccggttctggtgcgcatttcggccacggattgggccgctggcggttgggatttggatcagaccattgcactatccaaggtgctgaaggagcatggcgtcgatgtgatggacgtgtccactggcggcatcatgtcgggagtgtcgattccggtcaagccgaactatcaggtgccgttcgccgagcaggtcaagtccaaggccgatattccggtgaccgcggtgggtcttatcaccaagccgaagcaggcggccaagattttggcccgtggcgaagccgatgccgtggaaattggccgcgccgcattgcgcgatccgtactggccgttgcgtgcggccaacaagctgggcataccgtccacagaggtcccctacgccccgcaatacgtggccggtgcgtactgaatcctcatggggcggtgactttcccatggggcggtaaaaccctcatggggcggtaaaaccctcatggggcggtaacccaaaac

SEQ ID NO: 1400 - DNA, 4372 bp, Unknown
  R257_15m  MAG No. k141_7172
aatcagcgtcggagtcggcacccgtctcacgcaaggcgattatttcgctggattccacctcgcaggatgtcgaacggctgttccgcgaaaccatcgtttccatcgacagtgttcctggcaatcaggtacagggcatctcgccgctctaccatgtcagccatttcgacggcccggacgcgatgagcgcggtcatccaaatcgaaaccaagttgccgcccgccgacctgattgccgtattgggcagcatcgaaagtgttcatgatctggcagtcgatcttgaccttgtcgacatggaaggcgtgacttccgacgagcccaactgcagcattccttggccgtcggcccgtaaccatgcgtcggtattggcaccttggctggatatggacccgaatgcttctctgggcggcgacccggtggcattccttttggccatggcaccggatgccggacaggtcggattgctatcggacaactggatactgtcgaacagttgagctgatggcagaaccagttacgaacggtaggctagaaaccagacggtgacggaccagtctccggcctcgaacagccgggcacggcagtgacgaaaaccaaatcaagatgaacagcccaggcgcgagggccgttcgcaaacagcaaacagcaacgcaacgataaggaggccggacatgaaaacacggcgaacaccatggtggcagtatgtgatcggtgccgtgctgggcctgttggcgggtatcggtctggcctcctacggcgaaagctcgggactgtcgctgattggtgcgccttggattgtgaccggattgctggccgtgctgggcgttatcgtgctgatcttggccctgcaagtgcataaatacgcgaataccgaccccaagaagcgtccgcatagcttcatcaatcccactatcgcggtgtatacgctggtgctgtctaaggcactgggattggcgggcgcaacgctcgccggctggtatggcggtcagattgtgatgagcctgagccatatcgaggcggatttctatgcacacgccgtcaccgagtgcgcaatcgtggccgtggtgtgcatcgccgacatgatcatcggcattatcggcgaatggttgtgccagttaccgccgaacgaaggccccgaaaacccgaaaatcaaggaagccaagcgccgtagcgacatagcccaggcctacagaagataatccgtgataagccccctctgacgagggggccgtaggcatagccgactggggagagaagaagaaaaaccacaccatcggccaagccgattcccactattcctgcggcacgcgaaccatagcttcctgagcgatggccgccaccaagtcgccattctgcgcatacactttggcgatgccgagtccgcgtccgtgcgcggcgataggcgtatcctgcacatataaatgccattcgttgatatcgatatcctgataccaccacatcgaatggtcgatggacgcataggaaatgcccggtgtggaaatcgacagtccggcgcggcgcagcaccggctccatcatcacctgatcgcagccgagtgccagcatcgcacgatgcatgacctgcggcacatcgacgtggccatcggccttcatccacaccatctgcttgccggaatcatgctcggcggaatccttgtctgcgcgcagcatcacggtcggcgtcacgtggcggatatcgaatggcgatttctcgacatagaaattggcgaacggcgacttttcggcgaacggctgcatgagttccttggcggaagtcaacgtttcgggatcgggcaggttttccggcatcggatcggcaaattccacaccctcctgaccggtctcttggaaggaggcgatggccgtgagaatcgacccctcggcttgggtgacgttgacccgacgagcggagaacgagcggccgtcgcgaaggttctcgacgtcaaacagcaggtcttgacgaatatcgccggcggcaatgaaatagccatgcaccgaatgcggcaggcgtgaagggcccacggttttagacgcggcgatcaccgactgggcgatgacctggccaccgtagacgcggccggtggggaagtacatactctcgccattgatgtatgtgtgattgcggtaagcggaaggctcgcccaacttcagcaccttcaccagatggtccaatggagttacggtggttgcctgagccatggcgttcctcgattcctgttctactgtgttcgatattcggttatcgtattccaacctatggttggcagtctatccggtgggggttaagagttccgggagcgaaatgtaacgagactgtttggaaggtaaacggttggttatgcggtgcgttgccgctacgttgctgctgcactgccggtgtgttgccggtgcgttgccgtaggtgactgtgggattttatgggatgcggggcggtcatgggggcaattatgggaaagccgcccctgagggacggctttcgacgtataaagcgcgttgtggcactaatgccggcgtatctcagccgcgcacaagcttcttgtgcaggcggtgcgggcgggccgcatcctcaccgagtcgggccaccttgttctcctgataggcctggaagttgccttcgaaccagtaccacttggccggattgtcgtcgtcgccttcccacgcgaggatatgcgtggcgacgcggtcgaggaaccaacggtcgtgggagatcaccacagcgcagcccgggaactcgagcagcgcgttttcgagggattccagggtctcgacgtccagatcgttggtgggctcgtcgagcagcagcaggttgccgccctgcttcagggtcagggccaggttcagacggttgcgttcaccaccggacagcacgccggtcagcttctgctggtcggcgcccttgaagccgaagctggccacgtaggcgcgggtcggcacttccacgccggccacctcgatgaagtcgaggccgccggacacggcttcccacaggttcttgttcgggtccaggccttcacggttctggtccacgtagctgattttgacggtgtcgccgatcttcagctcgccgctggtcagcggttccaggcccacgatggtcttgaacagcgtggacttacccacgccgttcgggccgatcacgccgacgatgccgttgcgcggcagcgtgaaggacaggtcgtcgatgagcacgcgatcgccgaaagccttatggatatggttggcttcaagcacggtggagcccaggcgcgggccggccggaatctgaatctcggagaagtcgagcttcttgttgttgcgtgcctcgttctccatctggtcgtaacgttccaggcgggccttgttcttggcctgacgggccttgggggaggagcgcacccagtcgagctcgctcttcagtcgcttggcgagcttggcgtccttggctccctggatttccagacgctgggccttggtctccaagtaggtggagtagttgcccttgtacgggtacaggtggccgcggtcgacctcgcagatccattcggccacattgtccatgaagtaacgatcgtgggtgacggcgatgacggcacccttgtactggtgcaggaactgttccagccacaggatggactcggcgtccaggtggttggtgggctcgtcgagcagcagcaggtccggggcctcaagcagcagcttgcacagggccacacggcggcgctcgccaccggagcacacgttgaccggggtgtccggatcggggcactgcagggcgtccatcgcctgctcaagctgggagtcgaggtcccagccgtcggcggcgtcgatctcggtctgcagcttgcccatttcttccatcagcgcgtcgaagtcggcgtccgggttggccatttcttcaccgatctcgttgaatcgggcgaccttctcggcaatcgggccgaacgccatcttgatgttctcgcccacggtcttggtgtcatccagcggcggctcctgctgcaggatgccgaccgtgaagcccggggtcagcgtggcctcgccgttgctcacggtctccaggccggccatgatcttgagcagggtggacttacccatgccgttcgggcctacgacgccgatcttcgcgccgggcaggaagctcagggtcacgtcatcgagaatcacgcggtcgccgtaagacttgcgggccttgatcatctgaaatacgaattctgccatatgttaccttatcgttcaagaaacgctgattttccaacgttttgcgggacccggaccccgcaatgacaccaatggaaaacgacgcgaccgtttacgggggtgtcccggacggcccgttgtgcgtcattcgctgttgtggttgtcccgtgtcatcgccggcgccttggtcctacgcaaaa

SEQ ID NO: 1401 - DNA, 26669 bp, Unknown
  R257_15m  MAG No. k141_7586
cggcggcaacgtgtccgtcaccgcgtccgccgacctatccaaagcgcgcaacaccaccaacgattcactgaccacgctcggcctgatgatcggcgtgatcgcgctggccgtgggcggcatgagcatcgtcaacatgatgattgtcaccgtgatggaacgtcgcggcgaaatcggcctgagacgcgcgctcggcgccacgcccggcaacatccgcatgcaattcgtcaccgaagcggccctcctgtccacactcggcggattcgccggcatcgcgctcggcgccggcgctgccatcggcgtcgccgccagtgccggccagccgatcgccctcgactggacctccctgccgctcgcctgggccgccgccatcctggtcggcatcctcgccggcctctacccggcctcccgcgccgcccgtctcaccccgaccgaggccctgcgcggcgaataggggcgacggctggagtgaacgatcaccatgagtgcgcagcctcaatgtcacttttactgcacatgatgacatgtgcagtaaaagtgacatattggtgctgggcgggagagagcacgcgaggcgcgggcggggtgtgggtcgcggctatcggctagtatggtgcggtcacgacagagggaggcatgctgtggccgatgtgatgcgggagctggaacggctgcgaccggtgtatgagacgggcgtcctgcggttgctgttgcgccagaacgcgatgctgtacgtgtcgctgctgcgttccacgttcgacccgctcaccggcgagctgccgcgcgagaccgtggaggagcggttcgcgcaaagtctgaacgctctggccgacgccggcgaatatgcgccgcgcgaggaccagaccttcgccgaggccgcccatcagatcctcgccgacctgacccgtgaaggcgaaggcgactacgcctggctcgccaactcgcatgatgcggccacacaccgattcctctaccgtttgacggcccgcgcccaccgcgccatcgaggcactgagcaggctcgaagacgaatcacgcgccctgtccggcgcgcaggccaacagcatcatcatggaaatcgaacacgcgcgcatgcagctgaccgccgaccccggcgagcgcatcaaactcctcaaccgtgaaatcaaggaacgcaagcacgagatcaaacgcatccaacagggcaagcagcacgccacgctgagcgaagcccaagtggaggacgtgatcgccgtgatccacaacacgctgcgcggcgtacccatcgacctgcgcgaactcgtgctcgacgagcgggacaacggcgacgccttgcgccggcgcatgcagaccggcgacatcagcgtggacgagaacctgacccgctaccacgacgaataccgccgctcgttcagcgaatcggacagcggccgccgcttcgaggacgccttccaggtgatcatcaccgacgagggccgccagcaaatcgacgaagccctgcgcgccatcgccaaaaccccgtatctggccggcgaatccggcgtgctgctcggccagatccgcgacgaactggcccgcatctacgacggcatcgaagccgtgcgccgccagatgcgcgtctccgacgaggcgatcagccggctcgtgcgccagcaaaccgacactcgctaccgtacgatgctcacccgcttgaaccgactgtacgcgcgcctcaacgcggatgcgaaaacccatatgggagacgcctcgcgcccgtacgacacggccaccgcggacgcgctgttcgcgccattgccgatgcgcccggccaaatccatgacccgcgccaccgcacccggcctgagcgacctcgccgccgaagccccgcaggcgactccggtggccgatctgcgggatatggtcaacagcggcggcccccgactcctgcgcatggtcagcctcatccggcgcaacccggtgaccgttgacaggtccgatgacaggtccaacgcaaccctcgtggacatcgccgccagcttcaaccggctgcccgaaagcgaacgccgcgaaagcgagatcgtcggcttcctgggcgggctgggagccgtaagcggcagcgccatcgccgacgagccgtccactgacggcgtcggcatcgacagcgacatcgccaccgagccggccccggcgcagcgcggcgataccgcgacttggcattgcgtatcgatcgacggcgagccccggcactggatcactagaccggtgctggccgacatggacgagctgaacatcattgtggaggaaggatgaccgtggccgaggaacacgaggagcacatggacaacgccaacccgtacgccctgttcgaaggcgacaccggcgacatgccggccgaggcacgcatggccgccatcgccctcaaacgcgaccgctatatcagcgggcccacctacgacaccgtgcttgacaaccgcgacgtcgtcgtacgctccctgaacaacgacctgctcgacttggtgatcaacgaacgctaccgcatcatgtacgccacgcccgtggccggcgacgacgtgaccctgcgctcgctcaaaacccgtgtcagcctcaaacgcgaggaggccgcgctgctcgccttcctgcgcatccgcgtcctcgaatacgagaacgtgcacgccgaccccgccgactggctcgtcagctttgaggagatccgcgccgcgcttgccaccggcgccggttacctggcagcccgcaatgacgaggaaggcgtggcaaagcagatcggcgccatcgtctccgcgatgatcacctacgggtatttggcgcgcttggacgacgaagccatgtaccagatcacgccgctcgtgcccgtggtgctcgaccgcgaactggccgacacctggctcgacgtcgcggaacacggcgacggcgacacggaagatgacgatgacgacgagaagggagccgaatgatgcaggcgacagacgtgcagatgatcgcggaccggtggatgctggaatcccgccgactcatcaactggggctcctatgagggctaccacgaattccgcccctccacggaccacaagctgccggtgaccctgctcgccggcgccagcgaatccggcaaatccacgctggtcgacgcgcagatctccctgctgtacccgaccggcacgccgttcaacaaggcctcgaactccggccgctccgaacgcagcgactacacctacctgcgcggcatggtcggcgtgggcagcaccgaaaccggcgacgagccgctctacctgcgcggtcgcgacgagaatggcgcgccgcaacccgtgtggggcgccatcgtggacacctatcgcaaccagaccaccggccaggtgctttcctgcgccaaattcctctacctgatgcccggcgacggccgcggcgacgtgcgccgccagtacgtggtctggggcaagcccgtggaccccaggcgcatggaccaataccgtgacgccccgttcacaccagcccagctcaaagccacctaccccgactgcctcacattccccagcgccgaagcgttccacacacacatctggagcgcaatgggcctgagcgaggccgcctgccgactgctgcacaagatccagtccgccgacgcgccctcccggctcgacgacatcttcaaacaaggcgtgctcggcgtgcccgaagccctggacctggcccgcaccacggtcgaggactacgaacgttacgacgagaacttccacgccatggacgagaagacccgccgcatggacacgctgcgcggcatccaacaggcctacggcgaatacgccgccgcacgcggcaaggcccgcgccttcgaaccggtcaagccggccgtcgacggcacggtgccggccgtgctgcgcgactgggcattggcccgcatgcgcggcgaagtcgccgtccaactgcccgccgaccgcgccgaacaacagaacagcgaggcggaagccaagctgctgcgccgccgaaccgaagacctgcgcacccgcctcgacatgatccgaggccagatgcagggtctggacggcggcaacctgacccgactcgaactcgaactcgaccaggcccgccgcaccctcgaagacatgcaagccaaccgaacacgaatcgaacaaacgttcgcatccatcggcgaggcgctgcccggcaacgaacagtcctggaacgaacgccgcatcaacgccgtgaacttcaaacgcgaatacaacaaacgagacggcgaatgcgaggaagccctcaccgccgccatcaacgcacgggccggcgcacgcggcgacctcgaacgactgcaacgcgacttcgaccggcaacgctcccagcgcacccgcatctcccagcagatggacgaaacccgcgccatgctctgccgcgccaccggactcgcccccgccgaactgccgtacgtggccgaactcatggacgtgaacgaacacgaggaagactggcgtctcgccatgaacgtcgcctacgcgcccatcgcccagaccatcctcgtcgacaagcgccacgaacagggcttcgccgccaaagtcagcaccatcgacccgcgcaccatgccccgacgcacctggcagttcgtggacaccgcacgccactacgacgacaccggcgcgcacgcgaacatactcaccggagaacaggacggcgactggctgtccggcaaactgcgctaccgcgacgactcgcccttcgccgactggctgcgctcgcagacccaggacgaacgattcgacgccctatgcgtcaccgccatcgacgacaccgaccgcaccaaccgtcaggtgcaggccgacggtcagatcaaatccggcgcacgcggccagcacggcaccaaagaccgcgcccaggtcatcggattcgtcaacgaaacctacctcaacgcgctcgcagcgcaggtcgacgccgcccgcaacgcgctcagccaagccgacaccgactacacggccgccaaaacacagtccgataacctccaccgcgaactcgaactggccaaccagctcgcctacacgtcctgggaacgcatcgacatcgccggcgcgcaacggaccatcacggacacgcaggacgccatcgcatccatcaaaaacgatcccaaactcgccgaactcgccaaacagcgcgacgaactgaacgccgaactcgaccgtgtggaacgccagcgcatcgaatccgaccaggccgcggcccgcgccggcagcgccgtcgaagcggcgctcatctggctgcgcgaccatgccgacaccggcacgacggacgccgccggtgccaccgccgacaatgacgatgacgccgcgtccggcccgctgtcggacgaagtcacggcggcgctcgccgaatcctacgacaaccgattcgccgggctggcggacgcggccatgcgcgcgcacatgatcatcggcgcgggcgcggcaggaacgcaggcgccgggggagaacttccccgaacgcaccatcgccggcatcggcaaggacatggcctcccgcatcaacctgctgaacggccaggccgacgccgcacgcaccggcgtcgaatcgaaaatgagcacctacatcgcgctctacgcggccgacgatgattcgctgaccgccagcgtggaggactaccggtactatctcgacgaactcgccagcctcacccagctggccgcggtcgccgccaccgacgccgaataccggcgctgcctcgaacagctgctcaggagcttcctgaccatcaaacgcgccatcgacacggatgccagcgacatccacgaccagcttgaccgcatcaacgccatgctcaaaggccagcagttcggccccaagcacggcagcctgtccctgcacgcggacgtgcgccgtcccgagcgcaccttctgggcgcagctcatccgcgtcatcggcaccctgaacgattggaaatccgccgacgtcaacgattccgacgcctcgcgcaaggctttcgcggcctgcgcgccgatggtcgggctgctgcgcgccgaactcgcgcaggtcaaggacacgaacggcgtgaaaagctacggcgcccgcaacctcgacccgcgctgccgctcgtccttctacgccatcgtgcatcatgccgacggtccggacgaacgcatcacctccaccggcggccgttcgggcggcgccttgcaggagctcacctcattcgtatacggcgcggcgctcatctacctgctcggcggcggcctgaccagcgaaccctcgtacaccacgctgttcctcgacgaggcgctcatcaaggccgacggccgttacacgcagcgcgccctcacggtgctaccgcgcctcggattccaggtcatcgtctccgccccggaaagcaagaccggtgaaatcctcgaggtctccaccaaggcctacgtgacctacaaggaccccgacaccggcctcacctccctgtgcgaggccgtgctgcatcagaatgacatggacgatgaatcatcgtcggatatattgaaggatgacggggttgccgaatgagcagtcccggcgtcgccggtattaagacgattcggttcgactcgacgatgttcgaaagcaggtgatgggaactatggccggcatgaaagacatcgctgcgatcaccacatgcgtgaagaaacatatgcgttcacatatgtacgacatcgaaccggcatggccatttcccgtgccggtgggattgccggaccaagcatttttggaaaccaatgcgattgcagtgcatgacaacaacaatgagatacggcaatgggcaagcaagaatggttgcgaaatcataaccaagcatcgcaccataggcacctctgtcgagttgatctccaaagtcgtcgttcctgacgaatcaatagccatgcgtgtggttggtcgtacgctggcggcggaatatcgcgaagcgcaccgtcgcacagattccactgacaggattcagcggcaaatggctgaatgagtcaaaaaccaatcgtcgtaaggccatttgccgactgctcggtgtcgaaacgttgggtctgtcaaaacggccgaccgaactgcggttccgttatctcgatccgggccacgacgattttggtaccgatcgtactgaacgcagcgcgaagattgctatgcgggagcctaagccgacgcccggccttcaatcggcggagcgacgtctttatgaacgactgtgtgctgacaaaaccatcgcttatcggcgtatcgaacaggaacgcattcccatgcgtgatgcagttgacgaattacgcaagcttggcatccccgtggagtccattgaagattttgtcccggttcgaacatcaatcgtttgacggacgtaccggggcagaatccgttgtcccggtttgtgatttcgggtgtttttcgcgaaccgggacatgttgtgttgccccggtatgggcgtcaatcgtttgatgcgagaatcgggacaacatggcgactctgagattggctttattccgccgtttccgttcgcgttttatgtggttcgtggaaactggaatgtcctggttctcgaaaacaggccaaaatcacgaaccgggacagcgggttttgccccgatgcggacgtcaaacgattgacatgtgaaccggggcaaatcagaggaggagaggtcttcgggatagagcttgactggggctgggcgcacggttgatgtcgcgtgggccggctcttgcgttttggtccactgatggtccggaattttgcatactatggttcggttttccggcctgacacgccatcgaacaagcgttcgaatttggtcgtgtgttcgggtatccttgggacagatttggcgcgcgcataaccgtgcgcgcgggaacggtgagatggaaggtggggtgtggctgtggcggcaacgcggactggcgcaaggcgcgcaacaagcgcaaagggcgcgaaaaccagcaagggcaagaacggtgaggtcatcgtcgaaaaggtgatgaccagcgactccttcctgagccgggaaatcaaaaaggcgccgctgatcgaacacgatggttcgctggtagctgatatctcgcacatcccgaacgatctcaagatcacgattcagggtgcgcgcgaacacaacctcaagaatgtcgacctggcgattccacgcaaccgtatggtcgtgttcaccggcctgtccggttccggcaaatcctcgctcgcgtttgacaccctgttcgccgaaggccagcgacgctacgtcgaatccctgtccgcctacgcccgccagttcctgggtcagatggacaagcccgatgttgacttcatcgagggcctgagcccggccgtctccatcgatcagaagaccaccaaccgcaacccgcgttcgaccgtcggcaccatcaccgaaatctacgattacctgcgactcctcttcgcccgcaccggcatcccgcactgccccgaatgcggcgagcccgtcgcctcccagaccccgcagcagatcgtcgacacgctgctcggctacccggagcgcactcgattccagattctctcgcccgtggtcaagggccgcaagggcgagttcgtggacatgatcgagctgctgcgctccgacggctacgcccgcgcgctcatcgacggcgagatgacacagctgtccgacgacatcaaactcaccaagcagaagaagcacaccatcgaggtcgtggtcgaccgactcgtggtcaaggacggtatccgccaacgtttgactgattcggtggaaaccgccctcaagctcgccaacggcagcatcgtcatcgacttcgtggacgaggaggaaggcagcccggcccgccgccagccgttctccgaacaccgcagctgcccgaacgggcacacgctcgaactcgatgaggtcgagccgcgcaccttctccttcaacgccccctacggtgcctgccccgcctgcaccggtctcggcttcaaactggaaatcgacccggacctcatcatctccgacccggacaagtcactggccgacggcgtcatcgaaccgtggagcggcaccaagatgacctcccagtactacggccacatcctcgaaggcttggccaaggaaatgggcttctccatgaagaccccttggaaggacctgccggacgacgtcaagcacgacatcctctacggccacgacttcaaggtcaacgtctcctaccgcaatcgctggggacgcctgcgtgaatactccaccggtttcgaaggcgtgatccgcacgctcatgcgacgccacgacgaaaccgattcgcagtccatgcgcgaatactacgagtcgtacatgcgcgaagtgccctgccaggtctgccacggacgtcgtctgaagcccgaggtgctctctgtcaccgtggacggcaaatccatcttcgacgtatgtgacatgcccgtcgtacgcgaactcgcctggatcaacggcctgaaactcgaaggctcggcacagctgatcgccggcgaagtgctcaaggagatcaaggcccgactcggcttcctgaacgacgtcggcctcgactacctgaccctctcgcgcgcggccgccaccctgtccggcggagaagcgcagcgcatccgactcgccacgcagatcggctccggtctggtcggcgtcatgtacgtgctcgacgagccgtccatcggcctgcaccagcgcgacaacgaacgcctcatcgaaaccctgcaccacctgcgcgatctcggcaacacgctgatcgtcgtcgaacacgacgaggacacgatacgccgcgccgactgggtggtcgacatcggccccggcgccggcgaacacggcggcgaagtcatctactccggccccgccaagcacctcatcgaagccaagcgctccatcaccggcgactacatcgcccaccggcgagagatcgccgtgcccgccaagcgccgcaagatccacaagacccaggtgctcaaagtcgtgggtgcccgcgagaacaacctcaagaacatcgacgtgagcttcccgctcggcgtgctcaccgtggtcaccggcgtctccggctccggcaaatcctcgctggtcaacacgatcctctacccggtgctcgccgacaagctcaacggtgcacgcatcgtacccggccgccacaggcgcgtggaaggcgtggatcaggtgcgcaaggtgatccacgtcgaccagaacccgatcggccgcacgccgcgatccaaccccgccacctacaccggtgtgtgggacaagatccgcacccttttcgccaagactcccgaagcccaggtgcgcggctacggccccggccgcttcagtttcaacgtcaaaggcggccgatgcgaggcctgccacggcgacggcacgctgaagatcgaaatgaacttcctacccgacgtctacgtggactgcgaggtctgccacggcaaacgatacaaccgcgagacccttgaagtcacgtacaacggcaagaccgtggccgacatcctcaacatgcccatcgaggaggccgccgacttcttcaaggcgtacaccggcatctcccgatacctgaagaccctcgtggacgtcggcctcggctacatccgactcggccagcccgcacccaccctgtccggcggcgaatcgcagcgcgtcaagcttgccaccgagctgcagcgccgatccgacggcaaaaccgtgtacatcctcgacgagccgaccactggcctgcacttcgaagacgtgaacaagctgctcaaggtgctgcagtccctggtggacaagggcaatacggtcatcgtcatcgaacataatctggatgtgatcaaggaggccgactggctgatcgatctcggtccggagggtggcgacggaggcggcaccatcgtcacgcagggcacgcccgaacaggttgccgaatgcgaagcctcatggaccggcaagttcctgaagcccatgctttagccttccattgcagctgacctcgggtgggttggggtggtatgttgctggacacgctccgggccgctcaggccaagtctttacggtccagcagcacataccaacccgcccaatccctgatgattggttttgcttaatagcgaggaggattatgacgaacgatattgagcggcatagtccggatgagtggcggaagactgcggtggcgttaatgccggaaagcgtagctgtgggcgccggggaaacgacggcgaaggtgaatgcgaatggggcacctttgctgggggattctcgcgacctgttccgacccaagacctcggatattcccgccaaacccggtgtgtacaaatggcgcgacggggaagggcgcgtcatttatgtgggcaaggcgaagaacctgcgcaacaggctcaccaattatttccagccgctgtatctgctgcatccgcgcacgcagaccatggtgctgaccgcacgcagtctggagtggacggtcgtcgccaccgaactggaatcactgacgttggaatacacgtggatcaaggaattcgacccacggttcaacgtgcagttccgcgacgacaagacctatccgtatctcgcggtcagcacgggggagcgaattccgcgcgtgtgggtcacgcggtcgcgcaaacggcgggatacccggtatttcggcccctatgccaaagtgtgggaattgcggcacagtcttgaccggttgctgcgcacgttcccggtacgcacctgcaccaccaacgtattccacaaggcgcaactgaccggacggccatgcctgttcgcctccatcggcaaatgctccgcaccttgcgtgaaccgtatcgaagcggacgaacaccggcggctgtgcgaacagctggtcggcgtgatgaccggacgactcggacggccatacatcgcccagttgacccgcgacatgaaagaggccagcgccgaactcgaattcgagaaagccgcccgactgcgcgaccagatccaaatgctggaaaccgtggtgcaacagaacgccgtcgtcttcgaccaggatgtggacgcggacgtgttcggcttcgccagcgacgagctcgaagcctcggtgcacgccttttatgtgcgcgccggctctattcgcggcgaacgcaactggagcgtcgaacgagttgaggacatcgatgacgccgacttgatggccgaccttctggtgcaggtgtattcggactccgccggggacaatcacccccagtcggccgcgaccatctccaccaatcgcgaggccatcggctccacacagaccatcacggccacggacgctgtggcacgcgcccaggccacccgagaacgcaacacccgtcaggagaccaccggacgcgcggacctgctggcacccatcgcaccggtaccgcgcgaaatcatcgtgcccgtcgaaccggcccgccgcgaggaactcgaaggctggctgaccaatctgcgcgggggcgcggtgaccatccgcgtggcctcgcgaggcgacaagaagcagcttatggaccgcgccaacgagaacgccagccaagcactgcaacgcagcaagatgagccgcatctccgacatgggcgcacgcacccaggccatgaacgatgtggccaaggcattgggactcgcgcaagccccgctgcgcatcgaatgctacgacatttcgaacactgtgggcggtgccttccaagtggcctccatggtggtgttcgaagacgcgatcgccaagaaatccgaataccgacgcttcgccgtccgaggcaaggacggcaaaggcgcggtggatgatctgtccgcgctttacgagacgctcacccgccgcttcaggcacggcaacatcgccggcgactccggcgaaagcatcgacgcggaacagcgcgcggcctcggccgccggcaagatgaccactgccgtggcggcggagacaatcgttgcgaacggtaacgacaatggtgagggcggttccgacatcagtggcaagggacacgcggtgccggtcggagtgcagaacgatgcacgggagtcctcgcccgacatcgtccagcagaacacaaaccggcatcactttgcctacacgccgaacctggtggtggtcgacggcggtaagccacaggtcatggccgccgccaaggcgcttgaggactgtggcgtgatcgacgtggccgtctgcggactggccaaacgcttggaagaggtgtgggtgccggacgacgactatccgatcatcctcaaacgccagtccgaaggcatgtatctgctgcagcgtgtacgcgacgaatcccaccgcttcgccatcacctaccaccgccaacagcggcgcaaaggcgccctgcgcagcgcgctcgacgagattcccggcatcggcgaaagctaccagaagcggctgctcaaccacttcggctcggtcaaagccatgcgtgaagccagtgtcgaggacttcgagaaggtcaaaggcatcggccacgccaaagccaaagcgctgtacaacgcgctgcacgagcagtgagccggcccggtccagcagcccagagtgaattttcggttgcggggcctgtggttgacatattcgaagcaaagtgtcggctagcatggaaacagacatcaaggaggggatatggccaatcatcgttgcgctgtactcggcaaacccgtcgcgcactcattgtcacccgtgctccacaacgcggcttatcgttcgctgaaactcgacgattggctgtacgacaagcacgaggtgggggaagacgacctcgacgctttcctcaaaggccttggctcgacgtgggctggcctgagcctgaccatgccgttgaagaagaccatccaaccgtacggtgttccggaaaatctgtgggccaaggaactgaaggtggcgaataccgcggtattcgactggagtgtggctaccgatgatcccgcttggccgaacggcaagccgggcatcaagctgtacaacaccgatgtcatcggcatccaactcgccttcgaccacgccaatcgcgaactcggcgaacaccacaccgcatcgagaagcggcgccgcgctgatcctcggcaatggcaacaccgccacttcggcgttggccgcatgctgcatgatgcccgaaatcggccatatcatcgtcgccgcccgccaccctgggaaaaacaccgggcttaagccagtggccgaaaagttcgtcaacgtgcataacccgtacagcgaaatcgaattaggcgacgatcaggccctgctcgaggcagcccgcaacgccacctatgtcatcaacacgattcccggacatgcggccgacaacgtcgcggatgccctcaccaatgccggaaccgagccattctccggactgctgctggacgtggtctacgatccacgccccaccaagctcatggaagcctggcgcgctcatggcggtcacgccatcggcggcgaagaaatgctgctgtaccaagctctcgtacaggtattgctgatgaccggtatctgggatgacgacccgcccagcgatgccgaccagcgtctgcaggacaccaccaccgaagacgaccagctggagatcgcgatgcgcaaagctcttgaggaggcgttgtaatgagtcaacagacaacaatccgcgataccggcgaggcggccgccacgaatgcgccggcgaattccgcgacatccacatcgactccggacaaccagccgaccccgcttgatgccttcgaggtgctgctcatcaccggtatgtccggcgcaggccgctctcatgccgctgactgcgtggaagacatgggatggtatgtggtcgacaacctgcctcccaaactgcttatcccgcttgtcgacatgatgaccacctccggttccggatcggggtcgggcgtccacaagcttgccgccgtcatcgacgtgcgctccagctatttcgacgagctggccgccgtgctcggccatctggatgatctcggcgtcaaaacccatattctgttcctcgacgccagcaacgaagtgctcatcaagcgctatgaatccgtgcgccgcccgcacccgctgcagcacggcaaccgactgatcgacggcatccttgaggaacgtcacctgctggaagacctcaaggagcgagccgactgggtcattgacaccagctccctgagcatccaccagctgtccaccaaactctacgagacgatgctcggttccggccccaccaccgtggcggtacacatcttcagcttcggcttcaaatacggcatgcccatcgacgccgatttcgtggccgatgtgcgttttctgcccaacccgttctgggttcccaacctgcgcgagcttaccgggcacgacaagccggtcgccgactacgtgctttccagcaagggagccaaggaatttctcgacgcttatgagaaagctatcgagattgcgttggaaggatacgcccaggaagacaagcactatgtaaccatcgccgtcggctgcaccggtggtcagcaccggtcggtggcgatgagcgaagagctggctcgccgcttacgcgcacatgggctcaacgtaaccgtttccgcgagagaacagcataagcgtcactcatcgtaagcaggcgtcgagcggtcatcgggcaagcgttcggtgaccacactgcgagaaagcaaagcccataatacgtatcaaacgggttcgcttgtccaccagattaggtatcacagaaagccgatggcttccgaccgtatgacagcagataacggcacgaagcgcctgaagcattgagaagaacgggactgtaggaggtagatcttggctcttctggacgatgtcaaaagcgagttggcggcctttgaaggcgattcgccagccgcgatcaaggcccaagctgcggccatgatccgttttggcggcggtcttcgaccggtacagaatacatacgttatccaagccgtattcacctcgcttgacgttgcagaatggctgaagaacacgttgaggaacacgttcgggcatgaagccgaggtcaaccacctcacccgtcagaccccgaacggccctgtcgagacctacgtggtgctcgtcacccgcaacgtagtggccttggctttgcagaccggactggtcgaccgccgcaagcagcaggtccgtggactgccgtctgaagtggtcaacggatccatcgcccaaatcaaagcagcatggcgcggcgccttcatggcccgtggcttcctatccgatcccggtaaggccagcttcctggaaatcgcttgccctacggaagaggccgccatggccctgtgtggcgtggcccgtcgtctcggcatccaggccaagcatcgcacgctgcgcagctccgagcgcgtgaccctcaaggatcccgacgccatcgaacgcatgctcaagctcatgggcgccacccgttcggcccgcgaatggaccggcaagcgctccgacggcgaggcccgcggcaaggccaaccgtctggccaacttcgatgacgccaatatgcgccgttccgccaaggctgccgccgaagccagcgaaaaagtgcagcatgccttcgaagtgctcggcgataacattccggacaacctccgtcaggccggccagctgcgcatcgatcacgtggacaagagcctcgaggagcttggcaagatcgccgaaccgcaaatcaccaaggatgcgattgccggccgaattcgccgactgcttcagcttgccgagaaaacggagaaggctcgcgcagccgaaggcaagtaacccgacaacgacgtaacgaaacaccgcattcagtcagtaggcgaatgcggtgttttgttccggaatgcctgtaatatgcaaagtggcaaaattggccactttgacgtgcgattcgtcaaggaaaggatattcatgaagacactcaaggaccttggagatctcaagggcaagcgcgttctggttcgcgctgatttcaatgttccgctggacggcaccaccatcaccgatgacggtcgaatcaaggctgctctgccgaccatcaagaccctgcgcgaagaaggcgccaaggtcatcctcatggcccaccttggccgcccgaagggcaaggtcgttcctgagctgagcctggccccggttgccgcccgcctcggcgagctgctcggcaccaacgtgccgctggccaaggacacctacggcgaggacgctcaggccaaggtcgccgccatgaacgatggcgatgttgtgctgcttgagaacgttcgcttcaacccggaggagacctctaaggacgccgacgaacgcgccgcttacgccaagaagatcgccgctctcggcgaggccttcgtttccgatggcttcggcgtggtccaccgcgcccagggctccaactacgacgttgccgccgatctgccggccgccgcaggcctgctggtcgagaaggaagtcaaggccctgtccaaggccaccgagaacccggagcgtccgttcaccgtggtgctcggcggttccaaggtctccgacaagctcggcgtcatcgagaacctgctcgacaaggccaaccgtctggtcatcggcggcggcatggtgttcaccttcctcaaggccaagggctacgaggtcggcacctccctgcttgaagaggaccagcttgagaaggtcaagggctacatcgagaccgccgagaagaacggcgttgagctcgtgctgccgaccgacgtcgccgtgaacgccggcttcccggccggtgacaccccggttgctccggaagtcgttgccgccgacgccatcccggccgaccagatgggtctggacattggcccggagtcccagaagctcttccacgacaagatcgtcgactccaagaccgtcgtgtggaacggcccgatgggcgtgttcgaggttcctgagttcgcctccggcaccaaggccgtggcccagggtctggtcgacgccaccgcagccggtgcgttcaccatcgtcggtggcggcgactccgcctccgccgtgcgtaacctcggcttcccggaggacggcttctcccacatctccaccggtggcggcgcttccctcgagttcctcgaaggcaaggagctccctggtctgaaggtgcttgagtaatccattttctagctcccctccttgaggggagctacgtattttttagaggggaaacatatggcgtccaaacgcattccgttggtggccggcaactggaagatgaatttcgaccatcttgaagccacttacttcgtgcagaagctggtatggctgttgcgtgacgctcgctttgacttcaaacgctgcgaagtcgcgcttttcccctcgttcacgtcattgcgcagcgtacaggtgctggtcgaagccgacaagctccatgtcgcctacggcgcacaatccgtttccgtgaccacccaaggtgccttcaccggcgatgtgtccgcggacatgatcgcccatctcggctgctcgtacgtcatcgtcggccactccgaacgccgcaaataccatcctgaagatgacgccaatatcgtcgatcaggtacgtgccgtgctcgccgccggcatgcagccgattttgtgcgtcggcgaaagcttcgaggaacgacgtcaaggcattgaactcgatttcgccgtgggccaggtacgagacgtcacccgcgatctcaacgaagaacaagccgccgaactcatcgtggcctacgaacctgtctgggccattggcaccggcatggtggccactccgcaatccgcccaggatgccgcaaacgccatccgcaacgatttgaagaccacttttggcacgaaggtatccgatagcgtacgtatcctgtacggcggatcggtcacctcgaaaaacgcggcggaactcatttcccaacccgacgtcgacggcttcctgatcggaggggcggccctggatgttgaggaactcgccaaaatcgctcgactggcactgaaatccacgaaatcacggaactaataccacggttttcccgtgtgtgcgctatgctggtcaacagtccaatcaatccggaggtaccctgtgaccgctcttaagatcacgctgcaagtcatcgtcgtgctgctcagcttcgtgctgaccctgctcatccttatgcacaagggcaagggcggcggtttgtccgacatgttcggcggcggtctgacccagaacgccggtacttccggtgtcgccgaaaagaacctgaaccgttggaccgttatcatcgctctggtgtgggtggcattgatcatcggcctcgacatgatgaccaagttcaacctcggctgatcggcttgcacgccatatagacttgtcgctcgcgacccatgaccgttaccgtcggtcatgggtcgtatgcgttctatcgagtattacgaaaggacatcaccatggtcactatgaaccgcaacaaagtcgttatcgtcggcactggccaggtcggtgccaccgccgccttcggcatcgtcacgcacggcctgtgcaatgagctcgtgctcatcgaccgctccgccgccaaagccctgggggaggcccgcgacctcgatgacggcagcgaattccaggaccgccacgtcaaggtgcgcgccggcgactacgccgactgcaaggacgcggacatcgtcgtcatcaccgtgggccgcaagccgccggccaactccaaccgcatggccgaactcggcttcaccgtgggccttgtgggcgaagtggtcgacaacgtcatggcctccggcttcgacggcgtgatcgtcatggtctccaacccggtcgatgtgatggcctggtatgcctggaaacgttccggcctgccgcgcacccaggtgctgggcaccggcaccgcgctcgacacctcgcgtctcaagaccatcatcggcgaagagaccggcctcgacccgcgtaacgtgggcggcttcgtgatgggcgagcacggcgactcccagttcaccgcatggtccaccgtctcgctcggcggcaagccattcgcccgcttcctggccgacaaccaagaccgtttcgcctccgtgtccaccaccgaaatcgaagagaagacccgcacccgtggcgatgagatcgtcgcggccaagggcggtaccaacttcggcatcgcctccaccgtggccggcatcgtacagaccatcctgtgggacgaacgccgcatcgttcccgtctccaccctgctgaacggcgaatacggcgaacatgacgtgttcctcggtgtccccactgaactgcgcgccaatggtgccaacgagatcgtcgaactcgatctgagcgaggacgagcaggccaaattgcaccattccgccgaactcgtgcgtgaacactgcgaggggctgctgtgattctcgacgccatcacaccgaaacaaccccgactgctggtcgccgacctcgacggtacgttgctgcacgacgccgaggtattcgaggaccggttcatcacccagcgcagcatcgacaccatcaaccgcgcgcacgatgccggactgaaattcgccatcgccaccgcgcggccggtgagtaccggcctccagttcgccgaaaaactgccggtggacgccgtaatctatctgaacggtgccctcatcgatttcgacccggcccactccgacttcgacctgctcacctcaggtgccacgccggccgatgagaaccatttgatcaagattggcttctcctcacggcgtgcctgcgaagtctgtctgttcctgctcgatcgcatgcccggcctgaagctcggcatcgtgatgaacgacgtgcgctacaccaacttcgatgtgcgcgtgtattggaaaacacaggccttccaatacacgaacttccacgacgtgcccgaaggcgtggcggataagatcaccatcttccccgagcctgaacagtggaacgagctgcgtgcgctgattccgccggacttcgacatctccattagcgaaggcgtgatgtggatgctcatgaacccgcaggccaacaaggagcacgcgctgcacctgctgtgcgaacgactggacgtgccgctcgaacagaccgccgccttcggcgacgacctcatcgatatcaacatgatgagcgaatccggccggggtgtggccgtggccaacgcgaaccccaaggtgttgtctatcgccgacgagatctgcccgcccaacaatgaggacggcgtcgcccaatggattgaagcgcagttgggctgaaccggccgagactcgagaacacgccaaaattgaacttgtgttgaaccgggagtatgctttgaactgttgttcaaaagataaattgaactcccggttggaggcataaggatatgagcgtatcggtgtttgcggaacgtctgcgcaatgcgatgaacagtaggggattgaagcaggtcgatttggtgcacgccgccgaacatcgtggcgtaaagatgggcaagagccatatcagccaatacgtggccggcaagaccatgccccgcgaagacgtgctcgaattcctggccagcgaactggacgtcgacgcgaactggctgcgcggcgaggaatccaccccgcaattgaactcggacgcttccaacagcgtcacggacggcgaacacgccgccacgccgcttgccacgggcaccgccaagcccctgacggacagcgagattcccgtgggccgccgccgtaccttcggcaaatcgcacaagctcgacaacgtgctctacgacgtgcgcggcccggtcgccgacgaggcgatgcgcatggaggccaacggcacccacatcctgaaattgaacatcggcaatccagcacccttcggcttccgcacgccggacgaagtcgtctatgacatggcccaccagctcaccgacaccgaaggctactcgccgtccaagggcctgttctccgcgcgcaaggccatcatgcagtacgcgcagctgaagaacatcccgaacgtcaccatcgacgacatctacaccggcaacggcgtcagcgagctcatcaacctgtccatgtccgcgctgctcgacaccggcgacgaagtgctcgtgccctccccggactacccgctgtggaccgcctgcgtgaacctggccggcggcaccgccgtgcactacctgtgcgacgaacagtccgaatggtatccggacatcgatgacatccgctccaagatcaccagcaacaccaaggcgattgtcatcatcaacccgaacaaccccaccggcgcactttacccaaaggaagtgctccagcagatcgtcgacatcgcgcgtgaacaccagctcatcatcttctccgacgaaatctacgatcgcctcgtcatggacggcctgcagcacatctccatcgcctcgatggccccggacctgttctgcgtgaccttctccggcctgtcgaaatcgcacatgatcgccggctaccgcatcggctggatgatcctgtccggcaacaagcgtatcgccaaggactacatcgagggcctcaacatgctcgccaacatgcgcatgtgctcgaacgtgcccgcccagtccgtggtgcagaccgcgctcggcggccaccagagcgtcaacgactacatcgtgccgggcggccgcgtgcacgaccagcgtgacctcgtttacgacatgctcaaccagattcccggcatcaccgccgtcaagccgaaggccgcgttctacatcttcccgaagatcgacgtcaaacgcttcaacatccactcggacgagcagttcgcgctcgacctgctgcatgacaagcacatcctcatcagccacggcggcgcgttcaactggcatcgccccgaccacttccgcgtggtgtacctgccgcgcatgggcatgctgcacgaaaccatgggggagctcgccgacttcttcagctactactggcagagctgatccttggtacaggcgaacacgatcgatgccgggctgggcaccaaaccggtgccccgtctggccctgaccatgtcggtccccaccatcgtggcgcaggcggcgaacgcctcgtacacgatcatcgaccgactgttcatcgggcacatccccgaagtgggcaacgcggcgatgaccggcgtgggcatctgcttcccgattctgccggccgtcaccgccttcgcctcgctgatcggcgcaggcggcgcgccgcgcgcctccattgaacttgggcgcggcaacttcaagaaagccgaacgcatcctcggcaccagcgccgcgttcctcatcgccatagccctgaccctcaccgtgctgctgcagttggcgaaaccactgtggccatggtctccgtactcatcggcaccggcatatccatccttcttgaccccgtgttcattttcgtgttcggatggggcgtcaggggagcggccgccgcgaacgtgctcgccacattccccggcttcttcgcctcatggttcacctcggaacagacggtcatcgacatcgtgacccgcatgatgccgattttcgtctgcggctggggtatcttcggcatccagatgggcgcgcaatgcgcactcgtcggcatgggccaggccaaacagtcggtgttcttggccatcttccgcaagatcatcctgctcgtgccgctcgcgctgctgctgccgcactggatcagcgtcaacggcatcttcatcgccgaacccatctccgacgccacctccggcatcgtggccggcttcctgttctatgccacctaccgcaagattcggcgagatatggtctagactcctgattcaatggatgtgccgtctcatgcgttgcgaaacacgggacggatagaatgcctcgcaaaacgggtgcccgttgtttcgtgatatgaaggagattttatgccggtggtgtcgcgtcgtgcgcagccaacgtgatggacataatcgccgaaagcagggagaacaatggcagcacgcacaacacgacggtcagcagttccaaagcttcacggccgatgcaataagcgacaagacctgcattgtcagttaccgatagcgctgggcagaaatcggtgtgtctaccagtgttgtagctgttggtaaagaacgtgagacctgaccagaacagggcaacgggaacagagccgatggcgcgaaaagccctgtactcccgcaacggtcagacagagaatcgcgacaacactcagcgcagtcaccgtcataaaccacagtggtgaggtgacgcagactccataatcgtcagttgcttggcccgagagatagtaggtcattctgccaatcgccggacagttcggatgcagcatcatgccgccccaaatgcgctcatatagtggtgtatagtggtgcgaacgatacaccggcaccgctgagcgtcgcaacaaccgccatcaccgaccgaccgccagactccggcacagaccgggaagaactaccgtcgcggagcatcggcgataccaatggcaacaccgaggatagccgggaccacccagccgagctggtattgctgcaagggcagcatggccagcgtcgtgtccagccagccgatggagccgccgaagacggtgatcaggctggagatgcaggtggcgaaggagtcgatgcccaccagcagcacggtccagaagtagacatgtgggaatcgcgcgccgagcgacttgtgggtcagcgccagcagcaccagcacgatggcgatcggatacagtgcggacaacaccggcacggaaaccttgatgatcgcacttagcccggcgttggacacgatgaaactgaacacggtgaagatgacctgccaggtgcggtagctcaacgttctccctgcaacggtctggaaccgagtgtggaagtaggtggcgcaggtaccgatcagtccggtgcatacgttgaggcaggcgatgacgaagacgataccgaggaacgcggtaccgaacgcgccgaacagggacgaggtgagattggtgagcacggtcgcgcccgtgtctttggcgggatcgatggtggcgatggcgccggacaccacgcccacgtagctcagtgcgccgtagatcacgatcagcagcacaccggtgccgagtccggcatacgcggtctccttctgcacttgcgattcgtcatcgacctgctgggtgcggatattcgcggaaatcacgatgccgaaatagagcgcggcgagcagatccatggtctggtagccgtcgaggaagccacgtgcaatctggtttgtggagtagtcgcccatcggtttggccggggtaccgataccgtggattaggcaggcgatgaacaggacggcaatcagcaccagcagcaacggtcccatgaatcggccgagcactttggagagtttttcgggatgctgggcgaacaggaacgccagtgtgaagaacacgagcgagtagatgagttgggccagccagccgtaggaggacggcacgaaaggcgccaccatcatttcgaacgaggtggtcgccgtacgcggaatcgcaaagcaggggccgatggtgagcatgatcgccaagccgaggaacagggcgaatttgggggagacccggccggcgagtttgtcgaagccaccggcgaaggtgaccgccagcacgccgagaatcggcaggccgaccgcggagacgatgaagccgatggccgccggtatggtcgcggaaccggcctgagctccgacaaacggcgggaagatcaggttgcccgctccgaagaacatcgaaaagaaggtaaaggtcatcaccagccgctggcgtgcgacaagtttgttcattacggttcggcctttctctcatgtgctcgtactactgtagcaacaaacgtaagaagccccgaccggttggggtcggagcttctgtgagctaatcagttaatgcgcgaaatgcgcatcagctaataatctcaggcgttcacgcggtcgatgccggactggacgtcagccagcacggaatcccaggacttgatgaaggcggcgacaccgtcggcctccagcttgtcagtgacgtccttgaggttgatacccagctcagccagcttgttgatgacggcgtgggactcctcgtaggtgccctcgatggacggagcgccgttgccgtggtcggccagagcgttcagggtcttctccggcatggtgttgacgatgtgcttggcaacgagctcgtcaacgtacttgcagtcggagtaggcggcgttcttggtaccggtggaggcccacagcggacgctgaaccttggcacccttggcagccaggtcggcccaacgcggatcctcggcaaacttcttctcgaagagctcgtaagccaggcgagcgttggccacagcggccttgccctccagagccttggcctcgtcggagccgttggcttccagcagcttgtcgacagcggtgtccacgcgggagacgaagaaggaagcgacggagccgatgtgcttcaggtcgtggccgttggcgtcagcctgggcgatgccctcgatgaaggcgtcgatgacctgctcgtagcgctcgagcgagaagatcagggtgacgttgacggagatacccttggccagggtggcggtgatggccggcaggccttcgagggttgccggaatcttgatcatggcgttcggacggttgaccttctcccagagttccacagcctgcttggcggtgttctcggtgtcgtgggccagacgcgggtcgacctcgatggagacgcggccgtcgacgaagtcggtagcctcagcgatctcgcggaagatgtcggtggcgttgcgcacgtcggtggtggtgagctcgcggacagcggtctcaacgtcaaccttgccgagctccttgagctgagcgtcgtacgggccgacctggctcagggccttctggaagatggacgggttggtggtcacgccgacaacgttcttgttggcgatgagatcctgcagagagccggactcgatgcgggagcgggacaggtcgtccagccagatcgaga

SEQ ID NO: 1402 - DNA, 4250 bp, Unknown
  R257_15m  MAG No. k141_7618
ccgccatcttccacttcaagtggtcgaatcgcggaatcagccggcggatatcatgtgccgcgtcgttaccagtcaagccgggaaattcgttgcagacggtcagtcgaccagcgaattgatctggatgacatggtcgcgctgcggaccggtgccgatcgcggagatacggcagccgctcagctcttccaaacgcttgacgtaggcctggcaggtggcgggcagctcgtcgaaggagtggcagtcggagatgtcctcatcccagccgggcatggtctcgtaaatcggcttggccgcggcgaaggcggcctgatcggtcggcatatcgtcgtgacgttcgccgtccacgtcgtaggccacgcagatcggaatctccttcaggccggtgagcacgtcgagcttggtgagcacgatgtcggtcaggccattgacctgggaggcgtaacggttgacgaccgcatcgaaccagccgcaacgacgcggacgaccggtggtcacgccaaattcgtgaccctgctgacgcagccattcgccggactcgtccagcagttcggtggggaatgggccttcgcccacgcgggtgacgtaggccttggagacgccgattacgcgggtgatcttggtggggcccacgccggtgccggtgcaggcgccgccggcggtcgggttggaagaggtgacgaacgggtaggtgccgtggtccacgtcaagcatagtggcctgagcgccttcaaacagcacggtcttgccttcgtcaagcgccttgttgagaatcaggccggtgttggccacgtacggcttgaggcgttcgccgagcttcagcaactcctcggtggtctggtccacgtcgatcggacgacggttgtagagcttgaccagcatctggttcttctggtgcaggctggcctccaccttgtcgtgcagatggtcggcgttgaacaggtcatgcacgcggatgccgacacggttgatcttgtccgcgtaggctgggccgatgccacggccggtggtgccgatcttgtgcttgccaaggaagcgttcagtcaccttgtcgagtgtgcggtggtagggcgcgatgatgtgtgcggcctcgctcaccttgaggtgggagcaatcgatgccgcgggattccaagccgtcgatctcctcgaagagcacttccgggtccacgaccacgccgttgccgatcaccggggtcaggttcgggttgatgatgccggagggcagcagatgcagggcgtacgactcatcgccgaccaccacgctatggcccgcgttgttgccgccgttgaagcgcgcgacgtaatcgaccttggtgccgatcagatcggtagccttgcctttaccctcgtcgccccactgagcaccgataagaacaattccaggcatgatgcacctccgcattcgcacgattccgccggaaacagactaccttacaccctctactcggggcgcggccatctcacgcaatcgggcttctggtgtctttgccgcgcgttgcgcgaggcgggccgacaccaaggcgccgccacggcgaatgacagtttatttgggtgttatctgagtgctttgccggccgagccgagttgcttgcatgcctcagccacgcgggcggacatggattcctcggccttgcggccccaggaacgcggatcgtagaacttcttttcgcccacttcaccgtcgatcttgaggaccttgtcatagttctcgaacacatggtcggcaatcgggcgcgtgaacgagtattgcgtgtcggtgtcgatgttcatcttgatcacgccatggctcacggcttctgcaatctcttccggacgggagcccgaaccgccgtggaacaccaattcgaacggcttgccgttgggaaagtcgactatgccggcggcgctgggcagctcaccctcgaccaccgcgcgcgccacacgggactgaatatcaccgagcagggcgggacgcagcttgaccacgccgggcttgtaggagccgtgcacattaccgaacgtgaaggcggccatgtatcggccacgctcgcccaaaccaaggtgacgggccacttcaaggccatcggccggcgtggaatagaggcgttcgtcgattttggcggaatagccgtcttcctcgccgccgaccgcgccgatctcgatctccagcaccgtgtgcgcggcctgcgacttatcgagcagctcctcggcgatgtccagattttccttgagcgacacggtggagccgtcccacatatgcgactggaacgtgggctcctgaccatgcgccacctgatcggcctcatgtgcgagcagcggtcgcacccattcgtccagatactgcttggcgcagtgatcggtgtgcagggcgatggtgatgttcgggtacttcgcggcgacctcgtgtgcaaaagcggccaaggccagcgatccggtgacacggtcgttgacgccgatgccggaaaggtatgcggctgcgccgacggacacctggatgatgccgtcggattcggcatccgcgaaccccttcagcgcggcgttcagcgtctgcgagctggtcacgttgatggcagggtaagcgtagccgccgcgtcgtgcggcgtctagcatttcggcataacgttccggtgttgcgattgtcatggcttcattatcgctcggggtgtgcccgccagactaggttctggagccaggcgagctgtgaactatctcacgaggaacaccatgatgataatcatggcgaagccgaccaaatcggtcggggtaaagaccgcgccggcgaataggacaccggtgatagtggcggttacgggttcactggtgccgagcatggtggcgcgcattgcaccgcagcgctgggtgccgccgaggaatagccaataggcaccgaatgtgccgaacaccacggtgaataccatcagaccaatgccgaaccagtccaacgcgggggcggtggtccacggacgcacgagcggcagcagcattaggccggaaacgatgaacatgacgccgctggccatgaagttgccccatttggccattaatgcgatgggcagaatcgcaagcagtgacgtgcatacggcatcggtcaggccccacagcagaccgggcagcggcagactgagctggctgagatcgccgcctgtggcgatgagcaccgtgcccacaaaagcgagtaccacaccgatgctttcgcgtttgccgggcagccgtttgcccataatacatacgaatacgagtacaaccagcagattgagcgtctgcagcactgtggccgtgccggaattggtccagtcaatggccttcaagtaggagacctgcaccatgagcacgcagaagaacgcgcacagcaggagtctcgggtaggaacggtagtccttaagcgagttgatgaacttgtcaggcgtgaagattcctgcgcaaaccagaaagatgacaccggccaatagctcgcgcacgcaggcgatccacagcggatcggcgtgatagtcgttcatcaggagtttggagacggtggcgttgacgccccagaagacgcctccggcgagcgccagtccggcaccgacgaagatgtcgtgcggggtgcgttcgagggttggcgttggttggccattggttgcagcggtcttgggttcacacatcgcccatcacgatacgcggacgacgtgaattgttctcatatagcggtcatacggcaggaaaataagctctcaaaagagggaaaaccgttgaaatttcaaggaaaatcgatggagcggacgacgggagtcgaacccgcctctaaagcttgggaagctttcattctaccgatgaactacgtccgcatgtgcgcttccacgcacgagaggcaagtgtatcacctatgcggcaccttgcgccatgtgccggtttgagttctgtgctggactagtgaattgcgcgcgtggaatacgtggatgcggccaccggagtgccgttcatttcattggccatttgcatcaggcgtgcgatgcgctgatcagtcggcggatgcgtggagaacagtttggagaaaccgaccgcggagaacggattggcaatcatcatcgcggagacggactgggtgccggccgttttgcgcatgggcgtggtctgggcaccataggagatcttgttgagcgcggaggccagggcctcggggtcgccggtcagcagactgccgtcttcgtcggcgtcgtattcgcgagtacgggagatggccatctgaatcagtgatgcggcaatcggcgcgagaatcacgctgaggagcacgcc

SEQ ID NO: 1403 - DNA, 8365 bp, Unknown
  R257_15m  MAG No. k141_7802
acctgaccctagaaccggatcagcgccttgatgaccttgcgctggtccatcgcctcgtaggcgtcctggatatggtcgaggtcgtactcggcggtgaacacgcgaccggggttgatttcgcccttgagcaccgcatccagcagaccgtcatcgaggtcatagtggcgcacgggagccgggccgcccttgatgccgatgttgccgtagaacgtgccttcggcgctgatctccacgtcgtgcggcaggcccacacgaccaatcacgccaccgcggcgaatcaggccaatcgccgtgtcgaaggactgcttggagcccacgcattcgagaactgcgtccgcaccatagccaccggtcatctccagtaccttgtcaatagcctcttggccacgctcgggcacgatatcagtcgcaccgaattcgcgggcgagcgccgcgcgatcctcgtgacggctcatggcaataacgcgcgtggcaccgcgcatcttggcggcaatcacaccgcacaggccaactgcgccatcgcccatgaccacggcggcgtcaccgggcttgacctcggcagaaaccgccgcgtgataaccggtggacatcacatcggaaacggtcagcagcgaagcgagcgtcgcgtcatcgtagtcttccggcgaaccgggcaccttgaccacggtgccgtccgcctcgggcacacgcaggtattcggcctgacaagcggagaagtagccgccgtgcgggcacacggattcgaagccggccttacataccgggcacttgccgcagctgtatgggaatggcacgaccacgaaatcgccgggcttgacggattcgaccgccgcgccaacctcttcgaccacaccgatggactcgtgacccacctggctgtgcgcggcctgtccgctcagcccacgaaagaaccacaaatcagagccgcacacgcacgtgcgcaccacgcggatcacgatgtcatcatcctgttcaagcgtcgccttcggcacttcttccacggtcatcttgccaggctccacgaaaatcgcagctttcatggtttcagacatacgttcataactccttgttttccggcatcgagcgcttaagagccgttatcctcgtgttctattaaacaataatcgccttgcattaaccaataagccataaaccatgtttcgccatacccatgaggtatggcaacaaccgagcaattcactgcgataggccaatatccgagatacgctcactgttcgattcgtcgccatgagtaatctggagaaccggcgatgggacccgcctgaacttgtttcgaaccgcacactgctgatagttcctacacacgatttgacattgcatggaatcgttgtgtcttcagcaggattcagcggtttcaggaaaggctactatgggctcgcaatccccatccgcagatgcccggccgggcacgcgcacggccactcccccggcgcgcaagctccccgatatccatcttgatattgtgttggtcgtcttctgcggcggtgccatcggcaccgcgattcgctatgcgttcgcgcagattcccgcagccggcagcttccatcccggcacgtttgtggccaacatgctggcctgcttctgctatgcgggtctgaccgcctatttggccggctcttcccggttcgacacgcgtgccaaggagctcaccagccgtgggctcggcatgggcgtatgcggcggtttgtctacgatgtcgacgttggcattggaaggcttcaccgcgattcgcgacggtcaggtggcggccggcattgcctatctactggtgacgttcgcgctgggtctggtttgtgcgtctgccggcgtgtgggcaggaacgcatctggccggctcctcgaacgcatccgccgaagcgtccgctgatacgaatgccgctacgaccagcaagggaggtaaggcgtgatgaccgtattcctaccaatcttggtctgcctgtgcggcggcgtaggcgcctcctgccgctatctgcttgacgcgaccatcaaaacgtattggcaacgcgcattcccgctgtccacattcaccatcaatctcatcgccggattcctgaccggtctggttgcggcgctggcactgggcgggacacttgatgaaccgtggcggctggtgctggccaccggtttcctcggcggattctccacgttctcgaccgcgatcaacgaaatggtgacgctcttccacaaacgccgctaccccacggcaacggcctatctggtgctgtcgctgggtgtgccggtcgttgctgcggcctgcggttttctcgtctgaccgccacgacgattcccgacgcggtcagcggtatcatcgcgaggtcgaacgtcacaggtacatccgggaggtatatgggcatggcgaacaatggagcggatgtgaagcacaatcagggcgcggacgtcacgaacgcctcggccacgacgaacactgcggaaaataccgtgggcacggcaaccccgaagcaaaatggactcgccgtgttgggcaagtatatgggtgtttccgccacgcagaccattgtggagtatgcgacgttcgccatcctgcacttgatcggcgtgccctcgcagatctccaacggtatcgccgtggtgtgttcggcgacctacaacttcgtgatgaaccgcaacgtgacgttcaaatcgtcaagcaacttcacccgttccgtgatgcttttcgtgctgctgtggatctggaacttcacgttcagcacactgctgatcggctggatgccgggcgcgacggacctgagcccgtatgtggtgaagttcattgcgatggcctgccagttcggctggggttatccgttgtgcaagtacgtgatttttaggtgacacattccaattgctcactgtcgttcgccttcgcctatttgtatttggagcgcttatcagaagaacagcatcgcaacacctgcggcgaagcacatgagcagaatcgatgtcaggaagctggcgagcatcggcttcttgcccttggaagcgatggccttgaagttcacgttgatgccgagcgcggccatggccatgccgagcacgatgtacgcaaagtccacgagctgcggggtgatggaggcgatgagcggcacgaaggtgccgatgatcgaagcgccgatgaagccgagcatgaaccacgggaaggccacagtcttcttgccggtgttctccacctcggagtgcttcttctcccaccagatagcgatgatgatggccgcgaacacgagcatgagcacgcgggaaagcttcatgatggtggcgatgtccaccgcgccgaaagcgtcgccggcggcgaccgcgtgggcgatttcgtgcagggaagcaccggcggtgatgcccagctggtccttggtcatgccggccagcgggccgagcgcgatctccagcaacgcgaacacagtacccataatggctacgatggccacggccatggtcacgtcgttgtccttctcgtcctgcttgtcctcaggcaccttgatggaaccggctaggcccatgacggcggccgcaccgcagatgccggtgccaccggcagtcaggatggcgagcatcgggtcgacaccgagcttgcgggcgatggcatagcacacgatgatggtcagcgtgacgaccacagctgcgatcggcagacacttgatgccctgcgtgaacagcacggcgaggttgagcttgaaaccgagcaggatgatgccgaggcgcagcagcttgttggaaatcaggccagcggcgtccttgacgcctgccttgcggccatcattggaaccgacgtaggcactgcggatcgggaactggatgatcataccgatgagcagcgcgatgataagcgcgccgaacaggctgaatccggggaactgcttgagccaggaggcgaacagcgaggccagcagagtcagaacgccaatgaacaacatgtcaacggtggtaatgcgcttccaccattttgtacagaactctctcacggtgtctattgaagctcaagcatttacatcggtcaaatcattgcaaccaatacatatcatcgattttgtcgatacctaattgatctccctctgatgagggaggtggccgccgcaggcggacggagagagagaaacaacgttcgcgacctcccctcagtcgactatctgactacccgcgcagcgcagcaataatcatctccgccaactcccgctgatcgtgcgtcagaccggatctcggcaccagcgcatagaaccgccgcacaaactcatcgccaagctcccgctgcaccggcacgcccgccggcacggcggcttccgaaatcaacgactgcccgaacccggcggacagcgccgccacaatcgccgcattactggacacttccatcgtgcgtgcaggcacaacctgagcggtcttgaaatacaaatccgtgtaataccgcacgccggaaccgtgctcgcgcaccatccacacgccgtcgggctcccccgccaacaccagccggtcctcgcacagggtgacgcggtccaccgaatcgttcacgatcggcttttccaccacgccgagctgcacggccttcatgctgacccgttcgagaatcgcatccgagttcatcacgtgtacggcgaagtcgaaactgtccatgttccgagccatcaccggcaacgccttcggcagcagaatcgccgcggtcgtgtgcgagaacgaaacggccagcggctcacgcgcctcctgcacgcgggcgatctgctcacgcgtatcccgccataatccgtcgatgccgatggcggcctggtacagcatccgcccggcctgtgtgggcgtcacgtcgcttttcgcattgcgcacgaacagcggcgcgccgaccatctgctccaattgggcgatacgcgacgacaccgtcgactgcgacaccttcagttcgtcggcagccagcgtgaactggcccacctcgtatacggcgaccagggtttcgagcaaagggaacatggtttaactgtacgctgtatgatgcacgaatatttcaattagcttgggcgtagccctaggccacggacctggaccaccctcagtctcgctttgcgagccagctcccgccagcgggaccccaatggttttcatatcactatgcttcgcgcagttttgcgagctgtgttttggtcttgtggagcttggcatagatttcattgcgctgaacaggattcttgacgcgctgatggtcgcgggtgagcttgtccacttcggattcgagccgagcaatttcagtatggcgaatgatgcgcgcatccagattttcgatctccggcgtgcccagaatggtctgtgagcacagcgaggcccacagctcatcaatagtagagccggccagctccagctgggcctcccccgccggctgccaatcgccggcatatacccgatagatcggcgtgtggccggcacgccccggtatcgcccgacgcacggcgaacgcacattcctcacgtgtgctgccctcgaacggcacgtcgcgtacgcacacgaacacgatgcccgatttacgctgcccggcaatcaaatcgatgacctcgttcggtatgccagtggctttggccgtaagcttcagtccgatgaccagcacttccggaaccagtttgccgtccgcaagcccagtgttaatcgaccggaccaacgccagcatggtaatggattcgatttcgttcaccaatcgctgcttgagtttgcctgaaatcggtgccttgcccacgaacaaggctttcggcagtgtgcctttggcttcgggaatcgccgtggagacgggcagtcccagtgaaagcgcggatacggaaccacagtgtgcggcttgcgaaccagtcatcatcgaccttctttcccggcctgccatcagtgtcataccctcgcagtgcagcagtccgtttatctattggaaagcaacactagcgcatccaggccggaagtcgtggtacatatccatatcctgctgcggttataggaaatcccctccgagtttcctcgaaggggatttcttaagtcgctagttcaagcgaagattcttgtctgatgataatcaggcgaggatcttggtcacacgaccggagccaacggtgtggccgccttcacgcacagcgaaggtcaggccctcctccatggcgatgggctgaatccgctcaacggtgaaggtggcgtggtcgccgggctgaaccatctcgacgccttccggcagctcgatgacgccggtgacgtcggtggtgcggaagtagaactgcggacggtagttggagaagaacggcgagtgacggccgccttcgtccttggtcagcacgtagacttcgccctcgaacttggtgtgcggggtgacggagcccggcttggccacgacctggccacgctcgacatcctcacggccgaggccacgcagcagcagaccggtgttgtcgccagcctcgcaggcgtccatggtcttgtggaaggtctcgatggaggtgacggtggtctgctgggtcggacggataccaacgatctcgaccggggtgttgacggccagctggccacgctcgacacgaccggtgacgacggtaccacggccggagatggtgaagacgtcctcgatcggcatcaggaacggcttgtccaggtcgtgaaccggggtcgggatgtagtcatcgacggcggccatgaggtccttgacggactggacccacttctcgtggtccggagcgtcatcgtgcagtgcgccgtaagcggacacgtggatgaccgggcaatcgcgatcgaagccgttttcgtcgaggaggtcacggacctcttcttcgacgagctcgatgagctcttcatcgtcgaccatgtcgcacttggtgagggcgacgaggatcttcgggacgccgacctgacgggcgagcagcacgtgctcgcgggtctgggccatcgggccgtcggtggcggccacaacgaggatggcgccatccatctgggcggcaccggtgatcatgttcttcacgaagtcggcgtggcccgggcagtcgacgtgagcgtagtgacgcttctcggtctggtactcgatgtgggcgatgttgatggtgataccgcgggcggcctcttccggagcagaatcgatctggttgaagtcgtactccgggttgacatccgggaactcctcgtgcagcaccttggagatggcggcagtcagggtagtcttaccgtggtcgacgtggccgctggtcccgatgttaacgtgcggcttagtacgctcgtacttttcctttgccattacttttgtcctcctggacgtctcgtgagtgtcctgcgccctttcgcacagggactcgcttattctactgggtttctgggttatgtgccactttgaagagccagaacccagtcagcggtacagaatgttaccgctgactggcgacactggctacttcatcgtgaggcgcgtgtcactcgccgcgctgagccttgatgatctcctcggagacgctcttcggcacctcgtcgtaggagtccatctccatggtgaacatggcgcggccctgggtcttggaacgcaggtcgccgatgtagccgaacatctcggacagcgggaccttggcgtcgatgaccttgacgccgacaccgtcggtcatggactggatgttgccacggcgctggttcagatcgccgatgacttcgcccatgtactcttccggcgtacggacttcgaccttcatgatcggttcgagaatgaccggcttggccttcggggcggcttccttgaagcacatggaacctgcgagcttgaaggccatttcggaggaatcgaccgggtgcatctggccgtcggtgacggtggccttgacgcccacgaccgggaagccggcgagaacaccggactccatggcctccttgacaccggcctcgatggggccgatgaattcggcggagatgtggccgccggtgaccttgttctcgaactcgaaggtcttgccctcggtggtgtcgagcggctcgaagttcatcaggacctttgcgaactggccggaaccaccggtctgcttcttgtgggtgtagccctggtccatgacggccttgcggatggtctcgcggtaggcgacctgcggcttgccctggttgcactcgaccttgaattcacgacgcatacggtcgacgatgatgtcgagctggagctcgcccatgccggcgatcagggtctggccggactcttcgtcggtcgtgacctggaaggtcggatcctcttcggccagcttggacagggcgatgcccatcttctcctggtcggccttggtcttcggctcgacggccacctggatcacaggatccgggaaggtcatggagtcgagggtgatcggatcgtcgatggcgcacagggtgtcaccggtggtgacgttcttgaggcc

SEQ ID NO: 1404 - DNA, 7016 bp, Unknown
  R257_15m  MAG No. k141_8576
cgccgcgggactctggagctgttgggaaaagggccgggcgcagacccggaaaacctgaccagccgggagaaggccatcctcgtcaagcagaccagtgagaggctgggcgtgaccgccaaaagcctgttcgacgcggtcggcattccgcatagcacctaccatcaccagcccgacgccatgaacgggcccgacagggacgcgtggctgctgcccttggtcgaggaggcgttcgagaacagcgagaagcgctacgggtacaagcgcgtgcacctggaactgaagggcatggggataacggtgtcggccaaacgcgtcatgaaactcatgaccaagcatggcatggtgccgttgcacaagagcgcgaagcggtacagctcgtacaagggcgagctgaccaaggcgccagccaacctcgtgaaccgcgacttccacgccgacaggccgaacatgctgtgggtcacggatttgacggagttctccatcccggcgggcaaggcgtacctgtctcccatcatcgactgctacgacgggcttccggtcgcctggacgatcggcacgagccccaacgccgagctggccaacggctgtttatgttcaatggttttaaggccggttgagcgtttggtttttagtccgaaagagcggtaggaattagtccatttcatcgttgatggaaaacaagtgacaccggtctgtcgttatcgattagtttcccgagttgaaaaaacaaccattgacggttctcgggaaaggaaaggaatgaccatgccggtgtcggttcaacaacgtatcaggctccttgaccagcagggaacgccatggcgagccatcgcccgtgatttgaacgtgtccagggacacggtcaggagatacgccttgatggaggattgctcgcccagacccagaccatcgaccacgcggccgaggagactcgacgggttcacgcccgtgatcgacgagtggttgcaagcggaccggttcatgccccgccagcagcgccataccgccaaacgcgtgtacgacagactcgtcacggagaaagggttcaccggctcgtattccgcggtgcagcgttacgtgaagcaatggcgtcaagaacatcgtcccgcctgtgacgggttcatggagctggaatggcggcccggggtcatgcaggtcgatttcggcgaggccgtggtggtgctggcgggcgtgaagaccaaggcgcattgcctggtggcgtcgtttccgtattcgaacaagcgttacgtggtcgcgttgcctggcgaggacgcgcaatgcgtgtgcgagggattggtcgagatcttcgagcatatcggcctggttccgatggtgttggtgatggataacgccacaggggccgcgcaccggaccgcttgggacaagatcacgatcgtcgggctcttccagttgttcctggagcattaccggatcgaggccaggttctgcaatcccaggagcggttgggagaaaggcagcgtggagaacgcggtcgggttcctgcgccgcaacctcatggtcccgttgttgaacgtcgagtcctatgcgcagtcaagcaagcatctgctgtcgcggtgtgacgaactcggcaacgacaagcattaccgggctgatgaaagcgtgaacgacttgttcgaagaggaccgggcgggcatgcggccattgccgcgcgtgcgcttcgacgcggtcgattggcaggaacggcgcgccgacaaggaaggtgtcatacaggtcggttcgtatcgttacctcgcgggcccggcctggcgtagctggccgctattggtgggattgcgcgcgttcgacgtggagatccgtacccgcgacggccgcaaggtggcctcgctgcccagggcttatggcgagcaggccggtacggtgcgtagcccgtcgtcgctgctgccggcattggcgcgcaagccacgcgcgtggggcgaatcacccgtgcgcggtgattttcccgagggcctgagaaccctgatcgacgcgcagggctccgcccggcacaaggccacgttccgcttgttggagcgcgtgggtgccgcttgcggtttcgacgcggcctgcaaagccgcggaacacatcatcggccagggcagaccgatcgacgaggcagccctgagcatcatggccagacggatagcgtccggcgaggcgccggccgatgttcccgcgcccgacctgagcgtgtacgacgacttcatgagaacaggcgatggcgatacgctcaaggagcgggaaggagggaaggaccgatgagccggatccagaaccccgcgccggacgccacccgacgccgcgcgtccacgaacaggaaaatggaaacgatcatgcgattggcgcgccgactgccgttgaccaggcaagtgctcgccgaccagctcgaaaccgcgaccccgtcgcaaatggagttcatggaccaatggatgaacgcggagatcgagtccagggaacgatcgaaacgatcccggctgctcaagcaggccggtttcccggccgtcaagacattggacggctatgactgggagaacattcgtcttccggtggattggggcaggcggtcgcttgaatcattggagttcgcgagccgtccggaggatgcggtcatgttcgggcctcccggcacgggcaaaacccatctggcgatggcgttgggaaggaaggcctgcctggaaggcatgacggtacggttcttcaccgccgctggcctggtcatgcgcttgttgcgcgccggcacggaaggcaaactcgacagggagatcgcgtccatcggcaaggcccgcctgttgatcatcgacgagttgggctacgtgccgatcgacgaggaaggcagccggttgttgttccaggtcatcaccaacacgtacgagatgcaatccatcgtttacaccacgaacatcgagtccggcgggtggggccgggtgttcggggatccgaacatggccgcggcgatcatcgaccggaccgtgcatcacggcaggatgctcaggttcgagggcgagtcctatcgcaggactcatgctcttatgcaatgaaacaataaaacacgagcaatgacaggccagttccgaactggactaaaacccaccgctttttcggaaggaaaactcacgccacactggcctataacaacttgacaaaacacaaacggcatgctttcggacgcgtgctccacgctcaaggacggcgaggacgagaaaccggccatccacagcgaccgcggctgccactaccggtggcccgaatggatccgcatctgcaaggacaacaacctgacgcgttcgatgagcgcgaaaggctgttctccggacaacgcggccgcggaggggttcttcggacgtctcaagcaggagttcttccacaagagaagcttcgcgggtgtttcgatggacgggttcatcgacatgctcgacgactacatggtctggtaccgggacaagcggatcaagaccgagtacggcatgagcatcatggaccggcggcgcaagctcggcctcgtggcataatcagaaggcaggaacaaagaagtccaacaaaacggcaccacccccatatgtccaccttgagttgacgaaatacaaacgcttggcaatttataggacctcgaaaatcaggccattaaaaacaagagtggagatatgattgattgcaaccatactaagaagggaactcaatgtcaccgacgattcatattcatctgaaaaattgccacggcatcagggagatgacgcaggattttaaattcagtagcgcctcagatggcagttctcccactgcaaatattatttatgcgccaaacgggacaatgaagacttcgtttgctgaaacctttaatgatttgcagcatggatttgattccaaggacgagattttccccgatcgcgttaccacacgaaatatcactaccgataacggaagtaatctttctccgtcggaagtggtggtggtccagtcctatgatgaggagtataaagctgatcaagcggtatctacgctactgatcaacaagaaacttcggcaggaatatgagcgcattgagcaaaggctcgacaaagctatcgactctttgattcaagccttgcagtcccaggctcagtgcggcacaaaaatcaacatcgcagactgtctttcgaaatgcttcactggggcttcaggaaatttccagaaagctctttccgatcttcaaaaggagattgacgccatggaagactctccactcgatggcatcccttacccactcttattttccgataaagtgcgtaccttgttcaaggatgttagtttcaggaaccttctcaaggaatatattgaagagctcaacgggcttctcgacgaatcaacgttcttccaacgcgatgcattcaactactacaatgccgaaaacacagtaaaggccctcaaacaaggtcatttctttgaagttaaacatcaactacttttgcatggcaaagacacggatggcgaagacaaggacttgaccatcgattccgcggaccaactggaggacataatcaacgaagaaaagaagaaacttttcaacgaccagaaattaaaaagaaagtttcagaatatcgaaaaagcgctagaaaagaacattgatactcgagagttcagccgatatatctcgaatcacacggaattgttggcacaattggagcattatgaacagttcgagcaatcggtctggaaatcgtatctctatgccaatagacagcaatatgatgctgtgatttccgccatgcaggcaacttccgcaaagaagcaggaaatacaaagcagggcagccaaagaacacacccaatgggagaacgtcattgcgcaatttaatcagcggtttttcgttcccttcgagttgaaggtcaaaaaccgagaagccatggtcttaggccaggaagagctgccggaattgggatttgattttaaagaaggtgccaataatagcgtcactaaaaaggaagtcaacaaggaaactctacttcgcgcactgagcaatggagaaaagcgcgcattttatatccttaacatcctgttcgaggtcgaggcgcgtaaacaagacggtcagaagactttgttcattgttgatgatattgccgaaacttttgattataggaacaaatatgcaatcgtccaatatcttaaagagatggtggactacaggaattttcagcttattatcttaactcataatttcgatttcttccgaactctggtcaataaaggcgtcggctcgtatgaccatagtttctacgctcggaagactgacgcaggagtggttctgtcccgggcaaaaaatatcaaaggaccattctctagcaatttcaaaaagcaacttaatgataacgaactcgttcgtattgcgtcgatacctatcatgcgaaatcttattgaatatacgcaaggccccaaggctgacgattacaaactgctgacttccctcttgcatatgaaaagtgacacaggtgatatagtacaacaacaattagataagatttacgcaaacctatctgtcgcatcggattcagggcccattaagtacaaacaacccgaacaaacagtcttaaattcgatatttgagaccgcaaacaagattctcgatagcaccagtgacagcaccctgtcattagatgataaagttgctctttctattgccatacgtctaagaagcgagcaatatatgattgccgctattgatgattccgattttgtggacaatatcagcagtaaccagacttctcaattatatcgtgagttcatcaaacgtaatcttggagatgatcgcattcgtgatctactcaatagggctcagatgctgacccccgacatcattcacgtcaatgctttcatgtatgagccgattatcgatatgtccgatatccacctgcgtaaagtctatcgtcagctctgcgacctttccaataaatcggattctcgttgataatggttatgccggtttcttatcggtgtcatcgtggtatatgacggccggggcggcgacctccgatttgactgacgccatcgatttcggtgtctgtccttatttgatttgtcccgccgtggccgtcaatccgtggaccatggccaaacccatcatcccactggagacaagaacgaaggcgatcgaactggtgctggacggcatgcagcagaagcaggccgcccgacagctcggcgtgagcatcggagcggtccacaactgagtcaaggcgtaccgcgaaggaggcatggctgcgctgcaacccaggaacaggaatgccggccagggcaacaagcccgcgccgcgacgaagccggaatgcccgggacggcaacgacgacacggaggcgctgcgccgcagggtcgaggagctggagctggagaacgcgttgatgcgggaggtggtggaggtcgtaaaaagacccaggtgtatgttgatcaaataaaggtgttcagcgggaactggtgacgttttgctggactcgtcattgattccataaccgccaatcatgccacgagaccaagctcgcgttaacgatacgtgatgcgttaacgatacgggtagtgcccgcttctttgcgcagattggctgttggccagctgttggcgtgactttcatgccgctgcgcctaggctgtcatcgagccgggacatgtccatgtatcgccggtccgaccacgagcgtgaggtgacgtagcggattccggcgcatacgagcatgagcgcgctgttggagtcggggaagccgcccacgacccgggtgcaccggcggatctccttgttcaatcgctcgatcatgttgttcgtgcgcagcttgatcctatggttcgcggggacctccggcaggaggtaggtggtggtctcgccgacgccctcgcgcaggcagttcgcggccgccttgagcttgcgttcccccctttcgcccgcgaccgtccctgccttggccatggcggattcgcggttttcctgcgcgaagatggccttcagggcggcggacgcccattccctgtgactgggcggcgtcttcgagagcacgttgcgca

SEQ ID NO: 1405 - DNA, 53827 bp, Unknown
  R257_15m  MAG No. k141_8931
ataacacaatcgaaacatgcacgcaacgaattcatcgtcgcgtgtcgcattgatatttgcccaacgggatcgctctccctcttctcatacaataatgggccgcgcccaaccgtatggcagagccggtctgttccggttccgttacggttgggcgcgacccaaaatatcgagcctagacccaatatcccttatcggcgaatacgcagcgtggcgagctggaatggcgccaacgaaacgaccgcaccgtcggcgggcattggttcgtcaccggcgagcgcgcgcggcagttcggcatccagctccggctcctccatgagattcacctcccgcacgccggccttggcatcggagagagcggcgtcaaggcgcagtgtggccgtggcattgccgccggcggcctcgtacaggcgcacgatcagatcgctggaaccgtcatcggcgagcttgatccagtccaatacgatgacgccggtggcgtcggcgagcgagaccagcggcgccatatcaggcaactcccctattacggggctgttgagtcgcgccgcttcgtccagcaccgcattcatatcggcgtcagcgaccagagaccacgcgaaggagtgtgcgccttggtcggtgcgtgggtcggggtacagcggtgcggacagcagcgagagccgcaccatggtgccgcggccggtgccatgtgccgcatcggcgtggatggggctgacgtcggagccgtaggtggaggcgttgaccacagcggcggcatagtcggcgtcggtgatacgcacgaagcggtgcgtgcagctttcgaatttggcatcatcgctgcgcgtgttcttgttgatggggcgttcgaccagaccgtattggcattcgtattgcgcgttcaccgcttgcacggtgaccggcatatccactttgaggaactgttcgacggcatgccagtccacatcggcggtgaagtccagtgtggcggagcccggccttaaggcaatgcccgtacgaatttcaacgcccttcgcgcgagtgacagcatgcacgacggccccaccgttggcggtttcgtccacgcttgcaatcgatgcctcgctgagcgcgttggcggtgaggaacgcatcgcgttgaatatcccaggcgtcccagtggaagggttcgtctttgagcatttcgtagcggcccagtcgggtgccggcgggcaccagttcacgattggttcgctgatcgacgattgacgaaacggtgccgtcggcttcaatgcgcacgtgcagtcggccgttgtcgagcacaatcgtatcgccgtcatgggtaacggcgacccgagccatggatgcggttcccgcttcggctcggctcgaagccgggcgtaccacccacgtctcacaggcttggcgggaatatggggcgattacggcgtcggttatggttgcgtcatcgggttccacggctgcgatcgcgcgcccggcttcaagggcgatctcgttcagccgagcgatgtcacgcgcgtattcggtccgcgcctgacggtgcacccatgcgatggcggaaccgggcagaatgtcgtggaactggttcaggagcagcgttttccaaatacggtccagctcttcgcgcggatagacatagtccgggttcttgatgcgggccgcggcgcacaggtattcggtgacgcgcagcatcgactcctcctggcggcagccgcgcttcatgtcctgctgggcggtgagggtggcacggtgcagttcaaggtacagttcgcccttgaacaccggggtctccccttgcgcatcgtcgacgatatccttacgcacacggtcgaacagttggtcgggagtaccgaattcgatcttcggcgcgccggcgagatcatggtcgcggcggatgcgcgcggtcatctcacgggtggggccgccaccgccatcgccgaagccgtacagcagaatcgcgttacgggagaggtccttgtccaggaagttgcgctgcgaatacatcagctcgtgcatgctcatccacgagcagtaggtatccgagggcgggaagtgcgtgagaatacgcgtgccatcgatgccctcccacatgaacgagtggtgcgggaacttggtggtgtcgttccacgagatcttctgcgtgaggaaccagtcgaatcctgcacggcgggcgatctgcggccaagagccggtgtagccgaaactgtccggtagccagacgccgcgcggcgcgacgccgagatgctccttgaaatatcggcggccgaacgtgatctgccgcaccaatgattcgccggaaggaatcatgttgtcggattccacccacatgccgccgaccgggatgaagcggccctcttcgatgcgccgcttcattcgtgcgaacaggtcgggatgctcctcttccagccatgcgtactgttgggcggaactcatcgcatacgtgaagtccgggtcttcgtccatcaaagccagcacgttggatacggtacgggccaccttgcggcgggtctcgcgcaccggccacagccatgcggagtcgatatgcgcgtggccgatggcgatgtgtttgattgcgctggaggcggccggttcggcgagtacgccggcgagcgccgcacgggctgccgacacggtttccaagtcgcgttcatcgtagatgttcagggagcgttgcagtgctttggcgagctgccagtagcgtgggtcgtcgtccttgagctcacgaatcagcgaggagacggtttccagatccatgtagtaggcgaacacgtcttcgttgaagatggtgacgtccatacgactcagtgtgtatgggaagtcacaggtgccggtggcctcttcgccgagttcggtgggcgagaacggggtggggccttcgacgaatgggttggcggcggcttcgatatagacggtgaagtcgccatgttcatcgagttctacggtgctgctgccgtccgcgtagacgagtggaatccagtggttgcgtgggttcgcggatttgatggcggtgccgtcggcacgatagacaagtccctcggattggaatccggggccgcggtgatcgagccagccgaggtctaccatgagttcgacttttcgtcctttgaccgccgccatgtcgatatggccgttcacctcgaaccatgtggtgccccatgtggtgccccagacgccgggaacgcggaaaggttcgaagggcacttggccgttgcgcactttggctagaaattcactggagggcaccggttcgccgggattgtggaacgaacgcaaggtgcatgcggcgagtgtggtgtggatatgcggtttgacacgctgctgcatgacgcggtcgcagcgctccaactgctgattgggcagaagaaacatggagagttcaactcctttgctgtgtctggtggtaggggtgggagtgatggtaattggagaaaccgtaatacgacatacttctgtcccctcatggtacaaggaggcagaagcgtcaggcgagaattcagcgcgtgacgcgcagggtggcgagctggaacgggccgaagtgcagtgtggcgccttcggcgttctgtgtgccgtcttgcagcgcgaccggcaggtcggcggccaaatcgtcgccttccaacacgttggtctcatgcaccgaagcgcctgcgagcgccgggcagacgtgcagcgtggcatcggccctgccgccggccgcctcataggcgcgcacaatcaggtctccggagccatcgtcggccagctttatccagtccaacaccacggtgccgtttgctgactcgatcgaggcgagcggcgccaagtcgggcatgtcatgaagcgtcggtgcgttgagtgcgcaagcggcgtcaagcgcacggcccaccgtggcgttggccaccacggaccagtcgaactcatgcgcaccgatatcggtgcgcgggtcggggaaggtcggcgcggagagcagcgacagtcggaacatggtgcccgagtcacgaccctcggcggcgttcccggagatcggcgtggcatcggacccgtacaccgatccgttgatgacggccgccgcgtaaccggcgtcgccgataagggcgaagcggttcgtgctgctctcatacttggcttcgtcggatgcggtgtttttgacgatcgggcggcggaccagaccatactggcagtcgtatgttgcttggtcggccacgatacccagcggcagatcgactttgaggaagcgttcacgttcgtgccagtcaatgtcggcgtggaaatcgagcgtgtgtgaaccggggcgcagcgtgatggtggtggtgatgacggtgtcatcgtcggcggtacgcacacggactcgtgccgcaccgttttcggtatcgaccgattcgattgatccggtcatggcattcgccatgagcagggattcgcgttcgatctcccaggcatcccaaacggcgggttcgtccctcaacagttcgtattggcccaatcgggtgccggccggaaccagttcacggccatgctcctcgtcaaacagtgacgagattgtaccgtcggcctcgatggtgacggacagtacgccgttggccagcagtacacggccgttgtccaatgtctgggtcagtacggaaagcgcgtcggtcggttcgttgatgcggttggcatgccaagacgcgccgtcattgcggaactggctgatgcgggcctcggcgagcaagtcggcctgcgggttggccttgcgcagcacggcgcacatgtcttgggcgatttcagcgagacgcttcaggtcgcggcgatagtcctcgcgggcttcgcggtgcacccatgcgatggccgagccgggcaggatgtcgtggaactggttgagcatcagggtcttccagatacggtccagctcttcgcgcggataggcgtagttcgggtcggccaacgtggcggccgcgcccaggtattcgaccgtgcgcagcagcgattcctcttggcggcagccgcgtttcatgtcctgttgcgaggtcaaggtgccgcgatgcagttcgaggtacagctcgcccttccagacgggcatttcctctccggcgttcttttcgatctgtcggtgggctttgtcgaagaaatcgttcgggctctcaatagttaccttggagacgccttcgaggttctcgtagcggtgcaggtgctccatcatgttgcgcgtggggccgccaccgccatcaccgaaaccgaagagcagaagcgagcggtcggagagatccttgtcctggaagttcttctcggcgtagtcgagttcctggaccttgcaccaagcagcataagtatccgccggcgggaagtgggtgaagatgcgcgagccgtcgatgccttcccacatgaacgagtggtgcgggaacttggtggtatcgttccacgagatcttctgcgtgaggaaccattcgtacccggcacggcgggcgatctgtggccatgcgccggtgtagccgaagctgtccggcagccatacgcccttgggctccacaccgagatgttccttgaagtatttgcggccatatgcaatctggcggatcagtgactcaccggcgggcaacatgccatcggcttccacccacatgccgccgaccgggatgaaccggccttcttcaatgcgccgcttcatgcgcttgaagatgtccggatgatcctcttccagccaggcgtactgctgggcggagctcatcgcgtatttgaagtcggggtcggcgtccatcagcgccaatgcgttggatacggtgcgggccaccttgcggcgggtctcgcgcaccggccacagccatgcggagtcgatatgcgcgtggccgatggcgctgacgttcatggccgaggcattggccggcttggccagtacgccggcgagtgctgcgcgcgcagcttccacggattcggggttgcgctcgtcgtaggcgttcagcgaacgctgcaatgctttggcgagttgccagtagcgcggcgactgtttgtcggcgaattccatcagggagctcaccacgtcgagatcgacggagtagttctcgtagcgttcatcgaattcggccagatcggcggacttgaatacgtacggctcgtccggcttgccggtggcatggtcgcccagttcggtctcaatgaacggaggcacgccgagcagcagcgggttgctggcggcttcgaggtacagggtgaagctgccgtcttcggcgaccggcacttgcgcgttgccctcagcatccatgaacggcacccaatagttgagcgggtgtacggctttgatggcggtgccgtcggcacggtagacgaggccctcgatatggccgccgcaggagtgcgggtaccagccgaggtcgaggatgagctccagcggcttgcctttcgggtagccggccggcacggtaccggtcaggcggaaccagactgtgccccatgtggtgccccattcaccgccgagcgtaaacggcttgaagtcgatgtcacctcgattgagcttctcgaagaactcgtcagtgggcatcggctctccgggaatgtcaaaggactccaccgcaagctgtgcgatcgatgggtggatatgagggtccacgcgctggcgcactatgcgcttgcaccgctccagttgctgttcaggtttcaggaacatctgctgttcactccccttatctctgccgcttgtgcggccacatcattgtgctgcccgttcatgggaaacatatcgacatgcgccctcgcccgcagaagactaaagcgctttagtaacatattggagggaacgggatatgatgtcaaattactatcgcaattcagcgtgttccgtcaggcatgtcatgctcggtgtcgatgacgatggtcaccggcccgtcattgaccagtccgacccgcatatgcgcaccgaaacgaccttccttcaccggcactcccccggagcgcaacgcctcgtcgaacttgatccacatgaaatcggcatgctcgggcttgccggccttgatgaagctcgggcgattgcccttgtgcacgtcggcgaacagcgtgaactgcgagatggagagaatctcgccgccgatgtcctggatcgaacggttcatcttgccctgcgcatcctcgaacaccctgagattcagaatcttatgggccagccaggcgatctgcttgtcgccgtcctcatcggtgacgcccaccagaaccatgaatcccgggccaatctgctgcggctcgaacgtgggatccagcgtgcccaattcattgaccacgtccacggacgcttcggacactcgttgcaatacgactttcatggttccctacagtacaacgtgtgcagtcatcaccaccgaaccatgccaatactgcggcagccagcaggtcgaggcaccatggacgctctgccaaggttgaccgcaggccgcgcacccgcaggataatcggcgtctgccccgaatgcagacgcgaagtgatggccgcgaagggcgaggcgctgcgcctgtgcaggtgcggcaatcccatcaacgtgcaggagctgcgcgagcagagccgcgacaaggccgaggcaatacacctgaccaagacaccggcaggcatgagccaatggctcaagggaaactacgggtacgaggtcagccgcaagcggatcagcaactggctcaaccggggcaaactccccagctcgagacccgtcgatgacggctactgggagttcaacatacgggagattcttgcgttggctatgggctccagcggccattcggcttgacatgatgtagtctgtaggatacagtagaggtatggaaatcaagcaatccgccgaataccgcaagtggttcaagaaactcagggaccacaaagcgaaggccgccatccaagcccggctcgatgtctgcaagctcgcaggcaggccattcggcgacatcaaacccgtgggaggcccggtcagcgagatgcggttccacaccggggccggataccgcgtctacttcgccatgcagggcaacgtgctcatgctgctgctcgcaggcggcgacaaaagcacccagcagaccgacatcagacaagcccacgacatcctcaacgactacaaggaacaacgacaatgagcaccgaattcaccgactacgacaccagcgaatacctcgaaaacgaacaggacatcatcgcctacctcaacgccatagccgaatacgacgaccccgcactcatgcaggccgcgctcggcaacgtcgccaaggcccggggcatgacccagatcgccaaggacgcgggcgtggggcgcgaaagcctctacaagagcctcagcaaggacggcaaccccagcttccagaccatcgccaaggtaatccacgccctcggcggacgcctcaccatccaagccgcctgaaaaaacaaaacacaagcgggagtagggtgaatccaccccgtggcatactccgtatcaggattagtgtgaaagcctctgaatcaaccggttcaggggctttactcatatccacccaatggtcatgtgccatggcaatcaaccggcatgaccgcctatgcgcgtagctcagctggtagagcggcggtctccaaaaccgcaggtcgtcggatcgaagccaaccgcgcaatccccagccgcgtctacgacatcctcaaatggttgggcctcatcgtcctgcccgcactcgccctgttcgtcagtacggtcggccccgcatggggctggactcacgtggacgcgatagtgaccacgctcaacgcgctcggcatcctcgccggcgcgctcatcggcgtcagcgccatcaaacagcgcctcgacctcgccgcatgaccaccacgcacagttcggccccgtccggcatcgcagacgactcaacccgagtcggcctacttgccggtcggggccgttctcgcgttgtggcagagggcttcgcgggctcgatttttgcccacattttgcccacattatcccgtgaaaccgagagaatacgagggaatcggcgggaataagaaaagccgctcagccctactcccgcaaggccaagcggcttgtttccgccgaaacggattggtggaggcgcggggaattgaaccccggtccgatgaccgagcccacagtcttctacgtgcgtagtctgctggccaagttggcgatttttctgcccccatcgatgtcgcagacaactgatggcgagcatatccgcagttaaagtcccgatgcagccctgaggctcaactgcatcagcaagtcttctaaacgacgctcagcatcctcccaaagacgaggaggagtgaacggagcggctgctcactggttaatcctgactaaaaatcaggcagcgagagcgaactcagtgcggttagatttagcacttattcttttgccggggtcatccacgagcggacccggcgttcgcggcacgcttccctgcagcgaacaggtcaccgtcgaaaccgatcgcccccaatcttgagttatcaagcttccggcttttcggccggacttttcagcatacaccctatggcgctactcgcgcaaatcgccggcagcgaacgtcgtcccggcattgacgggaccaacgttgtcagcagggccaacggagcgaacgccgccccggaaccaacggaaccaacggaaccaactgaatcgccgtcacttgatgatgggcttctgggatgcggaaacatcaatctgatgtttgccggcaaagccagccgtgccagcggtgatgttcttgtcgatttcctcgacttccgccagcttcagcttcagttgcgaggagtctccccaaatgattacgcggtcaccgtcgttaagcgtggtggtcaccgaatcctgcgtctcagcggtgaccttggtaatggacttacgcatcgattccggcaatgcgcccagaatcgccagcgcctccttcaccgaacggttcttgagactggcgtctatatccttgacctcgatcaccgggatgccatccacgttggcgttcttcaccgagttcaacacacgcgcctgggaatccaccgcggtcagggtatcgcctcttttcagcatggccgcaggccgttgcgccttgacttccacgctcatcgacttggggaactgtttggagaccttggcctcgctgacgccgggaatggacttgagttgctctgtgacctcatgggtggagaccaggaacaacgactttccagcctgcttatcggcgatggcatggatggtctgcgcgctcacccattcgttggcaccggatacgccgatctcgctggtttccagacgaaacaccgacgagaagagcagcagccacgttagccccgtcactacagccacgctgacgacagcaatcaacacgcgtaacgcgacgacacgtacgttcgcacgcttgcgttctttggcgcgttcggtgaaattcaccactttcgggcgtgatacgactcctagggagccggtggtctggtgcagcgtttcggcaacgtaatcctcgctgtgcagccgtcgtgcatcgacgaaggcaccggcctggcccttggctaccgtcacatcgtcgatgatctccggctcgttgatctcatgcccggaagacacggaccggggagcgcgagacttcgacgagtgacccgtgtttccgcgtgaaccgatggtgcgcggcttgcggggacttccggacgaacgacgtgagccgttgtcattgcccccggatctgaccgtgcgcccggacatcactcgcagctttcccgatgggcctcaagtgcggtgagcagcacctgatccatgtcggtgatgtcgcccgcgcccacggtgaagatcacgtcgccgtggtgggcgcgcatggccatcatcttggcggccaggcacatatcctcgaccggctgaatccacgtgcctgcggaagcgtccttgagtcccgcagccgcgtccacgatggtggaggggctgatgtccgggaaatcggcctgcttttcacgggccgggaagatgccggtgataatgacgtcatcggctttggccaaggattcggcgaactggtgcgcgaagaacttggtgcgggagaacaggtgtggctggaagatcacacgaatggtcgaatcggggtaccggcgtcgggccgcatccagcagggccgcgatttcggtgggatggtgggcgtaatcgtccactacagtgacctgcttgaccgtgccgcgcacctggaagcggcgtgccgcaccgaggaatgtgccggccgccttggccgcgtctgcggggctcacgcccagcagcacggcagcgctgatggcggcggccgcattgcgcgcattgtgcacgccaggaaccttcagggcaacgctctgagacaccggctcccccgccgtcaccgcggccggcagatgcagggtgagctgttcgacgccgctgcctgcggtctcgctttccgaagcgatccagacatacgcggcaccgcccaaatcgggcagggattcacgcgcggtagtgccgtaggcaacggtatgggatttcacgtcggcgggcatggcctccagcacggcaagtccgtcggggtcgtcgatactgatgatcacgtgaccggtggcccggccggcgtgggcaacgaacgcggcacggtagtgggcttcgtcgccgtaatggtcgagatgatcggcttcacagttggtgataatggcgatggtcggatggtatttggcgaagctgccgtccgattcgtcggcttcggccaccagaatatcgcctttgcccgcgtgtccaccgtccagcgtggtgccgtccgggccttggataaagccgccgatggcgtagcttggatcagcaccggcgttcaccagaatgtgggacagcatggagctggtggtggttttgccatgcgctccggccacggtgacggctcgtttgccgttcatgagcagggcgaggatgtcactgcgatgcacaatgcgcttgcctgccgcgtgcgctgcgacgatttccggattgtccggtttgatggcgctggagtagaccacggtctcggcctgggcgacattttcggctcgctgcccgaattcaacggtgatgcccagcgtttcaagtcggtcggttttggcgctgtgtgcgcgatcggagccgtccaccgcgactccttcggcgtgcagcatttcggccagaacgctcataccggcgccgccgataccgatgaaatgggtggcgccgagatccgcggggcgggccgcagcatcgaacgaggcatacgtggggtcaagcacgatgggctgatcttgagacaattcaaaactcctttggggattccagcaccctatattatgaccgtatctcgtgttgcgggacgggattggtctgtatcgcgcacgggatgatatctgaatactatttggatggttcggctaattgcagaacgtgccgggccatgatttcggcagcgtttctgatgccgtattcccatgccttgcggccgaattcggcaagtcgttcgtgatcggcgagcagatcgggcacatgctcatgcacccactgcggggtcaggtccttgtctgcgaccagaaggccgccgccggcgttcaccactggctcggcgttgaaccgctgctcgccgttgccgattggcagcggcacgtagatggccggcagacccagtgcagccagctcggataccgatccggctccggcgcggcaaatcaccaagtcggcacaggcgaaggccagatcgattcgttccagatattcggcggtatggtagtcaccttgtccggccgattcggggccgatgccggtaagcacgtccgcgccggccgaggccgtgaccagttcgcgtacttcgctgattttgcctcgcccggtcaagtggatgatttgtgcgtgggccaacaggtctgcggcggaggaggcgatggcgcggttcaggctttgcgctcccagcgatccgccagtgaccagcaccagcggacggttcggatcgacgccaagctgcgcggccgattcacggcgtacggcggcacgatcgtcaccgatgcgtttggtcagggaggcgatggtcgggcgcaacggcagaccgacacgctcgacgtcggctccggcacgcggtttgagaccggtgccttcgtacacggtaccgatgaaatcggcccaacgagcgcccagtttattggccatgccggcacgcgcattctgctcatggatggcaatcggaatgcccatcttgtgtgcggtggcgtagacgggggcggaagcatacccgccgaatccggccacgacatccgcatgccgcgtttcaagaatggagcgcaccttggcggtttctcgcttccattttgccgggaagcgaagcatgtacaggtcagggcgacgcgggaacggcactttttcgatggtgtcgagctcgtagccggcctcaggcaccaaatccttctccaaacccaccgcagtgccgatgacggtgacctgtgccgtgggttcgatgtcgcgaatcgccccggcgaccgcgagcagcggattgacatgtccggcggtaccgccgccggcaagaacgatatgtggtgtgccttgattcatgattaccgagtctacttacgcgctctgacgcgactgttttatctgcggttgagaacgcataagtcccacaaccagtccggccgccgtcaagcacatgatcattgatgagccacctgcggagacgaacggcataggcacgcccaataccgggaacacacccacgaccacgccgatgttgaccatggcctggcccacgatccaaatggtgacgcacatcagcaccatggcaacataacgatcggtgacctgcaatgcgatgacgatcatgcaccaggcgagaatcgcgaagaacagcaatacgatggcgcaaccgacgaatccggtctcctcgccgatgatcgcgaaaatgaaatcgttatgggcggccggcaggtaattccatttctctcgcgaattgccgatgcccaatcccagaaagcctccggaggcgatggcgtacttggcgtgaatggactggtagcatacgctctgcgcgtcagcggccgagcaatcaccatatgtggccagaatacgacgcatgcggttcgggctggaaaccgccaatgcaccgaccataaccaccgcgcccaatacgccgattcccatccatttgccggggaatccgacgatcaggaaggccacgcctccgatggagaccagaatcatggccgtgccgaggtccttgccgcccatcaccagcgccacgcctatcgcatacaacaccaacggcgcggcatatgctttgattcccttcttgtggtacatcttgctgcaggcatgcaacgacgagggcagccatatgcacatcgcgaacttcatgaattcggccggctggatagtggtgaagccgaggttcagccaacctttgttgccgtagacgtcgatacccagcggagtaaaggtcagcgcctgcaacaggcaggcacccaccacaaagaacacgccggtccgtttccagaacgtcaccggcatcgtcaatgccacgaagcccagcaccaagccgatcaggcaaaacgcgccctggttcagaagctgaaggaacggcgacttgcccagtgcggccatggtgaccgtggagctggagaacaccatgatcaggccgaagcatgtcagccccaccacggccatgcggaatccgtggtagcaccatagcgggttgagcaagcttcgccaacccgtgtagtcggtgatctcgagtgcgggcctgtcaggggctctgtatgccttacgcttatgggtatcagtggaggccatgcacctcgctccacgtcttggctgcggcggcgaatcgattgcctcgatccgcataggacttgaactggtccatggaggcgcaggccggagccataagcacgatgtcgccggcggcggcatacgtgccgcaggcttcgacggcacgatccatgacggtatcgttgtcttcgggatcgatgatggtcaccgggatgtccggagcttggctggcaaacgcttcgaccatcggctgctggtctttgccgatgatgacggccgctttgatggtatgtgcctggtctttgaccaggtcctcgaatcgactgcccttggccagacctccggcaatccagatcacagacttggccgggaagctggacagcgaggcgcgtgccgcatgaccgttggtggctttggaatcgtccacgaaacgaacggagccgccctcgactgcggcctcagccacggtttcgatgcgatggccgcccggcttgaacgaggtaagcgccttcaacgcggtatctcgatcagcgccaagtcccagcaccaacgccaatgccgtcaatgcatcggccaccagatgcgggtacagtgagccgtccggctctgccagatgcgtgaaatcggtgatggcggccagtctgaccggctcccccactgcgccgccggccacgccgctcctgtccacgatccagccatcttcaatgccgatctgaccggcctggggggcctcgagcgtgaatcccaccttgcggcatccttcggcggtttgggcctcggccgccagttcgctgactttggcgtcctgcgcattgtagacgatggcgcgtttggcgttgtggaacaccttggatttgtcggcggcgtaattctcgcgcccgccatgccagtcgaggtgatcgtcggcgatattggtgatcgccgcgcagtcaagtgccagcgaatcggtgaagtgcaattggaaggagctcagttccacgcacagtacgtcgtgctgaggattggtggcgcaacgagacaggctcatgctcatgtctccggaggcgatattaccggcggtcggcgcgtcgagtccgcaggcggtgagcatttccgaggtcatctcggtggtggaggttttgccgttggtgccggtgatgccgatccatggagccggagtaccggtgcgctcgttattcacacgcagctgccatgcgaattccacctcgctcatcacggggatgccacggcgttgggcttccagcacgaacggggtgcgggggttgaacaccggggacgacatgacgtagtccacatggtcccagtccacgtcatcaaaggagcggagaccggcctcgggcttcctctcgtcgacgccaatcacgtgggcgccgcattccctcaatacctccgccaacgaggtgccggacacacccagtccagcgatcaccactgtcttatccgctacttgcattgttcctcctgatataggaattccgtgggtgagcataatcccacccagatttccgctagctgaacagcaggccggagcgggtgacccagtcgccgtagaaaatcgtcagggcgagcagcacgaagatgagttcgatcatccagaaccgcaccaccaccttggtttcggtccaacccttcagttcgaaatgatggtggatcggtgccatcttgaatacacgtttgtgggtcatcttgaagtacccgacctggatgacgtcgctcatggcttccatgacgtacagtccacccagaaccaccgccaggaattcggtgtgcgtggcgatggacagggctgcgaacaggccgcccaaggccagggacccggtatcacccatgaaaatcgatgcggggttcgagttgtaccacaggaagccgaagcaggcgacggccgcgcatacggcgatgacggtcagatcgagaggatcggacacagcataggaatagccgccatggctgccgcccttgatgtggtagctttcccagaatgcgatgatgccaaaaccggtgaaggcgatcatcgacgaacctgccgccagaccgtcaagcccatccgtcagattcactgcgttggtccatgcggtcatcaggaagttcacccagatgacgaacaggatgatggttacggcacggccggcgaagtcgaagttgaagaacggctgttcgatgaagctgatgcccgcctgcgcactggggaatcccgatttggtgggaatcagcagcgcaagtaccgcgtagatggtggcgaagatgaactggccgatgaacttgccgcccaccgataggccttcgttctgcttcttacgcaccttggcgaagtcgtcgataaagcccagcagacccattgacagcatggcgaacagtacgagcaccgcggaccaggagggcacgtcgcccgaacgcaggtatcggtacagtgcggaggatgcccaaccgagcagaatcgcgaagttgatgaccacgccgcccaacgtgggggtgccgcgcttgaccagatgcgactgcggcccatcctggcggatgtactggccatagtgcagcttgtggaccagccgaatcagcagcggggtgccgactaaggtgacgatgagcgacaccagcattccaatgatcagagcaatcacgtgcagcttctctttcttgtcggtttcttggggtggttatcgggtcagttctttgcccagcgttcagccaaagcgctcaggcctgacgcgtgcgatcccttgagcagtaccacagcgtcggaatggttgcgcgccaagtcgatgaccagctgttcggccgcatcgatgtcgtgtacgcaatccaccgacgcggattggctctgacgggcaccgtccgccagagcctgtgccagtgcatcgagatgttggtcttgggcggaaccgaccgcgatgatcgcgtcgatgcccaattcggccgcatacgtgccgatagaggtgtgcaatgccgtctcatcggcgccgagttccagcatggcacccagcagcgccacgcggaacggatccttgccgtcatttgagttccaagccttcaacccgttcaggccggctttcatggagtcgggattggcattaaaggaatcatcgatcagtgtgaaggaaatcccctcgcgattcaccgtggacaatgccatgcgatgagggctgatggtgtgctgcgaggccagaatccgcgccaccgtttcgggtgccataccgtaacgcatcgccacggttgcggcggccaacgcgttcatcacgttgtgacgtccaggaatgcccagatgcaccggcgtatggttgccgtccgcatcgaccaacgtgaattcagcatgatcggaccggtcggcagtgacatcaatggcccgcacctcgggctcctgcgacgatcccaagccgaaccacagcacatcgccgctggccaggccggccatgggaaccacgtgttcgtcatcggcgttcagtaccgcggtgcctccgggaagcagtccctgcacgatttcgcttttcgcctgtgcgatgcgttcgcgggagccgaattctccaaggtgagcgacgccgaccttcaatacgattgccgtgttcggcggtgcgatacgggtcagtcgcgcgatttcgccgatatggctggcacccatctcagccacgaagaaccgggtgtgctcatcgacccgcaacgcagtgagcggcaggccgatctcattgttgaacgatcccaccggagccacggtcgggcctacggtggcaagcagggaggagagcagatccttggtggtggtcttgcccaccgaaccggtcaatccgatgatgtcgaagtcgccgtccagctcgcggcggcgaacgatgttgtgtcgggcgagctcgccaagggcgtcgaccgtgtctttcactacgatctgcggcaggccatcggactccacctcatggtcgacgatggccaccgtggctccctgttcagcggttttcgccacaaagtcatgcccatcgacacgctcgcctcggatggccacaaacaccgatccggggccggcctgccgcgagtcgctgaccgtattggtggctcgagactcggaatcggcgtctccgatcaatcgaccatcgacggccttggcgatctcctccacactcatcggaaccatggtgtttcaaactcctttacgattacgcttcgtcccgcatccacggacttaattgagattgttggccacatgcagggcactgcgtatgttgtttttcctcacgccggcggccagtaccatggcgatggccaaggacatgtgcccgagtcggacgcggtcgtacattgccggtgaatccgcagccatttcatccgattcgggtgtcgacgaggtcatggacatgtcatgttccgcaacgaatgcgtagcgtgtcttcaattcgtccaagcttgcgcttgcgttgacatcttccgtgcccagcacatccacgttcaccgattccaacgcatgctcggccaatgtgcggtcatccatggcgatgatcacggccgccacaccgtcttcggcgcacacggacagcgcgcgctgcatatcgaggatgcccagaggatagttcaggttcatggtacgtgtcatcgacgtggacccggatgcggtgattaccgccaccggattgcccagcatgtgcaggaattcggagagctgggacacgcctgcgtcaacggcctgctcatccgcaccggtcaccgcgaacaccgccatggcgttggatggtccgccggccaggccgctggccagatcgccgagtacgcgatcgtcgaaatcgccgtagagcaacggtatatcggcattggcgatctgtcctttggacgcgcgtggcagcaacgccgcataggcacctgcctgtgcggcatgcagcacatcgggttcctgctcatgcgtgcagatgaacagcgagccgggaataacggtatccacggcatcgctgagtgaggtaatggtgacattggtggcgaagggtggatcgacttcaaaaccgtaccgttcgaccagcattcccaaggtcacccgctgggcgatggattcgctcactgcactcatgggctatcgcctttctcccctgatccttaccacgtgactggaatagcattttttcgtggactggagacaggcacctcgtatttctgcataaggaactcacaaatctgtgcggaaacagggccggccgtcagaccgccgaacacaccattcggatccttcagcaccacggtgaccgcatagcgcgggttgtccgcgggaatcaccacggaataatcggagataatggacgagagcgcgccatccgaaccctgcacctctgcggtaccggacttggcggccatgcggtaaccatcgaccttgacgaacttgttgtagctctccgccactgattccatcgcattcatcatgtccgatgcgaccttttcatccaccacgcgggtggcttcgcccttcttggtctcagtggtcttgccattggcatcggtggttgatctgatgatcgactgctgctgcttgacgcccttgttcgcgatggtggccaccacgttgttgagctgcagggcgttgacggtgtagccctgaccaaacaggatggtgttgcgcgtacgcagatcccatgccgaagggctggtgagcagaccgctcgattcaccgggcaggttcagtccggtcggttgtccgatgccgaatttggtcaggtactcgtagcgttgctcatccggatagttctccccggccataatcatgccgacgttcgatgagttctgcagaataccggcgagcgtccagcgctcagtgccatggtcgaatgagtccttgtaggtctggcccttctgtgtgatgtggtccgggaccgacaattgatcgctcatcttatgcagtcccgtctgcagatagccggacatggagatgaccttgcccaccgaaccaggctcgaaggtttcggacacggcccgagacgggctcatcttcgccgcatcggtaccagcctgtacttcatcgctatcggccagtgcgagaatctccccgctctggacatcctgcaccacggcgatcgcccacgctgcaccatacttggattcggcctccttcaaggcctttttgacataccattgcacatcacggtcaatggtcagggtgacatcgtcgccatttttggccgccaccgattcggtcatggtgccgggaatctcttcgccgccattaccacgctggtaggtttcatggccatcggttccggtaagcgtcttgttctcgacctgctcgatgccggcgacgccatcgccgttgtcgttcacgccgccaagcagcgcgcccatgagatcgccatccgcatacagtctttcactgctcagctcaccccagacaataccgcccaggtgcaacgcctcgatgctgcgcttgacctgtggggtcacgtctttcttcagaatcacatactgcccggtaccggacagatcagcgcccagttccatggcgttcatatccaggactttggccagcagtcggcccacggccgccgctccggtagcacccacgggtttgccgtcaatttcgtggcagtaatcacgggtgttgtcattgcaagtaatcggctcgaactcctgtgcagcctccggattggcgacgatagtataacgctccacgctttgagcgagcacggagccgttggcgtcgaggatacgcccacgcttggcgctcaacgtcacggtcagggtgcggttagccgtggccgcttgtgcggtttgacggccgccgatgagctgggtggaggccagctgaatcacgcatgccgacgccaccaacgccaatgcggcgccgatggcaatgcatttgaacgcgaaggtcttgaccttggcgaactctacgatgcgacgaatggtgttcactgggttccgcctttgttggactggtatccgcttaagtcgatggacactgatccttgctgcgggaccatgcccatgtcgctggccttgtcgggcaggttcgcgactaactgatcgagtttggcctgatcgtcttcgacatcttgggtaagtctgttgatattggtttcgatctgtgccgcctcaaacgagttctgcaccatctgggtacgcaacatcagcgcaccgaacaaggtgccgacgaggaagatcactgcgatggccacgtgcaccagcggtgcgcttcttgttctggtccattcgatgacccgtccgacgacattgccccgctcgtctccacgcgggttggagaccacccgcagctcaggtcgggaggaggactgatgcttggtgtgcggtcggttcgaggccggagccgcgttcgatcgaatgttacgtgcggttgccatatgctgttatcccctccttgtacgaattcgcgctgtgtttttggctctgcccggagacgcggagccttgtatcttgacgtcattcaggccctgcgcggtttgcgtaaagcgtttcctccatcgtgacggaatctcacggctgacttccaccgcccgcaaccgcaccgaagccgatctcgggttggctgcgatttcatgttcgccggccttgatggcacctcgcgtgagatccgtgaaaaacggttgggcatccggcggtatgacaggcagaccagccggaacatccactcgcagcccttgtgccatgaacgatttgacggttttgtcttcgagcgaatgataggactccaccaccagtcgtcccccgacatgcagtcggttcgcggcttgcggcaatgtggaggcgagcttgtccaattcgccgttgacttcaatgcgcaacgcctggaagacgcgtttggcgggattgcccgccgggcggtgggcttgcggcaccacttcatcgaccagacggttgagctgtgcggtggtggtaaacggctccttgtctcgacgtgccacgatggcgcgggcgatctgacgcgagaaacgctcttcaccgtattccttgaatatacggaccagttccgccgcatcataggtggcaagaatccgttcggccgtcaacggctggctgacgtccatgcgcatatccagcggcgcatcatgcgaataggagaagccacgatcggtttcgtcgatctgcaggctggataatcccagatccatgaatacggcgtccacacgttctatgcctcggtccgtcaacacctgatcgagctgatcgaaggcggcatgcaccgggatgaatcgatcggcgagcccctcccgttccatgcgttcggtggccagccccagcgcttcactgtcacggtcaatgccgatgagccgagcctgcggcgcggctttgaggaaggcgatggaatggccggcaaggcccagggtgcaatccgctgcgatggcgttctcatgttccagggcaggcgccatcaggttcacgcaatcgtccagcaataccggcagatgaatattcgccacatcaaccatcagaattccacctccggcaacacatcgtcagcaatatcggaatatccctcttccttctcggcgaggtaggactcccacgtgtccttattccacagttcggcacgggtgccaacgccgatcaccacgacgtcggaacccagattggcgtaatcgcgcagcatctgcggcaccagcacgcggccctgcttgtccggctgctgatcgacggcaccggaaaggaacacacgcaggtattcgcgggcggctttgtttcccaccgacacacgctgaatctgcgaggcgatacggcgaaattcatcgaacggcagcaggtacacgcaccgttcctggcctcgggccatgaccaggccctgccccagctgggagcggaatttggccgggagcgccatacggcctttggcgtcgatcttcggcgtatatgtgccgagaagcagcggcggcagaccagccatgagatcagccatagtggtggagccttgtgcgttggcatcagcgtcgcgaatcgtctgatcggcaaccatggctccacctccttcatcgttacgtgggatacacttcggccaactggttcaccactctaccccacgattccccatttctccccactcatgcacgatttgctcacccttttagggcaattaccgatggattgcgcgtgtcggccacgactgtcgcacgaatgggcgctccgcacatccaatccacgttgcgcactccaccgaccgagcagcatggcgaattcacgctgaattcacctattccgggttgtccgcatcactgacgtagggggtgtgcggtaaatttgaatgccttaagttttttctgccccacggaaatggaacgaagagaacagcatgtcgagttacgcctcccagctgcatgaggagcagcaggccgtcgatcgcgcctatggacgattggatgatctgcgagccgaaatgtggcaacgcctggacaccgtacgcgccgccggctcccacggatcccccacgcaacgcagcgaacgagactcctttgccacaatgtacgaaaaccgcctcacgcaattgcgcagcgttgaggatcggctggtgtttggtcgtctcgacgccaagaacggcgaccgtcattacatcggccgcatcggcctgtcgagcccggaccatgagccgattctgaccgactggcgtgccgaagccgcacgtcctttctatgaggcgaccccctccaatcacggcgacatcgtgatgcgcaggcatatcaccttgagtttccgcgaagtcgtgggcgttgaggatgaggtgctcgacgtgcattccgaccaagtcggccaggcgtcttccgccggcacgttgaccggcgagggtgcgctgctggcttcgctgagctcacgccgcaccggcaagatgaccgatatcgtggccaccattcaggccgagcaggaccgcatcatccgctccgacatgaatcgtgccgtggtggtgcagggcggtcccggcaccggcaagacggccgtggcgctccatcgcgccgcctacctgctgtacacgcaccggcgcacgctggaacgttccggcgtgctggttgttggccccagctcggcgttcctgcactacatcgatcaggtgctgccctccttgggcgagaccggcgtggtctcacgcaccatcagcgatctgattcccggcatcaccgccacggcggtcgactccccttatgcagccaagctcaagggcgatcgacgcatgacctccgtagtggccaatgccatcgccgcgcgcgtgcgtgttcccgctgttctgccgacagtaaccattagcggcattcaggtaccaatgctggccactgatatcgagcaggcgcaggcggacgcgaagcgcacccggcaacctcataacaaggcccgcgagacctttatccgttcgatgctgaccagcatgcagaaccgttatgccgaacagcttgattacacgccggatcaggcggagctgaaccgcgcgatgtcgttgctgcgtatgaacgagcaggtgcgcaagaccctgaacctgtgctggctgccgatgactgccccatggctcatcgatcagctgttcgcccatcccgaacgtctgaagtctctggctggttggctgaccgacaacgacatcgcggcacttgcccgccccaagggctccccgctgacccgctccgatattccgctgctcgacgaagcgatggatatgctgggccccgatcccaagacggtggcccgccagtccgccgccgacgcacgtcgtgccgccgaagagcagtatgccaaagacacgctggccgcgaccggtctgggtggaggcatcgtctccagtcagatgctgctcgaccagatgaacggggacgacgccgagctgaccgcgcagcgggccgcggccgaccgtgaatggacctacgggcacatcgtggtcgacgaagcgcaggaactgaccgccatggactggcgtatgttgatccgccgttgcccctcccgctcgttcaccatcgtgggcgatgtggcgcagacctcggcgctgggtggcacccgacgctggagcaaatcgatgaaccgcctgttcggcgaaagccactgggatctgaacgagttgaccatcaactaccgtaatccgcaggaagtttccgaactcgcctcacgatttgccgagaaggaaggcctctacatctccacggtcaatgcggtgcgcaccatccccgattcggtgtcccgcaatgtggtgcccgacatgtcgtccttgctggaaacgacggccgagcaggcggcgcagcttgccgaacaattcgtttcggcagacggcaccggccgcatcgccgtcatctgtccggatgatctcatcgccccggtgcgcgacgccgtgcgccgcaaactggccgccgttcttgacccggccgaatacgcaaggctcatcgagcagcccgaatgggatgagcaaatcagcgtctgcggcaccgaaacggtcaagggtctggagttcgatgccgtcgtggtggtcgagcccggtctcatcgaggatgacgcgccgagccgcctggtcgccgcctcggacctgtacgtggcaatgaccaggccgacccagaaactggttatagttcggacaagaacggacgaaaagtccctgaacatctaaggtatgaagcatgcccaaagcactgttattggaaaacattcaccccgacgcggccaaatcgctgcgtgatcacggtttcgaagtcgagaccatgaagggagccctgagcgaggacgaactcatcgacgcgctggatggcgtggacttggtgggcgtacgctccaagaccaacgtcacagcccgcgtgctggatgcgcgtcctacgctaagcgccatcggctgcttctgcatcggcaccaatcaggtcgatctggcacatgccggcaagcgtggcatcgccgtgttcaacgccccctactccaacacccgttccgtggtggaattggtgatttgcgacatcatctgcttgatgcgccgcattcccgcacacacgcatcacatcaagcatggcctgtgggacaagtccgcttccggctcgcatgaagtgcgcggcaagacccttggcatcatcggctacggcaacatcggctcccagctgtcggtactggccgaggccctcggcatgcgcgtggtgttctacgacatcgaggagaaactggcactgggcaacgcccaccgttgcgataccctcaacgaactgctggaacagtccgatgccgtgaccctgcacgtggatggccgcaagtcgaacaccggcttcttcggcgaagaccaattcgcccacatgaagcaggacgcgattttcattaacctttcgcgcggtttcgtcgccgatctgggagctctgaagcagcacctcgattccggccatctgtctggcgcggcggtcgacgtgttccccgttgagccgaagaagagcggagatccgttcgagacctcactggccaacgaagacaatatgattctgactcctcatattggcggctccaccttggaggctcaggaatccatcggccatttcgtctctcagcgtcttgaggattactggttcaagggttctacctcattgtccgtgaacctaccgcagatcaacctaggtgaacgcaagggcgtgtgccgtatcgcccatctgcacgacaatcttcctggtgtgctggctcatgtcaatcgcgtgctcggcgaagagaacatcaacgtttccttccagtcgttggccaccgaaggcgaacttggctatgtggtcaccgacgtggctcagaagcccagcgccgccacgcttgaagcactacgcaacatcgagggcaccgttcgcatgcgtgtcatcagctgacgcagctcatcctcgattgatatgaaagagacccgtcgctgacgggtctctttcataagtgcagggcttcatgattggttcgcaccatggtttgcgaatcactcgcatatcacggtgcatggcattcgcatattattcacgcaaaccatcaatggcgctttggaaatcctccagacctgcaaagttctggtacacactcgcgaatcgaaggtacgccaccacatccaagtcacgcaacggtttcaggatggctttgcccacttcatctgaggtgacttcggcaaggcctcgggagcgaagatcctcttcgactttctgtcccagcagcttcagatcctcttctctgaccggccgcccctggcaggctttacgtacgccggaaatcactttgtctctgctgaatggctccacgccacccgaacgtttagtgaccagcagcatactggtttccaccgtggtaaaacgcttgttgcatttcgggcatacgcgacgccgacggatggaatgaccgtcatcgctaatgcgcgtatcaataactttggtgtcggggttctggcaaaaagggcaatgcatgctctccagaataacgtgtacgggcggaaaaaccatgccgctcgggtttcatttactcaaccggaacaataatgcgctgcccggcctgcaatgttccggactcgagattgttcagcgtaatcagctcatccactgtttccgatacatcatggccagcaggtgtaatagccgaagcatatgaccagagcgtatcccccggccgcacgatatagctggtcacctgcgtggcacccgtatctgattgggcccgctgagcggtaagcgcgccgaaaccacaccaggccagcgccaaggcgatcatcactgcgataatccgcccacgcacattccggcgggacgttccagcatgctgcatagctacacgtgcgctacgggccggggccatcaccattgaaccagtcatcacgaccacctctctcgaacagatgttctatcgaacaactgttcttataatggcacaaatgttcgacacggtcaagtcgaaactcgaacagatgtttgatttcacacgaacaacacgttatgctggtgacataacgaaaggagccctgacgtgagcaccattcccctctcccccaagcagaagccggacgagtccaccctgaccgaccgccagcgcaaagtgttggacgccattcgcacgcatatcgacgaacaaggctttgctccctctttccgggagatcggaaatgccgccgggctcaaaagtccgtcttcggtcaagcatcagctacaagttttggaagacaagggcttcattcgcatgaacgcgaacaagggtcgcgccatcgaggtgatggcaggatccgccccgaatgccgaaaagccatcacaagccagcgaagaggcaaccagcgccagcaatgtggcggagatataccaattccccgccgaagccattgccgaatcacatgacgtaccgctcgttggccgtattgccgccggcgtgccgattaccgccgaacagcatgtggacgacgtcatgcgtctgcctgaacggctgaccggctccggcaccctgttcatgctggaagtccacggtgattccatggtggatgccgctatctgcgatggcgactatgtggtggtgcgcgaacagaattccgccgtcaacggagatatcgtcgccgctctgttggatgacgaggccacggtgaagaccttccgcaaggaaaacggccatgtctggctgatgccgcacaaccccgcatactcgcccatcgacggcacacatgccacgattatgggcaaggtggtcaccgtactgcgcaaattatagcctgttcgccaccagctgatcagcgtgcgctgaatcgcgctggtcgtgctatagtcgcacactgcttacgaaaccccggcctcgcgccggggtttcgtcgtattcagaccatatcgcaaatggtattgagaagcggtttcaactcgatagagcgaaggagtacacatggcccatacccatacacccgcaccatccacatccgtaaaccctgccgcgcaccagcgcaggctgattgccacgttgaccgtcactggttcggtcttcctcatcgaagtggtgtcggccgtcttaaccggctcactggccctgctggtggatgccggtcatatgctcaccgacatgtccgtgctggtggcatccacaatcaccgccatactgatgcgccgcaagcccaacaacactcgtacttggggctgggccaggcttgaggtgctcaccgctgccgcgggcgccgtagtattgcttatcgtcggcatctatgcgttggtagaggccggcatgcgtctgttcggcggctccaaagcggaaatcgacgatatcggcttgctgctgttcgtaggcattctgggtcttgtcgcaaatatcatctcgatcttcatccttgcctcgcagcgcgaagacaacatgaacatgaaggccgcgttcctcgaggtaatgaacgacgcacttggctcggtgtctgtggtggcctctgccctggtaatgatctccaccggatggaatggcttcgacgccgtggccggtgccgtcatcgcactgatgatgattccgcgcgccatcaagctgctgcacaacgcggtcaaggtgctgctggaggaaacaccggatggtcttgatctcgataaggtacgcgagcatctggaagatgtgccgcatgtgcttgccgtgcatgacctccatgccagcacggtgtccaccgacatgccgattcttatggcccacgtggtagtcgacaaagacctcaccatggaagatgccgccacaatcctcacccaactgcaggattgcctgcgcgagcacttcccggtctcggtcccccacaccaccttccagcttgagcccgagggctatagctccccctcctccaacgaattccacgaataaaaaatgctccctctggaagcattcagcagggtataaaaaatcgctgtacgtgtgcgatttttcgtgccgcacaaggtgaaggcctacaaaggtagttcgaaccttgtgcggtgtgaaaggcgctccgtacagcgattttttatcagaagccgaactgggcggcggtttccttcagcgtctcggcggagcgcttcagagcggcgagctccttgtcggagaccggggtgttgatggtgttgttgacgccctgacggttgaggagggtcggcacggacatgcagatgtcggagatgccgtggaagtccttgagcatggagctcacgggcaggatgcggttggtgtcgtgcaggacggcttcgatgatgtcgacgccggacatgccgatggcgtagttggtggcacccttaccgttgatgatcttgtaagcggcgttcttgacttcctggtggatctcctcgcgcttggcggcgtcgagcggatcgtggccgggcagcggggtccagtcgcacatggggacaccaccgatggtggcggactcccacagcgggacttcggagtcgccgtgctcgccggcgatgtaggcgtgcacgttcttgacgttgacgccggtctgctgggcaatcaggaagcgcagacgagcggagtccaggttggtgccggaaccgaagacctggttctcgggcagaccggtgagcttctgagccacgtgggtagcgatgtcgaccgggttggtgatgagcatgtagatggcgttcggagccaccttgaccaagttcggcatgatggccttgaggatgttgacggtagcgccaacgagctcaagacgagactgacccggcttctgacgcggaccagcggtgatgacgaccatgtcggcgtcgcggcagatctcaggatcgtcggaaccgtcgatggacacggtcgggtagaagctggagccgtgctgcatgtcgagcacttcggcttccacgcgctccttggcgatgtcttcaagcacgatctcgcgagcgacgccacgctgggcagcggcgaaggcgagggtggagccaacggcaccggcaccaataacagcaagcttcgtgggcttaacggtagtttccgccatgatggatgaacctctcttcaaaggcggtctgctgatgaatggcaggccttgtaactaacggttttcactctataaacccgctaagacgttttgctaccagcacaccaccctgtctgataacggtatggtaatgtttccaacggttgttagcgctcacaaacaaactgtgatgtttatcacgttagtcaatggactgttcgaccacctgagcggcaagatgggcgtcgacgtccgcttcaagctgtatgccatcatcgcggtactccaccttgtccaccttgccgtattcgcgtacacgagagatcagggagccagcggtatacggcagcagagcgttgacatgcacatgcgggaccggcagcagactttcgaccgcggtacgcagctcgtccaatccctcaccggtataggcggagacgatgaacgcatccggctgcagtgcggcgagtcgttcacgtgtcgcctcgtccgcctgatcggccttgttgaatacgagaatacgcggaatcgaggccgtgccttcgatgtccgccaacacgtcattgaccgcgtcgacctgagagaacgggtcagggtgggagccatcgaccacgtgcaggatcacgtcggcctcggccacctcttccagggtggatttgaacgcctcgatcagctgggtgggcaggcggcgcacgaagccgaccgtgtccacgtaggcgtaagcgcgtccgtcgcgggttttggcgcggcgcacggccgtgtccaatgtggcgaacagcgcgttttccaccagttcggccgaaccggtcagacggttggtcaacgaggatttgccggcgttcgtgtagccgaccacggccactgtgggcaggccgaagcgacggcgtgaaccgcgcttgacctcacgtgccggagccatctcacgaatctgacggcgcagtctggcgatacgcgtgcgaattacacgacggtccatttcgattttggtctcgcccgggcctcgcgatccgatgcccgcatccgcgcctgccgcgcgaccgccggcctgacgggacagcgaaccaccccaaccacgcagtcggggcagcatgtattcgagctgcgccaactccacctgcgccttaccttcacgcgaggtggcgtgctgggcgaagatgtccagaatcaccgcggtgcgatccaccaccttgactttggctgcgtcctccaatgcacggcgctgtgacggcggcaggtcgtcgtccacgataatcgtatcggcttcctcacgcgccacgatgtcggcaatctccttggctttgccggaaccaacgtacgtggctgcatccggcttggagcgatgctgcagcaaaccatcgcataccaccgcaccggcggtttcggcgagcgccgccaactccctcaacgattcctcggccttggcttgcgtggtgacggcggacgaccagacgccgacgagcaccacacgttccagtcgcaccttgcggtattcgacttcggtgacgtcctgcagctcgccgagaccggcgacatgcttgagctcgttgcgggcctcgcgctcctcccattcctggttggcgtcctcgtgccagccggtcgcgcgctggctgtcgtcgagcagcacttcggactgcccggccagcacaccttcaggggtaacgtcgttgttgccgcggtcgatgtcggtgtactgggtgttgtcggtcaagtgcgcctcgtttggttggaatggttcacgattcttctatggtcccttattatcatcacatgaggtgacatgctggcatagatcggcacgtaccggcataggccggctgatacaggtcggcatacgagagcggcgaatcccgcagaaatggagcgaccatggcagaacagtatttctctgcggaacccgcgtcgaaagatgtgcgccgcacattgaacgtaacgttgcgcggtcatgaggcgaccgctcaggtgtcgaacggcgtgttctccggctcgcgcgtggacctcggtacatcggtattgctgaagcatgcgcccgagccgccgcttaccggcgatttcctggatttgggctgcggctggggccctatcgccctgacattggcgtttgagtcgcccgaagcgaacgtgtgggcggtggatgtcaacgagcgcgcgctggacctgacccatgccaacgcacaggcgaacggccgcacgaacattcatacggctcaggtggacgagtccagcactcccctgcccgccgagaaccagccggcgttctgcgagacggtgccgggcgacctcacgtttgatgcgatttggtcgaatccaccgattcgaatcggcaaggaagcgctgcatacattgcttatggcttggctgccgaagctcaaggtgggcggcgccgcctatctcgtagtgcagaagaatctcggctccgattcgctgatcccctggctggacgatgcgctcggcgaggggttcactgcgagcaaatacgcgagctccaagggcttccgtatcattgaagttcgtcatgaaatatgagtatcctgcagaacttcccgtatctgccgcgcgtgatgagatagccagcgcggtcaaacgttcccaagtcgttattgtgtccggccagaccggttcgggcaaaaccacacagctgccgaagatcctgcttgagcttggccgtggcacgcacggcaagcagatcgtgcacacccagcctcgccgtatcgccgcgcgcacggtggccgaacgtatcgcctcggagatgggcgtgaagctcggtgacgaggtcggctatcaggtgcgtttcaccgacgaaagctcgcccagcacgcgattgagagtcgtgaccgacggtattctgctcgcccagatccagcgcgatccgaaactcacccaatacgatacgatcatcatcgacgaggcgcatgagcgtagtcttaacatcgactttctgctcggctatctgacggcactgctgcctcagcgccgcgatctgaagctcatcatcacctccgcgaccatcgattcggtcaagttccaggagcatttcgagcacgccttgcatgagaaggtgccggtaatcgaggtttccggccgcaccttccccgtgcaggtggtctatgagccgcttggcaccgcgcccgcgttgatgcgcgaagtgccgggattcgcggtgggcgcccgccccggcgacgccgattacgacgagctggccagcgccatcgcggaatccgattccgaccggccccacggccggtccggcgactcctatgccgatgacggcatcaccgatatgcccacggccgtggctcgagcctgcgccgaactggtgatccactcctcccatgagcgcggtccccgcgatattctggtcttcgcttccggcgagcgcgacatccacgagttcgaggccgcactgcggcatcattacggtccgcgcgccgacgacatgcgccgaccggacgccatcgagatcatgccgctgttcgcgcgattgtccgccgccgaccagcacaaggtgttcgaatcgcatttgcatcagcgcatcgtcatcgccaccaatgtggctgagacctcgctgaccgtgcccggtatccgctacgtggtggaccctggttccgcccgtatctcccggtattcgaagaccgcaaaggtccagcgtctgccgatcgagccgatcagccaggccagtgccgaccagaggtccggccgatgcggccgcgtggccgacggcatcgcgatccgcctgtattcgcgtgaggattacgagacccgaccgcgcttcaccgagccggaaatcctgcgtacctcgctgggtgccgtggtgcttcacatgctgtcggtgggcgtggcccgcacggccgaggacgtcacgaacttcgggttcatcgatccgccggatatgaaggccgtgtcggacggtttcaatgagctcaccgagctcaaggccatcggccgaaagcgcggcgaggtgacgctcacccataccggccgtcagctggcgcgcatccccatcgacgtgcgtctgggacgtatggttatcgaggccgcgaaaaccggttcgccgaatcttctggcccaggtgctcgtggtcgtggcgttcttgagcttgcaggacccacgtgaacgcccggacgacaagcgtgaggatgccgaccgtatccacaaccgatatgcggatgagacttccgatttcctgacggccctgaacatctgggatcgcgtgttccaagcggacggcgacccgagcaacaacgcgctgcgccgtatctgcaaaaccgagtatctcagctggctgaggatacgccagtggaaagatctcgtctcccagctacgccagatgtgcaaggagctgaagttcaaggtcggcgacccgttgcccgcctcccgcccaggcttggagattcgccagctgccgttgaatcagcaggccgcgcattcgctgtgctgctcgtgggatgcggatggcatccacaagtcgatgctcgccggattgctgtcgatgatgggcatgcaggtggtgcgtgagcccaaggcctccgatttcgcggggctgaccggtgcggcgcgcgcccgtgcgatgaaacgcgcccagaagcagtcgaagaacgattatcagggcgcgcgcggcacccgtttcgccctgttccccgcctccgccgtggccaagaagaccccgtcatgggtgatgagcaccgaactggtggagacctctcgcctgtgggcccgctattcggcggccatcgacccggcgtgggccgaaccgttggccggccaattgacccgcaccacgtatgcggagccgcactggtcgggttcgcgtggctcggctgtggccaccgcgcgcgtgctgctgtatggtctgccgatcgtacaggaccgtgccgtgcagtggggacgcatcaatccgcttgaggcgcgcgacttcctgattcgccagggtctggtcgagggcgatattcagcagcgcttcagttacgacgactttgtgggcaaaaaccgtgacattctcgaggatgccgccgatgacgcgagccgcacccgccagctggcggacaccgtgtccgacgaggatctgttcgacttctacaacgcggtcattcccaacgatgtgaccagcgtggccgatctggcgaaatggtggaagtccgagcatgaccgtcagccgaatctgcttgatttcgacccggccaaggtggagcgtctggcatccagcgattcggtgagtctggacgattaccccgaccattggcatacgaccggatcggacggccaacccatcgacctgcgtttgagctacgtatacgatccggccgacccggccgacggcgtcaccgtgcatgtgccgttgaaggcgctctcgcgtatcacgcccgaccagttcacatggaatgtgccgggcctgttggatgagctgattctgtcgatgatcaaggcgctgcccaagcagctgcgcgtccagttcgtgccggccccggatgccgcgcgtgcgattcgtgactggatcgacgagcattacccggatctgccgggctcgggctcgcagcagaagccggatctgccgccggtggatgaggatggcacgaccgttggctggcctgatttggcacatgtgttcaccaaggcggccatcgccaccaagggtgcgcagattcatcccgaagtgttggggccggaactggtcgagcgtctttccccgtatctcagggtcacgttctcggtggagcagcaactgccggccggcaagcaccctcgtggacgccggcatgcgcgcggccccgtcaaggtgctgggtgtgtccaaggatctgaaggcgctgcaacgcaagttcgccgcgcaggcggaggcgtcggcccgtcaaatggtcaagaagcaggccgatcaggctggagaacagggcaagctggtcagtcaggcgaacctgttgcataaggcgggtgccaccaccgagtcccgggccacgatgctctggcgtggcgcattggatgcgctgcggttgccggccgaacgcatttcgtcgcgctggctgggtaccgaggcgttgatgctggcttctgctccgtacaagtccaccaaggatctggtcgaagacctgcagctggccacggtcaaacggctgatgccgaatgtcgacaggctctcggacgatgaggcgttggccaatgcggtgctcgatgtgcgcgaagtgtacgaggacaccgtctatcaggtggcgcatgacgtgatcgccgtgctcaaggcttatgccgaagtcgacaaggccactggcggcaaggctgatctgccgatgctttcggtgttgcagtcgattcgcgaccatatcgccacgctcgtctaccccggattcatcgggcgtactcccccggatgcgctgaagtcgttgagccgatatttgagagccgatctgagccgactcaataaggcaaaaaccgataagaaccgtgacgtcaagtgggcctggcaggccgacgaagcccgtcaggtggtcgataaggcgttggcccgtgccaaggcggagccggccggcccgaagcatgaggcattgatgaagcaggccgaacaggcccgttggatgcttgaagagttctacgtgtccctatgggcgcaggagcttggcaccgccaagccggtgagcctgcagcgcatcaagaaggcactggcgtagcgatggcgacgacgcaacggcgcaagccggccaatccgcgcggcagggcgaacgtgattgtcgcggggcggggcgtgtcaggcggcaatcgcaaacgtcgcccgggcaaacgcccgcgcaatcgcaggtatccgctcagcccggcgcgctggtggaagcgggccgggttggcgcagcgcgtcgcggctgtgctggtcaccgtggtggcggccgcatgcgtggtcgcgctggtcgtgggcactgtgcgggtcgtccagtggcgtcgcgacgtgcaggaggccgaggcccgccagctgcagctgacgcagcaatacgacttcaatcccggcgacatcatctcggacggccagttcttcaacgccaatgcgatgagcgaggccgaggtccagtcgttcctcgacaagcagggcgcggcgtgcagcggttcccggtgcctgaaaaccatgaccttcgacaccgaagaccaggcggcgaacgagtattgcgcggcgtacgagggcgcgagaaaggagaccgcggccgcgatcatcgacaagtcggcgcgcgcgtgcggcatcagccagaaggtgctgctcaccgtgatgcagaaggagcagcacctggtcacggccgtcgatccgacggacttccagtacaaggccgccatggggctgagctgcccggacaacgcgaactgcgatccggcctatgccggcttcttcagacaggtgtacggggcggcgcaccgctaccaatactacgtggcgcatgaaagcgcctacggctatcacgccaacgcgctgaactacatccagtaccacccggatgccgggtgcggcggcaccaacgtgtacatcgagaacaaggcgaccgcgctgctctacatctacacgccctaccagccgaacgacgcctcgctggcggccgggttcggcgagggcgactcatgctccagctacggcaaccgcaacttcgccctcatatacaccaactggttcggtgccgcgcgccgataggggcgggaacggcaaaaaaccgaaaccacggtaaggctaggtgtcatccgcgccgtcgccgccccgccgcacggccggagaaccggccggatgacgagcggcacggctcacaggtcgatcttcggggaggcgtcgagcagggtacgcgtgtactcggccttgggatggttgagcacgcggccggtctccccgctctccacgacgcgcccgtggcgcagcaccgtgatcacgtcggacatctcctgcacgatgcccaggtcatgggtgatgaacaggcatgcgaaaccgtgctcgcgctgcagccggcgcagcaggtcgagcaccttgcgctgcacggtcacgtccagcgacgacgtcggctcgtcggcgatgagcagcgacgggttgagcgccaaggcgcgcgcgatgccgacgcgctggcgttggccgcccgacagctggtgcgggaaccggccggccacatcggcgggcagctccacctgatcaagcaattcaaggacgcgcttgcgccggtccgtctcgctgagcccgccctgcacgagcatcggctcgccgatgctccatgccacggacttgcgcgggttgagcgccgatccgctgtcctggaacacatagcccatatgcttcagaatctcgcgcttgcgcctgccatgcgccttggcgagatcctccccctcgatgagcaccgtgcccgaggttggcgcgagctggccggagatcaccttggcgatcgtggtcttgccggctcccgattcgcccaccagcgcgcgggtcctgccggccaccagatcgaacgagatgtccttgacggcgaagctgccggccttgtacgacacggccacgtcgttcacctgcgtgatgcgcctgccgccgccgagcgcgtcactttccgtgatgcgttcgccgccggccgcatgttcgccgtctgccgcatgctcgtcgatgcgcaggcgcggcacggcgtcgagcagcatccgcgtgtagtcgtcggacgggtggcggaagacctgcgcgacgctcccctgctcgacgatcacgccgttgtgcatcacgtacacgtcctgcgcggcctgccacaccacgcccatgtcgtgggtgatgagcagcacggccagatcgaggtcgaccgccagcgaggagatcagggcgagaatcgccttctgcgtggtcacgtcgagcgcggtggtcggctcgtcggcgatgagtaccttgggtcggttgatgatcgccatggcgatcatcacgcgctgcagctggccgcccgacagctcatgcgggtacgacgaccacacgcgttcggcgtcgtcgagcccgacctcgcgcagctgttcgagcaccttggccttgcgctcggcggcgctgagctgcttctggtggtatttgagcgattccgcgacctgtacgccgagcgtgaacaccggattgaacgcggtggacggttcctggaacaccgtgccgatgtattcgccgcggatgcgttgcagcggcgcgtcggcggccagcagatcgatgccgcggccggcggcgtccttgccgtcgccgcccggaccggagtccggcccgtcatccacaagggcgtcgtcgaggtacgcgtggcccttcacgctggccaccgacggatcgagacggggcagcgccatcgccgtcaccgacttgccggagccggattcgccgaccagagcggtgatgcgccccgggaacagcctgaggctgacgccgtgggtcacctcccgctcgtcgaagctgacggccagaccgtccacggtcacgatcgcgcgtggttcactcattggaagctccttggatgcacaagcgttggaatgcgtccggcgcgcgcgccagcggaccatgccgccggcgcgcgccggatgcggatgccggctcagttcgcgctggcgagcgagacctgcgtgtagtccgggtacgccgggaagttgccgatgacgaagttggtcacgttcgatccgtggatgaacgtgttcttcgaatagatcagcggcacgaccggcgcgtcggccatgatcgtcttgtcggcctcggcccagatcttgccggcctcggtctgatcgatggtctcggtggccttcttgatcagctcgtcgaccttcgggttcgcgtaacgggccaggttgtagttgccgtggccgatctgcgaggagtcgaacagcggggagatgttggcgtagggcgacgggaagtcgggctgccacgagctgatggccagatcgtagtcgcccttgtcgttggtcagcgtatcggaatacacatcgtcgttaagtgtctggatgtccaccttgacgccggcccgcttgaggctcgtctggatcgaggaggcggtttcggcctgagcggaggtggcgatgagcttgagggtcggggcctgctcgcccgactccttgatcagctgcttggccttgtccacgtcgccggtcggatcggccttgtacaggtcgtagtcctcgcggccctcgatgccgggcgtaatgagcgtggtggcgaagttgccggcgatctcgccgccggaagccgtctggtaggccttcttgtcgaccgcgtactgcagcgcttggcgaatcttcgcgttcttcacgtgttgggtgttgatggcgaggtattccagcgcgccgtcgccgctggtggtcagcagcttcttgtagttcgggttggcctgcgcctgcgcgagctgcgcggccggcacgaatccggacaggaacgagttcttgccttcaccggtgccctgcatgatcgactgggcggccacagaggtgtcctgtcccatcttgaacacgatcttgtcggggcccgcggtgcgcaccggatcggtcttcttgtcccagaaggtgttgcgcacgaagacggcctgcttgccggcctcgttcgactcgaccttgtacgggccggaggccaccggcagcttgccgtagccggacgccgggcccttgccgtcgggcacgggggtgaacgcggcgagcgagacgacccacggccagtcgccgaacggcgcgttgaggtggaagatgatggtcttgtcgttcggcgtctcgatggagctgagctcctggccgtcgaacgggccgtggtagtcctgcgcgccctcgagcagcgtcttgtggtagctcaggccgccggtcagcgagtcggcgaaggaacgctccagcccgtacttgacgtccttggaggtgatgggcgtgccgtcggagaacttgagcccgttcttgagcgtgtacgtccacgtcttgccgtcgtcgctcgacttgccggtgtcggtggccagatcgggcacgaccttcgtctcgcccttgtcggtgatcttccacgcggtcaggcggcggaagatgttgccgttcgtggtggtcggcagaccctggctcttggccgggtccagatccatctccgtgctggacagcagcacgttcagcgtgccgcccttgacggtggtgccgctcgccgagccggtggcggcgttgtcgttggacgtgccgcagccggacagcgccagtaccgcggcacaagcccccgccgcgaatacgcgccatgcgttgttcttcatgatggttttcctctctatcggcgccggtccgtggagcagaccggcaagtatcgcgtgttgcggccgcagccgcactacttcgtgccgagcgcgaccctggggtcgagcaggctgtagcagatgtccacgatcaggttggcgacgatgaccagcacggcggcgaacatcgtcgcgccgaccagcacctgcaggtcgaggttcgacacggaatcgagcagcagcgagccgagcccctgcatcgagaacaccttctcggtgagcaccgcgccgccgagcagcccgcccagatcgaggccgaacatggtcatcacgggcagcagcgcgttgcgcagcgcgtgcttgaagatgatcaccgattcgggcacgcccttggagcgggcggtgcggatgtagtcctggctcagctcgccaatcatctgcgtgcgggtgaccctggtgtagccggcggcgctgagcacggccagcaccagccacggcagcagcagatgcgtgaaccagccgacagggtcgtcgtggaagttcacgtacccgccgctggggaatatctgcagcaccagcgaaaaggcgatcaccgtcagcaggccgatcaggtatgacggtgccgaaacgcccacgatcgacagcccgagcagcgtgcggtcgatcagcgtatcgcgcttgagggccgcccacacgccggtcgccacgccgatgaccagccacagcacggccgcgccgaccgcgatcgacgcggtgatcgggaagcggtcgaggatcagctggctcaccgattcgttgagacggaacgaatacccgaggcatggtgccgagcagaccacggcgccgccgccgctgccgaaggtgcgcccgacgaagatgcccgccacgtaattgcccatctgctcgtaccacggcttatcggtgcccatgaaggcggagacccgctgcagctgctcgggcgtgcacggcttgccgcacgacagctgcgccggattggtcggcagcaggaagaagatcaggaacagcgccagcgtgatgagcaggatgacgacgatcgagctcgccacgcgcttgccgatgtattgcaggattctcatgcacgcacccccttgcgcgggtcgatggcgtcgctcaggccatcgccaagcaggttgaagccgaaggtcagcaggaacagggcggcgcccgggaagatcagatacatcgggtcgaccagggcccactgcacggcgtcggagatggaccggccccatgagggcgtcggcgggttcatgccgacgccgaggaacgacaggcccgcctcggcgccgatgcgcccgggaatcgacagcgtgatgttgacgatgagcagcggcatgaggttcggcaggatctgatgccacagcacatgggcaggcgaggcgcccatcaccttggacgcgacggcgaaattgcgcttgctcagcgtcagcgtctgcccccggacaagacgcgcgatgccgggccatccgaagaatccgagcactagcgtcagcagcaccggcctcgggaagccctgcggcaccaccgccgacagcgcgatcgcgaagatcaggaacgggaagccgaagaagacgtccatcgtgcgcgagatcagcgcatcgaccaacccggggaaatagccggccagcagcccgagcgccacgccgatgaccagcgagatgaccgacgagacgacgccgatgcccagcgagatccgtgagccgtacgccacgatggagaacaggtcgacgccgcgcagcggggtgacgccgaaccagtgccgggcactgatgccgccgccgaatccggccggcaccgacccggcacccaaggcctcgggatgctcggcgtacgggtcgttgccggtgatggccgacaacggcccggccagcggcgccagcagcacgaagaacagcacgatggcgccgccgaccactatcgatgagcgagcgccggaacggagaacgcgccgccgtctttccgccttcggcgcggctttcgcagtcgcatccgtcatattgtcatccccattttcacgctgaacatgccgataatcatcaatccgcgcaggtgggcgcccgtgagccgggtccccctgcagccggtgtcctaacattaaggtttcgcagcaggatgacatgctgtggccttatcggttatttggatagcaggttatcaatggacggcaatcggcggataaggcatgccgcggggacacgcgggaaaaacccttcgttcccgcgcgtcacgccacccgtcattccccgaccgggctgacgtacggacgcagcagtgtcgtggtgccggctgccagcaacgcaaaaatcgcgccgaacgggccgagccaggtcaggccaaggaggtcgttgaccaggccgccgaccgcggagccgatggcgatgccgatgttgaacgacatggaattcagggaggcggccagattcaccgaaccgggatgggattggtaggccacatccatatacagcacctgggaagcggaattctgcaggtacatgagcatgccaagcgccaccagcagcagtgcgccgccggccggcaccagcgaggcgaaagccagcaggcacaggcagacggcctgcacgcagtagatcggtcgaatgtgggtcagcggctcgacccccctgccccgatcggccagcttgcctccgtacaggttgctccacaggcaggcacagccgtagaccaccaagccgacgctgatatagcgttcgggcacaccgatttcgtcgcgcatgatcggcgagagatacgtgtagaagacgtaggaggcggctgcgccaaagaccacatccgccacgccgagctggatgcggcggtcgaagaacagacggaattgcctcaggaaaccgatcttcgccggatgtgagttgcgtggcagagacactgccatcgatgccatcagcacggcggtgagcaccgaaaccaaggcaaaggtgacacgccagccgaaagtattggccacccaagtgccggccggtacgccgaccacagaggcgatggagaaacccgagaatacccaggcaatgaacttggtgcggtatttgtcggtggtcacgtcgggcgcgaaggtcatggagatggccaccagcgtgccggacaccgaggcgatgagcagtcgggcgatgagcagcaccggatagttcggcgcgaaggcgcacaggatattgccgacgaggaacacgcccatcaacgtcagataggtgagaaagcgcgggaatcgggcggataatgcggatccgagcggcgtgcagggcgcgtacacgaatgcgaagatggccaccagattacccacggtcacttcggagaccttaagtccggatgcgatgtccggcaggatgcccactaccacgaattcgctcatgcccagcatgaagctggcgaagatcaggatggtgaccggcagattgaagaagcggtcggtgcgcgcggtgttcgcaggtgtgttcgtcatgggtgctctcttgagtgctctcgctcgtactacaagctgattcgtcggttacgtcaatcgtttttcgtatcaactcagcgacaacactattcccacctctgcccgctacccaccaccacgacacgctataaaaaccccgccgatgaccaatcatcgacggggttcggcacatgtgcaacgcttgcgattacagcttcggcagatacttcttcagctcgtaaggcgtgacctgctggttgtactcctcccattcctggtgcttgttgtccaggaagtagccgaaggcgtgttcgccgagcacgtcggccacgaagtcggatttctccatgatcttcagcgcctcgtccagcgagcgcggcagcggctgaatgcccatagcctgacgttcgccgtcggtgagctcccacacgtcatcactggtgggttcgcccagctgcatctgcttatcgatgccatcgagaccggcggccagcagcaccgagtaggcaaggtatgggttggccaccgggtcgagcgcacggaactccatgcgcgcggagttgcccttgcccggcttgtactgcgggatgcgcagcaacgcggaacggttgttgtggccccagcagatgtagcttggtgcctcattgccgccccacaggcgcttgtacgagttgacgtactggtcggtgaccgcgcagatttcggccgcatggtacaggatgccggcggcgaactggcgggcggtcagggacatgttgaactcctgaccggcctcgtagaaggcgttggaatcgccttcgaacaggctcaggtgcgtgtgcatgccggaaccaggcgcgtcggccaggggcttgggcatgaaactggcgtgaatgccacgctccaaggaaatctccttgaccaccgtacggaatgtcatgatgttgtcggccatggtgagcgcgtccgcgtatcgcagatcgatctcgttctggcctggccccgcctcatggtgcgagtattccaccgagatgcccatttgctcgagcatgttcacggtggcgcggcggaagtccatgcctgggctgcgcggcacatggtcgaagtagccgccctcgtcgatcggggtcggggccttggaccagtcgtcctggctttcgaacaggtagaactcgatttccggatgcacgtagaacgtgaagcccttgtccttggccttggcgagcgtacgcttcaacacgtgacgtggatcgccgagcgaaggctcgccgtctggggtcagaatgtcgcagaacatgcgggcggtaccttgcgggccaccgcgccacggcaggatctggaacgtcgcgggatcgggttgaacgatcatgtcgtcttcggacacgcgggtcatgccctcgatggcggaaccgtcgaagccgagcccctcctcaaacgcggcttccagttcggccggagcaatcgccacggacttcagtgttcccaacacgtccgtgaaccacagacgaataaagcgcacgtcgcgttcttcgaccgtgcgcagcgcaaactcctgctgtttatccatagtcgcctatcgttccataaccgtgttacgaggggcgttaacatctcactgttcgtcaccagcgagtcgcgagatttcatcaacatgccccggtccgcatgtcaggcatggttcgggcccgtgccggcacggcactatggtagtgactataagcgaagatcatctcaccccatccgccaatccgcccgagctggtgccgatatcagctggatgattacgccgacttggatgcgttgcaggcacgtatagacacgctgttcgagagctaccggcattccctgtacgacgatcgccgttgggttttcgatcatttgcgctatcaggacgcggcccgcaaggtggtgggcgtgggctcggtgggccagcgcgcgtggacgtcggtgtggatcgcgcgtgatatcgacgatccgatgatgattcagatgaaggaggccacgtattccgtgctcgagcattactgcggcgcgtcgccgtacgccacgcacggtgagcacgtggttcaggggcagaagctgattcagaatacggccgatgtgctgttgggttggtcgagctttatggccgaggatggccgaccgcgcgactattacgtgcgccagttgtggaatggcaaggggtcgattgatatcgacaatctcaacgcttcgggattgagcgatctgtcacgcatgtgcgcatggtcgttggcgcacgcccacgcccgcaccggcgattcgatcgcgatcgccaattacatgggtggcaccgacgaatttgatcaggccatcgcctcattcgccgtcagctacgccgaacagaatgatgaagactacgccgtcttcaagaaactcctcaaatccggcgacctcccgtgctgagccgttaagcggacagcccaatgggctgtccgtaggcgaggcctgagtgaagcgatagctgagcaaaggtagcttaacagtctcgctaaggcgagtcctttgcctacttcgcgactgcgagcgcctcctggagcgtgaacgcacgtacgtataacgacttgccgaggatggcggaatcgacgccgatctcggccagttccttgatggcgcgcaaatcgtccagcttggagataccaccggaggccgtgaccttggcgtcggtgcgttcggcgacttcacgcagcagttggatgttcgggccggacatcatgccgtccttggccacgtcggtgaccacgtaacgcgagcagcccacggagtcaaggaacttcatggtctcaaacaggtcgccgccttcgcgcgtccagccgcgcgccgccagtgtgtgaccgcgcacatccagaccaacagccacacggtcgccgtacttcttgatgaccgaagcggtccaatccgggttctccaaagcggcggtgccgatgttcactcgggcggcaccggcctcaagggccgcgtccaacgaagcgtcatcgcgcacgccgccggacagttcgatgttcacgcggtcgccaagctcatgaacgatttcacgcagctgatcgcgattgttgcccgtaccgaaagcggcatcaaggtcgaccaggtgaatccattcggcaccggcctcaacccaggtacgggcggcctcaaacggcgaaccgtaatcggtttcggaaccggattcgccttggcgcaggcgcacggccttgccatcgcgtacatcgacggcgggcagcagagtcaacgacataagaagagcctttcttcagttacttatacataatttgagctctctcgtcagaggggagcttcatgctttttacagcgtggcgatccagttcttgaggagctgggagccagcgtccccggacttttccgggtggaattgcgtggcggacagcgggccgtgttcgtaggcggccacgaaacgcgaccggccgtacgagcaccagctcacgcgttcgggcgcaccgctcagatcaatgtcgaagcgggacgtatccgccggcttcacttccatcgcggcgtaggagtgcacgaagtaaaaccgttcattctccacgccgttgagcagcaccgaatcgggggcggcctcgatcgtgtcccatcccatgtgaggcaccacgtcggcgtccagcaggttcaccgttccgccgatcagcccgatgcccgcggcatgggccccgtgctccagaccgtgttcgaacatgatctgctcgcccacgcacacgccaagcaccgggcggccggcgcggatgcgatcatagatcacacggtcgccgtcgaccttcttcagtccttccatgcatgcggcgaacgcgcccacgcccggcacgaccagaccgtcggcctccaacgactgccggtagtcggaggtgagggtggtgtcgacgccaagattggcgagcgcacgcaccatggaacgtacattgccgaaaccgtaatcgaaaacaaccgctgtggtcatattctctcctatcccctactggttggttggcgtctattcgatgcgggagccgcgtccgccacgcccacgcttggtatggttggcgagaatctgcatcgcctggtcatggtcgagtccagcggaatccaccacttcgaacccttgggtcttgagttggttcagggttacgatgccgagcatcaggtcctcgacgaagcgcggtgtggaggtgaacagcacgggcggcgcgaaactctgtccggcctctccctgcacgtacatggccacttcgagcttgtcggcacgattgactgcaagaatcacggccatgccggataccacggtggtcaggtccttggctgcggcttccgggccgtcgccgtccagattcttcagcaccgcgacggccccctgattggcaccgacgcatgcggcggagatgtccgacagctggcagaacgcggccaacagttcagcggaggcaagacgggtgacgatcagcgccaccttcgccttgttacccaacagtccagcgagttcgttgtcgaagccgagcaaggggtcgaccacgtcggccatggcctcattcaccgcatcagcgaccgacccggtgacgtcgtcggtcataggctggccggaatcagcggaagccttatcagccgtatcatcattcgcgtcggaatcggacttcgctgaagcagcgtccgccgttttatcggcatcactggtatcactggcatcgccggatgccgaatcgtccgcgaattctttctcgaatccggcgagcgcggcctcaagctcctcgtcggagaagtgcgattcgtccggatcgaacttgtcgtcggccatcacagggctcccttggtgctgggcacgccgtctacacgcgggtcgatttccacggcgaagcgcagcgcacgggccagcgccttgaattcggcttcggcgatgtgatgcggatcacggccggcgagcacctgcatgtgcaggcagatgccggcgtggaaggcgatggattccatgacgtggcggaccagagagccggtgaagtggccgccgatcatgcagaattcgtagccttcgggctcgccgctgcacacgcagtacgggcggccggaaatgtcgaccacggccttggccagcgcctcgtcgagcggcacggtggcgtcggcgaagcggcggatgcctttcttgtcgccgagggcccgcttcagagcttcgccgaacacgatggccgtatcttccacggtgtggtgcacgtcgatgtcggtgtcgccgtgggcgtggatggtcaggtcgatcagcgaatgcttgccgagcgcggtcatcatatggttgtagaacggcacggatgtatcgatatcggttttgccggtgccgtcgaggttcagttcgaggtcgatgtgtgattcgctggtttcgcggacgatgtgcgcggttcttgccatcatgtctcctgtgtgattcgtcatattggattgcggcgggactcgaatcgcttcgggtctcgccgcaatcggaaagaaacgtcccttatgctgcttccactatacgaagcgcttcaacaagggcgttacggaaggtttccatctcctcgtcggtacccatgcacacgcgcagccaaccgtccggtccgaccacgcggatgagtacgccgcgcttcaggagctcgtcgaagatggcttcgcgcttgtcgaagtgcccgccgaacagcaggaagttcgagccggattcggccacttcaagcggctggtccttgtaggtctgttccttgagccatgcggcggtggcctcgcgggtttcgcgcagatgctcgacacggctcagctgttcatcggtgtgttcgaaggcggccagtgcggcggcctgggtcacggcggacaggtggtacggcatacgtacgatgcgcacgcagtcgatgatgcccttggatgcggctaggtagccgactcgcgcgccggcgaaggcaaaggccttgctcatggtgcggcttacggccaggttcgggtggtccttaatcaggctcacggcgctcggggtgccgggcttgcggaattccacgtacgcttcatcgatgacgagaatcgggtgcacgccctcacccgcgccggccacttcggcggtttcgcaggcggcgagaatacgctcgatatcctccatcggcaacggggtgccggtcgggttgttcggactggtgagcagcaccatcgagggcttgacctcggcgatggcctcaagcaccttgtcgacgttcaacgtgaagtcggcgttgcggtgggcgagcttccaaccggtgaaggtgtcgcgagcgtactccgggtacatggagtacgtcgggtcggcaccgagtgcggtgcggcccgggccgccgaaagcctggaacagctggagcatgatctcgttggagccgttcgcgccccacagctcgtccacgtccagacgggtaccggattcacgggccaggtaatcggagaatgcctgacgcaattcaatgtgctcacggtccgggtatcggttgagtgtgggggcgatttcacgcacacgcttggcgatggtgtcgcatacggccggggccggcgcatacgggttctcgttgacgttcaggcacaccggcacgtccagctggggagcgccgtacggctcctcaccgatcaggtcgttgcgcagcggcaggttttcgggaatcgagctcatcgcagaccggctcccctctcctgctcgcgcagggtggccttgtcatacggatccttgacgaagcgggagagcacgcactcgccgtgggcgggcaggtcctcggacaccgcgaaggcgttgatgcgggcggcgagagccttgaggccttcctcgtcgtattcgatgacttcgaccggcttcatgaacgtgtgcacgccgaggcctgcggcgaagcgggcggtgccgccggtgggcagcacgtggttggaaccggacatgtagtcgcccaacggcaccggggagtacgggccgcggaagatggcaccggcgttcttgatgcgcttgacgacagcatcggcatccttggtctgaatctcaaggtgttcggcggcgtaggcgttggccgcgtcgatggactggtcaagaccgtcggtcagcacgatggcagactgggtgccggacagcgacgtgtggacgcgctcggcgtgctcggtacgcggcacgcggtacttgaggttctcctgcaccttgtcggcaatctcggtggagtcggtgaacagcacggaaccggcgagctcatcatgctcggcctggccgatgaggtcggcggccaacaggctcgggttggcggtttcatcggcgatgatgccgatttcagtggggccggcgaccgcgtcgatgcccacgaatgcggagaccagcgacttggcggtggccacgaagatgttgcccgggccagtgatcttgtcaaccggatcacacaggatgtcaccatcctgcggttcgctgcctttggcgccgtatgcgaacatagcgatggcctgagcgccgccgaccgcgtatacctcgtcaacaccgaggatggcgcaggtggcgaggatgggcttgttcggcaggccttcctcattgtcgcgggcgggcggggtggcgatggccaacgattcgacgccggcggcctgggccggcacagcgttcatgatgacggagctcgggtagacggccttgccgccgggcacatacaggccgacgcgctgaatcggaatccagcgttcggccacgcgggcgccttcggcgtggtcggtgtagaagtccttcggcacctggttggcggccacggcgcgggcgcggcgcaccgattcctcgatggcggcgcgcacttcggagtcg
